United States Patent Application Publication US 2026/0327627 A1 - sequence listing, part 3

SEQ ID NO: 10754 - RNA, 21 nt, synthetic construct
  source 1..21: mol_type = other RNA
  modified_base 1: mod_base = OTHER; note = 2'-O-methylcytidine-3'-phosphorothioate
  modified_base 2: mod_base = OTHER; note = 2'-O-methyluridine-3'-phosphorothioate
  modified_base 3: mod_base = OTHER; note = 2'-O-methylguanosine-3'-phosphate
  modified_base 4: mod_base = OTHER; note = 2'-O-methyladenosine-3'-phosphate
  modified_base 5: mod_base = OTHER; note = 2'-O-methyladenosine-3'-phosphate
  modified_base 6: mod_base = OTHER; note = 2'-O-docosanyl-adenosine-3'-phosphate
  modified_base 7: mod_base = OTHER; note = 2'-deoxy-2'-fluorouridine-3'-phosphate
  modified_base 8: mod_base = OTHER; note = 2'-O-methylguanosine-3'-phosphate
  modified_base 9: mod_base = OTHER; note = 2'-deoxy-2'-fluorocytidine-3'-phosphate
  modified_base 10: mod_base = OTHER; note = 2'-deoxy-2'-fluorouridine-3'-phosphate
  modified_base 11: mod_base = OTHER; note = 2'-deoxy-2'-fluorouridine-3'-phosphate
  modified_base 12: mod_base = OTHER; note = 2'-O-methylguanosine-3'-phosphate
  modified_base 13: mod_base = OTHER; note = 2'-O-methyladenosine-3'-phosphate
  modified_base 14: mod_base = OTHER; note = 2'-O-methyluridine-3'-phosphate
  modified_base 15: mod_base = OTHER; note = 2'-O-methylguanosine-3'-phosphate
  modified_base 16: mod_base = OTHER; note = 2'-O-methyladenosine-3'-phosphate
  modified_base 17: mod_base = OTHER; note = 2'-O-methyluridine-3'-phosphate
  modified_base 18: mod_base = OTHER; note = 2'-O-methyladenosine-3'-phosphate
  modified_base 19: mod_base = OTHER; note = 2'-O-methylcytidine-3'-phosphorothioate
  modified_base 20: mod_base = OTHER; note = 2'-O-methyladenosine-3'-phosphorothioate
  modified_base 21: mod_base = OTHER; note = 2'-O-methyladenosine
ctgaaatgcttgatgatacaa

SEQ ID NO: 10755 - RNA, 21 nt, synthetic construct
  source 1..21: mol_type = other RNA
  modified_base 1: mod_base = OTHER; note = 2'-O-methyluridine-3'-phosphorothioate
  modified_base 2: mod_base = OTHER; note = 2'-O-methylguanosine-3'-phosphorothioate
  modified_base 3: mod_base = OTHER; note = 2'-O-methyladenosine-3'-phosphate
  modified_base 4: mod_base = OTHER; note = 2'-O-methyladenosine-3'-phosphate
  modified_base 5: mod_base = OTHER; note = 2'-O-methyladenosine-3'-phosphate
  modified_base 6: mod_base = OTHER; note = 2'-O-docosanyl-uridine-3'-phosphate
  modified_base 7: mod_base = OTHER; note = 2'-deoxy-2'-fluoroguanosine-3'-phosphate
  modified_base 8: mod_base = OTHER; note = 2'-O-methylcytidine-3'-phosphate
  modified_base 9: mod_base = OTHER; note = 2'-deoxy-2'-fluorouridine-3'-phosphate
  modified_base 10: mod_base = OTHER; note = 2'-deoxy-2'-fluorouridine-3'-phosphate
  modified_base 11: mod_base = OTHER; note = 2'-deoxy-2'-fluoroguanosine-3'-phosphate
  modified_base 12: mod_base = OTHER; note = 2'-O-methyladenosine-3'-phosphate
  modified_base 13: mod_base = OTHER; note = 2'-O-methyluridine-3'-phosphate
  modified_base 14: mod_base = OTHER; note = 2'-O-methylguanosine-3'-phosphate
  modified_base 15: mod_base = OTHER; note = 2'-O-methyladenosine-3'-phosphate
  modified_base 16: mod_base = OTHER; note = 2'-O-methyluridine-3'-phosphate
  modified_base 17: mod_base = OTHER; note = 2'-O-methyladenosine-3'-phosphate
  modified_base 18: mod_base = OTHER; note = 2'-O-methylcytidine-3'-phosphate
  modified_base 19: mod_base = OTHER; note = 2'-O-methyladenosine-3'-phosphorothioate
  modified_base 20: mod_base = OTHER; note = 2'-O-methyladenosine-3'-phosphorothioate
  modified_base 21: mod_base = OTHER; note = 2'-O-methyladenosine
tgaaatgcttgatgatacaaa

SEQ ID NO: 10756 - RNA, 21 nt, synthetic construct
  source 1..21: mol_type = other RNA
  modified_base 1: mod_base = OTHER; note = 2'-O-methylguanosine-3'-phosphorothioate
  modified_base 2: mod_base = OTHER; note = 2'-O-methyladenosine-3'-phosphorothioate
  modified_base 3: mod_base = OTHER; note = 2'-O-methyladenosine-3'-phosphate
  modified_base 4: mod_base = OTHER; note = 2'-O-methyladenosine-3'-phosphate
  modified_base 5: mod_base = OTHER; note = 2'-O-methyluridine-3'-phosphate
  modified_base 6: mod_base = OTHER; note = 2'-O-docosanyl-guanosine-3'-phosphate
  modified_base 7: mod_base = OTHER; note = 2'-deoxy-2'-fluorocytidine-3'-phosphate
  modified_base 8: mod_base = OTHER; note = 2'-O-methyluridine-3'-phosphate
  modified_base 9: mod_base = OTHER; note = 2'-deoxy-2'-fluorouridine-3'-phosphate
  modified_base 10: mod_base = OTHER; note = 2'-deoxy-2'-fluoroguanosine-3'-phosphate
  modified_base 11: mod_base = OTHER; note = 2'-deoxy-2'-fluoroadenosine-3'-phosphate
  modified_base 12: mod_base = OTHER; note = 2'-O-methyluridine-3'-phosphate
  modified_base 13: mod_base = OTHER; note = 2'-O-methylguanosine-3'-phosphate
  modified_base 14: mod_base = OTHER; note = 2'-O-methyladenosine-3'-phosphate
  modified_base 15: mod_base = OTHER; note = 2'-O-methyluridine-3'-phosphate
  modified_base 16: mod_base = OTHER; note = 2'-O-methyladenosine-3'-phosphate
  modified_base 17: mod_base = OTHER; note = 2'-O-methylcytidine-3'-phosphate
  modified_base 18: mod_base = OTHER; note = 2'-O-methyladenosine-3'-phosphate
  modified_base 19: mod_base = OTHER; note = 2'-O-methyladenosine-3'-phosphorothioate
  modified_base 20: mod_base = OTHER; note = 2'-O-methyluridine-3'-phosphorothioate
  modified_base 21: mod_base = OTHER; note = 2'-O-methyladenosine
gaaatgcttgatgatacaata

SEQ ID NO: 10757 - RNA, 21 nt, synthetic construct
  source 1..21: mol_type = other RNA
  modified_base 1: mod_base = OTHER; note = 2'-O-methyladenosine-3'-phosphorothioate
  modified_base 2: mod_base = OTHER; note = 2'-O-methyladenosine-3'-phosphorothioate
  modified_base 3: mod_base = OTHER; note = 2'-O-methyladenosine-3'-phosphate
  modified_base 4: mod_base = OTHER; note = 2'-O-methyluridine-3'-phosphate
  modified_base 5: mod_base = OTHER; note = 2'-O-methylguanosine-3'-phosphate
  modified_base 6: mod_base = OTHER; note = 2'-O-docosanyl-cytidine-3'-phosphate
  modified_base 7: mod_base = OTHER; note = 2'-deoxy-2'-fluorouridine-3'-phosphate
  modified_base 8: mod_base = OTHER; note = 2'-O-methyluridine-3'-phosphate
  modified_base 9: mod_base = OTHER; note = 2'-deoxy-2'-fluoroguanosine-3'-phosphate
  modified_base 10: mod_base = OTHER; note = 2'-deoxy-2'-fluoroadenosine-3'-phosphate
  modified_base 11: mod_base = OTHER; note = 2'-deoxy-2'-fluorouridine-3'-phosphate
  modified_base 12: mod_base = OTHER; note = 2'-O-methylguanosine-3'-phosphate
  modified_base 13: mod_base = OTHER; note = 2'-O-methyladenosine-3'-phosphate
  modified_base 14: mod_base = OTHER; note = 2'-O-methyluridine-3'-phosphate
  modified_base 15: mod_base = OTHER; note = 2'-O-methyladenosine-3'-phosphate
  modified_base 16: mod_base = OTHER; note = 2'-O-methylcytidine-3'-phosphate
  modified_base 17: mod_base = OTHER; note = 2'-O-methyladenosine-3'-phosphate
  modified_base 18: mod_base = OTHER; note = 2'-O-methyladenosine-3'-phosphate
  modified_base 19: mod_base = OTHER; note = 2'-O-methyluridine-3'-phosphorothioate
  modified_base 20: mod_base = OTHER; note = 2'-O-methylguanosine-3'-phosphorothioate
  modified_base 21: mod_base = OTHER; note = 2'-O-methyladenosine
aaatgcttgatgatacaatga

SEQ ID NO: 10758 - RNA, 21 nt, synthetic construct
  source 1..21: mol_type = other RNA
  modified_base 1: mod_base = OTHER; note = 2'-O-methyladenosine-3'-phosphorothioate
  modified_base 2: mod_base = OTHER; note = 2'-O-methyladenosine-3'-phosphorothioate
  modified_base 3: mod_base = OTHER; note = 2'-O-methyluridine-3'-phosphate
  modified_base 4: mod_base = OTHER; note = 2'-O-methylguanosine-3'-phosphate
  modified_base 5: mod_base = OTHER; note = 2'-O-methylcytidine-3'-phosphate
  modified_base 6: mod_base = OTHER; note = 2'-O-docosanyl-uridine-3'-phosphate
  modified_base 7: mod_base = OTHER; note = 2'-deoxy-2'-fluorouridine-3'-phosphate
  modified_base 8: mod_base = OTHER; note = 2'-O-methylguanosine-3'-phosphate
  modified_base 9: mod_base = OTHER; note = 2'-deoxy-2'-fluoroadenosine-3'-phosphate
  modified_base 10: mod_base = OTHER; note = 2'-deoxy-2'-fluorouridine-3'-phosphate
  modified_base 11: mod_base = OTHER; note = 2'-deoxy-2'-fluoroguanosine-3'-phosphate
  modified_base 12: mod_base = OTHER; note = 2'-O-methyladenosine-3'-phosphate
  modified_base 13: mod_base = OTHER; note = 2'-O-methyluridine-3'-phosphate
  modified_base 14: mod_base = OTHER; note = 2'-O-methyladenosine-3'-phosphate
  modified_base 15: mod_base = OTHER; note = 2'-O-methylcytidine-3'-phosphate
  modified_base 16: mod_base = OTHER; note = 2'-O-methyladenosine-3'-phosphate
  modified_base 17: mod_base = OTHER; note = 2'-O-methyladenosine-3'-phosphate
  modified_base 18: mod_base = OTHER; note = 2'-O-methyluridine-3'-phosphate
  modified_base 19: mod_base = OTHER; note = 2'-O-methylguanosine-3'-phosphorothioate
  modified_base 20: mod_base = OTHER; note = 2'-O-methyladenosine-3'-phosphorothioate
  modified_base 21: mod_base = OTHER; note = 2'-O-methyladenosine
aatgcttgatgatacaatgaa

SEQ ID NO: 10759 - RNA, 21 nt, synthetic construct
  source 1..21: mol_type = other RNA
  modified_base 1: mod_base = OTHER; note = 2'-O-methyladenosine-3'-phosphorothioate
  modified_base 2: mod_base = OTHER; note = 2'-O-methyluridine-3'-phosphorothioate
  modified_base 3: mod_base = OTHER; note = 2'-O-methylguanosine-3'-phosphate
  modified_base 4: mod_base = OTHER; note = 2'-O-methylcytidine-3'-phosphate
  modified_base 5: mod_base = OTHER; note = 2'-O-methyluridine-3'-phosphate
  modified_base 6: mod_base = OTHER; note = 2'-O-docosanyl-uridine-3'-phosphate
  modified_base 7: mod_base = OTHER; note = 2'-deoxy-2'-fluoroguanosine-3'-phosphate
  modified_base 8: mod_base = OTHER; note = 2'-O-methyladenosine-3'-phosphate
  modified_base 9: mod_base = OTHER; note = 2'-deoxy-2'-fluorouridine-3'-phosphate
  modified_base 10: mod_base = OTHER; note = 2'-deoxy-2'-fluoroguanosine-3'-phosphate
  modified_base 11: mod_base = OTHER; note = 2'-deoxy-2'-fluoroadenosine-3'-phosphate
  modified_base 12: mod_base = OTHER; note = 2'-O-methyluridine-3'-phosphate
  modified_base 13: mod_base = OTHER; note = 2'-O-methyladenosine-3'-phosphate
  modified_base 14: mod_base = OTHER; note = 2'-O-methylcytidine-3'-phosphate
  modified_base 15: mod_base = OTHER; note = 2'-O-methyladenosine-3'-phosphate
  modified_base 16: mod_base = OTHER; note = 2'-O-methyladenosine-3'-phosphate
  modified_base 17: mod_base = OTHER; note = 2'-O-methyluridine-3'-phosphate
  modified_base 18: mod_base = OTHER; note = 2'-O-methylguanosine-3'-phosphate
  modified_base 19: mod_base = OTHER; note = 2'-O-methyladenosine-3'-phosphorothioate
  modified_base 20: mod_base = OTHER; note = 2'-O-methyladenosine-3'-phosphorothioate
  modified_base 21: mod_base = OTHER; note = 2'-O-methyladenosine
atgcttgatgatacaatgaaa

SEQ ID NO: 10760 - RNA, 21 nt, synthetic construct
  source 1..21: mol_type = other RNA
  modified_base 1: mod_base = OTHER; note = 2'-O-methylguanosine-3'-phosphorothioate
  modified_base 2: mod_base = OTHER; note = 2'-O-methylcytidine-3'-phosphorothioate
  modified_base 3: mod_base = OTHER; note = 2'-O-methyluridine-3'-phosphate
  modified_base 4: mod_base = OTHER; note = 2'-O-methyluridine-3'-phosphate
  modified_base 5: mod_base = OTHER; note = 2'-O-methylguanosine-3'-phosphate
  modified_base 6: mod_base = OTHER; note = 2'-O-docosanyl-adenosine-3'-phosphate
  modified_base 7: mod_base = OTHER; note = 2'-deoxy-2'-fluorouridine-3'-phosphate
  modified_base 8: mod_base = OTHER; note = 2'-O-methylguanosine-3'-phosphate
  modified_base 9: mod_base = OTHER; note = 2'-deoxy-2'-fluoroadenosine-3'-phosphate
  modified_base 10: mod_base = OTHER; note = 2'-deoxy-2'-fluorouridine-3'-phosphate
  modified_base 11: mod_base = OTHER; note = 2'-deoxy-2'-fluoroadenosine-3'-phosphate
  modified_base 12: mod_base = OTHER; note = 2'-O-methylcytidine-3'-phosphate
  modified_base 13: mod_base = OTHER; note = 2'-O-methyladenosine-3'-phosphate
  modified_base 14: mod_base = OTHER; note = 2'-O-methyladenosine-3'-phosphate
  modified_base 15: mod_base = OTHER; note = 2'-O-methyluridine-3'-phosphate
  modified_base 16: mod_base = OTHER; note = 2'-O-methylguanosine-3'-phosphate
  modified_base 17: mod_base = OTHER; note = 2'-O-methyladenosine-3'-phosphate
  modified_base 18: mod_base = OTHER; note = 2'-O-methyladenosine-3'-phosphate
  modified_base 19: mod_base = OTHER; note = 2'-O-methyluridine-3'-phosphorothioate
  modified_base 20: mod_base = OTHER; note = 2'-O-methylguanosine-3'-phosphorothioate
  modified_base 21: mod_base = OTHER; note = 2'-O-methyladenosine
gcttgatgatacaatgaatga

SEQ ID NO: 10761 - RNA, 21 nt, synthetic construct
  source 1..21: mol_type = other RNA
  modified_base 1: mod_base = OTHER; note = 2'-O-methylcytidine-3'-phosphorothioate
  modified_base 2: mod_base = OTHER; note = 2'-O-methyluridine-3'-phosphorothioate
  modified_base 3: mod_base = OTHER; note = 2'-O-methyluridine-3'-phosphate
  modified_base 4: mod_base = OTHER; note = 2'-O-methylguanosine-3'-phosphate
  modified_base 5: mod_base = OTHER; note = 2'-O-methyladenosine-3'-phosphate
  modified_base 6: mod_base = OTHER; note = 2'-O-docosanyl-uridine-3'-phosphate
  modified_base 7: mod_base = OTHER; note = 2'-deoxy-2'-fluoroguanosine-3'-phosphate
  modified_base 8: mod_base = OTHER; note = 2'-O-methyladenosine-3'-phosphate
  modified_base 9: mod_base = OTHER; note = 2'-deoxy-2'-fluorouridine-3'-phosphate
  modified_base 10: mod_base = OTHER; note = 2'-deoxy-2'-fluoroadenosine-3'-phosphate
  modified_base 11: mod_base = OTHER; note = 2'-deoxy-2'-fluorocytidine-3'-phosphate
  modified_base 12: mod_base = OTHER; note = 2'-O-methyladenosine-3'-phosphate
  modified_base 13: mod_base = OTHER; note = 2'-O-methyladenosine-3'-phosphate
  modified_base 14: mod_base = OTHER; note = 2'-O-methyluridine-3'-phosphate
  modified_base 15: mod_base = OTHER; note = 2'-O-methylguanosine-3'-phosphate
  modified_base 16: mod_base = OTHER; note = 2'-O-methyladenosine-3'-phosphate
  modified_base 17: mod_base = OTHER; note = 2'-O-methyladenosine-3'-phosphate
  modified_base 18: mod_base = OTHER; note = 2'-O-methyluridine-3'-phosphate
  modified_base 19: mod_base = OTHER; note = 2'-O-methylguanosine-3'-phosphorothioate
  modified_base 20: mod_base = OTHER; note = 2'-O-methyluridine-3'-phosphorothioate
  modified_base 21: mod_base = OTHER; note = 2'-O-methyladenosine
cttgatgatacaatgaatgta

SEQ ID NO: 10762 - RNA, 21 nt, synthetic construct
  source 1..21: mol_type = other RNA
  modified_base 1: mod_base = OTHER; note = 2'-O-methyluridine-3'-phosphorothioate
  modified_base 2: mod_base = OTHER; note = 2'-O-methyluridine-3'-phosphorothioate
  modified_base 3: mod_base = OTHER; note = 2'-O-methylguanosine-3'-phosphate
  modified_base 4: mod_base = OTHER; note = 2'-O-methyladenosine-3'-phosphate
  modified_base 5: mod_base = OTHER; note = 2'-O-methyluridine-3'-phosphate
  modified_base 6: mod_base = OTHER; note = 2'-O-docosanyl-guanosine-3'-phosphate
  modified_base 7: mod_base = OTHER; note = 2'-deoxy-2'-fluoroadenosine-3'-phosphate
  modified_base 8: mod_base = OTHER; note = 2'-O-methyluridine-3'-phosphate
  modified_base 9: mod_base = OTHER; note = 2'-deoxy-2'-fluoroadenosine-3'-phosphate
  modified_base 10: mod_base = OTHER; note = 2'-deoxy-2'-fluorocytidine-3'-phosphate
  modified_base 11: mod_base = OTHER; note = 2'-deoxy-2'-fluoroadenosine-3'-phosphate
  modified_base 12: mod_base = OTHER; note = 2'-O-methyladenosine-3'-phosphate
  modified_base 13: mod_base = OTHER; note = 2'-O-methyluridine-3'-phosphate
  modified_base 14: mod_base = OTHER; note = 2'-O-methylguanosine-3'-phosphate
  modified_base 15: mod_base = OTHER; note = 2'-O-methyladenosine-3'-phosphate
  modified_base 16: mod_base = OTHER; note = 2'-O-methyladenosine-3'-phosphate
  modified_base 17: mod_base = OTHER; note = 2'-O-methyluridine-3'-phosphate
  modified_base 18: mod_base = OTHER; note = 2'-O-methylguanosine-3'-phosphate
  modified_base 19: mod_base = OTHER; note = 2'-O-methyluridine-3'-phosphorothioate
  modified_base 20: mod_base = OTHER; note = 2'-O-methylguanosine-3'-phosphorothioate
  modified_base 21: mod_base = OTHER; note = 2'-O-methyladenosine
ttgatgatacaatgaatgtga

SEQ ID NO: 10763 - RNA, 21 nt, synthetic construct
  source 1..21: mol_type = other RNA
  modified_base 1: mod_base = OTHER; note = 2'-O-methyluridine-3'-phosphorothioate
  modified_base 2: mod_base = OTHER; note = 2'-O-methylguanosine-3'-phosphorothioate
  modified_base 3: mod_base = OTHER; note = 2'-O-methyladenosine-3'-phosphate
  modified_base 4: mod_base = OTHER; note = 2'-O-methyluridine-3'-phosphate
  modified_base 5: mod_base = OTHER; note = 2'-O-methylguanosine-3'-phosphate
  modified_base 6: mod_base = OTHER; note = 2'-O-docosanyl-adenosine-3'-phosphate
  modified_base 7: mod_base = OTHER; note = 2'-deoxy-2'-fluorouridine-3'-phosphate
  modified_base 8: mod_base = OTHER; note = 2'-O-methyladenosine-3'-phosphate
  modified_base 9: mod_base = OTHER; note = 2'-deoxy-2'-fluorocytidine-3'-phosphate
  modified_base 10: mod_base = OTHER; note = 2'-deoxy-2'-fluoroadenosine-3'-phosphate
  modified_base 11: mod_base = OTHER; note = 2'-deoxy-2'-fluoroadenosine-3'-phosphate
  modified_base 12: mod_base = OTHER; note = 2'-O-methyluridine-3'-phosphate
  modified_base 13: mod_base = OTHER; note = 2'-O-methylguanosine-3'-phosphate
  modified_base 14: mod_base = OTHER; note = 2'-O-methyladenosine-3'-phosphate
  modified_base 15: mod_base = OTHER; note = 2'-O-methyladenosine-3'-phosphate
  modified_base 16: mod_base = OTHER; note = 2'-O-methyluridine-3'-phosphate
  modified_base 17: mod_base = OTHER; note = 2'-O-methylguanosine-3'-phosphate
  modified_base 18: mod_base = OTHER; note = 2'-O-methyluridine-3'-phosphate
  modified_base 19: mod_base = OTHER; note = 2'-O-methylguanosine-3'-phosphorothioate
  modified_base 20: mod_base = OTHER; note = 2'-O-methyladenosine-3'-phosphorothioate
  modified_base 21: mod_base = OTHER; note = 2'-O-methyladenosine
tgatgatacaatgaatgtgaa

SEQ ID NO: 10764 - RNA, 21 nt, synthetic construct
  source 1..21: mol_type = other RNA
  modified_base 1: mod_base = OTHER; note = 2'-O-methylguanosine-3'-phosphorothioate
  modified_base 2: mod_base = OTHER; note = 2'-O-methyladenosine-3'-phosphorothioate
  modified_base 3: mod_base = OTHER; note = 2'-O-methyluridine-3'-phosphate
  modified_base 4: mod_base = OTHER; note = 2'-O-methylguanosine-3'-phosphate
  modified_base 5: mod_base = OTHER; note = 2'-O-methyladenosine-3'-phosphate
  modified_base 6: mod_base = OTHER; note = 2'-O-docosanyl-uridine-3'-phosphate
  modified_base 7: mod_base = OTHER; note = 2'-deoxy-2'-fluoroadenosine-3'-phosphate
  modified_base 8: mod_base = OTHER; note = 2'-O-methylcytidine-3'-phosphate
  modified_base 9: mod_base = OTHER; note = 2'-deoxy-2'-fluoroadenosine-3'-phosphate
  modified_base 10: mod_base = OTHER; note = 2'-deoxy-2'-fluoroadenosine-3'-phosphate
  modified_base 11: mod_base = OTHER; note = 2'-deoxy-2'-fluorouridine-3'-phosphate
  modified_base 12: mod_base = OTHER; note = 2'-O-methylguanosine-3'-phosphate
  modified_base 13: mod_base = OTHER; note = 2'-O-methyladenosine-3'-phosphate
  modified_base 14: mod_base = OTHER; note = 2'-O-methyladenosine-3'-phosphate
  modified_base 15: mod_base = OTHER; note = 2'-O-methyluridine-3'-phosphate
  modified_base 16: mod_base = OTHER; note = 2'-O-methylguanosine-3'-phosphate
  modified_base 17: mod_base = OTHER; note = 2'-O-methyluridine-3'-phosphate
  modified_base 18: mod_base = OTHER; note = 2'-O-methylguanosine-3'-phosphate
  modified_base 19: mod_base = OTHER; note = 2'-O-methyladenosine-3'-phosphorothioate
  modified_base 20: mod_base = OTHER; note = 2'-O-methyladenosine-3'-phosphorothioate
  modified_base 21: mod_base = OTHER; note = 2'-O-methyladenosine
gatgatacaatgaatgtgaaa

SEQ ID NO: 10765 - RNA, 21 nt, synthetic construct
  source 1..21: mol_type = other RNA
  modified_base 1: mod_base = OTHER; note = 2'-O-methyladenosine-3'-phosphorothioate
  modified_base 2: mod_base = OTHER; note = 2'-O-methyluridine-3'-phosphorothioate
  modified_base 3: mod_base = OTHER; note = 2'-O-methylguanosine-3'-phosphate
  modified_base 4: mod_base = OTHER; note = 2'-O-methyladenosine-3'-phosphate
  modified_base 5: mod_base = OTHER; note = 2'-O-methyluridine-3'-phosphate
  modified_base 6: mod_base = OTHER; note = 2'-O-docosanyl-adenosine-3'-phosphate
  modified_base 7: mod_base = OTHER; note = 2'-deoxy-2'-fluorocytidine-3'-phosphate
  modified_base 8: mod_base = OTHER; note = 2'-O-methyladenosine-3'-phosphate
  modified_base 9: mod_base = OTHER; note = 2'-deoxy-2'-fluoroadenosine-3'-phosphate
  modified_base 10: mod_base = OTHER; note = 2'-deoxy-2'-fluorouridine-3'-phosphate
  modified_base 11: mod_base = OTHER; note = 2'-deoxy-2'-fluoroguanosine-3'-phosphate
  modified_base 12: mod_base = OTHER; note = 2'-O-methyladenosine-3'-phosphate
  modified_base 13: mod_base = OTHER; note = 2'-O-methyladenosine-3'-phosphate
  modified_base 14: mod_base = OTHER; note = 2'-O-methyluridine-3'-phosphate
  modified_base 15: mod_base = OTHER; note = 2'-O-methylguanosine-3'-phosphate
  modified_base 16: mod_base = OTHER; note = 2'-O-methyluridine-3'-phosphate
  modified_base 17: mod_base = OTHER; note = 2'-O-methylguanosine-3'-phosphate
  modified_base 18: mod_base = OTHER; note = 2'-O-methyladenosine-3'-phosphate
  modified_base 19: mod_base = OTHER; note = 2'-O-methyladenosine-3'-phosphorothioate
  modified_base 20: mod_base = OTHER; note = 2'-O-methyluridine-3'-phosphorothioate
  modified_base 21: mod_base = OTHER; note = 2'-O-methyladenosine
atgatacaatgaatgtgaata

SEQ ID NO: 10766 - RNA, 21 nt, synthetic construct
  source 1..21: mol_type = other RNA
  modified_base 1: mod_base = OTHER; note = 2'-O-methyluridine-3'-phosphorothioate
  modified_base 2: mod_base = OTHER; note = 2'-O-methylguanosine-3'-phosphorothioate
  modified_base 3: mod_base = OTHER; note = 2'-O-methyladenosine-3'-phosphate
  modified_base 4: mod_base = OTHER; note = 2'-O-methyluridine-3'-phosphate
  modified_base 5: mod_base = OTHER; note = 2'-O-methyladenosine-3'-phosphate
  modified_base 6: mod_base = OTHER; note = 2'-O-docosanyl-cytidine-3'-phosphate
  modified_base 7: mod_base = OTHER; note = 2'-deoxy-2'-fluoroadenosine-3'-phosphate
  modified_base 8: mod_base = OTHER; note = 2'-O-methyladenosine-3'-phosphate
  modified_base 9: mod_base = OTHER; note = 2'-deoxy-2'-fluorouridine-3'-phosphate
  modified_base 10: mod_base = OTHER; note = 2'-deoxy-2'-fluoroguanosine-3'-phosphate
  modified_base 11: mod_base = OTHER; note = 2'-deoxy-2'-fluoroadenosine-3'-phosphate
  modified_base 12: mod_base = OTHER; note = 2'-O-methyladenosine-3'-phosphate
  modified_base 13: mod_base = OTHER; note = 2'-O-methyluridine-3'-phosphate
  modified_base 14: mod_base = OTHER; note = 2'-O-methylguanosine-3'-phosphate
  modified_base 15: mod_base = OTHER; note = 2'-O-methyluridine-3'-phosphate
  modified_base 16: mod_base = OTHER; note = 2'-O-methylguanosine-3'-phosphate
  modified_base 17: mod_base = OTHER; note = 2'-O-methyladenosine-3'-phosphate
  modified_base 18: mod_base = OTHER; note = 2'-O-methyladenosine-3'-phosphate
  modified_base 19: mod_base = OTHER; note = 2'-O-methyluridine-3'-phosphorothioate
  modified_base 20: mod_base = OTHER; note = 2'-O-methyladenosine-3'-phosphorothioate
  modified_base 21: mod_base = OTHER; note = 2'-O-methyladenosine
tgatacaatgaatgtgaataa

SEQ ID NO: 10767 - RNA, 21 nt, synthetic construct
  source 1..21: mol_type = other RNA
  modified_base 1: mod_base = OTHER; note = 2'-O-methyladenosine-3'-phosphorothioate
  modified_base 2: mod_base = OTHER; note = 2'-O-methyluridine-3'-phosphorothioate
  modified_base 3: mod_base = OTHER; note = 2'-O-methyladenosine-3'-phosphate
  modified_base 4: mod_base = OTHER; note = 2'-O-methylcytidine-3'-phosphate
  modified_base 5: mod_base = OTHER; note = 2'-O-methyladenosine-3'-phosphate
  modified_base 6: mod_base = OTHER; note = 2'-O-docosanyl-adenosine-3'-phosphate
  modified_base 7: mod_base = OTHER; note = 2'-deoxy-2'-fluorouridine-3'-phosphate
  modified_base 8: mod_base = OTHER; note = 2'-O-methylguanosine-3'-phosphate
  modified_base 9: mod_base = OTHER; note = 2'-deoxy-2'-fluoroadenosine-3'-phosphate
  modified_base 10: mod_base = OTHER; note = 2'-deoxy-2'-fluoroadenosine-3'-phosphate
  modified_base 11: mod_base = OTHER; note = 2'-deoxy-2'-fluorouridine-3'-phosphate
  modified_base 12: mod_base = OTHER; note = 2'-O-methylguanosine-3'-phosphate
  modified_base 13: mod_base = OTHER; note = 2'-O-methyluridine-3'-phosphate
  modified_base 14: mod_base = OTHER; note = 2'-O-methylguanosine-3'-phosphate
  modified_base 15: mod_base = OTHER; note = 2'-O-methyladenosine-3'-phosphate
  modified_base 16: mod_base = OTHER; note = 2'-O-methyladenosine-3'-phosphate
  modified_base 17: mod_base = OTHER; note = 2'-O-methyluridine-3'-phosphate
  modified_base 18: mod_base = OTHER; note = 2'-O-methyladenosine-3'-phosphate
  modified_base 19: mod_base = OTHER; note = 2'-O-methyluridine-3'-phosphorothioate
  modified_base 20: mod_base = OTHER; note = 2'-O-methylcytidine-3'-phosphorothioate
  modified_base 21: mod_base = OTHER; note = 2'-O-methyladenosine
atacaatgaatgtgaatatca

SEQ ID NO: 10768 - RNA, 21 nt, synthetic construct
  source 1..21: mol_type = other RNA
  modified_base 1: mod_base = OTHER; note = 2'-O-methyluridine-3'-phosphorothioate
  modified_base 2: mod_base = OTHER; note = 2'-O-methyladenosine-3'-phosphorothioate
  modified_base 3: mod_base = OTHER; note = 2'-O-methylcytidine-3'-phosphate
  modified_base 4: mod_base = OTHER; note = 2'-O-methyladenosine-3'-phosphate
  modified_base 5: mod_base = OTHER; note = 2'-O-methyladenosine-3'-phosphate
  modified_base 6: mod_base = OTHER; note = 2'-O-docosanyl-uridine-3'-phosphate
  modified_base 7: mod_base = OTHER; note = 2'-deoxy-2'-fluoroguanosine-3'-phosphate
  modified_base 8: mod_base = OTHER; note = 2'-O-methyladenosine-3'-phosphate
  modified_base 9: mod_base = OTHER; note = 2'-deoxy-2'-fluoroadenosine-3'-phosphate
  modified_base 10: mod_base = OTHER; note = 2'-deoxy-2'-fluorouridine-3'-phosphate
  modified_base 11: mod_base = OTHER; note = 2'-deoxy-2'-fluoroguanosine-3'-phosphate
  modified_base 12: mod_base = OTHER; note = 2'-O-methyluridine-3'-phosphate
  modified_base 13: mod_base = OTHER; note = 2'-O-methylguanosine-3'-phosphate
  modified_base 14: mod_base = OTHER; note = 2'-O-methyladenosine-3'-phosphate
  modified_base 15: mod_base = OTHER; note = 2'-O-methyladenosine-3'-phosphate
  modified_base 16: mod_base = OTHER; note = 2'-O-methyluridine-3'-phosphate
  modified_base 17: mod_base = OTHER; note = 2'-O-methyladenosine-3'-phosphate
  modified_base 18: mod_base = OTHER; note = 2'-O-methyluridine-3'-phosphate
  modified_base 19: mod_base = OTHER; note = 2'-O-methylcytidine-3'-phosphorothioate
  modified_base 20: mod_base = OTHER; note = 2'-O-methyluridine-3'-phosphorothioate
  modified_base 21: mod_base = OTHER; note = 2'-O-methyladenosine
tacaatgaatgtgaatatcta

SEQ ID NO: 10769 - RNA, 21 nt, synthetic construct
  source 1..21: mol_type = other RNA
  modified_base 1: mod_base = OTHER; note = 2'-O-methylguanosine-3'-phosphorothioate
  modified_base 2: mod_base = OTHER; note = 2'-O-methyladenosine-3'-phosphorothioate
  modified_base 3: mod_base = OTHER; note = 2'-O-methyladenosine-3'-phosphate
  modified_base 4: mod_base = OTHER; note = 2'-O-methyluridine-3'-phosphate
  modified_base 5: mod_base = OTHER; note = 2'-O-methyladenosine-3'-phosphate
  modified_base 6: mod_base = OTHER; note = 2'-O-docosanyl-uridine-3'-phosphate
  modified_base 7: mod_base = OTHER; note = 2'-deoxy-2'-fluorocytidine-3'-phosphate
  modified_base 8: mod_base = OTHER; note = 2'-O-methyluridine-3'-phosphate
  modified_base 9: mod_base = OTHER; note = 2'-deoxy-2'-fluorouridine-3'-phosphate
  modified_base 10: mod_base = OTHER; note = 2'-deoxy-2'-fluorouridine-3'-phosphate
  modified_base 11: mod_base = OTHER; note = 2'-deoxy-2'-fluoroguanosine-3'-phosphate
  modified_base 12: mod_base = OTHER; note = 2'-O-methyladenosine-3'-phosphate
  modified_base 13: mod_base = OTHER; note = 2'-O-methylguanosine-3'-phosphate
  modified_base 14: mod_base = OTHER; note = 2'-O-methyluridine-3'-phosphate
  modified_base 15: mod_base = OTHER; note = 2'-O-methylcytidine-3'-phosphate
  modified_base 16: mod_base = OTHER; note = 2'-O-methylcytidine-3'-phosphate
  modified_base 17: mod_base = OTHER; note = 2'-O-methyluridine-3'-phosphate
  modified_base 18: mod_base = OTHER; note = 2'-O-methyluridine-3'-phosphate
  modified_base 19: mod_base = OTHER; note = 2'-O-methylcytidine-3'-phosphorothioate
  modified_base 20: mod_base = OTHER; note = 2'-O-methyladenosine-3'-phosphorothioate
  modified_base 21: mod_base = OTHER; note = 2'-O-methyladenosine
gaatatctttgagtccttcaa

SEQ ID NO: 10770 - RNA, 21 nt, synthetic construct
  source 1..21: mol_type = other RNA
  modified_base 1: mod_base = OTHER; note = 2'-O-methylguanosine-3'-phosphorothioate
  modified_base 2: mod_base = OTHER; note = 2'-O-methyladenosine-3'-phosphorothioate
  modified_base 3: mod_base = OTHER; note = 2'-O-methylcytidine-3'-phosphate
  modified_base 4: mod_base = OTHER; note = 2'-O-methyladenosine-3'-phosphate
  modified_base 5: mod_base = OTHER; note = 2'-O-methyluridine-3'-phosphate
  modified_base 6: mod_base = OTHER; note = 2'-O-docosanyl-cytidine-3'-phosphate
  modified_base 7: mod_base = OTHER; note = 2'-deoxy-2'-fluorouridine-3'-phosphate
  modified_base 8: mod_base = OTHER; note = 2'-O-methyladenosine-3'-phosphate
  modified_base 9: mod_base = OTHER; note = 2'-deoxy-2'-fluorouridine-3'-phosphate
  modified_base 10: mod_base = OTHER; note = 2'-deoxy-2'-fluorouridine-3'-phosphate
  modified_base 11: mod_base = OTHER; note = 2'-deoxy-2'-fluorocytidine-3'-phosphate
  modified_base 12: mod_base = OTHER; note = 2'-O-methyluridine-3'-phosphate
  modified_base 13: mod_base = OTHER; note = 2'-O-methylguanosine-3'-phosphate
  modified_base 14: mod_base = OTHER; note = 2'-O-methyluridine-3'-phosphate
  modified_base 15: mod_base = OTHER; note = 2'-O-methyluridine-3'-phosphate
  modified_base 16: mod_base = OTHER; note = 2'-O-methylguanosine-3'-phosphate
  modified_base 17: mod_base = OTHER; note = 2'-O-methylguanosine-3'-phosphate
  modified_base 18: mod_base = OTHER; note = 2'-O-methyluridine-3'-phosphate
  modified_base 19: mod_base = OTHER; note = 2'-O-methylcytidine-3'-phosphorothioate
  modified_base 20: mod_base = OTHER; note = 2'-O-methyluridine-3'-phosphorothioate
  modified_base 21: mod_base = OTHER; note = 2'-O-methyladenosine
gacatctattctgttggtcta

SEQ ID NO: 10771 - RNA, 21 nt, synthetic construct
  source 1..21: mol_type = other RNA
  modified_base 1: mod_base = OTHER; note = 2'-O-methyladenosine-3'-phosphorothioate
  modified_base 2: mod_base = OTHER; note = 2'-O-methyladenosine-3'-phosphorothioate
  modified_base 3: mod_base = OTHER; note = 2'-O-methyluridine-3'-phosphate
  modified_base 4: mod_base = OTHER; note = 2'-O-methylguanosine-3'-phosphate
  modified_base 5: mod_base = OTHER; note = 2'-O-methyladenosine-3'-phosphate
  modified_base 6: mod_base = OTHER; note = 2'-O-docosanyl-adenosine-3'-phosphate
  modified_base 7: mod_base = OTHER; note = 2'-deoxy-2'-fluorouridine-3'-phosphate
  modified_base 8: mod_base = OTHER; note = 2'-O-methylguanosine-3'-phosphate
  modified_base 9: mod_base = OTHER; note = 2'-deoxy-2'-fluorouridine-3'-phosphate
  modified_base 10: mod_base = OTHER; note = 2'-deoxy-2'-fluoroguanosine-3'-phosphate
  modified_base 11: mod_base = OTHER; note = 2'-deoxy-2'-fluoroadenosine-3'-phosphate
  modified_base 12: mod_base = OTHER; note = 2'-O-methyladenosine-3'-phosphate
  modified_base 13: mod_base = OTHER; note = 2'-O-methyluridine-3'-phosphate
  modified_base 14: mod_base = OTHER; note = 2'-O-methyladenosine-3'-phosphate
  modified_base 15: mod_base = OTHER; note = 2'-O-methyluridine-3'-phosphate
  modified_base 16: mod_base = OTHER; note = 2'-O-methylcytidine-3'-phosphate
  modified_base 17: mod_base = OTHER; note = 2'-O-methyluridine-3'-phosphate
  modified_base 18: mod_base = OTHER; note = 2'-O-methyluridine-3'-phosphate
  modified_base 19: mod_base = OTHER; note = 2'-O-methyluridine-3'-phosphorothioate
  modified_base 20: mod_base = OTHER; note = 2'-O-methylguanosine-3'-phosphorothioate
  modified_base 21: mod_base = OTHER; note = 2'-O-methyladenosine
aatgaatgtgaatatctttga

SEQ ID NO: 10772 - RNA, 21 nt, synthetic construct
  source 1..21: mol_type = other RNA
  modified_base 1: mod_base = OTHER; note = 2'-O-methyladenosine-3'-phosphorothioate
  modified_base 2: mod_base = OTHER; note = 2'-O-methyluridine-3'-phosphorothioate
  modified_base 3: mod_base = OTHER; note = 2'-O-methylguanosine-3'-phosphate
  modified_base 4: mod_base = OTHER; note = 2'-O-methyladenosine-3'-phosphate
  modified_base 5: mod_base = OTHER; note = 2'-O-methyladenosine-3'-phosphate
  modified_base 6: mod_base = OTHER; note = 2'-O-docosanyl-uridine-3'-phosphate
  modified_base 7: mod_base = OTHER; note = 2'-deoxy-2'-fluoroguanosine-3'-phosphate
  modified_base 8: mod_base = OTHER; note = 2'-O-methyluridine-3'-phosphate
  modified_base 9: mod_base = OTHER; note = 2'-deoxy-2'-fluoroguanosine-3'-phosphate
  modified_base 10: mod_base = OTHER; note = 2'-deoxy-2'-fluoroadenosine-3'-phosphate
  modified_base 11: mod_base = OTHER; note = 2'-deoxy-2'-fluoroadenosine-3'-phosphate
  modified_base 12: mod_base = OTHER; note = 2'-O-methyluridine-3'-phosphate
  modified_base 13: mod_base = OTHER; note = 2'-O-methyladenosine-3'-phosphate
  modified_base 14: mod_base = OTHER; note = 2'-O-methyluridine-3'-phosphate
  modified_base 15: mod_base = OTHER; note = 2'-O-methylcytidine-3'-phosphate
  modified_base 16: mod_base = OTHER; note = 2'-O-methyluridine-3'-phosphate
  modified_base 17: mod_base = OTHER; note = 2'-O-methyluridine-3'-phosphate
  modified_base 18: mod_base = OTHER; note = 2'-O-methyluridine-3'-phosphate
  modified_base 19: mod_base = OTHER; note = 2'-O-methylguanosine-3'-phosphorothioate
  modified_base 20: mod_base = OTHER; note = 2'-O-methyladenosine-3'-phosphorothioate
  modified_base 21: mod_base = OTHER; note = 2'-O-methyladenosine
atgaatgtgaatatctttgaa

SEQ ID NO: 10773 - RNA, 21 nt, synthetic construct
  source 1..21: mol_type = other RNA
  modified_base 1: mod_base = OTHER; note = 2'-O-methyluridine-3'-phosphorothioate
  modified_base 2: mod_base = OTHER; note = 2'-O-methylguanosine-3'-phosphorothioate
  modified_base 3: mod_base = OTHER; note = 2'-O-methyladenosine-3'-phosphate
  modified_base 4: mod_base = OTHER; note = 2'-O-methyladenosine-3'-phosphate
  modified_base 5: mod_base = OTHER; note = 2'-O-methyluridine-3'-phosphate
  modified_base 6: mod_base = OTHER; note = 2'-O-docosanyl-guanosine-3'-phosphate
  modified_base 7: mod_base = OTHER; note = 2'-deoxy-2'-fluorouridine-3'-phosphate
  modified_base 8: mod_base = OTHER; note = 2'-O-methylguanosine-3'-phosphate
  modified_base 9: mod_base = OTHER; note = 2'-deoxy-2'-fluoroadenosine-3'-phosphate
  modified_base 10: mod_base = OTHER; note = 2'-deoxy-2'-fluoroadenosine-3'-phosphate
  modified_base 11: mod_base = OTHER; note = 2'-deoxy-2'-fluorouridine-3'-phosphate
  modified_base 12: mod_base = OTHER; note = 2'-O-methyladenosine-3'-phosphate
  modified_base 13: mod_base = OTHER; note = 2'-O-methyluridine-3'-phosphate
  modified_base 14: mod_base = OTHER; note = 2'-O-methylcytidine-3'-phosphate
  modified_base 15: mod_base = OTHER; note = 2'-O-methyluridine-3'-phosphate
  modified_base 16: mod_base = OTHER; note = 2'-O-methyluridine-3'-phosphate
  modified_base 17: mod_base = OTHER; note = 2'-O-methyluridine-3'-phosphate
  modified_base 18: mod_base = OTHER; note = 2'-O-methylguanosine-3'-phosphate
  modified_base 19: mod_base = OTHER; note = 2'-O-methyladenosine-3'-phosphorothioate
  modified_base 20: mod_base = OTHER; note = 2'-O-methylguanosine-3'-phosphorothioate
  modified_base 21: mod_base = OTHER; note = 2'-O-methyladenosine
tgaatgtgaatatctttgaga

SEQ ID NO: 10774 - RNA, 21 nt, synthetic construct
  source 1..21: mol_type = other RNA
  modified_base 1: mod_base = OTHER; note = 2'-O-methylguanosine-3'-phosphorothioate
  modified_base 2: mod_base = OTHER; note = 2'-O-methyladenosine-3'-phosphorothioate
  modified_base 3: mod_base = OTHER; note = 2'-O-methyladenosine-3'-phosphate
  modified_base 4: mod_base = OTHER; note = 2'-O-methyluridine-3'-phosphate
  modified_base 5: mod_base = OTHER; note = 2'-O-methylguanosine-3'-phosphate
  modified_base 6: mod_base = OTHER; note = 2'-O-docosanyl-uridine-3'-phosphate
  modified_base 7: mod_base = OTHER; note = 2'-deoxy-2'-fluoroguanosine-3'-phosphate
  modified_base 8: mod_base = OTHER; note = 2'-O-methyladenosine-3'-phosphate
  modified_base 9: mod_base = OTHER; note = 2'-deoxy-2'-fluoroadenosine-3'-phosphate
  modified_base 10: mod_base = OTHER; note = 2'-deoxy-2'-fluorouridine-3'-phosphate
  modified_base 11: mod_base = OTHER; note = 2'-deoxy-2'-fluoroadenosine-3'-phosphate
  modified_base 12: mod_base = OTHER; note = 2'-O-methyluridine-3'-phosphate
  modified_base 13: mod_base = OTHER; note = 2'-O-methylcytidine-3'-phosphate
  modified_base 14: mod_base = OTHER; note = 2'-O-methyluridine-3'-phosphate
  modified_base 15: mod_base = OTHER; note = 2'-O-methyluridine-3'-phosphate
  modified_base 16: mod_base = OTHER; note = 2'-O-methyluridine-3'-phosphate
  modified_base 17: mod_base = OTHER; note = 2'-O-methylguanosine-3'-phosphate
  modified_base 18: mod_base = OTHER; note = 2'-O-methyladenosine-3'-phosphate
  modified_base 19: mod_base = OTHER; note = 2'-O-methylguanosine-3'-phosphorothioate
  modified_base 20: mod_base = OTHER; note = 2'-O-methyluridine-3'-phosphorothioate
  modified_base 21: mod_base = OTHER; note = 2'-O-methyladenosine
gaatgtgaatatctttgagta

SEQ ID NO: 10775 - RNA, 21 nt, synthetic construct
  source 1..21: mol_type = other RNA
  modified_base 1: mod_base = OTHER; note = 2'-O-methyladenosine-3'-phosphorothioate
  modified_base 2: mod_base = OTHER; note = 2'-O-methyladenosine-3'-phosphorothioate
  modified_base 3: mod_base = OTHER; note = 2'-O-methyluridine-3'-phosphate
  modified_base 4: mod_base = OTHER; note = 2'-O-methylguanosine-3'-phosphate
  modified_base 5: mod_base = OTHER; note = 2'-O-methyluridine-3'-phosphate
  modified_base 6: mod_base = OTHER; note = 2'-O-docosanyl-guanosine-3'-phosphate
  modified_base 7: mod_base = OTHER; note = 2'-deoxy-2'-fluoroadenosine-3'-phosphate
  modified_base 8: mod_base = OTHER; note = 2'-O-methyladenosine-3'-phosphate
  modified_base 9: mod_base = OTHER; note = 2'-deoxy-2'-fluorouridine-3'-phosphate
  modified_base 10: mod_base = OTHER; note = 2'-deoxy-2'-fluoroadenosine-3'-phosphate
  modified_base 11: mod_base = OTHER; note = 2'-deoxy-2'-fluorouridine-3'-phosphate
  modified_base 12: mod_base = OTHER; note = 2'-O-methylcytidine-3'-phosphate
  modified_base 13: mod_base = OTHER; note = 2'-O-methyluridine-3'-phosphate
  modified_base 14: mod_base = OTHER; note = 2'-O-methyluridine-3'-phosphate
  modified_base 15: mod_base = OTHER; note = 2'-O-methyluridine-3'-phosphate
  modified_base 16: mod_base = OTHER; note = 2'-O-methylguanosine-3'-phosphate
  modified_base 17: mod_base = OTHER; note = 2'-O-methyladenosine-3'-phosphate
  modified_base 18: mod_base = OTHER; note = 2'-O-methylguanosine-3'-phosphate
  modified_base 19: mod_base = OTHER; note = 2'-O-methyluridine-3'-phosphorothioate
  modified_base 20: mod_base = OTHER; note = 2'-O-methylcytidine-3'-phosphorothioate
  modified_base 21: mod_base = OTHER; note = 2'-O-methyladenosine
aatgtgaatatctttgagtca

SEQ ID NO: 10776 - RNA, 21 nt, synthetic construct
  source 1..21: mol_type = other RNA
  modified_base 1: mod_base = OTHER; note = 2'-O-methyladenosine-3'-phosphorothioate
  modified_base 2: mod_base = OTHER; note = 2'-O-methyluridine-3'-phosphorothioate
  modified_base 3: mod_base = OTHER; note = 2'-O-methylguanosine-3'-phosphate
  modified_base 4: mod_base = OTHER; note = 2'-O-methyluridine-3'-phosphate
  modified_base 5: mod_base = OTHER; note = 2'-O-methylguanosine-3'-phosphate
  modified_base 6: mod_base = OTHER; note = 2'-O-docosanyl-adenosine-3'-phosphate
  modified_base 7: mod_base = OTHER; note = 2'-deoxy-2'-fluoroadenosine-3'-phosphate
  modified_base 8: mod_base = OTHER; note = 2'-O-methyluridine-3'-phosphate
  modified_base 9: mod_base = OTHER; note = 2'-deoxy-2'-fluoroadenosine-3'-phosphate
  modified_base 10: mod_base = OTHER; note = 2'-deoxy-2'-fluorouridine-3'-phosphate
  modified_base 11: mod_base = OTHER; note = 2'-deoxy-2'-fluorocytidine-3'-phosphate
  modified_base 12: mod_base = OTHER; note = 2'-O-methyluridine-3'-phosphate
  modified_base 13: mod_base = OTHER; note = 2'-O-methyluridine-3'-phosphate
  modified_base 14: mod_base = OTHER; note = 2'-O-methyluridine-3'-phosphate
  modified_base 15: mod_base = OTHER; note = 2'-O-methylguanosine-3'-phosphate
  modified_base 16: mod_base = OTHER; note = 2'-O-methyladenosine-3'-phosphate
  modified_base 17: mod_base = OTHER; note = 2'-O-methylguanosine-3'-phosphate
  modified_base 18: mod_base = OTHER; note = 2'-O-methyluridine-3'-phosphate
  modified_base 19: mod_base = OTHER; note = 2'-O-methylcytidine-3'-phosphorothioate
  modified_base 20: mod_base = OTHER; note = 2'-O-methylcytidine-3'-phosphorothioate
  modified_base 21: mod_base = OTHER; note = 2'-O-methyladenosine
atgtgaatatctttgagtcca

SEQ ID NO: 10777 - RNA, 21 nt, synthetic construct
  source 1..21: mol_type = other RNA
  modified_base 1: mod_base = OTHER; note = 2'-O-methyluridine-3'-phosphorothioate
  modified_base 2: mod_base = OTHER; note = 2'-O-methylguanosine-3'-phosphorothioate
  modified_base 3: mod_base = OTHER; note = 2'-O-methyluridine-3'-phosphate
  modified_base 4: mod_base = OTHER; note = 2'-O-methylguanosine-3'-phosphate
  modified_base 5: mod_base = OTHER; note = 2'-O-methyladenosine-3'-phosphate
  modified_base 6: mod_base = OTHER; note = 2'-O-docosanyl-adenosine-3'-phosphate
  modified_base 7: mod_base = OTHER; note = 2'-deoxy-2'-fluorouridine-3'-phosphate
  modified_base 8: mod_base = OTHER; note = 2'-O-methyladenosine-3'-phosphate
  modified_base 9: mod_base = OTHER; note = 2'-deoxy-2'-fluorouridine-3'-phosphate
  modified_base 10: mod_base = OTHER; note = 2'-deoxy-2'-fluorocytidine-3'-phosphate
  modified_base 11: mod_base = OTHER; note = 2'-deoxy-2'-fluorouridine-3'-phosphate
  modified_base 12: mod_base = OTHER; note = 2'-O-methyluridine-3'-phosphate
  modified_base 13: mod_base = OTHER; note = 2'-O-methyluridine-3'-phosphate
  modified_base 14: mod_base = OTHER; note = 2'-O-methylguanosine-3'-phosphate
  modified_base 15: mod_base = OTHER; note = 2'-O-methyladenosine-3'-phosphate
  modified_base 16: mod_base = OTHER; note = 2'-O-methylguanosine-3'-phosphate
  modified_base 17: mod_base = OTHER; note = 2'-O-methyluridine-3'-phosphate
  modified_base 18: mod_base = OTHER; note = 2'-O-methylcytidine-3'-phosphate
  modified_base 19: mod_base = OTHER; note = 2'-O-methylcytidine-3'-phosphorothioate
  modified_base 20: mod_base = OTHER; note = 2'-O-methyluridine-3'-phosphorothioate
  modified_base 21: mod_base = OTHER; note = 2'-O-methyladenosine
tgtgaatatctttgagtccta

SEQ ID NO: 10778 - RNA, 21 nt, synthetic construct
  source 1..21: mol_type = other RNA
  modified_base 1: mod_base = OTHER; note = 2'-O-methylguanosine-3'-phosphorothioate
  modified_base 2: mod_base = OTHER; note = 2'-O-methyluridine-3'-phosphorothioate
  modified_base 3: mod_base = OTHER; note = 2'-O-methylguanosine-3'-phosphate
  modified_base 4: mod_base = OTHER; note = 2'-O-methyladenosine-3'-phosphate
  modified_base 5: mod_base = OTHER; note = 2'-O-methyladenosine-3'-phosphate
  modified_base 6: mod_base = OTHER; note = 2'-O-docosanyl-uridine-3'-phosphate
  modified_base 7: mod_base = OTHER; note = 2'-deoxy-2'-fluoroadenosine-3'-phosphate
  modified_base 8: mod_base = OTHER; note = 2'-O-methyluridine-3'-phosphate
  modified_base 9: mod_base = OTHER; note = 2'-deoxy-2'-fluorocytidine-3'-phosphate
  modified_base 10: mod_base = OTHER; note = 2'-deoxy-2'-fluorouridine-3'-phosphate
  modified_base 11: mod_base = OTHER; note = 2'-deoxy-2'-fluorouridine-3'-phosphate
  modified_base 12: mod_base = OTHER; note = 2'-O-methyluridine-3'-phosphate
  modified_base 13: mod_base = OTHER; note = 2'-O-methylguanosine-3'-phosphate
  modified_base 14: mod_base = OTHER; note = 2'-O-methyladenosine-3'-phosphate
  modified_base 15: mod_base = OTHER; note = 2'-O-methylguanosine-3'-phosphate
  modified_base 16: mod_base = OTHER; note = 2'-O-methyluridine-3'-phosphate
  modified_base 17: mod_base = OTHER; note = 2'-O-methylcytidine-3'-phosphate
  modified_base 18: mod_base = OTHER; note = 2'-O-methylcytidine-3'-phosphate
  modified_base 19: mod_base = OTHER; note = 2'-O-methyluridine-3'-phosphorothioate
  modified_base 20: mod_base = OTHER; note = 2'-O-methyluridine-3'-phosphorothioate
  modified_base 21: mod_base = OTHER; note = 2'-O-methyladenosine
gtgaatatctttgagtcctta

SEQ ID NO: 10779 - RNA, 21 nt, synthetic construct
  source 1..21: mol_type = other RNA
  modified_base 1: mod_base = OTHER; note = 2'-O-methyluridine-3'-phosphorothioate
  modified_base 2: mod_base = OTHER; note = 2'-O-methylguanosine-3'-phosphorothioate
  modified_base 3: mod_base = OTHER; note = 2'-O-methyladenosine-3'-phosphate
  modified_base 4: mod_base = OTHER; note = 2'-O-methyladenosine-3'-phosphate
  modified_base 5: mod_base = OTHER; note = 2'-O-methyluridine-3'-phosphate
  modified_base 6: mod_base = OTHER; note = 2'-O-docosanyl-adenosine-3'-phosphate
  modified_base 7: mod_base = OTHER; note = 2'-deoxy-2'-fluorouridine-3'-phosphate
  modified_base 8: mod_base = OTHER; note = 2'-O-methylcytidine-3'-phosphate
  modified_base 9: mod_base = OTHER; note = 2'-deoxy-2'-fluorouridine-3'-phosphate
  modified_base 10: mod_base = OTHER; note = 2'-deoxy-2'-fluorouridine-3'-phosphate
  modified_base 11: mod_base = OTHER; note = 2'-deoxy-2'-fluorouridine-3'-phosphate
  modified_base 12: mod_base = OTHER; note = 2'-O-methylguanosine-3'-phosphate
  modified_base 13: mod_base = OTHER; note = 2'-O-methyladenosine-3'-phosphate
  modified_base 14: mod_base = OTHER; note = 2'-O-methylguanosine-3'-phosphate
  modified_base 15: mod_base = OTHER; note = 2'-O-methyluridine-3'-phosphate
  modified_base 16: mod_base = OTHER; note = 2'-O-methylcytidine-3'-phosphate
  modified_base 17: mod_base = OTHER; note = 2'-O-methylcytidine-3'-phosphate
  modified_base 18: mod_base = OTHER; note = 2'-O-methyluridine-3'-phosphate
  modified_base 19: mod_base = OTHER; note = 2'-O-methyluridine-3'-phosphorothioate
  modified_base 20: mod_base = OTHER; note = 2'-O-methylcytidine-3'-phosphorothioate
  modified_base 21: mod_base = OTHER; note = 2'-O-methyladenosine
tgaatatctttgagtccttca

SEQ ID NO: 10780 - RNA, 21 nt, synthetic construct
  source 1..21: mol_type = other RNA
  modified_base 1: mod_base = OTHER; note = 2'-O-methyladenosine-3'-phosphorothioate
  modified_base 2: mod_base = OTHER; note = 2'-O-methyladenosine-3'-phosphorothioate
  modified_base 3: mod_base = OTHER; note = 2'-O-methyluridine-3'-phosphate
  modified_base 4: mod_base = OTHER; note = 2'-O-methyladenosine-3'-phosphate
  modified_base 5: mod_base = OTHER; note = 2'-O-methyluridine-3'-phosphate
  modified_base 6: mod_base = OTHER; note = 2'-O-docosanyl-cytidine-3'-phosphate
  modified_base 7: mod_base = OTHER; note = 2'-deoxy-2'-fluorouridine-3'-phosphate
  modified_base 8: mod_base = OTHER; note = 2'-O-methyluridine-3'-phosphate
  modified_base 9: mod_base = OTHER; note = 2'-deoxy-2'-fluorouridine-3'-phosphate
  modified_base 10: mod_base = OTHER; note = 2'-deoxy-2'-fluoroguanosine-3'-phosphate
  modified_base 11: mod_base = OTHER; note = 2'-deoxy-2'-fluoroadenosine-3'-phosphate
  modified_base 12: mod_base = OTHER; note = 2'-O-methylguanosine-3'-phosphate
  modified_base 13: mod_base = OTHER; note = 2'-O-methyluridine-3'-phosphate
  modified_base 14: mod_base = OTHER; note = 2'-O-methylcytidine-3'-phosphate
  modified_base 15: mod_base = OTHER; note = 2'-O-methylcytidine-3'-phosphate
  modified_base 16: mod_base = OTHER; note = 2'-O-methyluridine-3'-phosphate
  modified_base 17: mod_base = OTHER; note = 2'-O-methyluridine-3'-phosphate
  modified_base 18: mod_base = OTHER; note = 2'-O-methylcytidine-3'-phosphate
  modified_base 19: mod_base = OTHER; note = 2'-O-methyladenosine-3'-phosphorothioate
  modified_base 20: mod_base = OTHER; note = 2'-O-methyladenosine-3'-phosphorothioate
  modified_base 21: mod_base = OTHER; note = 2'-O-methyladenosine
aatatctttgagtccttcaaa

SEQ ID NO: 10781 - RNA, 21 nt, synthetic construct
  source 1..21: mol_type = other RNA
  modified_base 1: mod_base = OTHER; note = 2'-O-methyladenosine-3'-phosphorothioate
  modified_base 2: mod_base = OTHER; note = 2'-O-methyluridine-3'-phosphorothioate
  modified_base 3: mod_base = OTHER; note = 2'-O-methyladenosine-3'-phosphate
  modified_base 4: mod_base = OTHER; note = 2'-O-methyluridine-3'-phosphate
  modified_base 5: mod_base = OTHER; note = 2'-O-methylcytidine-3'-phosphate
  modified_base 6: mod_base = OTHER; note = 2'-O-docosanyl-uridine-3'-phosphate
  modified_base 7: mod_base = OTHER; note = 2'-deoxy-2'-fluorouridine-3'-phosphate
  modified_base 8: mod_base = OTHER; note = 2'-O-methyluridine-3'-phosphate
  modified_base 9: mod_base = OTHER; note = 2'-deoxy-2'-fluoroguanosine-3'-phosphate
  modified_base 10: mod_base = OTHER; note = 2'-deoxy-2'-fluoroadenosine-3'-phosphate
  modified_base 11: mod_base = OTHER; note = 2'-deoxy-2'-fluoroguanosine-3'-phosphate
  modified_base 12: mod_base = OTHER; note = 2'-O-methyluridine-3'-phosphate
  modified_base 13: mod_base = OTHER; note = 2'-O-methylcytidine-3'-phosphate
  modified_base 14: mod_base = OTHER; note = 2'-O-methylcytidine-3'-phosphate
  modified_base 15: mod_base = OTHER; note = 2'-O-methyluridine-3'-phosphate
  modified_base 16: mod_base = OTHER; note = 2'-O-methyluridine-3'-phosphate
  modified_base 17: mod_base = OTHER; note = 2'-O-methylcytidine-3'-phosphate
  modified_base 18: mod_base = OTHER; note = 2'-O-methyladenosine-3'-phosphate
  modified_base 19: mod_base = OTHER; note = 2'-O-methyladenosine-3'-phosphorothioate
  modified_base 20: mod_base = OTHER; note = 2'-O-methyladenosine-3'-phosphorothioate
  modified_base 21: mod_base = OTHER; note = 2'-O-methyladenosine
atatctttgagtccttcaaaa

SEQ ID NO: 10782 - RNA, 21 nt, synthetic construct
  source 1..21: mol_type = other RNA
  modified_base 1: mod_base = OTHER; note = 2'-O-methyluridine-3'-phosphorothioate
  modified_base 2: mod_base = OTHER; note = 2'-O-methyladenosine-3'-phosphorothioate
  modified_base 3: mod_base = OTHER; note = 2'-O-methyluridine-3'-phosphate
  modified_base 4: mod_base = OTHER; note = 2'-O-methylcytidine-3'-phosphate
  modified_base 5: mod_base = OTHER; note = 2'-O-methyluridine-3'-phosphate
  modified_base 6: mod_base = OTHER; note = 2'-O-docosanyl-uridine-3'-phosphate
  modified_base 7: mod_base = OTHER; note = 2'-deoxy-2'-fluorouridine-3'-phosphate
  modified_base 8: mod_base = OTHER; note = 2'-O-methylguanosine-3'-phosphate
  modified_base 9: mod_base = OTHER; note = 2'-deoxy-2'-fluoroadenosine-3'-phosphate
  modified_base 10: mod_base = OTHER; note = 2'-deoxy-2'-fluoroguanosine-3'-phosphate
  modified_base 11: mod_base = OTHER; note = 2'-deoxy-2'-fluorouridine-3'-phosphate
  modified_base 12: mod_base = OTHER; note = 2'-O-methylcytidine-3'-phosphate
  modified_base 13: mod_base = OTHER; note = 2'-O-methylcytidine-3'-phosphate
  modified_base 14: mod_base = OTHER; note = 2'-O-methyluridine-3'-phosphate
  modified_base 15: mod_base = OTHER; note = 2'-O-methyluridine-3'-phosphate
  modified_base 16: mod_base = OTHER; note = 2'-O-methylcytidine-3'-phosphate
  modified_base 17: mod_base = OTHER; note = 2'-O-methyladenosine-3'-phosphate
  modified_base 18: mod_base = OTHER; note = 2'-O-methyladenosine-3'-phosphate
  modified_base 19: mod_base = OTHER; note = 2'-O-methyladenosine-3'-phosphorothioate
  modified_base 20: mod_base = OTHER; note = 2'-O-methylcytidine-3'-phosphorothioate
  modified_base 21: mod_base = OTHER; note = 2'-O-methyladenosine
tatctttgagtccttcaaaca

SEQ ID NO: 10783 - RNA, 21 nt, synthetic construct
  source 1..21: mol_type = other RNA
  modified_base 1: mod_base = OTHER; note = 2'-O-methyladenosine-3'-phosphorothioate
  modified_base 2: mod_base = OTHER; note = 2'-O-methyluridine-3'-phosphorothioate
  modified_base 3: mod_base = OTHER; note = 2'-O-methylcytidine-3'-phosphate
  modified_base 4: mod_base = OTHER; note = 2'-O-methyluridine-3'-phosphate
  modified_base 5: mod_base = OTHER; note = 2'-O-methyluridine-3'-phosphate
  modified_base 6: mod_base = OTHER; note = 2'-O-docosanyl-uridine-3'-phosphate
  modified_base 7: mod_base = OTHER; note = 2'-deoxy-2'-fluoroguanosine-3'-phosphate
  modified_base 8: mod_base = OTHER; note = 2'-O-methyladenosine-3'-phosphate
  modified_base 9: mod_base = OTHER; note = 2'-deoxy-2'-fluoroguanosine-3'-phosphate
  modified_base 10: mod_base = OTHER; note = 2'-deoxy-2'-fluorouridine-3'-phosphate
  modified_base 11: mod_base = OTHER; note = 2'-deoxy-2'-fluorocytidine-3'-phosphate
  modified_base 12: mod_base = OTHER; note = 2'-O-methylcytidine-3'-phosphate
  modified_base 13: mod_base = OTHER; note = 2'-O-methyluridine-3'-phosphate
  modified_base 14: mod_base = OTHER; note = 2'-O-methyluridine-3'-phosphate
  modified_base 15: mod_base = OTHER; note = 2'-O-methylcytidine-3'-phosphate
  modified_base 16: mod_base = OTHER; note = 2'-O-methyladenosine-3'-phosphate
  modified_base 17: mod_base = OTHER; note = 2'-O-methyladenosine-3'-phosphate
  modified_base 18: mod_base = OTHER; note = 2'-O-methyladenosine-3'-phosphate
  modified_base 19: mod_base = OTHER; note = 2'-O-methylcytidine-3'-phosphorothioate
  modified_base 20: mod_base = OTHER; note = 2'-O-methylguanosine-3'-phosphorothioate
  modified_base 21: mod_base = OTHER; note = 2'-O-methyladenosine
atctttgagtccttcaaacga

SEQ ID NO: 10784 - RNA, 21 nt, synthetic construct
  source 1..21: mol_type = other RNA
  modified_base 1: mod_base = OTHER; note = 2'-O-methyluridine-3'-phosphorothioate
  modified_base 2: mod_base = OTHER; note = 2'-O-methylcytidine-3'-phosphorothioate
  modified_base 3: mod_base = OTHER; note = 2'-O-methyluridine-3'-phosphate
  modified_base 4: mod_base = OTHER; note = 2'-O-methyluridine-3'-phosphate
  modified_base 5: mod_base = OTHER; note = 2'-O-methyluridine-3'-phosphate
  modified_base 6: mod_base = OTHER; note = 2'-O-docosanyl-guanosine-3'-phosphate
  modified_base 7: mod_base = OTHER; note = 2'-deoxy-2'-fluoroadenosine-3'-phosphate
  modified_base 8: mod_base = OTHER; note = 2'-O-methylguanosine-3'-phosphate
  modified_base 9: mod_base = OTHER; note = 2'-deoxy-2'-fluorouridine-3'-phosphate
  modified_base 10: mod_base = OTHER; note = 2'-deoxy-2'-fluorocytidine-3'-phosphate
  modified_base 11: mod_base = OTHER; note = 2'-deoxy-2'-fluorocytidine-3'-phosphate
  modified_base 12: mod_base = OTHER; note = 2'-O-methyluridine-3'-phosphate
  modified_base 13: mod_base = OTHER; note = 2'-O-methyluridine-3'-phosphate
  modified_base 14: mod_base = OTHER; note = 2'-O-methylcytidine-3'-phosphate
  modified_base 15: mod_base = OTHER; note = 2'-O-methyladenosine-3'-phosphate
  modified_base 16: mod_base = OTHER; note = 2'-O-methyladenosine-3'-phosphate
  modified_base 17: mod_base = OTHER; note = 2'-O-methyladenosine-3'-phosphate
  modified_base 18: mod_base = OTHER; note = 2'-O-methylcytidine-3'-phosphate
  modified_base 19: mod_base = OTHER; note = 2'-O-methylguanosine-3'-phosphorothioate
  modified_base 20: mod_base = OTHER; note = 2'-O-methyladenosine-3'-phosphorothioate
  modified_base 21: mod_base = OTHER; note = 2'-O-methyladenosine
tctttgagtccttcaaacgaa

SEQ ID NO: 10785 - RNA, 21 nt, synthetic construct
  source 1..21: mol_type = other RNA
  modified_base 1: mod_base = OTHER; note = 2'-O-methylcytidine-3'-phosphorothioate
  modified_base 2: mod_base = OTHER; note = 2'-O-methyluridine-3'-phosphorothioate
  modified_base 3: mod_base = OTHER; note = 2'-O-methyluridine-3'-phosphate
  modified_base 4: mod_base = OTHER; note = 2'-O-methyluridine-3'-phosphate
  modified_base 5: mod_base = OTHER; note = 2'-O-methylguanosine-3'-phosphate
  modified_base 6: mod_base = OTHER; note = 2'-O-docosanyl-adenosine-3'-phosphate
  modified_base 7: mod_base = OTHER; note = 2'-deoxy-2'-fluoroguanosine-3'-phosphate
  modified_base 8: mod_base = OTHER; note = 2'-O-methyluridine-3'-phosphate
  modified_base 9: mod_base = OTHER; note = 2'-deoxy-2'-fluorocytidine-3'-phosphate
  modified_base 10: mod_base = OTHER; note = 2'-deoxy-2'-fluorocytidine-3'-phosphate
  modified_base 11: mod_base = OTHER; note = 2'-deoxy-2'-fluorouridine-3'-phosphate
  modified_base 12: mod_base = OTHER; note = 2'-O-methyluridine-3'-phosphate
  modified_base 13: mod_base = OTHER; note = 2'-O-methylcytidine-3'-phosphate
  modified_base 14: mod_base = OTHER; note = 2'-O-methyladenosine-3'-phosphate
  modified_base 15: mod_base = OTHER; note = 2'-O-methyladenosine-3'-phosphate
  modified_base 16: mod_base = OTHER; note = 2'-O-methyladenosine-3'-phosphate
  modified_base 17: mod_base = OTHER; note = 2'-O-methylcytidine-3'-phosphate
  modified_base 18: mod_base = OTHER; note = 2'-O-methylguanosine-3'-phosphate
  modified_base 19: mod_base = OTHER; note = 2'-O-methyladenosine-3'-phosphorothioate
  modified_base 20: mod_base = OTHER; note = 2'-O-methylguanosine-3'-phosphorothioate
  modified_base 21: mod_base = OTHER; note = 2'-O-methyladenosine
ctttgagtccttcaaacgaga

SEQ ID NO: 10786 - RNA, 21 nt, synthetic construct
  source 1..21: mol_type = other RNA
  modified_base 1: mod_base = OTHER; note = 2'-O-methyluridine-3'-phosphorothioate
  modified_base 2: mod_base = OTHER; note = 2'-O-methyluridine-3'-phosphorothioate
  modified_base 3: mod_base = OTHER; note = 2'-O-methylcytidine-3'-phosphate
  modified_base 4: mod_base = OTHER; note = 2'-O-methyladenosine-3'-phosphate
  modified_base 5: mod_base = OTHER; note = 2'-O-methyladenosine-3'-phosphate
  modified_base 6: mod_base = OTHER; note = 2'-O-docosanyl-adenosine-3'-phosphate
  modified_base 7: mod_base = OTHER; note = 2'-deoxy-2'-fluorocytidine-3'-phosphate
  modified_base 8: mod_base = OTHER; note = 2'-O-methylguanosine-3'-phosphate
  modified_base 9: mod_base = OTHER; note = 2'-deoxy-2'-fluoroadenosine-3'-phosphate
  modified_base 10: mod_base = OTHER; note = 2'-deoxy-2'-fluoroguanosine-3'-phosphate
  modified_base 11: mod_base = OTHER; note = 2'-deoxy-2'-fluorocytidine-3'-phosphate
  modified_base 12: mod_base = OTHER; note = 2'-O-methyluridine-3'-phosphate
  modified_base 13: mod_base = OTHER; note = 2'-O-methylguanosine-3'-phosphate
  modified_base 14: mod_base = OTHER; note = 2'-O-methyladenosine-3'-phosphate
  modified_base 15: mod_base = OTHER; note = 2'-O-methylcytidine-3'-phosphate
  modified_base 16: mod_base = OTHER; note = 2'-O-methyladenosine-3'-phosphate
  modified_base 17: mod_base = OTHER; note = 2'-O-methyluridine-3'-phosphate
  modified_base 18: mod_base = OTHER; note = 2'-O-methylcytidine-3'-phosphate
  modified_base 19: mod_base = OTHER; note = 2'-O-methyluridine-3'-phosphorothioate
  modified_base 20: mod_base = OTHER; note = 2'-O-methyladenosine-3'-phosphorothioate
  modified_base 21: mod_base = OTHER; note = 2'-O-methyladenosine
ttcaaacgagctgacatctaa

SEQ ID NO: 10787 - RNA, 21 nt, synthetic construct
  source 1..21: mol_type = other RNA
  modified_base 1: mod_base = OTHER; note = 2'-O-methyladenosine-3'-phosphorothioate
  modified_base 2: mod_base = OTHER; note = 2'-O-methyladenosine-3'-phosphorothioate
  modified_base 3: mod_base = OTHER; note = 2'-O-methylcytidine-3'-phosphate
  modified_base 4: mod_base = OTHER; note = 2'-O-methylguanosine-3'-phosphate
  modified_base 5: mod_base = OTHER; note = 2'-O-methyladenosine-3'-phosphate
  modified_base 6: mod_base = OTHER; note = 2'-O-docosanyl-guanosine-3'-phosphate
  modified_base 7: mod_base = OTHER; note = 2'-deoxy-2'-fluorocytidine-3'-phosphate
  modified_base 8: mod_base = OTHER; note = 2'-O-methyluridine-3'-phosphate
  modified_base 9: mod_base = OTHER; note = 2'-deoxy-2'-fluoroguanosine-3'-phosphate
  modified_base 10: mod_base = OTHER; note = 2'-deoxy-2'-fluoroadenosine-3'-phosphate
  modified_base 11: mod_base = OTHER; note = 2'-deoxy-2'-fluorocytidine-3'-phosphate
  modified_base 12: mod_base = OTHER; note = 2'-O-methyladenosine-3'-phosphate
  modified_base 13: mod_base = OTHER; note = 2'-O-methyluridine-3'-phosphate
  modified_base 14: mod_base = OTHER; note = 2'-O-methylcytidine-3'-phosphate
  modified_base 15: mod_base = OTHER; note = 2'-O-methyluridine-3'-phosphate
  modified_base 16: mod_base = OTHER; note = 2'-O-methyladenosine-3'-phosphate
  modified_base 17: mod_base = OTHER; note = 2'-O-methyluridine-3'-phosphate
  modified_base 18: mod_base = OTHER; note = 2'-O-methyluridine-3'-phosphate
  modified_base 19: mod_base = OTHER; note = 2'-O-methylcytidine-3'-phosphorothioate
  modified_base 20: mod_base = OTHER; note = 2'-O-methyluridine-3'-phosphorothioate
  modified_base 21: mod_base = OTHER; note = 2'-O-methyladenosine
aacgagctgacatctattcta

SEQ ID NO: 10788 - RNA, 21 nt, synthetic construct
  source 1..21: mol_type = other RNA
  modified_base 1: mod_base = OTHER; note = 2'-O-methyladenosine-3'-phosphorothioate
  modified_base 2: mod_base = OTHER; note = 2'-O-methylcytidine-3'-phosphorothioate
  modified_base 3: mod_base = OTHER; note = 2'-O-methylguanosine-3'-phosphate
  modified_base 4: mod_base = OTHER; note = 2'-O-methyladenosine-3'-phosphate
  modified_base 5: mod_base = OTHER; note = 2'-O-methylguanosine-3'-phosphate
  modified_base 6: mod_base = OTHER; note = 2'-O-docosanyl-cytidine-3'-phosphate
  modified_base 7: mod_base = OTHER; note = 2'-deoxy-2'-fluorouridine-3'-phosphate
  modified_base 8: mod_base = OTHER; note = 2'-O-methylguanosine-3'-phosphate
  modified_base 9: mod_base = OTHER; note = 2'-deoxy-2'-fluoroadenosine-3'-phosphate
  modified_base 10: mod_base = OTHER; note = 2'-deoxy-2'-fluorocytidine-3'-phosphate
  modified_base 11: mod_base = OTHER; note = 2'-deoxy-2'-fluoroadenosine-3'-phosphate
  modified_base 12: mod_base = OTHER; note = 2'-O-methyluridine-3'-phosphate
  modified_base 13: mod_base = OTHER; note = 2'-O-methylcytidine-3'-phosphate
  modified_base 14: mod_base = OTHER; note = 2'-O-methyluridine-3'-phosphate
  modified_base 15: mod_base = OTHER; note = 2'-O-methyladenosine-3'-phosphate
  modified_base 16: mod_base = OTHER; note = 2'-O-methyluridine-3'-phosphate
  modified_base 17: mod_base = OTHER; note = 2'-O-methyluridine-3'-phosphate
  modified_base 18: mod_base = OTHER; note = 2'-O-methylcytidine-3'-phosphate
  modified_base 19: mod_base = OTHER; note = 2'-O-methyluridine-3'-phosphorothioate
  modified_base 20: mod_base = OTHER; note = 2'-O-methylguanosine-3'-phosphorothioate
  modified_base 21: mod_base = OTHER; note = 2'-O-methyladenosine
acgagctgacatctattctga

SEQ ID NO: 10789 - RNA, 21 nt, synthetic construct
  source 1..21: mol_type = other RNA
  modified_base 1: mod_base = OTHER; note = 2'-O-methylcytidine-3'-phosphorothioate
  modified_base 2: mod_base = OTHER; note = 2'-O-methylguanosine-3'-phosphorothioate
  modified_base 3: mod_base = OTHER; note = 2'-O-methyladenosine-3'-phosphate
  modified_base 4: mod_base = OTHER; note = 2'-O-methylguanosine-3'-phosphate
  modified_base 5: mod_base = OTHER; note = 2'-O-methylcytidine-3'-phosphate
  modified_base 6: mod_base = OTHER; note = 2'-O-docosanyl-uridine-3'-phosphate
  modified_base 7: mod_base = OTHER; note = 2'-deoxy-2'-fluoroguanosine-3'-phosphate
  modified_base 8: mod_base = OTHER; note = 2'-O-methyladenosine-3'-phosphate
  modified_base 9: mod_base = OTHER; note = 2'-deoxy-2'-fluorocytidine-3'-phosphate
  modified_base 10: mod_base = OTHER; note = 2'-deoxy-2'-fluoroadenosine-3'-phosphate
  modified_base 11: mod_base = OTHER; note = 2'-deoxy-2'-fluorouridine-3'-phosphate
  modified_base 12: mod_base = OTHER; note = 2'-O-methylcytidine-3'-phosphate
  modified_base 13: mod_base = OTHER; note = 2'-O-methyluridine-3'-phosphate
  modified_base 14: mod_base = OTHER; note = 2'-O-methyladenosine-3'-phosphate
  modified_base 15: mod_base = OTHER; note = 2'-O-methyluridine-3'-phosphate
  modified_base 16: mod_base = OTHER; note = 2'-O-methyluridine-3'-phosphate
  modified_base 17: mod_base = OTHER; note = 2'-O-methylcytidine-3'-phosphate
  modified_base 18: mod_base = OTHER; note = 2'-O-methyluridine-3'-phosphate
  modified_base 19: mod_base = OTHER; note = 2'-O-methylguanosine-3'-phosphorothioate
  modified_base 20: mod_base = OTHER; note = 2'-O-methyluridine-3'-phosphorothioate
  modified_base 21: mod_base = OTHER; note = 2'-O-methyladenosine
cgagctgacatctattctgta

SEQ ID NO: 10790 - RNA, 21 nt, synthetic construct
  source 1..21: mol_type = other RNA
  modified_base 1: mod_base = OTHER; note = 2'-O-methyladenosine-3'-phosphorothioate
  modified_base 2: mod_base = OTHER; note = 2'-O-methylguanosine-3'-phosphorothioate
  modified_base 3: mod_base = OTHER; note = 2'-O-methylcytidine-3'-phosphate
  modified_base 4: mod_base = OTHER; note = 2'-O-methyluridine-3'-phosphate
  modified_base 5: mod_base = OTHER; note = 2'-O-methylguanosine-3'-phosphate
  modified_base 6: mod_base = OTHER; note = 2'-O-docosanyl-adenosine-3'-phosphate
  modified_base 7: mod_base = OTHER; note = 2'-deoxy-2'-fluorocytidine-3'-phosphate
  modified_base 8: mod_base = OTHER; note = 2'-O-methyladenosine-3'-phosphate
  modified_base 9: mod_base = OTHER; note = 2'-deoxy-2'-fluorouridine-3'-phosphate
  modified_base 10: mod_base = OTHER; note = 2'-deoxy-2'-fluorocytidine-3'-phosphate
  modified_base 11: mod_base = OTHER; note = 2'-deoxy-2'-fluorouridine-3'-phosphate
  modified_base 12: mod_base = OTHER; note = 2'-O-methyladenosine-3'-phosphate
  modified_base 13: mod_base = OTHER; note = 2'-O-methyluridine-3'-phosphate
  modified_base 14: mod_base = OTHER; note = 2'-O-methyluridine-3'-phosphate
  modified_base 15: mod_base = OTHER; note = 2'-O-methylcytidine-3'-phosphate
  modified_base 16: mod_base = OTHER; note = 2'-O-methyluridine-3'-phosphate
  modified_base 17: mod_base = OTHER; note = 2'-O-methylguanosine-3'-phosphate
  modified_base 18: mod_base = OTHER; note = 2'-O-methyluridine-3'-phosphate
  modified_base 19: mod_base = OTHER; note = 2'-O-methyluridine-3'-phosphorothioate
  modified_base 20: mod_base = OTHER; note = 2'-O-methylguanosine-3'-phosphorothioate
  modified_base 21: mod_base = OTHER; note = 2'-O-methyladenosine
agctgacatctattctgttga

SEQ ID NO: 10791 - RNA, 21 nt, synthetic construct
  source 1..21: mol_type = other RNA
  modified_base 1: mod_base = OTHER; note = 2'-O-methylguanosine-3'-phosphorothioate
  modified_base 2: mod_base = OTHER; note = 2'-O-methylcytidine-3'-phosphorothioate
  modified_base 3: mod_base = OTHER; note = 2'-O-methyluridine-3'-phosphate
  modified_base 4: mod_base = OTHER; note = 2'-O-methylguanosine-3'-phosphate
  modified_base 5: mod_base = OTHER; note = 2'-O-methyladenosine-3'-phosphate
  modified_base 6: mod_base = OTHER; note = 2'-O-docosanyl-cytidine-3'-phosphate
  modified_base 7: mod_base = OTHER; note = 2'-deoxy-2'-fluoroadenosine-3'-phosphate
  modified_base 8: mod_base = OTHER; note = 2'-O-methyluridine-3'-phosphate
  modified_base 9: mod_base = OTHER; note = 2'-deoxy-2'-fluorocytidine-3'-phosphate
  modified_base 10: mod_base = OTHER; note = 2'-deoxy-2'-fluorouridine-3'-phosphate
  modified_base 11: mod_base = OTHER; note = 2'-deoxy-2'-fluoroadenosine-3'-phosphate
  modified_base 12: mod_base = OTHER; note = 2'-O-methyluridine-3'-phosphate
  modified_base 13: mod_base = OTHER; note = 2'-O-methyluridine-3'-phosphate
  modified_base 14: mod_base = OTHER; note = 2'-O-methylcytidine-3'-phosphate
  modified_base 15: mod_base = OTHER; note = 2'-O-methyluridine-3'-phosphate
  modified_base 16: mod_base = OTHER; note = 2'-O-methylguanosine-3'-phosphate
  modified_base 17: mod_base = OTHER; note = 2'-O-methyluridine-3'-phosphate
  modified_base 18: mod_base = OTHER; note = 2'-O-methyluridine-3'-phosphate
  modified_base 19: mod_base = OTHER; note = 2'-O-methylguanosine-3'-phosphorothioate
  modified_base 20: mod_base = OTHER; note = 2'-O-methylguanosine-3'-phosphorothioate
  modified_base 21: mod_base = OTHER; note = 2'-O-methyladenosine
gctgacatctattctgttgga

SEQ ID NO: 10792 - RNA, 21 nt, synthetic construct
  source 1..21: mol_type = other RNA
  modified_base 1: mod_base = OTHER; note = 2'-O-methyluridine-3'-phosphorothioate
  modified_base 2: mod_base = OTHER; note = 2'-O-methyladenosine-3'-phosphorothioate
  modified_base 3: mod_base = OTHER; note = 2'-O-methyluridine-3'-phosphate
  modified_base 4: mod_base = OTHER; note = 2'-O-methyluridine-3'-phosphate
  modified_base 5: mod_base = OTHER; note = 2'-O-methylcytidine-3'-phosphate
  modified_base 6: mod_base = OTHER; note = 2'-O-docosanyl-uridine-3'-phosphate
  modified_base 7: mod_base = OTHER; note = 2'-deoxy-2'-fluoroguanosine-3'-phosphate
  modified_base 8: mod_base = OTHER; note = 2'-O-methyluridine-3'-phosphate
  modified_base 9: mod_base = OTHER; note = 2'-deoxy-2'-fluorouridine-3'-phosphate
  modified_base 10: mod_base = OTHER; note = 2'-deoxy-2'-fluoroguanosine-3'-phosphate
  modified_base 11: mod_base = OTHER; note = 2'-deoxy-2'-fluoroguanosine-3'-phosphate
  modified_base 12: mod_base = OTHER; note = 2'-O-methyluridine-3'-phosphate
  modified_base 13: mod_base = OTHER; note = 2'-O-methylcytidine-3'-phosphate
  modified_base 14: mod_base = OTHER; note = 2'-O-methyluridine-3'-phosphate
  modified_base 15: mod_base = OTHER; note = 2'-O-methylguanosine-3'-phosphate
  modified_base 16: mod_base = OTHER; note = 2'-O-methylguanosine-3'-phosphate
  modified_base 17: mod_base = OTHER; note = 2'-O-methyluridine-3'-phosphate
  modified_base 18: mod_base = OTHER; note = 2'-O-methyluridine-3'-phosphate
  modified_base 19: mod_base = OTHER; note = 2'-O-methyluridine-3'-phosphorothioate
  modified_base 20: mod_base = OTHER; note = 2'-O-methyladenosine-3'-phosphorothioate
  modified_base 21: mod_base = OTHER; note = 2'-O-methyladenosine
tattctgttggtctggtttaa

SEQ ID NO: 10793 - RNA, 21 nt, synthetic construct
  source 1..21: mol_type = other RNA
  modified_base 1: mod_base = OTHER; note = 2'-O-methylguanosine-3'-phosphorothioate
  modified_base 2: mod_base = OTHER; note = 2'-O-methyluridine-3'-phosphorothioate
  modified_base 3: mod_base = OTHER; note = 2'-O-methylcytidine-3'-phosphate
  modified_base 4: mod_base = OTHER; note = 2'-O-methyluridine-3'-phosphate
  modified_base 5: mod_base = OTHER; note = 2'-O-methylguanosine-3'-phosphate
  modified_base 6: mod_base = OTHER; note = 2'-O-docosanyl-guanosine-3'-phosphate
  modified_base 7: mod_base = OTHER; note = 2'-deoxy-2'-fluorouridine-3'-phosphate
  modified_base 8: mod_base = OTHER; note = 2'-O-methyluridine-3'-phosphate
  modified_base 9: mod_base = OTHER; note = 2'-deoxy-2'-fluorouridine-3'-phosphate
  modified_base 10: mod_base = OTHER; note = 2'-deoxy-2'-fluoroadenosine-3'-phosphate
  modified_base 11: mod_base = OTHER; note = 2'-deoxy-2'-fluorocytidine-3'-phosphate
  modified_base 12: mod_base = OTHER; note = 2'-O-methyluridine-3'-phosphate
  modified_base 13: mod_base = OTHER; note = 2'-O-methylguanosine-3'-phosphate
  modified_base 14: mod_base = OTHER; note = 2'-O-methylguanosine-3'-phosphate
  modified_base 15: mod_base = OTHER; note = 2'-O-methylguanosine-3'-phosphate
  modified_base 16: mod_base = OTHER; note = 2'-O-methyladenosine-3'-phosphate
  modified_base 17: mod_base = OTHER; note = 2'-O-methyladenosine-3'-phosphate
  modified_base 18: mod_base = OTHER; note = 2'-O-methyladenosine-3'-phosphate
  modified_base 19: mod_base = OTHER; note = 2'-O-methyluridine-3'-phosphorothioate
  modified_base 20: mod_base = OTHER; note = 2'-O-methyladenosine-3'-phosphorothioate
  modified_base 21: mod_base = OTHER; note = 2'-O-methyladenosine
gtctggtttactgggaaataa

SEQ ID NO: 10794 - RNA, 21 nt, synthetic construct
  source 1..21: mol_type = other RNA
  modified_base 1: mod_base = OTHER; note = 2'-O-methyluridine-3'-phosphorothioate
  modified_base 2: mod_base = OTHER; note = 2'-O-methylguanosine-3'-phosphorothioate
  modified_base 3: mod_base = OTHER; note = 2'-O-methyladenosine-3'-phosphate
  modified_base 4: mod_base = OTHER; note = 2'-O-methylguanosine-3'-phosphate
  modified_base 5: mod_base = OTHER; note = 2'-O-methylguanosine-3'-phosphate
  modified_base 6: mod_base = OTHER; note = 2'-O-docosanyl-adenosine-3'-phosphate
  modified_base 7: mod_base = OTHER; note = 2'-deoxy-2'-fluoroguanosine-3'-phosphate
  modified_base 8: mod_base = OTHER; note = 2'-O-methyluridine-3'-phosphate
  modified_base 9: mod_base = OTHER; note = 2'-deoxy-2'-fluoroadenosine-3'-phosphate
  modified_base 10: mod_base = OTHER; note = 2'-deoxy-2'-fluorocytidine-3'-phosphate
  modified_base 11: mod_base = OTHER; note = 2'-deoxy-2'-fluorocytidine-3'-phosphate
  modified_base 12: mod_base = OTHER; note = 2'-O-methyladenosine-3'-phosphate
  modified_base 13: mod_base = OTHER; note = 2'-O-methyladenosine-3'-phosphate
  modified_base 14: mod_base = OTHER; note = 2'-O-methyluridine-3'-phosphate
  modified_base 15: mod_base = OTHER; note = 2'-O-methyluridine-3'-phosphate
  modified_base 16: mod_base = OTHER; note = 2'-O-methylguanosine-3'-phosphate
  modified_base 17: mod_base = OTHER; note = 2'-O-methylcytidine-3'-phosphate
  modified_base 18: mod_base = OTHER; note = 2'-O-methylcytidine-3'-phosphate
  modified_base 19: mod_base = OTHER; note = 2'-O-methyluridine-3'-phosphorothioate
  modified_base 20: mod_base = OTHER; note = 2'-O-methyluridine-3'-phosphorothioate
  modified_base 21: mod_base = OTHER; note = 2'-O-methyladenosine
tgaggagtaccaattgcctta

SEQ ID NO: 10795 - RNA, 21 nt, synthetic construct
  source 1..21: mol_type = other RNA
  modified_base 1: mod_base = OTHER; note = 2'-O-methylguanosine-3'-phosphorothioate
  modified_base 2: mod_base = OTHER; note = 2'-O-methyladenosine-3'-phosphorothioate
  modified_base 3: mod_base = OTHER; note = 2'-O-methylguanosine-3'-phosphate
  modified_base 4: mod_base = OTHER; note = 2'-O-methyluridine-3'-phosphate
  modified_base 5: mod_base = OTHER; note = 2'-O-methyladenosine-3'-phosphate
  modified_base 6: mod_base = OTHER; note = 2'-O-docosanyl-cytidine-3'-phosphate
  modified_base 7: mod_base = OTHER; note = 2'-deoxy-2'-fluorocytidine-3'-phosphate
  modified_base 8: mod_base = OTHER; note = 2'-O-methyladenosine-3'-phosphate
  modified_base 9: mod_base = OTHER; note = 2'-deoxy-2'-fluoroadenosine-3'-phosphate
  modified_base 10: mod_base = OTHER; note = 2'-deoxy-2'-fluorouridine-3'-phosphate
  modified_base 11: mod_base = OTHER; note = 2'-deoxy-2'-fluorouridine-3'-phosphate
  modified_base 12: mod_base = OTHER; note = 2'-O-methylguanosine-3'-phosphate
  modified_base 13: mod_base = OTHER; note = 2'-O-methylcytidine-3'-phosphate
  modified_base 14: mod_base = OTHER; note = 2'-O-methylcytidine-3'-phosphate
  modified_base 15: mod_base = OTHER; note = 2'-O-methyluridine-3'-phosphate
  modified_base 16: mod_base = OTHER; note = 2'-O-methyluridine-3'-phosphate
  modified_base 17: mod_base = OTHER; note = 2'-O-methyladenosine-3'-phosphate
  modified_base 18: mod_base = OTHER; note = 2'-O-methyluridine-3'-phosphate
  modified_base 19: mod_base = OTHER; note = 2'-O-methyluridine-3'-phosphorothioate
  modified_base 20: mod_base = OTHER; note = 2'-O-methyladenosine-3'-phosphorothioate
  modified_base 21: mod_base = OTHER; note = 2'-O-methyladenosine
gagtaccaattgccttattaa

SEQ ID NO: 10796 - RNA, 21 nt, synthetic construct
  source 1..21: mol_type = other RNA
  modified_base 1: mod_base = OTHER; note = 2'-O-methylguanosine-3'-phosphorothioate
  modified_base 2: mod_base = OTHER; note = 2'-O-methyladenosine-3'-phosphorothioate
  modified_base 3: mod_base = OTHER; note = 2'-O-methylguanosine-3'-phosphate
  modified_base 4: mod_base = OTHER; note = 2'-O-methylguanosine-3'-phosphate
  modified_base 5: mod_base = OTHER; note = 2'-O-methyladenosine-3'-phosphate
  modified_base 6: mod_base = OTHER; note = 2'-O-docosanyl-guanosine-3'-phosphate
  modified_base 7: mod_base = OTHER; note = 2'-deoxy-2'-fluorouridine-3'-phosphate
  modified_base 8: mod_base = OTHER; note = 2'-O-methyladenosine-3'-phosphate
  modified_base 9: mod_base = OTHER; note = 2'-deoxy-2'-fluorocytidine-3'-phosphate
  modified_base 10: mod_base = OTHER; note = 2'-deoxy-2'-fluorocytidine-3'-phosphate
  modified_base 11: mod_base = OTHER; note = 2'-deoxy-2'-fluoroadenosine-3'-phosphate
  modified_base 12: mod_base = OTHER; note = 2'-O-methyladenosine-3'-phosphate
  modified_base 13: mod_base = OTHER; note = 2'-O-methyluridine-3'-phosphate
  modified_base 14: mod_base = OTHER; note = 2'-O-methyluridine-3'-phosphate
  modified_base 15: mod_base = OTHER; note = 2'-O-methylguanosine-3'-phosphate
  modified_base 16: mod_base = OTHER; note = 2'-O-methylcytidine-3'-phosphate
  modified_base 17: mod_base = OTHER; note = 2'-O-methylcytidine-3'-phosphate
  modified_base 18: mod_base = OTHER; note = 2'-O-methyluridine-3'-phosphate
  modified_base 19: mod_base = OTHER; note = 2'-O-methyluridine-3'-phosphorothioate
  modified_base 20: mod_base = OTHER; note = 2'-O-methyladenosine-3'-phosphorothioate
  modified_base 21: mod_base = OTHER; note = 2'-O-methyladenosine
gaggagtaccaattgccttaa

SEQ ID NO: 10797 - RNA, 21 nt, synthetic construct
  source 1..21: mol_type = other RNA
  modified_base 1: mod_base = OTHER; note = 2'-O-methyladenosine-3'-phosphorothioate
  modified_base 2: mod_base = OTHER; note = 2'-O-methylguanosine-3'-phosphorothioate
  modified_base 3: mod_base = OTHER; note = 2'-O-methylguanosine-3'-phosphate
  modified_base 4: mod_base = OTHER; note = 2'-O-methyladenosine-3'-phosphate
  modified_base 5: mod_base = OTHER; note = 2'-O-methylguanosine-3'-phosphate
  modified_base 6: mod_base = OTHER; note = 2'-O-docosanyl-uridine-3'-phosphate
  modified_base 7: mod_base = OTHER; note = 2'-deoxy-2'-fluoroadenosine-3'-phosphate
  modified_base 8: mod_base = OTHER; note = 2'-O-methylcytidine-3'-phosphate
  modified_base 9: mod_base = OTHER; note = 2'-deoxy-2'-fluorocytidine-3'-phosphate
  modified_base 10: mod_base = OTHER; note = 2'-deoxy-2'-fluoroadenosine-3'-phosphate
  modified_base 11: mod_base = OTHER; note = 2'-deoxy-2'-fluoroadenosine-3'-phosphate
  modified_base 12: mod_base = OTHER; note = 2'-O-methyluridine-3'-phosphate
  modified_base 13: mod_base = OTHER; note = 2'-O-methyluridine-3'-phosphate
  modified_base 14: mod_base = OTHER; note = 2'-O-methylguanosine-3'-phosphate
  modified_base 15: mod_base = OTHER; note = 2'-O-methylcytidine-3'-phosphate
  modified_base 16: mod_base = OTHER; note = 2'-O-methylcytidine-3'-phosphate
  modified_base 17: mod_base = OTHER; note = 2'-O-methyluridine-3'-phosphate
  modified_base 18: mod_base = OTHER; note = 2'-O-methyluridine-3'-phosphate
  modified_base 19: mod_base = OTHER; note = 2'-O-methyladenosine-3'-phosphorothioate
  modified_base 20: mod_base = OTHER; note = 2'-O-methyluridine-3'-phosphorothioate
  modified_base 21: mod_base = OTHER; note = 2'-O-methyladenosine
aggagtaccaattgccttata

SEQ ID NO: 10798 - RNA, 21 nt, synthetic construct
  source 1..21: mol_type = other RNA
  modified_base 1: mod_base = OTHER; note = 2'-O-methylguanosine-3'-phosphorothioate
  modified_base 2: mod_base = OTHER; note = 2'-O-methylguanosine-3'-phosphorothioate
  modified_base 3: mod_base = OTHER; note = 2'-O-methyladenosine-3'-phosphate
  modified_base 4: mod_base = OTHER; note = 2'-O-methylguanosine-3'-phosphate
  modified_base 5: mod_base = OTHER; note = 2'-O-methyluridine-3'-phosphate
  modified_base 6: mod_base = OTHER; note = 2'-O-docosanyl-adenosine-3'-phosphate
  modified_base 7: mod_base = OTHER; note = 2'-deoxy-2'-fluorocytidine-3'-phosphate
  modified_base 8: mod_base = OTHER; note = 2'-O-methylcytidine-3'-phosphate
  modified_base 9: mod_base = OTHER; note = 2'-deoxy-2'-fluoroadenosine-3'-phosphate
  modified_base 10: mod_base = OTHER; note = 2'-deoxy-2'-fluoroadenosine-3'-phosphate
  modified_base 11: mod_base = OTHER; note = 2'-deoxy-2'-fluorouridine-3'-phosphate
  modified_base 12: mod_base = OTHER; note = 2'-O-methyluridine-3'-phosphate
  modified_base 13: mod_base = OTHER; note = 2'-O-methylguanosine-3'-phosphate
  modified_base 14: mod_base = OTHER; note = 2'-O-methylcytidine-3'-phosphate
  modified_base 15: mod_base = OTHER; note = 2'-O-methylcytidine-3'-phosphate
  modified_base 16: mod_base = OTHER; note = 2'-O-methyluridine-3'-phosphate
  modified_base 17: mod_base = OTHER; note = 2'-O-methyluridine-3'-phosphate
  modified_base 18: mod_base = OTHER; note = 2'-O-methyladenosine-3'-phosphate
  modified_base 19: mod_base = OTHER; note = 2'-O-methyluridine-3'-phosphorothioate
  modified_base 20: mod_base = OTHER; note = 2'-O-methyluridine-3'-phosphorothioate
  modified_base 21: mod_base = OTHER; note = 2'-O-methyladenosine
ggagtaccaattgccttatta

SEQ ID NO: 10799 - RNA, 21 nt, synthetic construct
  source 1..21: mol_type = other RNA
  modified_base 1: mod_base = OTHER; note = 2'-O-methyladenosine-3'-phosphorothioate
  modified_base 2: mod_base = OTHER; note = 2'-O-methylguanosine-3'-phosphorothioate
  modified_base 3: mod_base = OTHER; note = 2'-O-methyluridine-3'-phosphate
  modified_base 4: mod_base = OTHER; note = 2'-O-methyladenosine-3'-phosphate
  modified_base 5: mod_base = OTHER; note = 2'-O-methylcytidine-3'-phosphate
  modified_base 6: mod_base = OTHER; note = 2'-O-docosanyl-cytidine-3'-phosphate
  modified_base 7: mod_base = OTHER; note = 2'-deoxy-2'-fluoroadenosine-3'-phosphate
  modified_base 8: mod_base = OTHER; note = 2'-O-methyladenosine-3'-phosphate
  modified_base 9: mod_base = OTHER; note = 2'-deoxy-2'-fluorouridine-3'-phosphate
  modified_base 10: mod_base = OTHER; note = 2'-deoxy-2'-fluorouridine-3'-phosphate
  modified_base 11: mod_base = OTHER; note = 2'-deoxy-2'-fluoroguanosine-3'-phosphate
  modified_base 12: mod_base = OTHER; note = 2'-O-methylcytidine-3'-phosphate
  modified_base 13: mod_base = OTHER; note = 2'-O-methylcytidine-3'-phosphate
  modified_base 14: mod_base = OTHER; note = 2'-O-methyluridine-3'-phosphate
  modified_base 15: mod_base = OTHER; note = 2'-O-methyluridine-3'-phosphate
  modified_base 16: mod_base = OTHER; note = 2'-O-methyladenosine-3'-phosphate
  modified_base 17: mod_base = OTHER; note = 2'-O-methyluridine-3'-phosphate
  modified_base 18: mod_base = OTHER; note = 2'-O-methyluridine-3'-phosphate
  modified_base 19: mod_base = OTHER; note = 2'-O-methyladenosine-3'-phosphorothioate
  modified_base 20: mod_base = OTHER; note = 2'-O-methyluridine-3'-phosphorothioate
  modified_base 21: mod_base = OTHER; note = 2'-O-methyladenosine
agtaccaattgccttattata

SEQ ID NO: 10800 - RNA, 21 nt, synthetic construct
  source 1..21: mol_type = other RNA
  modified_base 1: mod_base = OTHER; note = 2'-O-methylguanosine-3'-phosphorothioate
  modified_base 2: mod_base = OTHER; note = 2'-O-methyluridine-3'-phosphorothioate
  modified_base 3: mod_base = OTHER; note = 2'-O-methyladenosine-3'-phosphate
  modified_base 4: mod_base = OTHER; note = 2'-O-methylcytidine-3'-phosphate
  modified_base 5: mod_base = OTHER; note = 2'-O-methylcytidine-3'-phosphate
  modified_base 6: mod_base = OTHER; note = 2'-O-docosanyl-adenosine-3'-phosphate
  modified_base 7: mod_base = OTHER; note = 2'-deoxy-2'-fluoroadenosine-3'-phosphate
  modified_base 8: mod_base = OTHER; note = 2'-O-methyluridine-3'-phosphate
  modified_base 9: mod_base = OTHER; note = 2'-deoxy-2'-fluorouridine-3'-phosphate
  modified_base 10: mod_base = OTHER; note = 2'-deoxy-2'-fluoroguanosine-3'-phosphate
  modified_base 11: mod_base = OTHER; note = 2'-deoxy-2'-fluorocytidine-3'-phosphate
  modified_base 12: mod_base = OTHER; note = 2'-O-methylcytidine-3'-phosphate
  modified_base 13: mod_base = OTHER; note = 2'-O-methyluridine-3'-phosphate
  modified_base 14: mod_base = OTHER; note = 2'-O-methyluridine-3'-phosphate
  modified_base 15: mod_base = OTHER; note = 2'-O-methyladenosine-3'-phosphate
  modified_base 16: mod_base = OTHER; note = 2'-O-methyluridine-3'-phosphate
  modified_base 17: mod_base = OTHER; note = 2'-O-methyluridine-3'-phosphate
  modified_base 18: mod_base = OTHER; note = 2'-O-methyladenosine-3'-phosphate
  modified_base 19: mod_base = OTHER; note = 2'-O-methyluridine-3'-phosphorothioate
  modified_base 20: mod_base = OTHER; note = 2'-O-methylguanosine-3'-phosphorothioate
  modified_base 21: mod_base = OTHER; note = 2'-O-methyladenosine
gtaccaattgccttattatga

SEQ ID NO: 10801 - RNA, 21 nt, synthetic construct
  source 1..21: mol_type = other RNA
  modified_base 1: mod_base = OTHER; note = 2'-O-methyluridine-3'-phosphorothioate
  modified_base 2: mod_base = OTHER; note = 2'-O-methyladenosine-3'-phosphorothioate
  modified_base 3: mod_base = OTHER; note = 2'-O-methylcytidine-3'-phosphate
  modified_base 4: mod_base = OTHER; note = 2'-O-methylcytidine-3'-phosphate
  modified_base 5: mod_base = OTHER; note = 2'-O-methyladenosine-3'-phosphate
  modified_base 6: mod_base = OTHER; note = 2'-O-docosanyl-adenosine-3'-phosphate
  modified_base 7: mod_base = OTHER; note = 2'-deoxy-2'-fluorouridine-3'-phosphate
  modified_base 8: mod_base = OTHER; note = 2'-O-methyluridine-3'-phosphate
  modified_base 9: mod_base = OTHER; note = 2'-deoxy-2'-fluoroguanosine-3'-phosphate
  modified_base 10: mod_base = OTHER; note = 2'-deoxy-2'-fluorocytidine-3'-phosphate
  modified_base 11: mod_base = OTHER; note = 2'-deoxy-2'-fluorocytidine-3'-phosphate
  modified_base 12: mod_base = OTHER; note = 2'-O-methyluridine-3'-phosphate
  modified_base 13: mod_base = OTHER; note = 2'-O-methyluridine-3'-phosphate
  modified_base 14: mod_base = OTHER; note = 2'-O-methyladenosine-3'-phosphate
  modified_base 15: mod_base = OTHER; note = 2'-O-methyluridine-3'-phosphate
  modified_base 16: mod_base = OTHER; note = 2'-O-methyluridine-3'-phosphate
  modified_base 17: mod_base = OTHER; note = 2'-O-methyladenosine-3'-phosphate
  modified_base 18: mod_base = OTHER; note = 2'-O-methyluridine-3'-phosphate
  modified_base 19: mod_base = OTHER; note = 2'-O-methylguanosine-3'-phosphorothioate
  modified_base 20: mod_base = OTHER; note = 2'-O-methyladenosine-3'-phosphorothioate
  modified_base 21: mod_base = OTHER; note = 2'-O-methyladenosine
taccaattgccttattatgaa

SEQ ID NO: 10802 - RNA, 21 nt, synthetic construct
  source 1..21: mol_type = other RNA
  modified_base 1: mod_base = OTHER; note = 2'-O-methyladenosine-3'-phosphorothioate
  modified_base 2: mod_base = OTHER; note = 2'-O-methylcytidine-3'-phosphorothioate
  modified_base 3: mod_base = OTHER; note = 2'-O-methylcytidine-3'-phosphate
  modified_base 4: mod_base = OTHER; note = 2'-O-methyladenosine-3'-phosphate
  modified_base 5: mod_base = OTHER; note = 2'-O-methyladenosine-3'-phosphate
  modified_base 6: mod_base = OTHER; note = 2'-O-docosanyl-uridine-3'-phosphate
  modified_base 7: mod_base = OTHER; note = 2'-deoxy-2'-fluorouridine-3'-phosphate
  modified_base 8: mod_base = OTHER; note = 2'-O-methylguanosine-3'-phosphate
  modified_base 9: mod_base = OTHER; note = 2'-deoxy-2'-fluorocytidine-3'-phosphate
  modified_base 10: mod_base = OTHER; note = 2'-deoxy-2'-fluorocytidine-3'-phosphate
  modified_base 11: mod_base = OTHER; note = 2'-deoxy-2'-fluorouridine-3'-phosphate
  modified_base 12: mod_base = OTHER; note = 2'-O-methyluridine-3'-phosphate
  modified_base 13: mod_base = OTHER; note = 2'-O-methyladenosine-3'-phosphate
  modified_base 14: mod_base = OTHER; note = 2'-O-methyluridine-3'-phosphate
  modified_base 15: mod_base = OTHER; note = 2'-O-methyluridine-3'-phosphate
  modified_base 16: mod_base = OTHER; note = 2'-O-methyladenosine-3'-phosphate
  modified_base 17: mod_base = OTHER; note = 2'-O-methyluridine-3'-phosphate
  modified_base 18: mod_base = OTHER; note = 2'-O-methylguanosine-3'-phosphate
  modified_base 19: mod_base = OTHER; note = 2'-O-methyladenosine-3'-phosphorothioate
  modified_base 20: mod_base = OTHER; note = 2'-O-methylcytidine-3'-phosphorothioate
  modified_base 21: mod_base = OTHER; note = 2'-O-methyladenosine
accaattgccttattatgaca

SEQ ID NO: 10803 - RNA, 21 nt, synthetic construct
  source 1..21: mol_type = other RNA
  modified_base 1: mod_base = OTHER; note = 2'-O-methylcytidine-3'-phosphorothioate
  modified_base 2: mod_base = OTHER; note = 2'-O-methylcytidine-3'-phosphorothioate
  modified_base 3: mod_base = OTHER; note = 2'-O-methyladenosine-3'-phosphate
  modified_base 4: mod_base = OTHER; note = 2'-O-methyladenosine-3'-phosphate
  modified_base 5: mod_base = OTHER; note = 2'-O-methyluridine-3'-phosphate
  modified_base 6: mod_base = OTHER; note = 2'-O-docosanyl-uridine-3'-phosphate
  modified_base 7: mod_base = OTHER; note = 2'-deoxy-2'-fluoroguanosine-3'-phosphate
  modified_base 8: mod_base = OTHER; note = 2'-O-methylcytidine-3'-phosphate
  modified_base 9: mod_base = OTHER; note = 2'-deoxy-2'-fluorocytidine-3'-phosphate
  modified_base 10: mod_base = OTHER; note = 2'-deoxy-2'-fluorouridine-3'-phosphate
  modified_base 11: mod_base = OTHER; note = 2'-deoxy-2'-fluorouridine-3'-phosphate
  modified_base 12: mod_base = OTHER; note = 2'-O-methyladenosine-3'-phosphate
  modified_base 13: mod_base = OTHER; note = 2'-O-methyluridine-3'-phosphate
  modified_base 14: mod_base = OTHER; note = 2'-O-methyluridine-3'-phosphate
  modified_base 15: mod_base = OTHER; note = 2'-O-methyladenosine-3'-phosphate
  modified_base 16: mod_base = OTHER; note = 2'-O-methyluridine-3'-phosphate
  modified_base 17: mod_base = OTHER; note = 2'-O-methylguanosine-3'-phosphate
  modified_base 18: mod_base = OTHER; note = 2'-O-methyladenosine-3'-phosphate
  modified_base 19: mod_base = OTHER; note = 2'-O-methylcytidine-3'-phosphorothioate
  modified_base 20: mod_base = OTHER; note = 2'-O-methyladenosine-3'-phosphorothioate
  modified_base 21: mod_base = OTHER; note = 2'-O-methyladenosine
ccaattgccttattatgacaa

SEQ ID NO: 10804 - RNA, 21 nt, synthetic construct
  source 1..21: mol_type = other RNA
  modified_base 1: mod_base = OTHER; note = 2'-O-methylcytidine-3'-phosphorothioate
  modified_base 2: mod_base = OTHER; note = 2'-O-methyladenosine-3'-phosphorothioate
  modified_base 3: mod_base = OTHER; note = 2'-O-methyladenosine-3'-phosphate
  modified_base 4: mod_base = OTHER; note = 2'-O-methyluridine-3'-phosphate
  modified_base 5: mod_base = OTHER; note = 2'-O-methyluridine-3'-phosphate
  modified_base 6: mod_base = OTHER; note = 2'-O-docosanyl-guanosine-3'-phosphate
  modified_base 7: mod_base = OTHER; note = 2'-deoxy-2'-fluorocytidine-3'-phosphate
  modified_base 8: mod_base = OTHER; note = 2'-O-methylcytidine-3'-phosphate
  modified_base 9: mod_base = OTHER; note = 2'-deoxy-2'-fluorouridine-3'-phosphate
  modified_base 10: mod_base = OTHER; note = 2'-deoxy-2'-fluorouridine-3'-phosphate
  modified_base 11: mod_base = OTHER; note = 2'-deoxy-2'-fluoroadenosine-3'-phosphate
  modified_base 12: mod_base = OTHER; note = 2'-O-methyluridine-3'-phosphate
  modified_base 13: mod_base = OTHER; note = 2'-O-methyluridine-3'-phosphate
  modified_base 14: mod_base = OTHER; note = 2'-O-methyladenosine-3'-phosphate
  modified_base 15: mod_base = OTHER; note = 2'-O-methyluridine-3'-phosphate
  modified_base 16: mod_base = OTHER; note = 2'-O-methylguanosine-3'-phosphate
  modified_base 17: mod_base = OTHER; note = 2'-O-methyladenosine-3'-phosphate
  modified_base 18: mod_base = OTHER; note = 2'-O-methylcytidine-3'-phosphate
  modified_base 19: mod_base = OTHER; note = 2'-O-methyladenosine-3'-phosphorothioate
  modified_base 20: mod_base = OTHER; note = 2'-O-methyluridine-3'-phosphorothioate
  modified_base 21: mod_base = OTHER; note = 2'-O-methyladenosine
caattgccttattatgacata

SEQ ID NO: 10805 - RNA, 21 nt, synthetic construct
  source 1..21: mol_type = other RNA
  modified_base 1: mod_base = OTHER; note = 2'-O-methyladenosine-3'-phosphorothioate
  modified_base 2: mod_base = OTHER; note = 2'-O-methyladenosine-3'-phosphorothioate
  modified_base 3: mod_base = OTHER; note = 2'-O-methyluridine-3'-phosphate
  modified_base 4: mod_base = OTHER; note = 2'-O-methyluridine-3'-phosphate
  modified_base 5: mod_base = OTHER; note = 2'-O-methylguanosine-3'-phosphate
  modified_base 6: mod_base = OTHER; note = 2'-O-docosanyl-cytidine-3'-phosphate
  modified_base 7: mod_base = OTHER; note = 2'-deoxy-2'-fluorocytidine-3'-phosphate
  modified_base 8: mod_base = OTHER; note = 2'-O-methyluridine-3'-phosphate
  modified_base 9: mod_base = OTHER; note = 2'-deoxy-2'-fluorouridine-3'-phosphate
  modified_base 10: mod_base = OTHER; note = 2'-deoxy-2'-fluoroadenosine-3'-phosphate
  modified_base 11: mod_base = OTHER; note = 2'-deoxy-2'-fluorouridine-3'-phosphate
  modified_base 12: mod_base = OTHER; note = 2'-O-methyluridine-3'-phosphate
  modified_base 13: mod_base = OTHER; note = 2'-O-methyladenosine-3'-phosphate
  modified_base 14: mod_base = OTHER; note = 2'-O-methyluridine-3'-phosphate
  modified_base 15: mod_base = OTHER; note = 2'-O-methylguanosine-3'-phosphate
  modified_base 16: mod_base = OTHER; note = 2'-O-methyladenosine-3'-phosphate
  modified_base 17: mod_base = OTHER; note = 2'-O-methylcytidine-3'-phosphate
  modified_base 18: mod_base = OTHER; note = 2'-O-methyladenosine-3'-phosphate
  modified_base 19: mod_base = OTHER; note = 2'-O-methyluridine-3'-phosphorothioate
  modified_base 20: mod_base = OTHER; note = 2'-O-methylguanosine-3'-phosphorothioate
  modified_base 21: mod_base = OTHER; note = 2'-O-methyladenosine
aattgccttattatgacatga

SEQ ID NO: 10806 - RNA, 21 nt, synthetic construct
  source 1..21: mol_type = other RNA
  modified_base 1: mod_base = OTHER; note = 2'-O-methyladenosine-3'-phosphorothioate
  modified_base 2: mod_base = OTHER; note = 2'-O-methyluridine-3'-phosphorothioate
  modified_base 3: mod_base = OTHER; note = 2'-O-methyluridine-3'-phosphate
  modified_base 4: mod_base = OTHER; note = 2'-O-methylguanosine-3'-phosphate
  modified_base 5: mod_base = OTHER; note = 2'-O-methylcytidine-3'-phosphate
  modified_base 6: mod_base = OTHER; note = 2'-O-docosanyl-cytidine-3'-phosphate
  modified_base 7: mod_base = OTHER; note = 2'-deoxy-2'-fluorouridine-3'-phosphate
  modified_base 8: mod_base = OTHER; note = 2'-O-methyluridine-3'-phosphate
  modified_base 9: mod_base = OTHER; note = 2'-deoxy-2'-fluoroadenosine-3'-phosphate
  modified_base 10: mod_base = OTHER; note = 2'-deoxy-2'-fluorouridine-3'-phosphate
  modified_base 11: mod_base = OTHER; note = 2'-deoxy-2'-fluorouridine-3'-phosphate
  modified_base 12: mod_base = OTHER; note = 2'-O-methyladenosine-3'-phosphate
  modified_base 13: mod_base = OTHER; note = 2'-O-methyluridine-3'-phosphate
  modified_base 14: mod_base = OTHER; note = 2'-O-methylguanosine-3'-phosphate
  modified_base 15: mod_base = OTHER; note = 2'-O-methyladenosine-3'-phosphate
  modified_base 16: mod_base = OTHER; note = 2'-O-methylcytidine-3'-phosphate
  modified_base 17: mod_base = OTHER; note = 2'-O-methyladenosine-3'-phosphate
  modified_base 18: mod_base = OTHER; note = 2'-O-methyluridine-3'-phosphate
  modified_base 19: mod_base = OTHER; note = 2'-O-methylguanosine-3'-phosphorothioate
  modified_base 20: mod_base = OTHER; note = 2'-O-methylguanosine-3'-phosphorothioate
  modified_base 21: mod_base = OTHER; note = 2'-O-methyladenosine
attgccttattatgacatgga

SEQ ID NO: 10807 - RNA, 21 nt, synthetic construct
  source 1..21: mol_type = other RNA
  modified_base 1: mod_base = OTHER; note = 2'-O-methyluridine-3'-phosphorothioate
  modified_base 2: mod_base = OTHER; note = 2'-O-methyluridine-3'-phosphorothioate
  modified_base 3: mod_base = OTHER; note = 2'-O-methylguanosine-3'-phosphate
  modified_base 4: mod_base = OTHER; note = 2'-O-methylcytidine-3'-phosphate
  modified_base 5: mod_base = OTHER; note = 2'-O-methylcytidine-3'-phosphate
  modified_base 6: mod_base = OTHER; note = 2'-O-docosanyl-uridine-3'-phosphate
  modified_base 7: mod_base = OTHER; note = 2'-deoxy-2'-fluorouridine-3'-phosphate
  modified_base 8: mod_base = OTHER; note = 2'-O-methyladenosine-3'-phosphate
  modified_base 9: mod_base = OTHER; note = 2'-deoxy-2'-fluorouridine-3'-phosphate
  modified_base 10: mod_base = OTHER; note = 2'-deoxy-2'-fluorouridine-3'-phosphate
  modified_base 11: mod_base = OTHER; note = 2'-deoxy-2'-fluoroadenosine-3'-phosphate
  modified_base 12: mod_base = OTHER; note = 2'-O-methyluridine-3'-phosphate
  modified_base 13: mod_base = OTHER; note = 2'-O-methylguanosine-3'-phosphate
  modified_base 14: mod_base = OTHER; note = 2'-O-methyladenosine-3'-phosphate
  modified_base 15: mod_base = OTHER; note = 2'-O-methylcytidine-3'-phosphate
  modified_base 16: mod_base = OTHER; note = 2'-O-methyladenosine-3'-phosphate
  modified_base 17: mod_base = OTHER; note = 2'-O-methyluridine-3'-phosphate
  modified_base 18: mod_base = OTHER; note = 2'-O-methylguanosine-3'-phosphate
  modified_base 19: mod_base = OTHER; note = 2'-O-methylguanosine-3'-phosphorothioate
  modified_base 20: mod_base = OTHER; note = 2'-O-methyluridine-3'-phosphorothioate
  modified_base 21: mod_base = OTHER; note = 2'-O-methyladenosine
ttgccttattatgacatggta

SEQ ID NO: 10808 - RNA, 21 nt, synthetic construct
  source 1..21: mol_type = other RNA
  modified_base 1: mod_base = OTHER; note = 2'-O-methyluridine-3'-phosphorothioate
  modified_base 2: mod_base = OTHER; note = 2'-O-methylguanosine-3'-phosphorothioate
  modified_base 3: mod_base = OTHER; note = 2'-O-methylcytidine-3'-phosphate
  modified_base 4: mod_base = OTHER; note = 2'-O-methylcytidine-3'-phosphate
  modified_base 5: mod_base = OTHER; note = 2'-O-methyluridine-3'-phosphate
  modified_base 6: mod_base = OTHER; note = 2'-O-docosanyl-uridine-3'-phosphate
  modified_base 7: mod_base = OTHER; note = 2'-deoxy-2'-fluoroadenosine-3'-phosphate
  modified_base 8: mod_base = OTHER; note = 2'-O-methyluridine-3'-phosphate
  modified_base 9: mod_base = OTHER; note = 2'-deoxy-2'-fluorouridine-3'-phosphate
  modified_base 10: mod_base = OTHER; note = 2'-deoxy-2'-fluoroadenosine-3'-phosphate
  modified_base 11: mod_base = OTHER; note = 2'-deoxy-2'-fluorouridine-3'-phosphate
  modified_base 12: mod_base = OTHER; note = 2'-O-methylguanosine-3'-phosphate
  modified_base 13: mod_base = OTHER; note = 2'-O-methyladenosine-3'-phosphate
  modified_base 14: mod_base = OTHER; note = 2'-O-methylcytidine-3'-phosphate
  modified_base 15: mod_base = OTHER; note = 2'-O-methyladenosine-3'-phosphate
  modified_base 16: mod_base = OTHER; note = 2'-O-methyluridine-3'-phosphate
  modified_base 17: mod_base = OTHER; note = 2'-O-methylguanosine-3'-phosphate
  modified_base 18: mod_base = OTHER; note = 2'-O-methylguanosine-3'-phosphate
  modified_base 19: mod_base = OTHER; note = 2'-O-methyluridine-3'-phosphorothioate
  modified_base 20: mod_base = OTHER; note = 2'-O-methylguanosine-3'-phosphorothioate
  modified_base 21: mod_base = OTHER; note = 2'-O-methyladenosine
tgccttattatgacatggtga

SEQ ID NO: 10809 - RNA, 21 nt, synthetic construct
  source 1..21: mol_type = other RNA
  modified_base 1: mod_base = OTHER; note = 2'-O-methylguanosine-3'-phosphorothioate
  modified_base 2: mod_base = OTHER; note = 2'-O-methylcytidine-3'-phosphorothioate
  modified_base 3: mod_base = OTHER; note = 2'-O-methylcytidine-3'-phosphate
  modified_base 4: mod_base = OTHER; note = 2'-O-methyluridine-3'-phosphate
  modified_base 5: mod_base = OTHER; note = 2'-O-methyluridine-3'-phosphate
  modified_base 6: mod_base = OTHER; note = 2'-O-docosanyl-adenosine-3'-phosphate
  modified_base 7: mod_base = OTHER; note = 2'-deoxy-2'-fluorouridine-3'-phosphate
  modified_base 8: mod_base = OTHER; note = 2'-O-methyluridine-3'-phosphate
  modified_base 9: mod_base = OTHER; note = 2'-deoxy-2'-fluoroadenosine-3'-phosphate
  modified_base 10: mod_base = OTHER; note = 2'-deoxy-2'-fluorouridine-3'-phosphate
  modified_base 11: mod_base = OTHER; note = 2'-deoxy-2'-fluoroguanosine-3'-phosphate
  modified_base 12: mod_base = OTHER; note = 2'-O-methyladenosine-3'-phosphate
  modified_base 13: mod_base = OTHER; note = 2'-O-methylcytidine-3'-phosphate
  modified_base 14: mod_base = OTHER; note = 2'-O-methyladenosine-3'-phosphate
  modified_base 15: mod_base = OTHER; note = 2'-O-methyluridine-3'-phosphate
  modified_base 16: mod_base = OTHER; note = 2'-O-methylguanosine-3'-phosphate
  modified_base 17: mod_base = OTHER; note = 2'-O-methylguanosine-3'-phosphate
  modified_base 18: mod_base = OTHER; note = 2'-O-methyluridine-3'-phosphate
  modified_base 19: mod_base = OTHER; note = 2'-O-methylguanosine-3'-phosphorothioate
  modified_base 20: mod_base = OTHER; note = 2'-O-methylcytidine-3'-phosphorothioate
  modified_base 21: mod_base = OTHER; note = 2'-O-methyladenosine
gccttattatgacatggtgca

SEQ ID NO: 10810 - RNA, 21 nt, synthetic construct
  source 1..21: mol_type = other RNA
  modified_base 1: mod_base = OTHER; note = 2'-O-methylcytidine-3'-phosphorothioate
  modified_base 2: mod_base = OTHER; note = 2'-O-methylcytidine-3'-phosphorothioate
  modified_base 3: mod_base = OTHER; note = 2'-O-methyluridine-3'-phosphate
  modified_base 4: mod_base = OTHER; note = 2'-O-methyluridine-3'-phosphate
  modified_base 5: mod_base = OTHER; note = 2'-O-methyladenosine-3'-phosphate
  modified_base 6: mod_base = OTHER; note = 2'-O-docosanyl-uridine-3'-phosphate
  modified_base 7: mod_base = OTHER; note = 2'-deoxy-2'-fluorouridine-3'-phosphate
  modified_base 8: mod_base = OTHER; note = 2'-O-methyladenosine-3'-phosphate
  modified_base 9: mod_base = OTHER; note = 2'-deoxy-2'-fluorouridine-3'-phosphate
  modified_base 10: mod_base = OTHER; note = 2'-deoxy-2'-fluoroguanosine-3'-phosphate
  modified_base 11: mod_base = OTHER; note = 2'-deoxy-2'-fluoroadenosine-3'-phosphate
  modified_base 12: mod_base = OTHER; note = 2'-O-methylcytidine-3'-phosphate
  modified_base 13: mod_base = OTHER; note = 2'-O-methyladenosine-3'-phosphate
  modified_base 14: mod_base = OTHER; note = 2'-O-methyluridine-3'-phosphate
  modified_base 15: mod_base = OTHER; note = 2'-O-methylguanosine-3'-phosphate
  modified_base 16: mod_base = OTHER; note = 2'-O-methylguanosine-3'-phosphate
  modified_base 17: mod_base = OTHER; note = 2'-O-methyluridine-3'-phosphate
  modified_base 18: mod_base = OTHER; note = 2'-O-methylguanosine-3'-phosphate
  modified_base 19: mod_base = OTHER; note = 2'-O-methylcytidine-3'-phosphorothioate
  modified_base 20: mod_base = OTHER; note = 2'-O-methylcytidine-3'-phosphorothioate
  modified_base 21: mod_base = OTHER; note = 2'-O-methyladenosine
ccttattatgacatggtgcca

SEQ ID NO: 10811 - RNA, 21 nt, synthetic construct
  source 1..21: mol_type = other RNA
  modified_base 1: mod_base = OTHER; note = 2'-O-methylcytidine-3'-phosphorothioate
  modified_base 2: mod_base = OTHER; note = 2'-O-methyluridine-3'-phosphorothioate
  modified_base 3: mod_base = OTHER; note = 2'-O-methyluridine-3'-phosphate
  modified_base 4: mod_base = OTHER; note = 2'-O-methyladenosine-3'-phosphate
  modified_base 5: mod_base = OTHER; note = 2'-O-methyluridine-3'-phosphate
  modified_base 6: mod_base = OTHER; note = 2'-O-docosanyl-uridine-3'-phosphate
  modified_base 7: mod_base = OTHER; note = 2'-deoxy-2'-fluoroadenosine-3'-phosphate
  modified_base 8: mod_base = OTHER; note = 2'-O-methyluridine-3'-phosphate
  modified_base 9: mod_base = OTHER; note = 2'-deoxy-2'-fluoroguanosine-3'-phosphate
  modified_base 10: mod_base = OTHER; note = 2'-deoxy-2'-fluoroadenosine-3'-phosphate
  modified_base 11: mod_base = OTHER; note = 2'-deoxy-2'-fluorocytidine-3'-phosphate
  modified_base 12: mod_base = OTHER; note = 2'-O-methyladenosine-3'-phosphate
  modified_base 13: mod_base = OTHER; note = 2'-O-methyluridine-3'-phosphate
  modified_base 14: mod_base = OTHER; note = 2'-O-methylguanosine-3'-phosphate
  modified_base 15: mod_base = OTHER; note = 2'-O-methylguanosine-3'-phosphate
  modified_base 16: mod_base = OTHER; note = 2'-O-methyluridine-3'-phosphate
  modified_base 17: mod_base = OTHER; note = 2'-O-methylguanosine-3'-phosphate
  modified_base 18: mod_base = OTHER; note = 2'-O-methylcytidine-3'-phosphate
  modified_base 19: mod_base = OTHER; note = 2'-O-methylcytidine-3'-phosphorothioate
  modified_base 20: mod_base = OTHER; note = 2'-O-methyluridine-3'-phosphorothioate
  modified_base 21: mod_base = OTHER; note = 2'-O-methyladenosine
cttattatgacatggtgccta

SEQ ID NO: 10812 - RNA, 21 nt, synthetic construct
  source 1..21: mol_type = other RNA
  modified_base 1: mod_base = OTHER; note = 2'-O-methyluridine-3'-phosphorothioate
  modified_base 2: mod_base = OTHER; note = 2'-O-methyluridine-3'-phosphorothioate
  modified_base 3: mod_base = OTHER; note = 2'-O-methyladenosine-3'-phosphate
  modified_base 4: mod_base = OTHER; note = 2'-O-methyluridine-3'-phosphate
  modified_base 5: mod_base = OTHER; note = 2'-O-methyluridine-3'-phosphate
  modified_base 6: mod_base = OTHER; note = 2'-O-docosanyl-adenosine-3'-phosphate
  modified_base 7: mod_base = OTHER; note = 2'-deoxy-2'-fluorouridine-3'-phosphate
  modified_base 8: mod_base = OTHER; note = 2'-O-methylguanosine-3'-phosphate
  modified_base 9: mod_base = OTHER; note = 2'-deoxy-2'-fluoroadenosine-3'-phosphate
  modified_base 10: mod_base = OTHER; note = 2'-deoxy-2'-fluorocytidine-3'-phosphate
  modified_base 11: mod_base = OTHER; note = 2'-deoxy-2'-fluoroadenosine-3'-phosphate
  modified_base 12: mod_base = OTHER; note = 2'-O-methyluridine-3'-phosphate
  modified_base 13: mod_base = OTHER; note = 2'-O-methylguanosine-3'-phosphate
  modified_base 14: mod_base = OTHER; note = 2'-O-methylguanosine-3'-phosphate
  modified_base 15: mod_base = OTHER; note = 2'-O-methyluridine-3'-phosphate
  modified_base 16: mod_base = OTHER; note = 2'-O-methylguanosine-3'-phosphate
  modified_base 17: mod_base = OTHER; note = 2'-O-methylcytidine-3'-phosphate
  modified_base 18: mod_base = OTHER; note = 2'-O-methylcytidine-3'-phosphate
  modified_base 19: mod_base = OTHER; note = 2'-O-methyluridine-3'-phosphorothioate
  modified_base 20: mod_base = OTHER; note = 2'-O-methyluridine-3'-phosphorothioate
  modified_base 21: mod_base = OTHER; note = 2'-O-methyladenosine
ttattatgacatggtgcctta

SEQ ID NO: 10813 - RNA, 21 nt, synthetic construct
  source 1..21: mol_type = other RNA
  modified_base 1: mod_base = OTHER; note = 2'-O-methyluridine-3'-phosphorothioate
  modified_base 2: mod_base = OTHER; note = 2'-O-methyladenosine-3'-phosphorothioate
  modified_base 3: mod_base = OTHER; note = 2'-O-methyluridine-3'-phosphate
  modified_base 4: mod_base = OTHER; note = 2'-O-methyluridine-3'-phosphate
  modified_base 5: mod_base = OTHER; note = 2'-O-methyladenosine-3'-phosphate
  modified_base 6: mod_base = OTHER; note = 2'-O-docosanyl-uridine-3'-phosphate
  modified_base 7: mod_base = OTHER; note = 2'-deoxy-2'-fluoroguanosine-3'-phosphate
  modified_base 8: mod_base = OTHER; note = 2'-O-methyladenosine-3'-phosphate
  modified_base 9: mod_base = OTHER; note = 2'-deoxy-2'-fluorocytidine-3'-phosphate
  modified_base 10: mod_base = OTHER; note = 2'-deoxy-2'-fluoroadenosine-3'-phosphate
  modified_base 11: mod_base = OTHER; note = 2'-deoxy-2'-fluorouridine-3'-phosphate
  modified_base 12: mod_base = OTHER; note = 2'-O-methylguanosine-3'-phosphate
  modified_base 13: mod_base = OTHER; note = 2'-O-methylguanosine-3'-phosphate
  modified_base 14: mod_base = OTHER; note = 2'-O-methyluridine-3'-phosphate
  modified_base 15: mod_base = OTHER; note = 2'-O-methylguanosine-3'-phosphate
  modified_base 16: mod_base = OTHER; note = 2'-O-methylcytidine-3'-phosphate
  modified_base 17: mod_base = OTHER; note = 2'-O-methylcytidine-3'-phosphate
  modified_base 18: mod_base = OTHER; note = 2'-O-methyluridine-3'-phosphate
  modified_base 19: mod_base = OTHER; note = 2'-O-methyluridine-3'-phosphorothioate
  modified_base 20: mod_base = OTHER; note = 2'-O-methylcytidine-3'-phosphorothioate
  modified_base 21: mod_base = OTHER; note = 2'-O-methyladenosine
tattatgacatggtgccttca

SEQ ID NO: 10814 - RNA, 21 nt, synthetic construct
  source 1..21: mol_type = other RNA
  modified_base 1: mod_base = OTHER; note = 2'-O-methyladenosine-3'-phosphorothioate
  modified_base 2: mod_base = OTHER; note = 2'-O-methyluridine-3'-phosphorothioate
  modified_base 3: mod_base = OTHER; note = 2'-O-methyluridine-3'-phosphate
  modified_base 4: mod_base = OTHER; note = 2'-O-methyladenosine-3'-phosphate
  modified_base 5: mod_base = OTHER; note = 2'-O-methyluridine-3'-phosphate
  modified_base 6: mod_base = OTHER; note = 2'-O-docosanyl-guanosine-3'-phosphate
  modified_base 7: mod_base = OTHER; note = 2'-deoxy-2'-fluoroadenosine-3'-phosphate
  modified_base 8: mod_base = OTHER; note = 2'-O-methylcytidine-3'-phosphate
  modified_base 9: mod_base = OTHER; note = 2'-deoxy-2'-fluoroadenosine-3'-phosphate
  modified_base 10: mod_base = OTHER; note = 2'-deoxy-2'-fluorouridine-3'-phosphate
  modified_base 11: mod_base = OTHER; note = 2'-deoxy-2'-fluoroguanosine-3'-phosphate
  modified_base 12: mod_base = OTHER; note = 2'-O-methylguanosine-3'-phosphate
  modified_base 13: mod_base = OTHER; note = 2'-O-methyluridine-3'-phosphate
  modified_base 14: mod_base = OTHER; note = 2'-O-methylguanosine-3'-phosphate
  modified_base 15: mod_base = OTHER; note = 2'-O-methylcytidine-3'-phosphate
  modified_base 16: mod_base = OTHER; note = 2'-O-methylcytidine-3'-phosphate
  modified_base 17: mod_base = OTHER; note = 2'-O-methyluridine-3'-phosphate
  modified_base 18: mod_base = OTHER; note = 2'-O-methyluridine-3'-phosphate
  modified_base 19: mod_base = OTHER; note = 2'-O-methylcytidine-3'-phosphorothioate
  modified_base 20: mod_base = OTHER; note = 2'-O-methyladenosine-3'-phosphorothioate
  modified_base 21: mod_base = OTHER; note = 2'-O-methyladenosine
attatgacatggtgccttcaa

SEQ ID NO: 10815 - RNA, 21 nt, synthetic construct
  source 1..21: mol_type = other RNA
  modified_base 1: mod_base = OTHER; note = 2'-O-methyladenosine-3'-phosphorothioate
  modified_base 2: mod_base = OTHER; note = 2'-O-methyluridine-3'-phosphorothioate
  modified_base 3: mod_base = OTHER; note = 2'-O-methyladenosine-3'-phosphate
  modified_base 4: mod_base = OTHER; note = 2'-O-methylguanosine-3'-phosphate
  modified_base 5: mod_base = OTHER; note = 2'-O-methyladenosine-3'-phosphate
  modified_base 6: mod_base = OTHER; note = 2'-O-docosanyl-guanosine-3'-phosphate
  modified_base 7: mod_base = OTHER; note = 2'-deoxy-2'-fluoroguanosine-3'-phosphate
  modified_base 8: mod_base = OTHER; note = 2'-O-methyladenosine-3'-phosphate
  modified_base 9: mod_base = OTHER; note = 2'-deoxy-2'-fluoroadenosine-3'-phosphate
  modified_base 10: mod_base = OTHER; note = 2'-deoxy-2'-fluoroadenosine-3'-phosphate
  modified_base 11: mod_base = OTHER; note = 2'-deoxy-2'-fluorouridine-3'-phosphate
  modified_base 12: mod_base = OTHER; note = 2'-O-methylguanosine-3'-phosphate
  modified_base 13: mod_base = OTHER; note = 2'-O-methyladenosine-3'-phosphate
  modified_base 14: mod_base = OTHER; note = 2'-O-methylguanosine-3'-phosphate
  modified_base 15: mod_base = OTHER; note = 2'-O-methyladenosine-3'-phosphate
  modified_base 16: mod_base = OTHER; note = 2'-O-methyladenosine-3'-phosphate
  modified_base 17: mod_base = OTHER; note = 2'-O-methyladenosine-3'-phosphate
  modified_base 18: mod_base = OTHER; note = 2'-O-methylguanosine-3'-phosphate
  modified_base 19: mod_base = OTHER; note = 2'-O-methylguanosine-3'-phosphorothioate
  modified_base 20: mod_base = OTHER; note = 2'-O-methyluridine-3'-phosphorothioate
  modified_base 21: mod_base = OTHER; note = 2'-O-methyladenosine
atagaggaaatgagaaaggta

SEQ ID NO: 10816 - RNA, 21 nt, synthetic construct
  source 1..21: mol_type = other RNA
  modified_base 1: mod_base = OTHER; note = 2'-O-methylguanosine-3'-phosphorothioate
  modified_base 2: mod_base = OTHER; note = 2'-O-methyladenosine-3'-phosphorothioate
  modified_base 3: mod_base = OTHER; note = 2'-O-methylguanosine-3'-phosphate
  modified_base 4: mod_base = OTHER; note = 2'-O-methylguanosine-3'-phosphate
  modified_base 5: mod_base = OTHER; note = 2'-O-methyladenosine-3'-phosphate
  modified_base 6: mod_base = OTHER; note = 2'-O-docosanyl-adenosine-3'-phosphate
  modified_base 7: mod_base = OTHER; note = 2'-deoxy-2'-fluoroadenosine-3'-phosphate
  modified_base 8: mod_base = OTHER; note = 2'-O-methyluridine-3'-phosphate
  modified_base 9: mod_base = OTHER; note = 2'-deoxy-2'-fluoroguanosine-3'-phosphate
  modified_base 10: mod_base = OTHER; note = 2'-deoxy-2'-fluoroadenosine-3'-phosphate
  modified_base 11: mod_base = OTHER; note = 2'-deoxy-2'-fluoroguanosine-3'-phosphate
  modified_base 12: mod_base = OTHER; note = 2'-O-methyladenosine-3'-phosphate
  modified_base 13: mod_base = OTHER; note = 2'-O-methyladenosine-3'-phosphate
  modified_base 14: mod_base = OTHER; note = 2'-O-methyladenosine-3'-phosphate
  modified_base 15: mod_base = OTHER; note = 2'-O-methylguanosine-3'-phosphate
  modified_base 16: mod_base = OTHER; note = 2'-O-methylguanosine-3'-phosphate
  modified_base 17: mod_base = OTHER; note = 2'-O-methyluridine-3'-phosphate
  modified_base 18: mod_base = OTHER; note = 2'-O-methyluridine-3'-phosphate
  modified_base 19: mod_base = OTHER; note = 2'-O-methylguanosine-3'-phosphorothioate
  modified_base 20: mod_base = OTHER; note = 2'-O-methyluridine-3'-phosphorothioate
  modified_base 21: mod_base = OTHER; note = 2'-O-methyladenosine
gaggaaatgagaaaggttgta

SEQ ID NO: 10817 - RNA, 21 nt, synthetic construct
  source 1..21: mol_type = other RNA
  modified_base 1: mod_base = OTHER; note = 2'-O-methyladenosine-3'-phosphorothioate
  modified_base 2: mod_base = OTHER; note = 2'-O-methyladenosine-3'-phosphorothioate
  modified_base 3: mod_base = OTHER; note = 2'-O-methylguanosine-3'-phosphate
  modified_base 4: mod_base = OTHER; note = 2'-O-methylguanosine-3'-phosphate
  modified_base 5: mod_base = OTHER; note = 2'-O-methyluridine-3'-phosphate
  modified_base 6: mod_base = OTHER; note = 2'-O-docosanyl-uridine-3'-phosphate
  modified_base 7: mod_base = OTHER; note = 2'-deoxy-2'-fluoroguanosine-3'-phosphate
  modified_base 8: mod_base = OTHER; note = 2'-O-methyluridine-3'-phosphate
  modified_base 9: mod_base = OTHER; note = 2'-deoxy-2'-fluorouridine-3'-phosphate
  modified_base 10: mod_base = OTHER; note = 2'-deoxy-2'-fluorouridine-3'-phosphate
  modified_base 11: mod_base = OTHER; note = 2'-deoxy-2'-fluoroguanosine-3'-phosphate
  modified_base 12: mod_base = OTHER; note = 2'-O-methyluridine-3'-phosphate
  modified_base 13: mod_base = OTHER; note = 2'-O-methylguanosine-3'-phosphate
  modified_base 14: mod_base = OTHER; note = 2'-O-methyladenosine-3'-phosphate
  modified_base 15: mod_base = OTHER; note = 2'-O-methylcytidine-3'-phosphate
  modified_base 16: mod_base = OTHER; note = 2'-O-methylcytidine-3'-phosphate
  modified_base 17: mod_base = OTHER; note = 2'-O-methyladenosine-3'-phosphate
  modified_base 18: mod_base = OTHER; note = 2'-O-methylguanosine-3'-phosphate
  modified_base 19: mod_base = OTHER; note = 2'-O-methyladenosine-3'-phosphorothioate
  modified_base 20: mod_base = OTHER; note = 2'-O-methyladenosine-3'-phosphorothioate
  modified_base 21: mod_base = OTHER; note = 2'-O-methyladenosine
aaggttgtttgtgaccagaaa

SEQ ID NO: 10818 - RNA, 21 nt, synthetic construct
  source 1..21: mol_type = other RNA
  modified_base 1: mod_base = OTHER; note = 2'-O-methyladenosine-3'-phosphorothioate
  modified_base 2: mod_base = OTHER; note = 2'-O-methylguanosine-3'-phosphorothioate
  modified_base 3: mod_base = OTHER; note = 2'-O-methylguanosine-3'-phosphate
  modified_base 4: mod_base = OTHER; note = 2'-O-methyladenosine-3'-phosphate
  modified_base 5: mod_base = OTHER; note = 2'-O-methyladenosine-3'-phosphate
  modified_base 6: mod_base = OTHER; note = 2'-O-docosanyl-adenosine-3'-phosphate
  modified_base 7: mod_base = OTHER; note = 2'-deoxy-2'-fluorouridine-3'-phosphate
  modified_base 8: mod_base = OTHER; note = 2'-O-methylguanosine-3'-phosphate
  modified_base 9: mod_base = OTHER; note = 2'-deoxy-2'-fluoroadenosine-3'-phosphate
  modified_base 10: mod_base = OTHER; note = 2'-deoxy-2'-fluoroguanosine-3'-phosphate
  modified_base 11: mod_base = OTHER; note = 2'-deoxy-2'-fluoroadenosine-3'-phosphate
  modified_base 12: mod_base = OTHER; note = 2'-O-methyladenosine-3'-phosphate
  modified_base 13: mod_base = OTHER; note = 2'-O-methyladenosine-3'-phosphate
  modified_base 14: mod_base = OTHER; note = 2'-O-methylguanosine-3'-phosphate
  modified_base 15: mod_base = OTHER; note = 2'-O-methylguanosine-3'-phosphate
  modified_base 16: mod_base = OTHER; note = 2'-O-methyluridine-3'-phosphate
  modified_base 17: mod_base = OTHER; note = 2'-O-methyluridine-3'-phosphate
  modified_base 18: mod_base = OTHER; note = 2'-O-methylguanosine-3'-phosphate
  modified_base 19: mod_base = OTHER; note = 2'-O-methyluridine-3'-phosphorothioate
  modified_base 20: mod_base = OTHER; note = 2'-O-methyluridine-3'-phosphorothioate
  modified_base 21: mod_base = OTHER; note = 2'-O-methyladenosine
aggaaatgagaaaggttgtta

SEQ ID NO: 10819 - RNA, 21 nt, synthetic construct
  source 1..21: mol_type = other RNA
  modified_base 1: mod_base = OTHER; note = 2'-O-methylguanosine-3'-phosphorothioate
  modified_base 2: mod_base = OTHER; note = 2'-O-methylguanosine-3'-phosphorothioate
  modified_base 3: mod_base = OTHER; note = 2'-O-methyladenosine-3'-phosphate
  modified_base 4: mod_base = OTHER; note = 2'-O-methyladenosine-3'-phosphate
  modified_base 5: mod_base = OTHER; note = 2'-O-methyladenosine-3'-phosphate
  modified_base 6: mod_base = OTHER; note = 2'-O-docosanyl-uridine-3'-phosphate
  modified_base 7: mod_base = OTHER; note = 2'-deoxy-2'-fluoroguanosine-3'-phosphate
  modified_base 8: mod_base = OTHER; note = 2'-O-methyladenosine-3'-phosphate
  modified_base 9: mod_base = OTHER; note = 2'-deoxy-2'-fluoroguanosine-3'-phosphate
  modified_base 10: mod_base = OTHER; note = 2'-deoxy-2'-fluoroadenosine-3'-phosphate
  modified_base 11: mod_base = OTHER; note = 2'-deoxy-2'-fluoroadenosine-3'-phosphate
  modified_base 12: mod_base = OTHER; note = 2'-O-methyladenosine-3'-phosphate
  modified_base 13: mod_base = OTHER; note = 2'-O-methylguanosine-3'-phosphate
  modified_base 14: mod_base = OTHER; note = 2'-O-methylguanosine-3'-phosphate
  modified_base 15: mod_base = OTHER; note = 2'-O-methyluridine-3'-phosphate
  modified_base 16: mod_base = OTHER; note = 2'-O-methyluridine-3'-phosphate
  modified_base 17: mod_base = OTHER; note = 2'-O-methylguanosine-3'-phosphate
  modified_base 18: mod_base = OTHER; note = 2'-O-methyluridine-3'-phosphate
  modified_base 19: mod_base = OTHER; note = 2'-O-methyluridine-3'-phosphorothioate
  modified_base 20: mod_base = OTHER; note = 2'-O-methyluridine-3'-phosphorothioate
  modified_base 21: mod_base = OTHER; note = 2'-O-methyladenosine
ggaaatgagaaaggttgttta

SEQ ID NO: 10820 - RNA, 21 nt, synthetic construct
  source 1..21: mol_type = other RNA
  modified_base 1: mod_base = OTHER; note = 2'-O-methylguanosine-3'-phosphorothioate
  modified_base 2: mod_base = OTHER; note = 2'-O-methyladenosine-3'-phosphorothioate
  modified_base 3: mod_base = OTHER; note = 2'-O-methyladenosine-3'-phosphate
  modified_base 4: mod_base = OTHER; note = 2'-O-methyladenosine-3'-phosphate
  modified_base 5: mod_base = OTHER; note = 2'-O-methyluridine-3'-phosphate
  modified_base 6: mod_base = OTHER; note = 2'-O-docosanyl-guanosine-3'-phosphate
  modified_base 7: mod_base = OTHER; note = 2'-deoxy-2'-fluoroadenosine-3'-phosphate
  modified_base 8: mod_base = OTHER; note = 2'-O-methylguanosine-3'-phosphate
  modified_base 9: mod_base = OTHER; note = 2'-deoxy-2'-fluoroadenosine-3'-phosphate
  modified_base 10: mod_base = OTHER; note = 2'-deoxy-2'-fluoroadenosine-3'-phosphate
  modified_base 11: mod_base = OTHER; note = 2'-deoxy-2'-fluoroadenosine-3'-phosphate
  modified_base 12: mod_base = OTHER; note = 2'-O-methylguanosine-3'-phosphate
  modified_base 13: mod_base = OTHER; note = 2'-O-methylguanosine-3'-phosphate
  modified_base 14: mod_base = OTHER; note = 2'-O-methyluridine-3'-phosphate
  modified_base 15: mod_base = OTHER; note = 2'-O-methyluridine-3'-phosphate
  modified_base 16: mod_base = OTHER; note = 2'-O-methylguanosine-3'-phosphate
  modified_base 17: mod_base = OTHER; note = 2'-O-methyluridine-3'-phosphate
  modified_base 18: mod_base = OTHER; note = 2'-O-methyluridine-3'-phosphate
  modified_base 19: mod_base = OTHER; note = 2'-O-methyluridine-3'-phosphorothioate
  modified_base 20: mod_base = OTHER; note = 2'-O-methylguanosine-3'-phosphorothioate
  modified_base 21: mod_base = OTHER; note = 2'-O-methyladenosine
gaaatgagaaaggttgtttga

SEQ ID NO: 10821 - RNA, 21 nt, synthetic construct
  source 1..21: mol_type = other RNA
  modified_base 1: mod_base = OTHER; note = 2'-O-methyladenosine-3'-phosphorothioate
  modified_base 2: mod_base = OTHER; note = 2'-O-methyladenosine-3'-phosphorothioate
  modified_base 3: mod_base = OTHER; note = 2'-O-methyladenosine-3'-phosphate
  modified_base 4: mod_base = OTHER; note = 2'-O-methyluridine-3'-phosphate
  modified_base 5: mod_base = OTHER; note = 2'-O-methylguanosine-3'-phosphate
  modified_base 6: mod_base = OTHER; note = 2'-O-docosanyl-adenosine-3'-phosphate
  modified_base 7: mod_base = OTHER; note = 2'-deoxy-2'-fluoroguanosine-3'-phosphate
  modified_base 8: mod_base = OTHER; note = 2'-O-methyladenosine-3'-phosphate
  modified_base 9: mod_base = OTHER; note = 2'-deoxy-2'-fluoroadenosine-3'-phosphate
  modified_base 10: mod_base = OTHER; note = 2'-deoxy-2'-fluoroadenosine-3'-phosphate
  modified_base 11: mod_base = OTHER; note = 2'-deoxy-2'-fluoroguanosine-3'-phosphate
  modified_base 12: mod_base = OTHER; note = 2'-O-methylguanosine-3'-phosphate
  modified_base 13: mod_base = OTHER; note = 2'-O-methyluridine-3'-phosphate
  modified_base 14: mod_base = OTHER; note = 2'-O-methyluridine-3'-phosphate
  modified_base 15: mod_base = OTHER; note = 2'-O-methylguanosine-3'-phosphate
  modified_base 16: mod_base = OTHER; note = 2'-O-methyluridine-3'-phosphate
  modified_base 17: mod_base = OTHER; note = 2'-O-methyluridine-3'-phosphate
  modified_base 18: mod_base = OTHER; note = 2'-O-methyluridine-3'-phosphate
  modified_base 19: mod_base = OTHER; note = 2'-O-methylguanosine-3'-phosphorothioate
  modified_base 20: mod_base = OTHER; note = 2'-O-methyluridine-3'-phosphorothioate
  modified_base 21: mod_base = OTHER; note = 2'-O-methyladenosine
aaatgagaaaggttgtttgta

SEQ ID NO: 10822 - RNA, 21 nt, synthetic construct
  source 1..21: mol_type = other RNA
  modified_base 1: mod_base = OTHER; note = 2'-O-methyladenosine-3'-phosphorothioate
  modified_base 2: mod_base = OTHER; note = 2'-O-methyladenosine-3'-phosphorothioate
  modified_base 3: mod_base = OTHER; note = 2'-O-methyluridine-3'-phosphate
  modified_base 4: mod_base = OTHER; note = 2'-O-methylguanosine-3'-phosphate
  modified_base 5: mod_base = OTHER; note = 2'-O-methyladenosine-3'-phosphate
  modified_base 6: mod_base = OTHER; note = 2'-O-docosanyl-guanosine-3'-phosphate
  modified_base 7: mod_base = OTHER; note = 2'-deoxy-2'-fluoroadenosine-3'-phosphate
  modified_base 8: mod_base = OTHER; note = 2'-O-methyladenosine-3'-phosphate
  modified_base 9: mod_base = OTHER; note = 2'-deoxy-2'-fluoroadenosine-3'-phosphate
  modified_base 10: mod_base = OTHER; note = 2'-deoxy-2'-fluoroguanosine-3'-phosphate
  modified_base 11: mod_base = OTHER; note = 2'-deoxy-2'-fluoroguanosine-3'-phosphate
  modified_base 12: mod_base = OTHER; note = 2'-O-methyluridine-3'-phosphate
  modified_base 13: mod_base = OTHER; note = 2'-O-methyluridine-3'-phosphate
  modified_base 14: mod_base = OTHER; note = 2'-O-methylguanosine-3'-phosphate
  modified_base 15: mod_base = OTHER; note = 2'-O-methyluridine-3'-phosphate
  modified_base 16: mod_base = OTHER; note = 2'-O-methyluridine-3'-phosphate
  modified_base 17: mod_base = OTHER; note = 2'-O-methyluridine-3'-phosphate
  modified_base 18: mod_base = OTHER; note = 2'-O-methylguanosine-3'-phosphate
  modified_base 19: mod_base = OTHER; note = 2'-O-methyluridine-3'-phosphorothioate
  modified_base 20: mod_base = OTHER; note = 2'-O-methylguanosine-3'-phosphorothioate
  modified_base 21: mod_base = OTHER; note = 2'-O-methyladenosine
aatgagaaaggttgtttgtga

SEQ ID NO: 10823 - RNA, 21 nt, synthetic construct
  source 1..21: mol_type = other RNA
  modified_base 1: mod_base = OTHER; note = 2'-O-methyladenosine-3'-phosphorothioate
  modified_base 2: mod_base = OTHER; note = 2'-O-methyluridine-3'-phosphorothioate
  modified_base 3: mod_base = OTHER; note = 2'-O-methylguanosine-3'-phosphate
  modified_base 4: mod_base = OTHER; note = 2'-O-methyladenosine-3'-phosphate
  modified_base 5: mod_base = OTHER; note = 2'-O-methylguanosine-3'-phosphate
  modified_base 6: mod_base = OTHER; note = 2'-O-docosanyl-adenosine-3'-phosphate
  modified_base 7: mod_base = OTHER; note = 2'-deoxy-2'-fluoroadenosine-3'-phosphate
  modified_base 8: mod_base = OTHER; note = 2'-O-methyladenosine-3'-phosphate
  modified_base 9: mod_base = OTHER; note = 2'-deoxy-2'-fluoroguanosine-3'-phosphate
  modified_base 10: mod_base = OTHER; note = 2'-deoxy-2'-fluoroguanosine-3'-phosphate
  modified_base 11: mod_base = OTHER; note = 2'-deoxy-2'-fluorouridine-3'-phosphate
  modified_base 12: mod_base = OTHER; note = 2'-O-methyluridine-3'-phosphate
  modified_base 13: mod_base = OTHER; note = 2'-O-methylguanosine-3'-phosphate
  modified_base 14: mod_base = OTHER; note = 2'-O-methyluridine-3'-phosphate
  modified_base 15: mod_base = OTHER; note = 2'-O-methyluridine-3'-phosphate
  modified_base 16: mod_base = OTHER; note = 2'-O-methyluridine-3'-phosphate
  modified_base 17: mod_base = OTHER; note = 2'-O-methylguanosine-3'-phosphate
  modified_base 18: mod_base = OTHER; note = 2'-O-methyluridine-3'-phosphate
  modified_base 19: mod_base = OTHER; note = 2'-O-methylguanosine-3'-phosphorothioate
  modified_base 20: mod_base = OTHER; note = 2'-O-methyladenosine-3'-phosphorothioate
  modified_base 21: mod_base = OTHER; note = 2'-O-methyladenosine
atgagaaaggttgtttgtgaa

SEQ ID NO: 10824 - RNA, 21 nt, synthetic construct
  source 1..21: mol_type = other RNA
  modified_base 1: mod_base = OTHER; note = 2'-O-methyluridine-3'-phosphorothioate
  modified_base 2: mod_base = OTHER; note = 2'-O-methylguanosine-3'-phosphorothioate
  modified_base 3: mod_base = OTHER; note = 2'-O-methyladenosine-3'-phosphate
  modified_base 4: mod_base = OTHER; note = 2'-O-methylguanosine-3'-phosphate
  modified_base 5: mod_base = OTHER; note = 2'-O-methyladenosine-3'-phosphate
  modified_base 6: mod_base = OTHER; note = 2'-O-docosanyl-adenosine-3'-phosphate
  modified_base 7: mod_base = OTHER; note = 2'-deoxy-2'-fluoroadenosine-3'-phosphate
  modified_base 8: mod_base = OTHER; note = 2'-O-methylguanosine-3'-phosphate
  modified_base 9: mod_base = OTHER; note = 2'-deoxy-2'-fluoroguanosine-3'-phosphate
  modified_base 10: mod_base = OTHER; note = 2'-deoxy-2'-fluorouridine-3'-phosphate
  modified_base 11: mod_base = OTHER; note = 2'-deoxy-2'-fluorouridine-3'-phosphate
  modified_base 12: mod_base = OTHER; note = 2'-O-methylguanosine-3'-phosphate
  modified_base 13: mod_base = OTHER; note = 2'-O-methyluridine-3'-phosphate
  modified_base 14: mod_base = OTHER; note = 2'-O-methyluridine-3'-phosphate
  modified_base 15: mod_base = OTHER; note = 2'-O-methyluridine-3'-phosphate
  modified_base 16: mod_base = OTHER; note = 2'-O-methylguanosine-3'-phosphate
  modified_base 17: mod_base = OTHER; note = 2'-O-methyluridine-3'-phosphate
  modified_base 18: mod_base = OTHER; note = 2'-O-methylguanosine-3'-phosphate
  modified_base 19: mod_base = OTHER; note = 2'-O-methyladenosine-3'-phosphorothioate
  modified_base 20: mod_base = OTHER; note = 2'-O-methylcytidine-3'-phosphorothioate
  modified_base 21: mod_base = OTHER; note = 2'-O-methyladenosine
tgagaaaggttgtttgtgaca

SEQ ID NO: 10825 - RNA, 21 nt, synthetic construct
  source 1..21: mol_type = other RNA
  modified_base 1: mod_base = OTHER; note = 2'-O-methylguanosine-3'-phosphorothioate
  modified_base 2: mod_base = OTHER; note = 2'-O-methyladenosine-3'-phosphorothioate
  modified_base 3: mod_base = OTHER; note = 2'-O-methylguanosine-3'-phosphate
  modified_base 4: mod_base = OTHER; note = 2'-O-methyladenosine-3'-phosphate
  modified_base 5: mod_base = OTHER; note = 2'-O-methyladenosine-3'-phosphate
  modified_base 6: mod_base = OTHER; note = 2'-O-docosanyl-adenosine-3'-phosphate
  modified_base 7: mod_base = OTHER; note = 2'-deoxy-2'-fluoroguanosine-3'-phosphate
  modified_base 8: mod_base = OTHER; note = 2'-O-methylguanosine-3'-phosphate
  modified_base 9: mod_base = OTHER; note = 2'-deoxy-2'-fluorouridine-3'-phosphate
  modified_base 10: mod_base = OTHER; note = 2'-deoxy-2'-fluorouridine-3'-phosphate
  modified_base 11: mod_base = OTHER; note = 2'-deoxy-2'-fluoroguanosine-3'-phosphate
  modified_base 12: mod_base = OTHER; note = 2'-O-methyluridine-3'-phosphate
  modified_base 13: mod_base = OTHER; note = 2'-O-methyluridine-3'-phosphate
  modified_base 14: mod_base = OTHER; note = 2'-O-methyluridine-3'-phosphate
  modified_base 15: mod_base = OTHER; note = 2'-O-methylguanosine-3'-phosphate
  modified_base 16: mod_base = OTHER; note = 2'-O-methyluridine-3'-phosphate
  modified_base 17: mod_base = OTHER; note = 2'-O-methylguanosine-3'-phosphate
  modified_base 18: mod_base = OTHER; note = 2'-O-methyladenosine-3'-phosphate
  modified_base 19: mod_base = OTHER; note = 2'-O-methylcytidine-3'-phosphorothioate
  modified_base 20: mod_base = OTHER; note = 2'-O-methylcytidine-3'-phosphorothioate
  modified_base 21: mod_base = OTHER; note = 2'-O-methyladenosine
gagaaaggttgtttgtgacca

SEQ ID NO: 10826 - RNA, 21 nt, synthetic construct
  source 1..21: mol_type = other RNA
  modified_base 1: mod_base = OTHER; note = 2'-O-methyladenosine-3'-phosphorothioate
  modified_base 2: mod_base = OTHER; note = 2'-O-methylguanosine-3'-phosphorothioate
  modified_base 3: mod_base = OTHER; note = 2'-O-methyladenosine-3'-phosphate
  modified_base 4: mod_base = OTHER; note = 2'-O-methyladenosine-3'-phosphate
  modified_base 5: mod_base = OTHER; note = 2'-O-methyladenosine-3'-phosphate
  modified_base 6: mod_base = OTHER; note = 2'-O-docosanyl-guanosine-3'-phosphate
  modified_base 7: mod_base = OTHER; note = 2'-deoxy-2'-fluoroguanosine-3'-phosphate
  modified_base 8: mod_base = OTHER; note = 2'-O-methyluridine-3'-phosphate
  modified_base 9: mod_base = OTHER; note = 2'-deoxy-2'-fluorouridine-3'-phosphate
  modified_base 10: mod_base = OTHER; note = 2'-deoxy-2'-fluoroguanosine-3'-phosphate
  modified_base 11: mod_base = OTHER; note = 2'-deoxy-2'-fluorouridine-3'-phosphate
  modified_base 12: mod_base = OTHER; note = 2'-O-methyluridine-3'-phosphate
  modified_base 13: mod_base = OTHER; note = 2'-O-methyluridine-3'-phosphate
  modified_base 14: mod_base = OTHER; note = 2'-O-methylguanosine-3'-phosphate
  modified_base 15: mod_base = OTHER; note = 2'-O-methyluridine-3'-phosphate
  modified_base 16: mod_base = OTHER; note = 2'-O-methylguanosine-3'-phosphate
  modified_base 17: mod_base = OTHER; note = 2'-O-methyladenosine-3'-phosphate
  modified_base 18: mod_base = OTHER; note = 2'-O-methylcytidine-3'-phosphate
  modified_base 19: mod_base = OTHER; note = 2'-O-methylcytidine-3'-phosphorothioate
  modified_base 20: mod_base = OTHER; note = 2'-O-methyladenosine-3'-phosphorothioate
  modified_base 21: mod_base = OTHER; note = 2'-O-methyladenosine
agaaaggttgtttgtgaccaa

SEQ ID NO: 10827 - RNA, 21 nt, synthetic construct
  source 1..21: mol_type = other RNA
  modified_base 1: mod_base = OTHER; note = 2'-O-methylguanosine-3'-phosphorothioate
  modified_base 2: mod_base = OTHER; note = 2'-O-methyladenosine-3'-phosphorothioate
  modified_base 3: mod_base = OTHER; note = 2'-O-methyladenosine-3'-phosphate
  modified_base 4: mod_base = OTHER; note = 2'-O-methyladenosine-3'-phosphate
  modified_base 5: mod_base = OTHER; note = 2'-O-methylguanosine-3'-phosphate
  modified_base 6: mod_base = OTHER; note = 2'-O-docosanyl-guanosine-3'-phosphate
  modified_base 7: mod_base = OTHER; note = 2'-deoxy-2'-fluorouridine-3'-phosphate
  modified_base 8: mod_base = OTHER; note = 2'-O-methyluridine-3'-phosphate
  modified_base 9: mod_base = OTHER; note = 2'-deoxy-2'-fluoroguanosine-3'-phosphate
  modified_base 10: mod_base = OTHER; note = 2'-deoxy-2'-fluorouridine-3'-phosphate
  modified_base 11: mod_base = OTHER; note = 2'-deoxy-2'-fluorouridine-3'-phosphate
  modified_base 12: mod_base = OTHER; note = 2'-O-methyluridine-3'-phosphate
  modified_base 13: mod_base = OTHER; note = 2'-O-methylguanosine-3'-phosphate
  modified_base 14: mod_base = OTHER; note = 2'-O-methyluridine-3'-phosphate
  modified_base 15: mod_base = OTHER; note = 2'-O-methylguanosine-3'-phosphate
  modified_base 16: mod_base = OTHER; note = 2'-O-methyladenosine-3'-phosphate
  modified_base 17: mod_base = OTHER; note = 2'-O-methylcytidine-3'-phosphate
  modified_base 18: mod_base = OTHER; note = 2'-O-methylcytidine-3'-phosphate
  modified_base 19: mod_base = OTHER; note = 2'-O-methyladenosine-3'-phosphorothioate
  modified_base 20: mod_base = OTHER; note = 2'-O-methylguanosine-3'-phosphorothioate
  modified_base 21: mod_base = OTHER; note = 2'-O-methyladenosine
gaaaggttgtttgtgaccaga

SEQ ID NO: 10828 - RNA, 21 nt, synthetic construct
  source 1..21: mol_type = other RNA
  modified_base 1: mod_base = OTHER; note = 2'-O-methyladenosine-3'-phosphorothioate
  modified_base 2: mod_base = OTHER; note = 2'-O-methyladenosine-3'-phosphorothioate
  modified_base 3: mod_base = OTHER; note = 2'-O-methyladenosine-3'-phosphate
  modified_base 4: mod_base = OTHER; note = 2'-O-methylguanosine-3'-phosphate
  modified_base 5: mod_base = OTHER; note = 2'-O-methylguanosine-3'-phosphate
  modified_base 6: mod_base = OTHER; note = 2'-O-docosanyl-uridine-3'-phosphate
  modified_base 7: mod_base = OTHER; note = 2'-deoxy-2'-fluorouridine-3'-phosphate
  modified_base 8: mod_base = OTHER; note = 2'-O-methylguanosine-3'-phosphate
  modified_base 9: mod_base = OTHER; note = 2'-deoxy-2'-fluorouridine-3'-phosphate
  modified_base 10: mod_base = OTHER; note = 2'-deoxy-2'-fluorouridine-3'-phosphate
  modified_base 11: mod_base = OTHER; note = 2'-deoxy-2'-fluorouridine-3'-phosphate
  modified_base 12: mod_base = OTHER; note = 2'-O-methylguanosine-3'-phosphate
  modified_base 13: mod_base = OTHER; note = 2'-O-methyluridine-3'-phosphate
  modified_base 14: mod_base = OTHER; note = 2'-O-methylguanosine-3'-phosphate
  modified_base 15: mod_base = OTHER; note = 2'-O-methyladenosine-3'-phosphate
  modified_base 16: mod_base = OTHER; note = 2'-O-methylcytidine-3'-phosphate
  modified_base 17: mod_base = OTHER; note = 2'-O-methylcytidine-3'-phosphate
  modified_base 18: mod_base = OTHER; note = 2'-O-methyladenosine-3'-phosphate
  modified_base 19: mod_base = OTHER; note = 2'-O-methylguanosine-3'-phosphorothioate
  modified_base 20: mod_base = OTHER; note = 2'-O-methyladenosine-3'-phosphorothioate
  modified_base 21: mod_base = OTHER; note = 2'-O-methyladenosine
aaaggttgtttgtgaccagaa

SEQ ID NO: 10829 - RNA, 21 nt, synthetic construct
  source 1..21: mol_type = other RNA
  modified_base 1: mod_base = OTHER; note = 2'-O-methyladenosine-3'-phosphorothioate
  modified_base 2: mod_base = OTHER; note = 2'-O-methylguanosine-3'-phosphorothioate
  modified_base 3: mod_base = OTHER; note = 2'-O-methylguanosine-3'-phosphate
  modified_base 4: mod_base = OTHER; note = 2'-O-methyluridine-3'-phosphate
  modified_base 5: mod_base = OTHER; note = 2'-O-methyluridine-3'-phosphate
  modified_base 6: mod_base = OTHER; note = 2'-O-docosanyl-guanosine-3'-phosphate
  modified_base 7: mod_base = OTHER; note = 2'-deoxy-2'-fluorouridine-3'-phosphate
  modified_base 8: mod_base = OTHER; note = 2'-O-methyluridine-3'-phosphate
  modified_base 9: mod_base = OTHER; note = 2'-deoxy-2'-fluorouridine-3'-phosphate
  modified_base 10: mod_base = OTHER; note = 2'-deoxy-2'-fluoroguanosine-3'-phosphate
  modified_base 11: mod_base = OTHER; note = 2'-deoxy-2'-fluorouridine-3'-phosphate
  modified_base 12: mod_base = OTHER; note = 2'-O-methylguanosine-3'-phosphate
  modified_base 13: mod_base = OTHER; note = 2'-O-methyladenosine-3'-phosphate
  modified_base 14: mod_base = OTHER; note = 2'-O-methylcytidine-3'-phosphate
  modified_base 15: mod_base = OTHER; note = 2'-O-methylcytidine-3'-phosphate
  modified_base 16: mod_base = OTHER; note = 2'-O-methyladenosine-3'-phosphate
  modified_base 17: mod_base = OTHER; note = 2'-O-methylguanosine-3'-phosphate
  modified_base 18: mod_base = OTHER; note = 2'-O-methyladenosine-3'-phosphate
  modified_base 19: mod_base = OTHER; note = 2'-O-methyladenosine-3'-phosphorothioate
  modified_base 20: mod_base = OTHER; note = 2'-O-methylguanosine-3'-phosphorothioate
  modified_base 21: mod_base = OTHER; note = 2'-O-methyladenosine
aggttgtttgtgaccagaaga

SEQ ID NO: 10830 - RNA, 21 nt, synthetic construct
  source 1..21: mol_type = other RNA
  modified_base 1: mod_base = OTHER; note = 2'-O-methylguanosine-3'-phosphorothioate
  modified_base 2: mod_base = OTHER; note = 2'-O-methylguanosine-3'-phosphorothioate
  modified_base 3: mod_base = OTHER; note = 2'-O-methyluridine-3'-phosphate
  modified_base 4: mod_base = OTHER; note = 2'-O-methyluridine-3'-phosphate
  modified_base 5: mod_base = OTHER; note = 2'-O-methylguanosine-3'-phosphate
  modified_base 6: mod_base = OTHER; note = 2'-O-docosanyl-uridine-3'-phosphate
  modified_base 7: mod_base = OTHER; note = 2'-deoxy-2'-fluorouridine-3'-phosphate
  modified_base 8: mod_base = OTHER; note = 2'-O-methyluridine-3'-phosphate
  modified_base 9: mod_base = OTHER; note = 2'-deoxy-2'-fluoroguanosine-3'-phosphate
  modified_base 10: mod_base = OTHER; note = 2'-deoxy-2'-fluorouridine-3'-phosphate
  modified_base 11: mod_base = OTHER; note = 2'-deoxy-2'-fluoroguanosine-3'-phosphate
  modified_base 12: mod_base = OTHER; note = 2'-O-methyladenosine-3'-phosphate
  modified_base 13: mod_base = OTHER; note = 2'-O-methylcytidine-3'-phosphate
  modified_base 14: mod_base = OTHER; note = 2'-O-methylcytidine-3'-phosphate
  modified_base 15: mod_base = OTHER; note = 2'-O-methyladenosine-3'-phosphate
  modified_base 16: mod_base = OTHER; note = 2'-O-methylguanosine-3'-phosphate
  modified_base 17: mod_base = OTHER; note = 2'-O-methyladenosine-3'-phosphate
  modified_base 18: mod_base = OTHER; note = 2'-O-methyladenosine-3'-phosphate
  modified_base 19: mod_base = OTHER; note = 2'-O-methylguanosine-3'-phosphorothioate
  modified_base 20: mod_base = OTHER; note = 2'-O-methyluridine-3'-phosphorothioate
  modified_base 21: mod_base = OTHER; note = 2'-O-methyladenosine
ggttgtttgtgaccagaagta

SEQ ID NO: 10831 - RNA, 21 nt, synthetic construct
  source 1..21: mol_type = other RNA
  modified_base 1: mod_base = OTHER; note = 2'-O-methylguanosine-3'-phosphorothioate
  modified_base 2: mod_base = OTHER; note = 2'-O-methyluridine-3'-phosphorothioate
  modified_base 3: mod_base = OTHER; note = 2'-O-methyluridine-3'-phosphate
  modified_base 4: mod_base = OTHER; note = 2'-O-methylguanosine-3'-phosphate
  modified_base 5: mod_base = OTHER; note = 2'-O-methyluridine-3'-phosphate
  modified_base 6: mod_base = OTHER; note = 2'-O-docosanyl-uridine-3'-phosphate
  modified_base 7: mod_base = OTHER; note = 2'-deoxy-2'-fluorouridine-3'-phosphate
  modified_base 8: mod_base = OTHER; note = 2'-O-methylguanosine-3'-phosphate
  modified_base 9: mod_base = OTHER; note = 2'-deoxy-2'-fluorouridine-3'-phosphate
  modified_base 10: mod_base = OTHER; note = 2'-deoxy-2'-fluoroguanosine-3'-phosphate
  modified_base 11: mod_base = OTHER; note = 2'-deoxy-2'-fluoroadenosine-3'-phosphate
  modified_base 12: mod_base = OTHER; note = 2'-O-methylcytidine-3'-phosphate
  modified_base 13: mod_base = OTHER; note = 2'-O-methylcytidine-3'-phosphate
  modified_base 14: mod_base = OTHER; note = 2'-O-methyladenosine-3'-phosphate
  modified_base 15: mod_base = OTHER; note = 2'-O-methylguanosine-3'-phosphate
  modified_base 16: mod_base = OTHER; note = 2'-O-methyladenosine-3'-phosphate
  modified_base 17: mod_base = OTHER; note = 2'-O-methyladenosine-3'-phosphate
  modified_base 18: mod_base = OTHER; note = 2'-O-methylguanosine-3'-phosphate
  modified_base 19: mod_base = OTHER; note = 2'-O-methyluridine-3'-phosphorothioate
  modified_base 20: mod_base = OTHER; note = 2'-O-methyluridine-3'-phosphorothioate
  modified_base 21: mod_base = OTHER; note = 2'-O-methyladenosine
gttgtttgtgaccagaagtta

SEQ ID NO: 10832 - RNA, 21 nt, synthetic construct
  source 1..21: mol_type = other RNA
  modified_base 1: mod_base = OTHER; note = 2'-O-methyluridine-3'-phosphorothioate
  modified_base 2: mod_base = OTHER; note = 2'-O-methyluridine-3'-phosphorothioate
  modified_base 3: mod_base = OTHER; note = 2'-O-methylguanosine-3'-phosphate
  modified_base 4: mod_base = OTHER; note = 2'-O-methyluridine-3'-phosphate
  modified_base 5: mod_base = OTHER; note = 2'-O-methyluridine-3'-phosphate
  modified_base 6: mod_base = OTHER; note = 2'-O-docosanyl-uridine-3'-phosphate
  modified_base 7: mod_base = OTHER; note = 2'-deoxy-2'-fluoroguanosine-3'-phosphate
  modified_base 8: mod_base = OTHER; note = 2'-O-methyluridine-3'-phosphate
  modified_base 9: mod_base = OTHER; note = 2'-deoxy-2'-fluoroguanosine-3'-phosphate
  modified_base 10: mod_base = OTHER; note = 2'-deoxy-2'-fluoroadenosine-3'-phosphate
  modified_base 11: mod_base = OTHER; note = 2'-deoxy-2'-fluorocytidine-3'-phosphate
  modified_base 12: mod_base = OTHER; note = 2'-O-methylcytidine-3'-phosphate
  modified_base 13: mod_base = OTHER; note = 2'-O-methyladenosine-3'-phosphate
  modified_base 14: mod_base = OTHER; note = 2'-O-methylguanosine-3'-phosphate
  modified_base 15: mod_base = OTHER; note = 2'-O-methyladenosine-3'-phosphate
  modified_base 16: mod_base = OTHER; note = 2'-O-methyladenosine-3'-phosphate
  modified_base 17: mod_base = OTHER; note = 2'-O-methylguanosine-3'-phosphate
  modified_base 18: mod_base = OTHER; note = 2'-O-methyluridine-3'-phosphate
  modified_base 19: mod_base = OTHER; note = 2'-O-methyluridine-3'-phosphorothioate
  modified_base 20: mod_base = OTHER; note = 2'-O-methyluridine-3'-phosphorothioate
  modified_base 21: mod_base = OTHER; note = 2'-O-methyladenosine
ttgtttgtgaccagaagttta

SEQ ID NO: 10833 - RNA, 21 nt, synthetic construct
  source 1..21: mol_type = other RNA
  modified_base 1: mod_base = OTHER; note = 2'-O-methylcytidine-3'-phosphorothioate
  modified_base 2: mod_base = OTHER; note = 2'-O-methyladenosine-3'-phosphorothioate
  modified_base 3: mod_base = OTHER; note = 2'-O-methylguanosine-3'-phosphate
  modified_base 4: mod_base = OTHER; note = 2'-O-methyladenosine-3'-phosphate
  modified_base 5: mod_base = OTHER; note = 2'-O-methyladenosine-3'-phosphate
  modified_base 6: mod_base = OTHER; note = 2'-O-docosanyl-guanosine-3'-phosphate
  modified_base 7: mod_base = OTHER; note = 2'-deoxy-2'-fluorouridine-3'-phosphate
  modified_base 8: mod_base = OTHER; note = 2'-O-methyluridine-3'-phosphate
  modified_base 9: mod_base = OTHER; note = 2'-deoxy-2'-fluorouridine-3'-phosphate
  modified_base 10: mod_base = OTHER; note = 2'-deoxy-2'-fluorocytidine-3'-phosphate
  modified_base 11: mod_base = OTHER; note = 2'-deoxy-2'-fluoroguanosine-3'-phosphate
  modified_base 12: mod_base = OTHER; note = 2'-O-methyladenosine-3'-phosphate
  modified_base 13: mod_base = OTHER; note = 2'-O-methylcytidine-3'-phosphate
  modified_base 14: mod_base = OTHER; note = 2'-O-methylcytidine-3'-phosphate
  modified_base 15: mod_base = OTHER; note = 2'-O-methyladenosine-3'-phosphate
  modified_base 16: mod_base = OTHER; note = 2'-O-methyladenosine-3'-phosphate
  modified_base 17: mod_base = OTHER; note = 2'-O-methylguanosine-3'-phosphate
  modified_base 18: mod_base = OTHER; note = 2'-O-methyluridine-3'-phosphate
  modified_base 19: mod_base = OTHER; note = 2'-O-methyladenosine-3'-phosphorothioate
  modified_base 20: mod_base = OTHER; note = 2'-O-methyluridine-3'-phosphorothioate
  modified_base 21: mod_base = OTHER; note = 2'-O-methyladenosine
cagaagtttcgaccaagtata

SEQ ID NO: 10834 - RNA, 21 nt, synthetic construct
  source 1..21: mol_type = other RNA
  modified_base 1: mod_base = OTHER; note = 2'-O-methyladenosine-3'-phosphorothioate
  modified_base 2: mod_base = OTHER; note = 2'-O-methylguanosine-3'-phosphorothioate
  modified_base 3: mod_base = OTHER; note = 2'-O-methyluridine-3'-phosphate
  modified_base 4: mod_base = OTHER; note = 2'-O-methylguanosine-3'-phosphate
  modified_base 5: mod_base = OTHER; note = 2'-O-methylguanosine-3'-phosphate
  modified_base 6: mod_base = OTHER; note = 2'-O-docosanyl-cytidine-3'-phosphate
  modified_base 7: mod_base = OTHER; note = 2'-deoxy-2'-fluoroadenosine-3'-phosphate
  modified_base 8: mod_base = OTHER; note = 2'-O-methyladenosine-3'-phosphate
  modified_base 9: mod_base = OTHER; note = 2'-deoxy-2'-fluoroadenosine-3'-phosphate
  modified_base 10: mod_base = OTHER; note = 2'-deoxy-2'-fluoroguanosine-3'-phosphate
  modified_base 11: mod_base = OTHER; note = 2'-deoxy-2'-fluorouridine-3'-phosphate
  modified_base 12: mod_base = OTHER; note = 2'-O-methyluridine-3'-phosphate
  modified_base 13: mod_base = OTHER; note = 2'-O-methylguanosine-3'-phosphate
  modified_base 14: mod_base = OTHER; note = 2'-O-methyluridine-3'-phosphate
  modified_base 15: mod_base = OTHER; note = 2'-O-methylguanosine-3'-phosphate
  modified_base 16: mod_base = OTHER; note = 2'-O-methyladenosine-3'-phosphate
  modified_base 17: mod_base = OTHER; note = 2'-O-methyladenosine-3'-phosphate
  modified_base 18: mod_base = OTHER; note = 2'-O-methylguanosine-3'-phosphate
  modified_base 19: mod_base = OTHER; note = 2'-O-methylcytidine-3'-phosphorothioate
  modified_base 20: mod_base = OTHER; note = 2'-O-methyladenosine-3'-phosphorothioate
  modified_base 21: mod_base = OTHER; note = 2'-O-methyladenosine
agtggcaaagttgtgaagcaa

SEQ ID NO: 10835 - RNA, 21 nt, synthetic construct
  source 1..21: mol_type = other RNA
  modified_base 1: mod_base = OTHER; note = 2'-O-methyluridine-3'-phosphorothioate
  modified_base 2: mod_base = OTHER; note = 2'-O-methylguanosine-3'-phosphorothioate
  modified_base 3: mod_base = OTHER; note = 2'-O-methylguanosine-3'-phosphate
  modified_base 4: mod_base = OTHER; note = 2'-O-methylcytidine-3'-phosphate
  modified_base 5: mod_base = OTHER; note = 2'-O-methyladenosine-3'-phosphate
  modified_base 6: mod_base = OTHER; note = 2'-O-docosanyl-adenosine-3'-phosphate
  modified_base 7: mod_base = OTHER; note = 2'-deoxy-2'-fluoroadenosine-3'-phosphate
  modified_base 8: mod_base = OTHER; note = 2'-O-methylguanosine-3'-phosphate
  modified_base 9: mod_base = OTHER; note = 2'-deoxy-2'-fluorouridine-3'-phosphate
  modified_base 10: mod_base = OTHER; note = 2'-deoxy-2'-fluorouridine-3'-phosphate
  modified_base 11: mod_base = OTHER; note = 2'-deoxy-2'-fluoroguanosine-3'-phosphate
  modified_base 12: mod_base = OTHER; note = 2'-O-methyluridine-3'-phosphate
  modified_base 13: mod_base = OTHER; note = 2'-O-methylguanosine-3'-phosphate
  modified_base 14: mod_base = OTHER; note = 2'-O-methyladenosine-3'-phosphate
  modified_base 15: mod_base = OTHER; note = 2'-O-methyladenosine-3'-phosphate
  modified_base 16: mod_base = OTHER; note = 2'-O-methylguanosine-3'-phosphate
  modified_base 17: mod_base = OTHER; note = 2'-O-methylcytidine-3'-phosphate
  modified_base 18: mod_base = OTHER; note = 2'-O-methyladenosine-3'-phosphate
  modified_base 19: mod_base = OTHER; note = 2'-O-methylcytidine-3'-phosphorothioate
  modified_base 20: mod_base = OTHER; note = 2'-O-methyluridine-3'-phosphorothioate
  modified_base 21: mod_base = OTHER; note = 2'-O-methyladenosine
tggcaaagttgtgaagcacta

SEQ ID NO: 10836 - RNA, 21 nt, synthetic construct
  source 1..21: mol_type = other RNA
  modified_base 1: mod_base = OTHER; note = 2'-O-methyluridine-3'-phosphorothioate
  modified_base 2: mod_base = OTHER; note = 2'-O-methyladenosine-3'-phosphorothioate
  modified_base 3: mod_base = OTHER; note = 2'-O-methyladenosine-3'-phosphate
  modified_base 4: mod_base = OTHER; note = 2'-O-methyluridine-3'-phosphate
  modified_base 5: mod_base = OTHER; note = 2'-O-methylguanosine-3'-phosphate
  modified_base 6: mod_base = OTHER; note = 2'-O-docosanyl-cytidine-3'-phosphate
  modified_base 7: mod_base = OTHER; note = 2'-deoxy-2'-fluoroguanosine-3'-phosphate
  modified_base 8: mod_base = OTHER; note = 2'-O-methyluridine-3'-phosphate
  modified_base 9: mod_base = OTHER; note = 2'-deoxy-2'-fluoroguanosine-3'-phosphate
  modified_base 10: mod_base = OTHER; note = 2'-deoxy-2'-fluoroadenosine-3'-phosphate
  modified_base 11: mod_base = OTHER; note = 2'-deoxy-2'-fluoroguanosine-3'-phosphate
  modified_base 12: mod_base = OTHER; note = 2'-O-methyluridine-3'-phosphate
  modified_base 13: mod_base = OTHER; note = 2'-O-methylguanosine-3'-phosphate
  modified_base 14: mod_base = OTHER; note = 2'-O-methyluridine-3'-phosphate
  modified_base 15: mod_base = OTHER; note = 2'-O-methyluridine-3'-phosphate
  modified_base 16: mod_base = OTHER; note = 2'-O-methylguanosine-3'-phosphate
  modified_base 17: mod_base = OTHER; note = 2'-O-methylguanosine-3'-phosphate
  modified_base 18: mod_base = OTHER; note = 2'-O-methyluridine-3'-phosphate
  modified_base 19: mod_base = OTHER; note = 2'-O-methyladenosine-3'-phosphorothioate
  modified_base 20: mod_base = OTHER; note = 2'-O-methyluridine-3'-phosphorothioate
  modified_base 21: mod_base = OTHER; note = 2'-O-methyladenosine
taatgcgtgagtgttggtata

SEQ ID NO: 10837 - RNA, 21 nt, synthetic construct
  source 1..21: mol_type = other RNA
  modified_base 1: mod_base = OTHER; note = 2'-O-methylguanosine-3'-phosphorothioate
  modified_base 2: mod_base = OTHER; note = 2'-O-methylcytidine-3'-phosphorothioate
  modified_base 3: mod_base = OTHER; note = 2'-O-methylcytidine-3'-phosphate
  modified_base 4: mod_base = OTHER; note = 2'-O-methyluridine-3'-phosphate
  modified_base 5: mod_base = OTHER; note = 2'-O-methyladenosine-3'-phosphate
  modified_base 6: mod_base = OTHER; note = 2'-O-docosanyl-adenosine-3'-phosphate
  modified_base 7: mod_base = OTHER; note = 2'-deoxy-2'-fluorocytidine-3'-phosphate
  modified_base 8: mod_base = OTHER; note = 2'-O-methyluridine-3'-phosphate
  modified_base 9: mod_base = OTHER; note = 2'-deoxy-2'-fluoroguanosine-3'-phosphate
  modified_base 10: mod_base = OTHER; note = 2'-deoxy-2'-fluorocytidine-3'-phosphate
  modified_base 11: mod_base = OTHER; note = 2'-deoxy-2'-fluorouridine-3'-phosphate
  modified_base 12: mod_base = OTHER; note = 2'-O-methylcytidine-3'-phosphate
  modified_base 13: mod_base = OTHER; note = 2'-O-methyluridine-3'-phosphate
  modified_base 14: mod_base = OTHER; note = 2'-O-methyluridine-3'-phosphate
  modified_base 15: mod_base = OTHER; note = 2'-O-methylcytidine-3'-phosphate
  modified_base 16: mod_base = OTHER; note = 2'-O-methylguanosine-3'-phosphate
  modified_base 17: mod_base = OTHER; note = 2'-O-methyluridine-3'-phosphate
  modified_base 18: mod_base = OTHER; note = 2'-O-methyladenosine-3'-phosphate
  modified_base 19: mod_base = OTHER; note = 2'-O-methyluridine-3'-phosphorothioate
  modified_base 20: mod_base = OTHER; note = 2'-O-methyluridine-3'-phosphorothioate
  modified_base 21: mod_base = OTHER; note = 2'-O-methyladenosine
gcctaactgctcttcgtatta

SEQ ID NO: 10838 - RNA, 21 nt, synthetic construct
  source 1..21: mol_type = other RNA
  modified_base 1: mod_base = OTHER; note = 2'-O-methylcytidine-3'-phosphorothioate
  modified_base 2: mod_base = OTHER; note = 2'-O-methylcytidine-3'-phosphorothioate
  modified_base 3: mod_base = OTHER; note = 2'-O-methyluridine-3'-phosphate
  modified_base 4: mod_base = OTHER; note = 2'-O-methyladenosine-3'-phosphate
  modified_base 5: mod_base = OTHER; note = 2'-O-methyladenosine-3'-phosphate
  modified_base 6: mod_base = OTHER; note = 2'-O-docosanyl-cytidine-3'-phosphate
  modified_base 7: mod_base = OTHER; note = 2'-deoxy-2'-fluorouridine-3'-phosphate
  modified_base 8: mod_base = OTHER; note = 2'-O-methylguanosine-3'-phosphate
  modified_base 9: mod_base = OTHER; note = 2'-deoxy-2'-fluorocytidine-3'-phosphate
  modified_base 10: mod_base = OTHER; note = 2'-deoxy-2'-fluorouridine-3'-phosphate
  modified_base 11: mod_base = OTHER; note = 2'-deoxy-2'-fluorocytidine-3'-phosphate
  modified_base 12: mod_base = OTHER; note = 2'-O-methyluridine-3'-phosphate
  modified_base 13: mod_base = OTHER; note = 2'-O-methyluridine-3'-phosphate
  modified_base 14: mod_base = OTHER; note = 2'-O-methylcytidine-3'-phosphate
  modified_base 15: mod_base = OTHER; note = 2'-O-methylguanosine-3'-phosphate
  modified_base 16: mod_base = OTHER; note = 2'-O-methyluridine-3'-phosphate
  modified_base 17: mod_base = OTHER; note = 2'-O-methyladenosine-3'-phosphate
  modified_base 18: mod_base = OTHER; note = 2'-O-methyluridine-3'-phosphate
  modified_base 19: mod_base = OTHER; note = 2'-O-methyluridine-3'-phosphorothioate
  modified_base 20: mod_base = OTHER; note = 2'-O-methyladenosine-3'-phosphorothioate
  modified_base 21: mod_base = OTHER; note = 2'-O-methyladenosine
cctaactgctcttcgtattaa

SEQ ID NO: 10839 - RNA, 21 nt, synthetic construct
  source 1..21: mol_type = other RNA
  modified_base 1: mod_base = OTHER; note = 2'-O-methylcytidine-3'-phosphorothioate
  modified_base 2: mod_base = OTHER; note = 2'-O-methyluridine-3'-phosphorothioate
  modified_base 3: mod_base = OTHER; note = 2'-O-methyladenosine-3'-phosphate
  modified_base 4: mod_base = OTHER; note = 2'-O-methyladenosine-3'-phosphate
  modified_base 5: mod_base = OTHER; note = 2'-O-methylcytidine-3'-phosphate
  modified_base 6: mod_base = OTHER; note = 2'-O-docosanyl-uridine-3'-phosphate
  modified_base 7: mod_base = OTHER; note = 2'-deoxy-2'-fluoroguanosine-3'-phosphate
  modified_base 8: mod_base = OTHER; note = 2'-O-methylcytidine-3'-phosphate
  modified_base 9: mod_base = OTHER; note = 2'-deoxy-2'-fluorouridine-3'-phosphate
  modified_base 10: mod_base = OTHER; note = 2'-deoxy-2'-fluorocytidine-3'-phosphate
  modified_base 11: mod_base = OTHER; note = 2'-deoxy-2'-fluorouridine-3'-phosphate
  modified_base 12: mod_base = OTHER; note = 2'-O-methyluridine-3'-phosphate
  modified_base 13: mod_base = OTHER; note = 2'-O-methylcytidine-3'-phosphate
  modified_base 14: mod_base = OTHER; note = 2'-O-methylguanosine-3'-phosphate
  modified_base 15: mod_base = OTHER; note = 2'-O-methyluridine-3'-phosphate
  modified_base 16: mod_base = OTHER; note = 2'-O-methyladenosine-3'-phosphate
  modified_base 17: mod_base = OTHER; note = 2'-O-methyluridine-3'-phosphate
  modified_base 18: mod_base = OTHER; note = 2'-O-methyluridine-3'-phosphate
  modified_base 19: mod_base = OTHER; note = 2'-O-methyladenosine-3'-phosphorothioate
  modified_base 20: mod_base = OTHER; note = 2'-O-methyladenosine-3'-phosphorothioate
  modified_base 21: mod_base = OTHER; note = 2'-O-methyladenosine
ctaactgctcttcgtattaaa

SEQ ID NO: 10840 - RNA, 21 nt, synthetic construct
  source 1..21: mol_type = other RNA
  modified_base 1: mod_base = OTHER; note = 2'-O-methyladenosine-3'-phosphorothioate
  modified_base 2: mod_base = OTHER; note = 2'-O-methylcytidine-3'-phosphorothioate
  modified_base 3: mod_base = OTHER; note = 2'-O-methyluridine-3'-phosphate
  modified_base 4: mod_base = OTHER; note = 2'-O-methylguanosine-3'-phosphate
  modified_base 5: mod_base = OTHER; note = 2'-O-methylcytidine-3'-phosphate
  modified_base 6: mod_base = OTHER; note = 2'-O-docosanyl-uridine-3'-phosphate
  modified_base 7: mod_base = OTHER; note = 2'-deoxy-2'-fluorocytidine-3'-phosphate
  modified_base 8: mod_base = OTHER; note = 2'-O-methyluridine-3'-phosphate
  modified_base 9: mod_base = OTHER; note = 2'-deoxy-2'-fluorouridine-3'-phosphate
  modified_base 10: mod_base = OTHER; note = 2'-deoxy-2'-fluorocytidine-3'-phosphate
  modified_base 11: mod_base = OTHER; note = 2'-deoxy-2'-fluoroguanosine-3'-phosphate
  modified_base 12: mod_base = OTHER; note = 2'-O-methyluridine-3'-phosphate
  modified_base 13: mod_base = OTHER; note = 2'-O-methyladenosine-3'-phosphate
  modified_base 14: mod_base = OTHER; note = 2'-O-methyluridine-3'-phosphate
  modified_base 15: mod_base = OTHER; note = 2'-O-methyluridine-3'-phosphate
  modified_base 16: mod_base = OTHER; note = 2'-O-methyladenosine-3'-phosphate
  modified_base 17: mod_base = OTHER; note = 2'-O-methyladenosine-3'-phosphate
  modified_base 18: mod_base = OTHER; note = 2'-O-methylguanosine-3'-phosphate
  modified_base 19: mod_base = OTHER; note = 2'-O-methyladenosine-3'-phosphorothioate
  modified_base 20: mod_base = OTHER; note = 2'-O-methyladenosine-3'-phosphorothioate
  modified_base 21: mod_base = OTHER; note = 2'-O-methyladenosine
actgctcttcgtattaagaaa

SEQ ID NO: 10841 - RNA, 21 nt, synthetic construct
  source 1..21: mol_type = other RNA
  modified_base 1: mod_base = OTHER; note = 2'-O-methylguanosine-3'-phosphorothioate
  modified_base 2: mod_base = OTHER; note = 2'-O-methylcytidine-3'-phosphorothioate
  modified_base 3: mod_base = OTHER; note = 2'-O-methyluridine-3'-phosphate
  modified_base 4: mod_base = OTHER; note = 2'-O-methylcytidine-3'-phosphate
  modified_base 5: mod_base = OTHER; note = 2'-O-methyluridine-3'-phosphate
  modified_base 6: mod_base = OTHER; note = 2'-O-docosanyl-uridine-3'-phosphate
  modified_base 7: mod_base = OTHER; note = 2'-deoxy-2'-fluorocytidine-3'-phosphate
  modified_base 8: mod_base = OTHER; note = 2'-O-methylguanosine-3'-phosphate
  modified_base 9: mod_base = OTHER; note = 2'-deoxy-2'-fluorouridine-3'-phosphate
  modified_base 10: mod_base = OTHER; note = 2'-deoxy-2'-fluoroadenosine-3'-phosphate
  modified_base 11: mod_base = OTHER; note = 2'-deoxy-2'-fluorouridine-3'-phosphate
  modified_base 12: mod_base = OTHER; note = 2'-O-methyluridine-3'-phosphate
  modified_base 13: mod_base = OTHER; note = 2'-O-methyladenosine-3'-phosphate
  modified_base 14: mod_base = OTHER; note = 2'-O-methyladenosine-3'-phosphate
  modified_base 15: mod_base = OTHER; note = 2'-O-methylguanosine-3'-phosphate
  modified_base 16: mod_base = OTHER; note = 2'-O-methyladenosine-3'-phosphate
  modified_base 17: mod_base = OTHER; note = 2'-O-methyladenosine-3'-phosphate
  modified_base 18: mod_base = OTHER; note = 2'-O-methylguanosine-3'-phosphate
  modified_base 19: mod_base = OTHER; note = 2'-O-methyladenosine-3'-phosphorothioate
  modified_base 20: mod_base = OTHER; note = 2'-O-methylcytidine-3'-phosphorothioate
  modified_base 21: mod_base = OTHER; note = 2'-O-methyladenosine
gctcttcgtattaagaagaca

SEQ ID NO: 10842 - RNA, 21 nt, synthetic construct
  source 1..21: mol_type = other RNA
  modified_base 1: mod_base = OTHER; note = 2'-O-methylcytidine-3'-phosphorothioate
  modified_base 2: mod_base = OTHER; note = 2'-O-methyluridine-3'-phosphorothioate
  modified_base 3: mod_base = OTHER; note = 2'-O-methylcytidine-3'-phosphate
  modified_base 4: mod_base = OTHER; note = 2'-O-methyluridine-3'-phosphate
  modified_base 5: mod_base = OTHER; note = 2'-O-methyluridine-3'-phosphate
  modified_base 6: mod_base = OTHER; note = 2'-O-docosanyl-cytidine-3'-phosphate
  modified_base 7: mod_base = OTHER; note = 2'-deoxy-2'-fluoroguanosine-3'-phosphate
  modified_base 8: mod_base = OTHER; note = 2'-O-methyluridine-3'-phosphate
  modified_base 9: mod_base = OTHER; note = 2'-deoxy-2'-fluoroadenosine-3'-phosphate
  modified_base 10: mod_base = OTHER; note = 2'-deoxy-2'-fluorouridine-3'-phosphate
  modified_base 11: mod_base = OTHER; note = 2'-deoxy-2'-fluorouridine-3'-phosphate
  modified_base 12: mod_base = OTHER; note = 2'-O-methyladenosine-3'-phosphate
  modified_base 13: mod_base = OTHER; note = 2'-O-methyladenosine-3'-phosphate
  modified_base 14: mod_base = OTHER; note = 2'-O-methylguanosine-3'-phosphate
  modified_base 15: mod_base = OTHER; note = 2'-O-methyladenosine-3'-phosphate
  modified_base 16: mod_base = OTHER; note = 2'-O-methyladenosine-3'-phosphate
  modified_base 17: mod_base = OTHER; note = 2'-O-methylguanosine-3'-phosphate
  modified_base 18: mod_base = OTHER; note = 2'-O-methyladenosine-3'-phosphate
  modified_base 19: mod_base = OTHER; note = 2'-O-methylcytidine-3'-phosphorothioate
  modified_base 20: mod_base = OTHER; note = 2'-O-methyluridine-3'-phosphorothioate
  modified_base 21: mod_base = OTHER; note = 2'-O-methyladenosine
ctcttcgtattaagaagacta

SEQ ID NO: 10843 - RNA, 21 nt, synthetic construct
  source 1..21: mol_type = other RNA
  modified_base 1: mod_base = OTHER; note = 2'-O-methyluridine-3'-phosphorothioate
  modified_base 2: mod_base = OTHER; note = 2'-O-methyladenosine-3'-phosphorothioate
  modified_base 3: mod_base = OTHER; note = 2'-O-methyluridine-3'-phosphate
  modified_base 4: mod_base = OTHER; note = 2'-O-methyladenosine-3'-phosphate
  modified_base 5: mod_base = OTHER; note = 2'-O-methyluridine-3'-phosphate
  modified_base 6: mod_base = OTHER; note = 2'-O-docosanyl-cytidine-3'-phosphate
  modified_base 7: mod_base = OTHER; note = 2'-deoxy-2'-fluorouridine-3'-phosphate
  modified_base 8: mod_base = OTHER; note = 2'-O-methylcytidine-3'-phosphate
  modified_base 9: mod_base = OTHER; note = 2'-deoxy-2'-fluoroadenosine-3'-phosphate
  modified_base 10: mod_base = OTHER; note = 2'-deoxy-2'-fluoroadenosine-3'-phosphate
  modified_base 11: mod_base = OTHER; note = 2'-deoxy-2'-fluorocytidine-3'-phosphate
  modified_base 12: mod_base = OTHER; note = 2'-O-methyluridine-3'-phosphate
  modified_base 13: mod_base = OTHER; note = 2'-O-methyluridine-3'-phosphate
  modified_base 14: mod_base = OTHER; note = 2'-O-methyluridine-3'-phosphate
  modified_base 15: mod_base = OTHER; note = 2'-O-methylguanosine-3'-phosphate
  modified_base 16: mod_base = OTHER; note = 2'-O-methyluridine-3'-phosphate
  modified_base 17: mod_base = OTHER; note = 2'-O-methylguanosine-3'-phosphate
  modified_base 18: mod_base = OTHER; note = 2'-O-methyluridine-3'-phosphate
  modified_base 19: mod_base = OTHER; note = 2'-O-methylcytidine-3'-phosphorothioate
  modified_base 20: mod_base = OTHER; note = 2'-O-methyladenosine-3'-phosphorothioate
  modified_base 21: mod_base = OTHER; note = 2'-O-methyladenosine
tatatctcaactttgtgtcaa

SEQ ID NO: 10844 - RNA, 21 nt, synthetic construct
  source 1..21: mol_type = other RNA
  modified_base 1: mod_base = OTHER; note = 2'-O-methyladenosine-3'-phosphorothioate
  modified_base 2: mod_base = OTHER; note = 2'-O-methyluridine-3'-phosphorothioate
  modified_base 3: mod_base = OTHER; note = 2'-O-methyladenosine-3'-phosphate
  modified_base 4: mod_base = OTHER; note = 2'-O-methyluridine-3'-phosphate
  modified_base 5: mod_base = OTHER; note = 2'-O-methylcytidine-3'-phosphate
  modified_base 6: mod_base = OTHER; note = 2'-O-docosanyl-uridine-3'-phosphate
  modified_base 7: mod_base = OTHER; note = 2'-deoxy-2'-fluorocytidine-3'-phosphate
  modified_base 8: mod_base = OTHER; note = 2'-O-methyladenosine-3'-phosphate
  modified_base 9: mod_base = OTHER; note = 2'-deoxy-2'-fluoroadenosine-3'-phosphate
  modified_base 10: mod_base = OTHER; note = 2'-deoxy-2'-fluorocytidine-3'-phosphate
  modified_base 11: mod_base = OTHER; note = 2'-deoxy-2'-fluorouridine-3'-phosphate
  modified_base 12: mod_base = OTHER; note = 2'-O-methyluridine-3'-phosphate
  modified_base 13: mod_base = OTHER; note = 2'-O-methyluridine-3'-phosphate
  modified_base 14: mod_base = OTHER; note = 2'-O-methylguanosine-3'-phosphate
  modified_base 15: mod_base = OTHER; note = 2'-O-methyluridine-3'-phosphate
  modified_base 16: mod_base = OTHER; note = 2'-O-methylguanosine-3'-phosphate
  modified_base 17: mod_base = OTHER; note = 2'-O-methyluridine-3'-phosphate
  modified_base 18: mod_base = OTHER; note = 2'-O-methylcytidine-3'-phosphate
  modified_base 19: mod_base = OTHER; note = 2'-O-methyladenosine-3'-phosphorothioate
  modified_base 20: mod_base = OTHER; note = 2'-O-methyladenosine-3'-phosphorothioate
  modified_base 21: mod_base = OTHER; note = 2'-O-methyladenosine
atatctcaactttgtgtcaaa

SEQ ID NO: 10845 - RNA, 21 nt, synthetic construct
  source 1..21: mol_type = other RNA
  modified_base 1: mod_base = OTHER; note = 2'-O-methyluridine-3'-phosphorothioate
  modified_base 2: mod_base = OTHER; note = 2'-O-methyladenosine-3'-phosphorothioate
  modified_base 3: mod_base = OTHER; note = 2'-O-methyluridine-3'-phosphate
  modified_base 4: mod_base = OTHER; note = 2'-O-methylcytidine-3'-phosphate
  modified_base 5: mod_base = OTHER; note = 2'-O-methyluridine-3'-phosphate
  modified_base 6: mod_base = OTHER; note = 2'-O-docosanyl-cytidine-3'-phosphate
  modified_base 7: mod_base = OTHER; note = 2'-deoxy-2'-fluoroadenosine-3'-phosphate
  modified_base 8: mod_base = OTHER; note = 2'-O-methyladenosine-3'-phosphate
  modified_base 9: mod_base = OTHER; note = 2'-deoxy-2'-fluorocytidine-3'-phosphate
  modified_base 10: mod_base = OTHER; note = 2'-deoxy-2'-fluorouridine-3'-phosphate
  modified_base 11: mod_base = OTHER; note = 2'-deoxy-2'-fluorouridine-3'-phosphate
  modified_base 12: mod_base = OTHER; note = 2'-O-methyluridine-3'-phosphate
  modified_base 13: mod_base = OTHER; note = 2'-O-methylguanosine-3'-phosphate
  modified_base 14: mod_base = OTHER; note = 2'-O-methyluridine-3'-phosphate
  modified_base 15: mod_base = OTHER; note = 2'-O-methylguanosine-3'-phosphate
  modified_base 16: mod_base = OTHER; note = 2'-O-methyluridine-3'-phosphate
  modified_base 17: mod_base = OTHER; note = 2'-O-methylcytidine-3'-phosphate
  modified_base 18: mod_base = OTHER; note = 2'-O-methyladenosine-3'-phosphate
  modified_base 19: mod_base = OTHER; note = 2'-O-methyladenosine-3'-phosphorothioate
  modified_base 20: mod_base = OTHER; note = 2'-O-methyladenosine-3'-phosphorothioate
  modified_base 21: mod_base = OTHER; note = 2'-O-methyladenosine
tatctcaactttgtgtcaaaa

SEQ ID NO: 10846 - RNA, 21 nt, synthetic construct
  source 1..21: mol_type = other RNA
  modified_base 1: mod_base = OTHER; note = 2'-O-methylcytidine-3'-phosphorothioate
  modified_base 2: mod_base = OTHER; note = 2'-O-methyluridine-3'-phosphorothioate
  modified_base 3: mod_base = OTHER; note = 2'-O-methylcytidine-3'-phosphate
  modified_base 4: mod_base = OTHER; note = 2'-O-methyladenosine-3'-phosphate
  modified_base 5: mod_base = OTHER; note = 2'-O-methyladenosine-3'-phosphate
  modified_base 6: mod_base = OTHER; note = 2'-O-docosanyl-cytidine-3'-phosphate
  modified_base 7: mod_base = OTHER; note = 2'-deoxy-2'-fluorouridine-3'-phosphate
  modified_base 8: mod_base = OTHER; note = 2'-O-methyluridine-3'-phosphate
  modified_base 9: mod_base = OTHER; note = 2'-deoxy-2'-fluorouridine-3'-phosphate
  modified_base 10: mod_base = OTHER; note = 2'-deoxy-2'-fluoroguanosine-3'-phosphate
  modified_base 11: mod_base = OTHER; note = 2'-deoxy-2'-fluorouridine-3'-phosphate
  modified_base 12: mod_base = OTHER; note = 2'-O-methylguanosine-3'-phosphate
  modified_base 13: mod_base = OTHER; note = 2'-O-methyluridine-3'-phosphate
  modified_base 14: mod_base = OTHER; note = 2'-O-methylcytidine-3'-phosphate
  modified_base 15: mod_base = OTHER; note = 2'-O-methyladenosine-3'-phosphate
  modified_base 16: mod_base = OTHER; note = 2'-O-methyladenosine-3'-phosphate
  modified_base 17: mod_base = OTHER; note = 2'-O-methyladenosine-3'-phosphate
  modified_base 18: mod_base = OTHER; note = 2'-O-methylguanosine-3'-phosphate
  modified_base 19: mod_base = OTHER; note = 2'-O-methyladenosine-3'-phosphorothioate
  modified_base 20: mod_base = OTHER; note = 2'-O-methyladenosine-3'-phosphorothioate
  modified_base 21: mod_base = OTHER; note = 2'-O-methyladenosine
ctcaactttgtgtcaaagaaa

SEQ ID NO: 10847 - RNA, 21 nt, synthetic construct
  source 1..21: mol_type = other RNA
  modified_base 1: mod_base = OTHER; note = 2'-O-methyladenosine-3'-phosphorothioate
  modified_base 2: mod_base = OTHER; note = 2'-O-methyladenosine-3'-phosphorothioate
  modified_base 3: mod_base = OTHER; note = 2'-O-methylguanosine-3'-phosphate
  modified_base 4: mod_base = OTHER; note = 2'-O-methylcytidine-3'-phosphate
  modified_base 5: mod_base = OTHER; note = 2'-O-methylcytidine-3'-phosphate
  modified_base 6: mod_base = OTHER; note = 2'-O-docosanyl-uridine-3'-phosphate
  modified_base 7: mod_base = OTHER; note = 2'-deoxy-2'-fluoroadenosine-3'-phosphate
  modified_base 8: mod_base = OTHER; note = 2'-O-methyladenosine-3'-phosphate
  modified_base 9: mod_base = OTHER; note = 2'-deoxy-2'-fluorouridine-3'-phosphate
  modified_base 10: mod_base = OTHER; note = 2'-deoxy-2'-fluoroguanosine-3'-phosphate
  modified_base 11: mod_base = OTHER; note = 2'-deoxy-2'-fluoroadenosine-3'-phosphate
  modified_base 12: mod_base = OTHER; note = 2'-O-methyluridine-3'-phosphate
  modified_base 13: mod_base = OTHER; note = 2'-O-methylguanosine-3'-phosphate
  modified_base 14: mod_base = OTHER; note = 2'-O-methyladenosine-3'-phosphate
  modified_base 15: mod_base = OTHER; note = 2'-O-methyluridine-3'-phosphate
  modified_base 16: mod_base = OTHER; note = 2'-O-methyladenosine-3'-phosphate
  modified_base 17: mod_base = OTHER; note = 2'-O-methyladenosine-3'-phosphate
  modified_base 18: mod_base = OTHER; note = 2'-O-methyluridine-3'-phosphate
  modified_base 19: mod_base = OTHER; note = 2'-O-methyluridine-3'-phosphorothioate
  modified_base 20: mod_base = OTHER; note = 2'-O-methyladenosine-3'-phosphorothioate
  modified_base 21: mod_base = OTHER; note = 2'-O-methyladenosine
aagcctaatgatgataattaa

SEQ ID NO: 10848 - RNA, 21 nt, synthetic construct
  source 1..21: mol_type = other RNA
  modified_base 1: mod_base = OTHER; note = 2'-O-methyladenosine-3'-phosphorothioate
  modified_base 2: mod_base = OTHER; note = 2'-O-methyladenosine-3'-phosphorothioate
  modified_base 3: mod_base = OTHER; note = 2'-O-methyladenosine-3'-phosphate
  modified_base 4: mod_base = OTHER; note = 2'-O-methyluridine-3'-phosphate
  modified_base 5: mod_base = OTHER; note = 2'-O-methylcytidine-3'-phosphate
  modified_base 6: mod_base = OTHER; note = 2'-O-docosanyl-uridine-3'-phosphate
  modified_base 7: mod_base = OTHER; note = 2'-deoxy-2'-fluorocytidine-3'-phosphate
  modified_base 8: mod_base = OTHER; note = 2'-O-methyluridine-3'-phosphate
  modified_base 9: mod_base = OTHER; note = 2'-deoxy-2'-fluorocytidine-3'-phosphate
  modified_base 10: mod_base = OTHER; note = 2'-deoxy-2'-fluoroadenosine-3'-phosphate
  modified_base 11: mod_base = OTHER; note = 2'-deoxy-2'-fluorouridine-3'-phosphate
  modified_base 12: mod_base = OTHER; note = 2'-O-methyladenosine-3'-phosphate
  modified_base 13: mod_base = OTHER; note = 2'-O-methylguanosine-3'-phosphate
  modified_base 14: mod_base = OTHER; note = 2'-O-methylcytidine-3'-phosphate
  modified_base 15: mod_base = OTHER; note = 2'-O-methyluridine-3'-phosphate
  modified_base 16: mod_base = OTHER; note = 2'-O-methyluridine-3'-phosphate
  modified_base 17: mod_base = OTHER; note = 2'-O-methyluridine-3'-phosphate
  modified_base 18: mod_base = OTHER; note = 2'-O-methylcytidine-3'-phosphate
  modified_base 19: mod_base = OTHER; note = 2'-O-methyluridine-3'-phosphorothioate
  modified_base 20: mod_base = OTHER; note = 2'-O-methyluridine-3'-phosphorothioate
  modified_base 21: mod_base = OTHER; note = 2'-O-methyladenosine
aaatctctcatagctttctta

SEQ ID NO: 10849 - RNA, 21 nt, synthetic construct
  source 1..21: mol_type = other RNA
  modified_base 1: mod_base = OTHER; note = 2'-O-methyladenosine-3'-phosphorothioate
  modified_base 2: mod_base = OTHER; note = 2'-O-methylcytidine-3'-phosphorothioate
  modified_base 3: mod_base = OTHER; note = 2'-O-methyluridine-3'-phosphate
  modified_base 4: mod_base = OTHER; note = 2'-O-methylguanosine-3'-phosphate
  modified_base 5: mod_base = OTHER; note = 2'-O-methylcytidine-3'-phosphate
  modified_base 6: mod_base = OTHER; note = 2'-O-docosanyl-adenosine-3'-phosphate
  modified_base 7: mod_base = OTHER; note = 2'-deoxy-2'-fluoroadenosine-3'-phosphate
  modified_base 8: mod_base = OTHER; note = 2'-O-methyladenosine-3'-phosphate
  modified_base 9: mod_base = OTHER; note = 2'-deoxy-2'-fluoroguanosine-3'-phosphate
  modified_base 10: mod_base = OTHER; note = 2'-deoxy-2'-fluorocytidine-3'-phosphate
  modified_base 11: mod_base = OTHER; note = 2'-deoxy-2'-fluorocytidine-3'-phosphate
  modified_base 12: mod_base = OTHER; note = 2'-O-methyluridine-3'-phosphate
  modified_base 13: mod_base = OTHER; note = 2'-O-methyladenosine-3'-phosphate
  modified_base 14: mod_base = OTHER; note = 2'-O-methyladenosine-3'-phosphate
  modified_base 15: mod_base = OTHER; note = 2'-O-methyluridine-3'-phosphate
  modified_base 16: mod_base = OTHER; note = 2'-O-methylguanosine-3'-phosphate
  modified_base 17: mod_base = OTHER; note = 2'-O-methyladenosine-3'-phosphate
  modified_base 18: mod_base = OTHER; note = 2'-O-methyluridine-3'-phosphate
  modified_base 19: mod_base = OTHER; note = 2'-O-methylguanosine-3'-phosphorothioate
  modified_base 20: mod_base = OTHER; note = 2'-O-methyladenosine-3'-phosphorothioate
  modified_base 21: mod_base = OTHER; note = 2'-O-methyladenosine
actgcaaagcctaatgatgaa

SEQ ID NO: 10850 - RNA, 21 nt, synthetic construct
  source 1..21: mol_type = other RNA
  modified_base 1: mod_base = OTHER; note = 2'-O-methylcytidine-3'-phosphorothioate
  modified_base 2: mod_base = OTHER; note = 2'-O-methyluridine-3'-phosphorothioate
  modified_base 3: mod_base = OTHER; note = 2'-O-methylguanosine-3'-phosphate
  modified_base 4: mod_base = OTHER; note = 2'-O-methylcytidine-3'-phosphate
  modified_base 5: mod_base = OTHER; note = 2'-O-methyladenosine-3'-phosphate
  modified_base 6: mod_base = OTHER; note = 2'-O-docosanyl-adenosine-3'-phosphate
  modified_base 7: mod_base = OTHER; note = 2'-deoxy-2'-fluoroadenosine-3'-phosphate
  modified_base 8: mod_base = OTHER; note = 2'-O-methylguanosine-3'-phosphate
  modified_base 9: mod_base = OTHER; note = 2'-deoxy-2'-fluorocytidine-3'-phosphate
  modified_base 10: mod_base = OTHER; note = 2'-deoxy-2'-fluorocytidine-3'-phosphate
  modified_base 11: mod_base = OTHER; note = 2'-deoxy-2'-fluorouridine-3'-phosphate
  modified_base 12: mod_base = OTHER; note = 2'-O-methyladenosine-3'-phosphate
  modified_base 13: mod_base = OTHER; note = 2'-O-methyladenosine-3'-phosphate
  modified_base 14: mod_base = OTHER; note = 2'-O-methyluridine-3'-phosphate
  modified_base 15: mod_base = OTHER; note = 2'-O-methylguanosine-3'-phosphate
  modified_base 16: mod_base = OTHER; note = 2'-O-methyladenosine-3'-phosphate
  modified_base 17: mod_base = OTHER; note = 2'-O-methyluridine-3'-phosphate
  modified_base 18: mod_base = OTHER; note = 2'-O-methylguanosine-3'-phosphate
  modified_base 19: mod_base = OTHER; note = 2'-O-methyladenosine-3'-phosphorothioate
  modified_base 20: mod_base = OTHER; note = 2'-O-methyluridine-3'-phosphorothioate
  modified_base 21: mod_base = OTHER; note = 2'-O-methyladenosine
ctgcaaagcctaatgatgata

SEQ ID NO: 10851 - RNA, 21 nt, synthetic construct
  source 1..21: mol_type = other RNA
  modified_base 1: mod_base = OTHER; note = 2'-O-methyluridine-3'-phosphorothioate
  modified_base 2: mod_base = OTHER; note = 2'-O-methylguanosine-3'-phosphorothioate
  modified_base 3: mod_base = OTHER; note = 2'-O-methylcytidine-3'-phosphate
  modified_base 4: mod_base = OTHER; note = 2'-O-methyladenosine-3'-phosphate
  modified_base 5: mod_base = OTHER; note = 2'-O-methyladenosine-3'-phosphate
  modified_base 6: mod_base = OTHER; note = 2'-O-docosanyl-adenosine-3'-phosphate
  modified_base 7: mod_base = OTHER; note = 2'-deoxy-2'-fluoroguanosine-3'-phosphate
  modified_base 8: mod_base = OTHER; note = 2'-O-methylcytidine-3'-phosphate
  modified_base 9: mod_base = OTHER; note = 2'-deoxy-2'-fluorocytidine-3'-phosphate
  modified_base 10: mod_base = OTHER; note = 2'-deoxy-2'-fluorouridine-3'-phosphate
  modified_base 11: mod_base = OTHER; note = 2'-deoxy-2'-fluoroadenosine-3'-phosphate
  modified_base 12: mod_base = OTHER; note = 2'-O-methyladenosine-3'-phosphate
  modified_base 13: mod_base = OTHER; note = 2'-O-methyluridine-3'-phosphate
  modified_base 14: mod_base = OTHER; note = 2'-O-methylguanosine-3'-phosphate
  modified_base 15: mod_base = OTHER; note = 2'-O-methyladenosine-3'-phosphate
  modified_base 16: mod_base = OTHER; note = 2'-O-methyluridine-3'-phosphate
  modified_base 17: mod_base = OTHER; note = 2'-O-methylguanosine-3'-phosphate
  modified_base 18: mod_base = OTHER; note = 2'-O-methyladenosine-3'-phosphate
  modified_base 19: mod_base = OTHER; note = 2'-O-methyluridine-3'-phosphorothioate
  modified_base 20: mod_base = OTHER; note = 2'-O-methyladenosine-3'-phosphorothioate
  modified_base 21: mod_base = OTHER; note = 2'-O-methyladenosine
tgcaaagcctaatgatgataa

SEQ ID NO: 10852 - RNA, 21 nt, synthetic construct
  source 1..21: mol_type = other RNA
  modified_base 1: mod_base = OTHER; note = 2'-O-methylguanosine-3'-phosphorothioate
  modified_base 2: mod_base = OTHER; note = 2'-O-methylcytidine-3'-phosphorothioate
  modified_base 3: mod_base = OTHER; note = 2'-O-methyladenosine-3'-phosphate
  modified_base 4: mod_base = OTHER; note = 2'-O-methyladenosine-3'-phosphate
  modified_base 5: mod_base = OTHER; note = 2'-O-methyladenosine-3'-phosphate
  modified_base 6: mod_base = OTHER; note = 2'-O-docosanyl-guanosine-3'-phosphate
  modified_base 7: mod_base = OTHER; note = 2'-deoxy-2'-fluorocytidine-3'-phosphate
  modified_base 8: mod_base = OTHER; note = 2'-O-methylcytidine-3'-phosphate
  modified_base 9: mod_base = OTHER; note = 2'-deoxy-2'-fluorouridine-3'-phosphate
  modified_base 10: mod_base = OTHER; note = 2'-deoxy-2'-fluoroadenosine-3'-phosphate
  modified_base 11: mod_base = OTHER; note = 2'-deoxy-2'-fluoroadenosine-3'-phosphate
  modified_base 12: mod_base = OTHER; note = 2'-O-methyluridine-3'-phosphate
  modified_base 13: mod_base = OTHER; note = 2'-O-methylguanosine-3'-phosphate
  modified_base 14: mod_base = OTHER; note = 2'-O-methyladenosine-3'-phosphate
  modified_base 15: mod_base = OTHER; note = 2'-O-methyluridine-3'-phosphate
  modified_base 16: mod_base = OTHER; note = 2'-O-methylguanosine-3'-phosphate
  modified_base 17: mod_base = OTHER; note = 2'-O-methyladenosine-3'-phosphate
  modified_base 18: mod_base = OTHER; note = 2'-O-methyluridine-3'-phosphate
  modified_base 19: mod_base = OTHER; note = 2'-O-methyladenosine-3'-phosphorothioate
  modified_base 20: mod_base = OTHER; note = 2'-O-methyladenosine-3'-phosphorothioate
  modified_base 21: mod_base = OTHER; note = 2'-O-methyladenosine
gcaaagcctaatgatgataaa

SEQ ID NO: 10853 - RNA, 21 nt, synthetic construct
  source 1..21: mol_type = other RNA
  modified_base 1: mod_base = OTHER; note = 2'-O-methylcytidine-3'-phosphorothioate
  modified_base 2: mod_base = OTHER; note = 2'-O-methyladenosine-3'-phosphorothioate
  modified_base 3: mod_base = OTHER; note = 2'-O-methyladenosine-3'-phosphate
  modified_base 4: mod_base = OTHER; note = 2'-O-methyladenosine-3'-phosphate
  modified_base 5: mod_base = OTHER; note = 2'-O-methylguanosine-3'-phosphate
  modified_base 6: mod_base = OTHER; note = 2'-O-docosanyl-cytidine-3'-phosphate
  modified_base 7: mod_base = OTHER; note = 2'-deoxy-2'-fluorocytidine-3'-phosphate
  modified_base 8: mod_base = OTHER; note = 2'-O-methyluridine-3'-phosphate
  modified_base 9: mod_base = OTHER; note = 2'-deoxy-2'-fluoroadenosine-3'-phosphate
  modified_base 10: mod_base = OTHER; note = 2'-deoxy-2'-fluoroadenosine-3'-phosphate
  modified_base 11: mod_base = OTHER; note = 2'-deoxy-2'-fluorouridine-3'-phosphate
  modified_base 12: mod_base = OTHER; note = 2'-O-methylguanosine-3'-phosphate
  modified_base 13: mod_base = OTHER; note = 2'-O-methyladenosine-3'-phosphate
  modified_base 14: mod_base = OTHER; note = 2'-O-methyluridine-3'-phosphate
  modified_base 15: mod_base = OTHER; note = 2'-O-methylguanosine-3'-phosphate
  modified_base 16: mod_base = OTHER; note = 2'-O-methyladenosine-3'-phosphate
  modified_base 17: mod_base = OTHER; note = 2'-O-methyluridine-3'-phosphate
  modified_base 18: mod_base = OTHER; note = 2'-O-methyladenosine-3'-phosphate
  modified_base 19: mod_base = OTHER; note = 2'-O-methyladenosine-3'-phosphorothioate
  modified_base 20: mod_base = OTHER; note = 2'-O-methyluridine-3'-phosphorothioate
  modified_base 21: mod_base = OTHER; note = 2'-O-methyladenosine
caaagcctaatgatgataata

SEQ ID NO: 10854 - RNA, 21 nt, synthetic construct
  source 1..21: mol_type = other RNA
  modified_base 1: mod_base = OTHER; note = 2'-O-methyladenosine-3'-phosphorothioate
  modified_base 2: mod_base = OTHER; note = 2'-O-methyladenosine-3'-phosphorothioate
  modified_base 3: mod_base = OTHER; note = 2'-O-methyladenosine-3'-phosphate
  modified_base 4: mod_base = OTHER; note = 2'-O-methylguanosine-3'-phosphate
  modified_base 5: mod_base = OTHER; note = 2'-O-methylcytidine-3'-phosphate
  modified_base 6: mod_base = OTHER; note = 2'-O-docosanyl-cytidine-3'-phosphate
  modified_base 7: mod_base = OTHER; note = 2'-deoxy-2'-fluorouridine-3'-phosphate
  modified_base 8: mod_base = OTHER; note = 2'-O-methyladenosine-3'-phosphate
  modified_base 9: mod_base = OTHER; note = 2'-deoxy-2'-fluoroadenosine-3'-phosphate
  modified_base 10: mod_base = OTHER; note = 2'-deoxy-2'-fluorouridine-3'-phosphate
  modified_base 11: mod_base = OTHER; note = 2'-deoxy-2'-fluoroguanosine-3'-phosphate
  modified_base 12: mod_base = OTHER; note = 2'-O-methyladenosine-3'-phosphate
  modified_base 13: mod_base = OTHER; note = 2'-O-methyluridine-3'-phosphate
  modified_base 14: mod_base = OTHER; note = 2'-O-methylguanosine-3'-phosphate
  modified_base 15: mod_base = OTHER; note = 2'-O-methyladenosine-3'-phosphate
  modified_base 16: mod_base = OTHER; note = 2'-O-methyluridine-3'-phosphate
  modified_base 17: mod_base = OTHER; note = 2'-O-methyladenosine-3'-phosphate
  modified_base 18: mod_base = OTHER; note = 2'-O-methyladenosine-3'-phosphate
  modified_base 19: mod_base = OTHER; note = 2'-O-methyluridine-3'-phosphorothioate
  modified_base 20: mod_base = OTHER; note = 2'-O-methyluridine-3'-phosphorothioate
  modified_base 21: mod_base = OTHER; note = 2'-O-methyladenosine
aaagcctaatgatgataatta

SEQ ID NO: 10855 - RNA, 21 nt, synthetic construct
  source 1..21: mol_type = other RNA
  modified_base 1: mod_base = OTHER; note = 2'-O-methylguanosine-3'-phosphorothioate
  modified_base 2: mod_base = OTHER; note = 2'-O-methylcytidine-3'-phosphorothioate
  modified_base 3: mod_base = OTHER; note = 2'-O-methylcytidine-3'-phosphate
  modified_base 4: mod_base = OTHER; note = 2'-O-methyluridine-3'-phosphate
  modified_base 5: mod_base = OTHER; note = 2'-O-methyladenosine-3'-phosphate
  modified_base 6: mod_base = OTHER; note = 2'-O-docosanyl-adenosine-3'-phosphate
  modified_base 7: mod_base = OTHER; note = 2'-deoxy-2'-fluorouridine-3'-phosphate
  modified_base 8: mod_base = OTHER; note = 2'-O-methylguanosine-3'-phosphate
  modified_base 9: mod_base = OTHER; note = 2'-deoxy-2'-fluoroadenosine-3'-phosphate
  modified_base 10: mod_base = OTHER; note = 2'-deoxy-2'-fluorouridine-3'-phosphate
  modified_base 11: mod_base = OTHER; note = 2'-deoxy-2'-fluoroguanosine-3'-phosphate
  modified_base 12: mod_base = OTHER; note = 2'-O-methyladenosine-3'-phosphate
  modified_base 13: mod_base = OTHER; note = 2'-O-methyluridine-3'-phosphate
  modified_base 14: mod_base = OTHER; note = 2'-O-methyladenosine-3'-phosphate
  modified_base 15: mod_base = OTHER; note = 2'-O-methyladenosine-3'-phosphate
  modified_base 16: mod_base = OTHER; note = 2'-O-methyluridine-3'-phosphate
  modified_base 17: mod_base = OTHER; note = 2'-O-methyluridine-3'-phosphate
  modified_base 18: mod_base = OTHER; note = 2'-O-methyladenosine-3'-phosphate
  modified_base 19: mod_base = OTHER; note = 2'-O-methyluridine-3'-phosphorothioate
  modified_base 20: mod_base = OTHER; note = 2'-O-methylguanosine-3'-phosphorothioate
  modified_base 21: mod_base = OTHER; note = 2'-O-methyladenosine
gcctaatgatgataattatga

SEQ ID NO: 10856 - RNA, 21 nt, synthetic construct
  source 1..21: mol_type = other RNA
  modified_base 1: mod_base = OTHER; note = 2'-O-methylcytidine-3'-phosphorothioate
  modified_base 2: mod_base = OTHER; note = 2'-O-methylcytidine-3'-phosphorothioate
  modified_base 3: mod_base = OTHER; note = 2'-O-methyluridine-3'-phosphate
  modified_base 4: mod_base = OTHER; note = 2'-O-methyladenosine-3'-phosphate
  modified_base 5: mod_base = OTHER; note = 2'-O-methyladenosine-3'-phosphate
  modified_base 6: mod_base = OTHER; note = 2'-O-docosanyl-uridine-3'-phosphate
  modified_base 7: mod_base = OTHER; note = 2'-deoxy-2'-fluoroguanosine-3'-phosphate
  modified_base 8: mod_base = OTHER; note = 2'-O-methyladenosine-3'-phosphate
  modified_base 9: mod_base = OTHER; note = 2'-deoxy-2'-fluorouridine-3'-phosphate
  modified_base 10: mod_base = OTHER; note = 2'-deoxy-2'-fluoroguanosine-3'-phosphate
  modified_base 11: mod_base = OTHER; note = 2'-deoxy-2'-fluoroadenosine-3'-phosphate
  modified_base 12: mod_base = OTHER; note = 2'-O-methyluridine-3'-phosphate
  modified_base 13: mod_base = OTHER; note = 2'-O-methyladenosine-3'-phosphate
  modified_base 14: mod_base = OTHER; note = 2'-O-methyladenosine-3'-phosphate
  modified_base 15: mod_base = OTHER; note = 2'-O-methyluridine-3'-phosphate
  modified_base 16: mod_base = OTHER; note = 2'-O-methyluridine-3'-phosphate
  modified_base 17: mod_base = OTHER; note = 2'-O-methyladenosine-3'-phosphate
  modified_base 18: mod_base = OTHER; note = 2'-O-methyluridine-3'-phosphate
  modified_base 19: mod_base = OTHER; note = 2'-O-methylguanosine-3'-phosphorothioate
  modified_base 20: mod_base = OTHER; note = 2'-O-methyluridine-3'-phosphorothioate
  modified_base 21: mod_base = OTHER; note = 2'-O-methyladenosine
cctaatgatgataattatgta

SEQ ID NO: 10857 - RNA, 21 nt, synthetic construct
  source 1..21: mol_type = other RNA
  modified_base 1: mod_base = OTHER; note = 2'-O-methylcytidine-3'-phosphorothioate
  modified_base 2: mod_base = OTHER; note = 2'-O-methyluridine-3'-phosphorothioate
  modified_base 3: mod_base = OTHER; note = 2'-O-methyladenosine-3'-phosphate
  modified_base 4: mod_base = OTHER; note = 2'-O-methyladenosine-3'-phosphate
  modified_base 5: mod_base = OTHER; note = 2'-O-methyluridine-3'-phosphate
  modified_base 6: mod_base = OTHER; note = 2'-O-docosanyl-guanosine-3'-phosphate
  modified_base 7: mod_base = OTHER; note = 2'-deoxy-2'-fluoroadenosine-3'-phosphate
  modified_base 8: mod_base = OTHER; note = 2'-O-methyluridine-3'-phosphate
  modified_base 9: mod_base = OTHER; note = 2'-deoxy-2'-fluoroguanosine-3'-phosphate
  modified_base 10: mod_base = OTHER; note = 2'-deoxy-2'-fluoroadenosine-3'-phosphate
  modified_base 11: mod_base = OTHER; note = 2'-deoxy-2'-fluorouridine-3'-phosphate
  modified_base 12: mod_base = OTHER; note = 2'-O-methyladenosine-3'-phosphate
  modified_base 13: mod_base = OTHER; note = 2'-O-methyladenosine-3'-phosphate
  modified_base 14: mod_base = OTHER; note = 2'-O-methyluridine-3'-phosphate
  modified_base 15: mod_base = OTHER; note = 2'-O-methyluridine-3'-phosphate
  modified_base 16: mod_base = OTHER; note = 2'-O-methyladenosine-3'-phosphate
  modified_base 17: mod_base = OTHER; note = 2'-O-methyluridine-3'-phosphate
  modified_base 18: mod_base = OTHER; note = 2'-O-methylguanosine-3'-phosphate
  modified_base 19: mod_base = OTHER; note = 2'-O-methyluridine-3'-phosphorothioate
  modified_base 20: mod_base = OTHER; note = 2'-O-methyluridine-3'-phosphorothioate
  modified_base 21: mod_base = OTHER; note = 2'-O-methyladenosine
ctaatgatgataattatgtta

SEQ ID NO: 10858 - RNA, 21 nt, synthetic construct
  source 1..21: mol_type = other RNA
  modified_base 1: mod_base = OTHER; note = 2'-O-methyluridine-3'-phosphorothioate
  modified_base 2: mod_base = OTHER; note = 2'-O-methyladenosine-3'-phosphorothioate
  modified_base 3: mod_base = OTHER; note = 2'-O-methyladenosine-3'-phosphate
  modified_base 4: mod_base = OTHER; note = 2'-O-methyladenosine-3'-phosphate
  modified_base 5: mod_base = OTHER; note = 2'-O-methyladenosine-3'-phosphate
  modified_base 6: mod_base = OTHER; note = 2'-O-docosanyl-adenosine-3'-phosphate
  modified_base 7: mod_base = OTHER; note = 2'-deoxy-2'-fluoroguanosine-3'-phosphate
  modified_base 8: mod_base = OTHER; note = 2'-O-methyladenosine-3'-phosphate
  modified_base 9: mod_base = OTHER; note = 2'-deoxy-2'-fluoroadenosine-3'-phosphate
  modified_base 10: mod_base = OTHER; note = 2'-deoxy-2'-fluoroadenosine-3'-phosphate
  modified_base 11: mod_base = OTHER; note = 2'-deoxy-2'-fluorouridine-3'-phosphate
  modified_base 12: mod_base = OTHER; note = 2'-O-methylcytidine-3'-phosphate
  modified_base 13: mod_base = OTHER; note = 2'-O-methyluridine-3'-phosphate
  modified_base 14: mod_base = OTHER; note = 2'-O-methylcytidine-3'-phosphate
  modified_base 15: mod_base = OTHER; note = 2'-O-methyluridine-3'-phosphate
  modified_base 16: mod_base = OTHER; note = 2'-O-methylcytidine-3'-phosphate
  modified_base 17: mod_base = OTHER; note = 2'-O-methyladenosine-3'-phosphate
  modified_base 18: mod_base = OTHER; note = 2'-O-methyluridine-3'-phosphate
  modified_base 19: mod_base = OTHER; note = 2'-O-methyladenosine-3'-phosphorothioate
  modified_base 20: mod_base = OTHER; note = 2'-O-methylguanosine-3'-phosphorothioate
  modified_base 21: mod_base = OTHER; note = 2'-O-methyladenosine
taaaaagaaatctctcataga

SEQ ID NO: 10859 - RNA, 21 nt, synthetic construct
  source 1..21: mol_type = other RNA
  modified_base 1: mod_base = OTHER; note = 2'-O-methyladenosine-3'-phosphorothioate
  modified_base 2: mod_base = OTHER; note = 2'-O-methyladenosine-3'-phosphorothioate
  modified_base 3: mod_base = OTHER; note = 2'-O-methyladenosine-3'-phosphate
  modified_base 4: mod_base = OTHER; note = 2'-O-methyladenosine-3'-phosphate
  modified_base 5: mod_base = OTHER; note = 2'-O-methyladenosine-3'-phosphate
  modified_base 6: mod_base = OTHER; note = 2'-O-docosanyl-guanosine-3'-phosphate
  modified_base 7: mod_base = OTHER; note = 2'-deoxy-2'-fluoroadenosine-3'-phosphate
  modified_base 8: mod_base = OTHER; note = 2'-O-methyladenosine-3'-phosphate
  modified_base 9: mod_base = OTHER; note = 2'-deoxy-2'-fluoroadenosine-3'-phosphate
  modified_base 10: mod_base = OTHER; note = 2'-deoxy-2'-fluorouridine-3'-phosphate
  modified_base 11: mod_base = OTHER; note = 2'-deoxy-2'-fluorocytidine-3'-phosphate
  modified_base 12: mod_base = OTHER; note = 2'-O-methyluridine-3'-phosphate
  modified_base 13: mod_base = OTHER; note = 2'-O-methylcytidine-3'-phosphate
  modified_base 14: mod_base = OTHER; note = 2'-O-methyluridine-3'-phosphate
  modified_base 15: mod_base = OTHER; note = 2'-O-methylcytidine-3'-phosphate
  modified_base 16: mod_base = OTHER; note = 2'-O-methyladenosine-3'-phosphate
  modified_base 17: mod_base = OTHER; note = 2'-O-methyluridine-3'-phosphate
  modified_base 18: mod_base = OTHER; note = 2'-O-methyladenosine-3'-phosphate
  modified_base 19: mod_base = OTHER; note = 2'-O-methylguanosine-3'-phosphorothioate
  modified_base 20: mod_base = OTHER; note = 2'-O-methylcytidine-3'-phosphorothioate
  modified_base 21: mod_base = OTHER; note = 2'-O-methyladenosine
aaaaagaaatctctcatagca

SEQ ID NO: 10860 - RNA, 21 nt, synthetic construct
  source 1..21: mol_type = other RNA
  modified_base 1: mod_base = OTHER; note = 2'-O-methyladenosine-3'-phosphorothioate
  modified_base 2: mod_base = OTHER; note = 2'-O-methyluridine-3'-phosphorothioate
  modified_base 3: mod_base = OTHER; note = 2'-O-methylcytidine-3'-phosphate
  modified_base 4: mod_base = OTHER; note = 2'-O-methyluridine-3'-phosphate
  modified_base 5: mod_base = OTHER; note = 2'-O-methylcytidine-3'-phosphate
  modified_base 6: mod_base = OTHER; note = 2'-O-docosanyl-uridine-3'-phosphate
  modified_base 7: mod_base = OTHER; note = 2'-deoxy-2'-fluorocytidine-3'-phosphate
  modified_base 8: mod_base = OTHER; note = 2'-O-methyladenosine-3'-phosphate
  modified_base 9: mod_base = OTHER; note = 2'-deoxy-2'-fluorouridine-3'-phosphate
  modified_base 10: mod_base = OTHER; note = 2'-deoxy-2'-fluoroadenosine-3'-phosphate
  modified_base 11: mod_base = OTHER; note = 2'-deoxy-2'-fluoroguanosine-3'-phosphate
  modified_base 12: mod_base = OTHER; note = 2'-O-methylcytidine-3'-phosphate
  modified_base 13: mod_base = OTHER; note = 2'-O-methyluridine-3'-phosphate
  modified_base 14: mod_base = OTHER; note = 2'-O-methyluridine-3'-phosphate
  modified_base 15: mod_base = OTHER; note = 2'-O-methyluridine-3'-phosphate
  modified_base 16: mod_base = OTHER; note = 2'-O-methylcytidine-3'-phosphate
  modified_base 17: mod_base = OTHER; note = 2'-O-methyluridine-3'-phosphate
  modified_base 18: mod_base = OTHER; note = 2'-O-methyluridine-3'-phosphate
  modified_base 19: mod_base = OTHER; note = 2'-O-methyluridine-3'-phosphorothioate
  modified_base 20: mod_base = OTHER; note = 2'-O-methyluridine-3'-phosphorothioate
  modified_base 21: mod_base = OTHER; note = 2'-O-methyladenosine
atctctcatagctttctttta

SEQ ID NO: 10861 - RNA, 21 nt, synthetic construct
  source 1..21: mol_type = other RNA
  modified_base 1: mod_base = OTHER; note = 2'-O-methyluridine-3'-phosphorothioate
  modified_base 2: mod_base = OTHER; note = 2'-O-methylcytidine-3'-phosphorothioate
  modified_base 3: mod_base = OTHER; note = 2'-O-methyladenosine-3'-phosphate
  modified_base 4: mod_base = OTHER; note = 2'-O-methyluridine-3'-phosphate
  modified_base 5: mod_base = OTHER; note = 2'-O-methyladenosine-3'-phosphate
  modified_base 6: mod_base = OTHER; note = 2'-O-docosanyl-guanosine-3'-phosphate
  modified_base 7: mod_base = OTHER; note = 2'-deoxy-2'-fluorocytidine-3'-phosphate
  modified_base 8: mod_base = OTHER; note = 2'-O-methyluridine-3'-phosphate
  modified_base 9: mod_base = OTHER; note = 2'-deoxy-2'-fluorouridine-3'-phosphate
  modified_base 10: mod_base = OTHER; note = 2'-deoxy-2'-fluorouridine-3'-phosphate
  modified_base 11: mod_base = OTHER; note = 2'-deoxy-2'-fluorocytidine-3'-phosphate
  modified_base 12: mod_base = OTHER; note = 2'-O-methyluridine-3'-phosphate
  modified_base 13: mod_base = OTHER; note = 2'-O-methyluridine-3'-phosphate
  modified_base 14: mod_base = OTHER; note = 2'-O-methyluridine-3'-phosphate
  modified_base 15: mod_base = OTHER; note = 2'-O-methyluridine-3'-phosphate
  modified_base 16: mod_base = OTHER; note = 2'-O-methylcytidine-3'-phosphate
  modified_base 17: mod_base = OTHER; note = 2'-O-methylcytidine-3'-phosphate
  modified_base 18: mod_base = OTHER; note = 2'-O-methyladenosine-3'-phosphate
  modified_base 19: mod_base = OTHER; note = 2'-O-methyluridine-3'-phosphorothioate
  modified_base 20: mod_base = OTHER; note = 2'-O-methyluridine-3'-phosphorothioate
  modified_base 21: mod_base = OTHER; note = 2'-O-methyladenosine
tcatagctttcttttccatta

SEQ ID NO: 10862 - RNA, 21 nt, synthetic construct
  source 1..21: mol_type = other RNA
  modified_base 1: mod_base = OTHER; note = 2'-O-methylcytidine-3'-phosphorothioate
  modified_base 2: mod_base = OTHER; note = 2'-O-methyladenosine-3'-phosphorothioate
  modified_base 3: mod_base = OTHER; note = 2'-O-methyluridine-3'-phosphate
  modified_base 4: mod_base = OTHER; note = 2'-O-methyladenosine-3'-phosphate
  modified_base 5: mod_base = OTHER; note = 2'-O-methylguanosine-3'-phosphate
  modified_base 6: mod_base = OTHER; note = 2'-O-docosanyl-cytidine-3'-phosphate
  modified_base 7: mod_base = OTHER; note = 2'-deoxy-2'-fluorouridine-3'-phosphate
  modified_base 8: mod_base = OTHER; note = 2'-O-methyluridine-3'-phosphate
  modified_base 9: mod_base = OTHER; note = 2'-deoxy-2'-fluorouridine-3'-phosphate
  modified_base 10: mod_base = OTHER; note = 2'-deoxy-2'-fluorocytidine-3'-phosphate
  modified_base 11: mod_base = OTHER; note = 2'-deoxy-2'-fluorouridine-3'-phosphate
  modified_base 12: mod_base = OTHER; note = 2'-O-methyluridine-3'-phosphate
  modified_base 13: mod_base = OTHER; note = 2'-O-methyluridine-3'-phosphate
  modified_base 14: mod_base = OTHER; note = 2'-O-methyluridine-3'-phosphate
  modified_base 15: mod_base = OTHER; note = 2'-O-methylcytidine-3'-phosphate
  modified_base 16: mod_base = OTHER; note = 2'-O-methylcytidine-3'-phosphate
  modified_base 17: mod_base = OTHER; note = 2'-O-methyladenosine-3'-phosphate
  modified_base 18: mod_base = OTHER; note = 2'-O-methyluridine-3'-phosphate
  modified_base 19: mod_base = OTHER; note = 2'-O-methyluridine-3'-phosphorothioate
  modified_base 20: mod_base = OTHER; note = 2'-O-methyluridine-3'-phosphorothioate
  modified_base 21: mod_base = OTHER; note = 2'-O-methyladenosine
catagctttcttttccattta

SEQ ID NO: 10863 - RNA, 21 nt, synthetic construct
  source 1..21: mol_type = other RNA
  modified_base 1: mod_base = OTHER; note = 2'-O-methylguanosine-3'-phosphorothioate
  modified_base 2: mod_base = OTHER; note = 2'-O-methyluridine-3'-phosphorothioate
  modified_base 3: mod_base = OTHER; note = 2'-O-methylguanosine-3'-phosphate
  modified_base 4: mod_base = OTHER; note = 2'-O-methyladenosine-3'-phosphate
  modified_base 5: mod_base = OTHER; note = 2'-O-methyladenosine-3'-phosphate
  modified_base 6: mod_base = OTHER; note = 2'-O-docosanyl-uridine-3'-phosphate
  modified_base 7: mod_base = OTHER; note = 2'-deoxy-2'-fluoroguanosine-3'-phosphate
  modified_base 8: mod_base = OTHER; note = 2'-O-methyluridine-3'-phosphate
  modified_base 9: mod_base = OTHER; note = 2'-deoxy-2'-fluorouridine-3'-phosphate
  modified_base 10: mod_base = OTHER; note = 2'-deoxy-2'-fluorouridine-3'-phosphate
  modified_base 11: mod_base = OTHER; note = 2'-deoxy-2'-fluorouridine-3'-phosphate
  modified_base 12: mod_base = OTHER; note = 2'-O-methyluridine-3'-phosphate
  modified_base 13: mod_base = OTHER; note = 2'-O-methylguanosine-3'-phosphate
  modified_base 14: mod_base = OTHER; note = 2'-O-methylcytidine-3'-phosphate
  modified_base 15: mod_base = OTHER; note = 2'-O-methylcytidine-3'-phosphate
  modified_base 16: mod_base = OTHER; note = 2'-O-methyladenosine-3'-phosphate
  modified_base 17: mod_base = OTHER; note = 2'-O-methyluridine-3'-phosphate
  modified_base 18: mod_base = OTHER; note = 2'-O-methyluridine-3'-phosphate
  modified_base 19: mod_base = OTHER; note = 2'-O-methyluridine-3'-phosphorothioate
  modified_base 20: mod_base = OTHER; note = 2'-O-methyluridine-3'-phosphorothioate
  modified_base 21: mod_base = OTHER; note = 2'-O-methyladenosine
gtgaatgtttttgccatttta

SEQ ID NO: 10864 - RNA, 21 nt, synthetic construct
  source 1..21: mol_type = other RNA
  modified_base 1: mod_base = OTHER; note = 2'-O-methylcytidine-3'-phosphorothioate
  modified_base 2: mod_base = OTHER; note = 2'-O-methyluridine-3'-phosphorothioate
  modified_base 3: mod_base = OTHER; note = 2'-O-methyluridine-3'-phosphate
  modified_base 4: mod_base = OTHER; note = 2'-O-methyluridine-3'-phosphate
  modified_base 5: mod_base = OTHER; note = 2'-O-methyladenosine-3'-phosphate
  modified_base 6: mod_base = OTHER; note = 2'-O-docosanyl-uridine-3'-phosphate
  modified_base 7: mod_base = OTHER; note = 2'-deoxy-2'-fluoroguanosine-3'-phosphate
  modified_base 8: mod_base = OTHER; note = 2'-O-methyluridine-3'-phosphate
  modified_base 9: mod_base = OTHER; note = 2'-deoxy-2'-fluoroguanosine-3'-phosphate
  modified_base 10: mod_base = OTHER; note = 2'-deoxy-2'-fluoroadenosine-3'-phosphate
  modified_base 11: mod_base = OTHER; note = 2'-deoxy-2'-fluoroadenosine-3'-phosphate
  modified_base 12: mod_base = OTHER; note = 2'-O-methyluridine-3'-phosphate
  modified_base 13: mod_base = OTHER; note = 2'-O-methylguanosine-3'-phosphate
  modified_base 14: mod_base = OTHER; note = 2'-O-methyluridine-3'-phosphate
  modified_base 15: mod_base = OTHER; note = 2'-O-methyluridine-3'-phosphate
  modified_base 16: mod_base = OTHER; note = 2'-O-methyluridine-3'-phosphate
  modified_base 17: mod_base = OTHER; note = 2'-O-methyluridine-3'-phosphate
  modified_base 18: mod_base = OTHER; note = 2'-O-methyluridine-3'-phosphate
  modified_base 19: mod_base = OTHER; note = 2'-O-methylguanosine-3'-phosphorothioate
  modified_base 20: mod_base = OTHER; note = 2'-O-methylcytidine-3'-phosphorothioate
  modified_base 21: mod_base = OTHER; note = 2'-O-methyladenosine
ctttatgtgaatgtttttgca

SEQ ID NO: 10865 - RNA, 21 nt, synthetic construct
  source 1..21: mol_type = other RNA
  modified_base 1: mod_base = OTHER; note = 2'-O-methyladenosine-3'-phosphorothioate
  modified_base 2: mod_base = OTHER; note = 2'-O-methyluridine-3'-phosphorothioate
  modified_base 3: mod_base = OTHER; note = 2'-O-methylguanosine-3'-phosphate
  modified_base 4: mod_base = OTHER; note = 2'-O-methyluridine-3'-phosphate
  modified_base 5: mod_base = OTHER; note = 2'-O-methylguanosine-3'-phosphate
  modified_base 6: mod_base = OTHER; note = 2'-O-docosanyl-adenosine-3'-phosphate
  modified_base 7: mod_base = OTHER; note = 2'-deoxy-2'-fluoroadenosine-3'-phosphate
  modified_base 8: mod_base = OTHER; note = 2'-O-methyluridine-3'-phosphate
  modified_base 9: mod_base = OTHER; note = 2'-deoxy-2'-fluoroguanosine-3'-phosphate
  modified_base 10: mod_base = OTHER; note = 2'-deoxy-2'-fluorouridine-3'-phosphate
  modified_base 11: mod_base = OTHER; note = 2'-deoxy-2'-fluorouridine-3'-phosphate
  modified_base 12: mod_base = OTHER; note = 2'-O-methyluridine-3'-phosphate
  modified_base 13: mod_base = OTHER; note = 2'-O-methyluridine-3'-phosphate
  modified_base 14: mod_base = OTHER; note = 2'-O-methyluridine-3'-phosphate
  modified_base 15: mod_base = OTHER; note = 2'-O-methylguanosine-3'-phosphate
  modified_base 16: mod_base = OTHER; note = 2'-O-methylcytidine-3'-phosphate
  modified_base 17: mod_base = OTHER; note = 2'-O-methylcytidine-3'-phosphate
  modified_base 18: mod_base = OTHER; note = 2'-O-methyladenosine-3'-phosphate
  modified_base 19: mod_base = OTHER; note = 2'-O-methyluridine-3'-phosphorothioate
  modified_base 20: mod_base = OTHER; note = 2'-O-methyluridine-3'-phosphorothioate
  modified_base 21: mod_base = OTHER; note = 2'-O-methyladenosine
atgtgaatgtttttgccatta

SEQ ID NO: 10866 - RNA, 21 nt, synthetic construct
  source 1..21: mol_type = other RNA
  modified_base 1: mod_base = OTHER; note = 2'-O-methylguanosine-3'-phosphorothioate
  modified_base 2: mod_base = OTHER; note = 2'-O-methyladenosine-3'-phosphorothioate
  modified_base 3: mod_base = OTHER; note = 2'-O-methyladenosine-3'-phosphate
  modified_base 4: mod_base = OTHER; note = 2'-O-methyluridine-3'-phosphate
  modified_base 5: mod_base = OTHER; note = 2'-O-methylguanosine-3'-phosphate
  modified_base 6: mod_base = OTHER; note = 2'-O-docosanyl-uridine-3'-phosphate
  modified_base 7: mod_base = OTHER; note = 2'-deoxy-2'-fluorouridine-3'-phosphate
  modified_base 8: mod_base = OTHER; note = 2'-O-methyluridine-3'-phosphate
  modified_base 9: mod_base = OTHER; note = 2'-deoxy-2'-fluorouridine-3'-phosphate
  modified_base 10: mod_base = OTHER; note = 2'-deoxy-2'-fluorouridine-3'-phosphate
  modified_base 11: mod_base = OTHER; note = 2'-deoxy-2'-fluoroguanosine-3'-phosphate
  modified_base 12: mod_base = OTHER; note = 2'-O-methylcytidine-3'-phosphate
  modified_base 13: mod_base = OTHER; note = 2'-O-methylcytidine-3'-phosphate
  modified_base 14: mod_base = OTHER; note = 2'-O-methyladenosine-3'-phosphate
  modified_base 15: mod_base = OTHER; note = 2'-O-methyluridine-3'-phosphate
  modified_base 16: mod_base = OTHER; note = 2'-O-methyluridine-3'-phosphate
  modified_base 17: mod_base = OTHER; note = 2'-O-methyluridine-3'-phosphate
  modified_base 18: mod_base = OTHER; note = 2'-O-methyluridine-3'-phosphate
  modified_base 19: mod_base = OTHER; note = 2'-O-methyluridine-3'-phosphorothioate
  modified_base 20: mod_base = OTHER; note = 2'-O-methyluridine-3'-phosphorothioate
  modified_base 21: mod_base = OTHER; note = 2'-O-methyladenosine
gaatgtttttgccatttttta

SEQ ID NO: 10867 - RNA, 21 nt, synthetic construct
  source 1..21: mol_type = other RNA
  modified_base 1: mod_base = OTHER; note = 2'-O-methyladenosine-3'-phosphorothioate
  modified_base 2: mod_base = OTHER; note = 2'-O-methylguanosine-3'-phosphorothioate
  modified_base 3: mod_base = OTHER; note = 2'-O-methyladenosine-3'-phosphate
  modified_base 4: mod_base = OTHER; note = 2'-O-methyluridine-3'-phosphate
  modified_base 5: mod_base = OTHER; note = 2'-O-methyladenosine-3'-phosphate
  modified_base 6: mod_base = OTHER; note = 2'-O-docosanyl-adenosine-3'-phosphate
  modified_base 7: mod_base = OTHER; note = 2'-deoxy-2'-fluoroguanosine-3'-phosphate
  modified_base 8: mod_base = OTHER; note = 2'-O-methyladenosine-3'-phosphate
  modified_base 9: mod_base = OTHER; note = 2'-deoxy-2'-fluorocytidine-3'-phosphate
  modified_base 10: mod_base = OTHER; note = 2'-deoxy-2'-fluoroadenosine-3'-phosphate
  modified_base 11: mod_base = OTHER; note = 2'-deoxy-2'-fluoroguanosine-3'-phosphate
  modified_base 12: mod_base = OTHER; note = 2'-O-methyluridine-3'-phosphate
  modified_base 13: mod_base = OTHER; note = 2'-O-methyladenosine-3'-phosphate
  modified_base 14: mod_base = OTHER; note = 2'-O-methylcytidine-3'-phosphate
  modified_base 15: mod_base = OTHER; note = 2'-O-methyladenosine-3'-phosphate
  modified_base 16: mod_base = OTHER; note = 2'-O-methylguanosine-3'-phosphate
  modified_base 17: mod_base = OTHER; note = 2'-O-methyluridine-3'-phosphate
  modified_base 18: mod_base = OTHER; note = 2'-O-methyladenosine-3'-phosphate
  modified_base 19: mod_base = OTHER; note = 2'-O-methyluridine-3'-phosphorothioate
  modified_base 20: mod_base = OTHER; note = 2'-O-methyluridine-3'-phosphorothioate
  modified_base 21: mod_base = OTHER; note = 2'-O-methyladenosine
agataagacagtacagtatta

SEQ ID NO: 10868 - RNA, 21 nt, synthetic construct
  source 1..21: mol_type = other RNA
  modified_base 1: mod_base = OTHER; note = 2'-O-methyluridine-3'-phosphorothioate
  modified_base 2: mod_base = OTHER; note = 2'-O-methyladenosine-3'-phosphorothioate
  modified_base 3: mod_base = OTHER; note = 2'-O-methyladenosine-3'-phosphate
  modified_base 4: mod_base = OTHER; note = 2'-O-methylguanosine-3'-phosphate
  modified_base 5: mod_base = OTHER; note = 2'-O-methyladenosine-3'-phosphate
  modified_base 6: mod_base = OTHER; note = 2'-O-docosanyl-cytidine-3'-phosphate
  modified_base 7: mod_base = OTHER; note = 2'-deoxy-2'-fluoroadenosine-3'-phosphate
  modified_base 8: mod_base = OTHER; note = 2'-O-methylguanosine-3'-phosphate
  modified_base 9: mod_base = OTHER; note = 2'-deoxy-2'-fluorouridine-3'-phosphate
  modified_base 10: mod_base = OTHER; note = 2'-deoxy-2'-fluoroadenosine-3'-phosphate
  modified_base 11: mod_base = OTHER; note = 2'-deoxy-2'-fluorocytidine-3'-phosphate
  modified_base 12: mod_base = OTHER; note = 2'-O-methyladenosine-3'-phosphate
  modified_base 13: mod_base = OTHER; note = 2'-O-methylguanosine-3'-phosphate
  modified_base 14: mod_base = OTHER; note = 2'-O-methyluridine-3'-phosphate
  modified_base 15: mod_base = OTHER; note = 2'-O-methyladenosine-3'-phosphate
  modified_base 16: mod_base = OTHER; note = 2'-O-methyluridine-3'-phosphate
  modified_base 17: mod_base = OTHER; note = 2'-O-methyluridine-3'-phosphate
  modified_base 18: mod_base = OTHER; note = 2'-O-methyluridine-3'-phosphate
  modified_base 19: mod_base = OTHER; note = 2'-O-methyladenosine-3'-phosphorothioate
  modified_base 20: mod_base = OTHER; note = 2'-O-methyladenosine-3'-phosphorothioate
  modified_base 21: mod_base = OTHER; note = 2'-O-methyladenosine
taagacagtacagtatttaaa

SEQ ID NO: 10869 - RNA, 21 nt, synthetic construct
  source 1..21: mol_type = other RNA
  modified_base 1: mod_base = OTHER; note = 2'-O-methyladenosine-3'-phosphorothioate
  modified_base 2: mod_base = OTHER; note = 2'-O-methylguanosine-3'-phosphorothioate
  modified_base 3: mod_base = OTHER; note = 2'-O-methyladenosine-3'-phosphate
  modified_base 4: mod_base = OTHER; note = 2'-O-methylcytidine-3'-phosphate
  modified_base 5: mod_base = OTHER; note = 2'-O-methyladenosine-3'-phosphate
  modified_base 6: mod_base = OTHER; note = 2'-O-docosanyl-guanosine-3'-phosphate
  modified_base 7: mod_base = OTHER; note = 2'-deoxy-2'-fluorouridine-3'-phosphate
  modified_base 8: mod_base = OTHER; note = 2'-O-methyladenosine-3'-phosphate
  modified_base 9: mod_base = OTHER; note = 2'-deoxy-2'-fluorocytidine-3'-phosphate
  modified_base 10: mod_base = OTHER; note = 2'-deoxy-2'-fluoroadenosine-3'-phosphate
  modified_base 11: mod_base = OTHER; note = 2'-deoxy-2'-fluoroguanosine-3'-phosphate
  modified_base 12: mod_base = OTHER; note = 2'-O-methyluridine-3'-phosphate
  modified_base 13: mod_base = OTHER; note = 2'-O-methyladenosine-3'-phosphate
  modified_base 14: mod_base = OTHER; note = 2'-O-methyluridine-3'-phosphate
  modified_base 15: mod_base = OTHER; note = 2'-O-methyluridine-3'-phosphate
  modified_base 16: mod_base = OTHER; note = 2'-O-methyluridine-3'-phosphate
  modified_base 17: mod_base = OTHER; note = 2'-O-methyladenosine-3'-phosphate
  modified_base 18: mod_base = OTHER; note = 2'-O-methyladenosine-3'-phosphate
  modified_base 19: mod_base = OTHER; note = 2'-O-methylguanosine-3'-phosphorothioate
  modified_base 20: mod_base = OTHER; note = 2'-O-methyluridine-3'-phosphorothioate
  modified_base 21: mod_base = OTHER; note = 2'-O-methyladenosine
agacagtacagtatttaagta

SEQ ID NO: 10870 - RNA, 21 nt, synthetic construct
  source 1..21: mol_type = other RNA
  modified_base 1: mod_base = OTHER; note = 2'-O-methylcytidine-3'-phosphorothioate
  modified_base 2: mod_base = OTHER; note = 2'-O-methyladenosine-3'-phosphorothioate
  modified_base 3: mod_base = OTHER; note = 2'-O-methylguanosine-3'-phosphate
  modified_base 4: mod_base = OTHER; note = 2'-O-methylcytidine-3'-phosphate
  modified_base 5: mod_base = OTHER; note = 2'-O-methyladenosine-3'-phosphate
  modified_base 6: mod_base = OTHER; note = 2'-O-docosanyl-uridine-3'-phosphate
  modified_base 7: mod_base = OTHER; note = 2'-deoxy-2'-fluoroguanosine-3'-phosphate
  modified_base 8: mod_base = OTHER; note = 2'-O-methyladenosine-3'-phosphate
  modified_base 9: mod_base = OTHER; note = 2'-deoxy-2'-fluoroadenosine-3'-phosphate
  modified_base 10: mod_base = OTHER; note = 2'-deoxy-2'-fluoroadenosine-3'-phosphate
  modified_base 11: mod_base = OTHER; note = 2'-deoxy-2'-fluoroadenosine-3'-phosphate
  modified_base 12: mod_base = OTHER; note = 2'-O-methylguanosine-3'-phosphate
  modified_base 13: mod_base = OTHER; note = 2'-O-methyladenosine-3'-phosphate
  modified_base 14: mod_base = OTHER; note = 2'-O-methyluridine-3'-phosphate
  modified_base 15: mod_base = OTHER; note = 2'-O-methyladenosine-3'-phosphate
  modified_base 16: mod_base = OTHER; note = 2'-O-methyladenosine-3'-phosphate
  modified_base 17: mod_base = OTHER; note = 2'-O-methylcytidine-3'-phosphate
  modified_base 18: mod_base = OTHER; note = 2'-O-methyluridine-3'-phosphate
  modified_base 19: mod_base = OTHER; note = 2'-O-methylcytidine-3'-phosphorothioate
  modified_base 20: mod_base = OTHER; note = 2'-O-methyluridine-3'-phosphorothioate
  modified_base 21: mod_base = OTHER; note = 2'-O-methyladenosine
cagcatgaaaagataactcta

SEQ ID NO: 10871 - RNA, 21 nt, synthetic construct
  source 1..21: mol_type = other RNA
  modified_base 1: mod_base = OTHER; note = 2'-O-methyluridine-3'-phosphorothioate
  modified_base 2: mod_base = OTHER; note = 2'-O-methyluridine-3'-phosphorothioate
  modified_base 3: mod_base = OTHER; note = 2'-O-methylcytidine-3'-phosphate
  modified_base 4: mod_base = OTHER; note = 2'-O-methyladenosine-3'-phosphate
  modified_base 5: mod_base = OTHER; note = 2'-O-methyluridine-3'-phosphate
  modified_base 6: mod_base = OTHER; note = 2'-O-docosanyl-cytidine-3'-phosphate
  modified_base 7: mod_base = OTHER; note = 2'-deoxy-2'-fluorocytidine-3'-phosphate
  modified_base 8: mod_base = OTHER; note = 2'-O-methyladenosine-3'-phosphate
  modified_base 9: mod_base = OTHER; note = 2'-deoxy-2'-fluoroadenosine-3'-phosphate
  modified_base 10: mod_base = OTHER; note = 2'-deoxy-2'-fluorouridine-3'-phosphate
  modified_base 11: mod_base = OTHER; note = 2'-deoxy-2'-fluorocytidine-3'-phosphate
  modified_base 12: mod_base = OTHER; note = 2'-O-methyluridine-3'-phosphate
  modified_base 13: mod_base = OTHER; note = 2'-O-methylcytidine-3'-phosphate
  modified_base 14: mod_base = OTHER; note = 2'-O-methyluridine-3'-phosphate
  modified_base 15: mod_base = OTHER; note = 2'-O-methyladenosine-3'-phosphate
  modified_base 16: mod_base = OTHER; note = 2'-O-methyluridine-3'-phosphate
  modified_base 17: mod_base = OTHER; note = 2'-O-methylguanosine-3'-phosphate
  modified_base 18: mod_base = OTHER; note = 2'-O-methyluridine-3'-phosphate
  modified_base 19: mod_base = OTHER; note = 2'-O-methyluridine-3'-phosphorothioate
  modified_base 20: mod_base = OTHER; note = 2'-O-methyladenosine-3'-phosphorothioate
  modified_base 21: mod_base = OTHER; note = 2'-O-methyladenosine
ttcatccaatctctatgttaa

SEQ ID NO: 10872 - RNA, 21 nt, synthetic construct
  source 1..21: mol_type = other RNA
  modified_base 1: mod_base = OTHER; note = 2'-O-methylcytidine-3'-phosphorothioate
  modified_base 2: mod_base = OTHER; note = 2'-O-methyladenosine-3'-phosphorothioate
  modified_base 3: mod_base = OTHER; note = 2'-O-methyladenosine-3'-phosphate
  modified_base 4: mod_base = OTHER; note = 2'-O-methylcytidine-3'-phosphate
  modified_base 5: mod_base = OTHER; note = 2'-O-methyladenosine-3'-phosphate
  modified_base 6: mod_base = OTHER; note = 2'-O-docosanyl-cytidine-3'-phosphate
  modified_base 7: mod_base = OTHER; note = 2'-deoxy-2'-fluorocytidine-3'-phosphate
  modified_base 8: mod_base = OTHER; note = 2'-O-methyluridine-3'-phosphate
  modified_base 9: mod_base = OTHER; note = 2'-deoxy-2'-fluorocytidine-3'-phosphate
  modified_base 10: mod_base = OTHER; note = 2'-deoxy-2'-fluoroadenosine-3'-phosphate
  modified_base 11: mod_base = OTHER; note = 2'-deoxy-2'-fluoroadenosine-3'-phosphate
  modified_base 12: mod_base = OTHER; note = 2'-O-methylcytidine-3'-phosphate
  modified_base 13: mod_base = OTHER; note = 2'-O-methyluridine-3'-phosphate
  modified_base 14: mod_base = OTHER; note = 2'-O-methylcytidine-3'-phosphate
  modified_base 15: mod_base = OTHER; note = 2'-O-methyladenosine-3'-phosphate
  modified_base 16: mod_base = OTHER; note = 2'-O-methyluridine-3'-phosphate
  modified_base 17: mod_base = OTHER; note = 2'-O-methylcytidine-3'-phosphate
  modified_base 18: mod_base = OTHER; note = 2'-O-methyluridine-3'-phosphate
  modified_base 19: mod_base = OTHER; note = 2'-O-methyluridine-3'-phosphorothioate
  modified_base 20: mod_base = OTHER; note = 2'-O-methyluridine-3'-phosphorothioate
  modified_base 21: mod_base = OTHER; note = 2'-O-methyladenosine
caacacctcaactcatcttta

SEQ ID NO: 10873 - RNA, 21 nt, synthetic construct
  source 1..21: mol_type = other RNA
  modified_base 1: mod_base = OTHER; note = 2'-O-methyladenosine-3'-phosphorothioate
  modified_base 2: mod_base = OTHER; note = 2'-O-methyladenosine-3'-phosphorothioate
  modified_base 3: mod_base = OTHER; note = 2'-O-methylguanosine-3'-phosphate
  modified_base 4: mod_base = OTHER; note = 2'-O-methylcytidine-3'-phosphate
  modified_base 5: mod_base = OTHER; note = 2'-O-methyladenosine-3'-phosphate
  modified_base 6: mod_base = OTHER; note = 2'-O-docosanyl-adenosine-3'-phosphate
  modified_base 7: mod_base = OTHER; note = 2'-deoxy-2'-fluorocytidine-3'-phosphate
  modified_base 8: mod_base = OTHER; note = 2'-O-methyladenosine-3'-phosphate
  modified_base 9: mod_base = OTHER; note = 2'-deoxy-2'-fluorocytidine-3'-phosphate
  modified_base 10: mod_base = OTHER; note = 2'-deoxy-2'-fluorocytidine-3'-phosphate
  modified_base 11: mod_base = OTHER; note = 2'-deoxy-2'-fluorouridine-3'-phosphate
  modified_base 12: mod_base = OTHER; note = 2'-O-methylcytidine-3'-phosphate
  modified_base 13: mod_base = OTHER; note = 2'-O-methyladenosine-3'-phosphate
  modified_base 14: mod_base = OTHER; note = 2'-O-methyladenosine-3'-phosphate
  modified_base 15: mod_base = OTHER; note = 2'-O-methylcytidine-3'-phosphate
  modified_base 16: mod_base = OTHER; note = 2'-O-methyluridine-3'-phosphate
  modified_base 17: mod_base = OTHER; note = 2'-O-methylcytidine-3'-phosphate
  modified_base 18: mod_base = OTHER; note = 2'-O-methyladenosine-3'-phosphate
  modified_base 19: mod_base = OTHER; note = 2'-O-methyluridine-3'-phosphorothioate
  modified_base 20: mod_base = OTHER; note = 2'-O-methylcytidine-3'-phosphorothioate
  modified_base 21: mod_base = OTHER; note = 2'-O-methyladenosine
aagcaacacctcaactcatca

SEQ ID NO: 10874 - RNA, 21 nt, synthetic construct
  source 1..21: mol_type = other RNA
  modified_base 1: mod_base = OTHER; note = 2'-O-methylcytidine-3'-phosphorothioate
  modified_base 2: mod_base = OTHER; note = 2'-O-methyladenosine-3'-phosphorothioate
  modified_base 3: mod_base = OTHER; note = 2'-O-methylcytidine-3'-phosphate
  modified_base 4: mod_base = OTHER; note = 2'-O-methylcytidine-3'-phosphate
  modified_base 5: mod_base = OTHER; note = 2'-O-methyluridine-3'-phosphate
  modified_base 6: mod_base = OTHER; note = 2'-O-docosanyl-cytidine-3'-phosphate
  modified_base 7: mod_base = OTHER; note = 2'-deoxy-2'-fluoroadenosine-3'-phosphate
  modified_base 8: mod_base = OTHER; note = 2'-O-methyladenosine-3'-phosphate
  modified_base 9: mod_base = OTHER; note = 2'-deoxy-2'-fluorocytidine-3'-phosphate
  modified_base 10: mod_base = OTHER; note = 2'-deoxy-2'-fluorouridine-3'-phosphate
  modified_base 11: mod_base = OTHER; note = 2'-deoxy-2'-fluorocytidine-3'-phosphate
  modified_base 12: mod_base = OTHER; note = 2'-O-methyladenosine-3'-phosphate
  modified_base 13: mod_base = OTHER; note = 2'-O-methyluridine-3'-phosphate
  modified_base 14: mod_base = OTHER; note = 2'-O-methylcytidine-3'-phosphate
  modified_base 15: mod_base = OTHER; note = 2'-O-methyluridine-3'-phosphate
  modified_base 16: mod_base = OTHER; note = 2'-O-methyluridine-3'-phosphate
  modified_base 17: mod_base = OTHER; note = 2'-O-methyluridine-3'-phosphate
  modified_base 18: mod_base = OTHER; note = 2'-O-methyluridine-3'-phosphate
  modified_base 19: mod_base = OTHER; note = 2'-O-methyluridine-3'-phosphorothioate
  modified_base 20: mod_base = OTHER; note = 2'-O-methyladenosine-3'-phosphorothioate
  modified_base 21: mod_base = OTHER; note = 2'-O-methyladenosine
cacctcaactcatctttttaa

SEQ ID NO: 10875 - RNA, 21 nt, synthetic construct
  source 1..21: mol_type = other RNA
  modified_base 1: mod_base = OTHER; note = 2'-O-methylcytidine-3'-phosphorothioate
  modified_base 2: mod_base = OTHER; note = 2'-O-methylcytidine-3'-phosphorothioate
  modified_base 3: mod_base = OTHER; note = 2'-O-methyluridine-3'-phosphate
  modified_base 4: mod_base = OTHER; note = 2'-O-methylcytidine-3'-phosphate
  modified_base 5: mod_base = OTHER; note = 2'-O-methyladenosine-3'-phosphate
  modified_base 6: mod_base = OTHER; note = 2'-O-docosanyl-adenosine-3'-phosphate
  modified_base 7: mod_base = OTHER; note = 2'-deoxy-2'-fluorocytidine-3'-phosphate
  modified_base 8: mod_base = OTHER; note = 2'-O-methyluridine-3'-phosphate
  modified_base 9: mod_base = OTHER; note = 2'-deoxy-2'-fluorocytidine-3'-phosphate
  modified_base 10: mod_base = OTHER; note = 2'-deoxy-2'-fluoroadenosine-3'-phosphate
  modified_base 11: mod_base = OTHER; note = 2'-deoxy-2'-fluorouridine-3'-phosphate
  modified_base 12: mod_base = OTHER; note = 2'-O-methylcytidine-3'-phosphate
  modified_base 13: mod_base = OTHER; note = 2'-O-methyluridine-3'-phosphate
  modified_base 14: mod_base = OTHER; note = 2'-O-methyluridine-3'-phosphate
  modified_base 15: mod_base = OTHER; note = 2'-O-methyluridine-3'-phosphate
  modified_base 16: mod_base = OTHER; note = 2'-O-methyluridine-3'-phosphate
  modified_base 17: mod_base = OTHER; note = 2'-O-methyluridine-3'-phosphate
  modified_base 18: mod_base = OTHER; note = 2'-O-methyladenosine-3'-phosphate
  modified_base 19: mod_base = OTHER; note = 2'-O-methyluridine-3'-phosphorothioate
  modified_base 20: mod_base = OTHER; note = 2'-O-methyluridine-3'-phosphorothioate
  modified_base 21: mod_base = OTHER; note = 2'-O-methyladenosine
cctcaactcatctttttatta

SEQ ID NO: 10876 - RNA, 21 nt, synthetic construct
  source 1..21: mol_type = other RNA
  modified_base 1: mod_base = OTHER; note = 2'-O-methylcytidine-3'-phosphorothioate
  modified_base 2: mod_base = OTHER; note = 2'-O-methyluridine-3'-phosphorothioate
  modified_base 3: mod_base = OTHER; note = 2'-O-methylcytidine-3'-phosphate
  modified_base 4: mod_base = OTHER; note = 2'-O-methyladenosine-3'-phosphate
  modified_base 5: mod_base = OTHER; note = 2'-O-methyladenosine-3'-phosphate
  modified_base 6: mod_base = OTHER; note = 2'-O-docosanyl-cytidine-3'-phosphate
  modified_base 7: mod_base = OTHER; note = 2'-deoxy-2'-fluorouridine-3'-phosphate
  modified_base 8: mod_base = OTHER; note = 2'-O-methylcytidine-3'-phosphate
  modified_base 9: mod_base = OTHER; note = 2'-deoxy-2'-fluoroadenosine-3'-phosphate
  modified_base 10: mod_base = OTHER; note = 2'-deoxy-2'-fluorouridine-3'-phosphate
  modified_base 11: mod_base = OTHER; note = 2'-deoxy-2'-fluorocytidine-3'-phosphate
  modified_base 12: mod_base = OTHER; note = 2'-O-methyluridine-3'-phosphate
  modified_base 13: mod_base = OTHER; note = 2'-O-methyluridine-3'-phosphate
  modified_base 14: mod_base = OTHER; note = 2'-O-methyluridine-3'-phosphate
  modified_base 15: mod_base = OTHER; note = 2'-O-methyluridine-3'-phosphate
  modified_base 16: mod_base = OTHER; note = 2'-O-methyluridine-3'-phosphate
  modified_base 17: mod_base = OTHER; note = 2'-O-methyladenosine-3'-phosphate
  modified_base 18: mod_base = OTHER; note = 2'-O-methyluridine-3'-phosphate
  modified_base 19: mod_base = OTHER; note = 2'-O-methyluridine-3'-phosphorothioate
  modified_base 20: mod_base = OTHER; note = 2'-O-methyluridine-3'-phosphorothioate
  modified_base 21: mod_base = OTHER; note = 2'-O-methyladenosine
ctcaactcatctttttattta

SEQ ID NO: 10877 - RNA, 21 nt, synthetic construct
  source 1..21: mol_type = other RNA
  modified_base 1: mod_base = OTHER; note = 2'-O-methyluridine-3'-phosphorothioate
  modified_base 2: mod_base = OTHER; note = 2'-O-methylcytidine-3'-phosphorothioate
  modified_base 3: mod_base = OTHER; note = 2'-O-methyluridine-3'-phosphate
  modified_base 4: mod_base = OTHER; note = 2'-O-methyladenosine-3'-phosphate
  modified_base 5: mod_base = OTHER; note = 2'-O-methyluridine-3'-phosphate
  modified_base 6: mod_base = OTHER; note = 2'-O-docosanyl-adenosine-3'-phosphate
  modified_base 7: mod_base = OTHER; note = 2'-deoxy-2'-fluoroadenosine-3'-phosphate
  modified_base 8: mod_base = OTHER; note = 2'-O-methyladenosine-3'-phosphate
  modified_base 9: mod_base = OTHER; note = 2'-deoxy-2'-fluoroadenosine-3'-phosphate
  modified_base 10: mod_base = OTHER; note = 2'-deoxy-2'-fluoroadenosine-3'-phosphate
  modified_base 11: mod_base = OTHER; note = 2'-deoxy-2'-fluorouridine-3'-phosphate
  modified_base 12: mod_base = OTHER; note = 2'-O-methylguanosine-3'-phosphate
  modified_base 13: mod_base = OTHER; note = 2'-O-methyluridine-3'-phosphate
  modified_base 14: mod_base = OTHER; note = 2'-O-methyluridine-3'-phosphate
  modified_base 15: mod_base = OTHER; note = 2'-O-methyladenosine-3'-phosphate
  modified_base 16: mod_base = OTHER; note = 2'-O-methyluridine-3'-phosphate
  modified_base 17: mod_base = OTHER; note = 2'-O-methyladenosine-3'-phosphate
  modified_base 18: mod_base = OTHER; note = 2'-O-methylguanosine-3'-phosphate
  modified_base 19: mod_base = OTHER; note = 2'-O-methyluridine-3'-phosphorothioate
  modified_base 20: mod_base = OTHER; note = 2'-O-methylcytidine-3'-phosphorothioate
  modified_base 21: mod_base = OTHER; note = 2'-O-methyladenosine
tctataaaaatgttatagtca

SEQ ID NO: 10878 - RNA, 21 nt, synthetic construct
  source 1..21: mol_type = other RNA
  modified_base 1: mod_base = OTHER; note = 2'-O-methyluridine-3'-phosphorothioate
  modified_base 2: mod_base = OTHER; note = 2'-O-methyluridine-3'-phosphorothioate
  modified_base 3: mod_base = OTHER; note = 2'-O-methylguanosine-3'-phosphate
  modified_base 4: mod_base = OTHER; note = 2'-O-methyladenosine-3'-phosphate
  modified_base 5: mod_base = OTHER; note = 2'-O-methyladenosine-3'-phosphate
  modified_base 6: mod_base = OTHER; note = 2'-O-docosanyl-cytidine-3'-phosphate
  modified_base 7: mod_base = OTHER; note = 2'-deoxy-2'-fluorocytidine-3'-phosphate
  modified_base 8: mod_base = OTHER; note = 2'-O-methyladenosine-3'-phosphate
  modified_base 9: mod_base = OTHER; note = 2'-deoxy-2'-fluoroadenosine-3'-phosphate
  modified_base 10: mod_base = OTHER; note = 2'-deoxy-2'-fluoroguanosine-3'-phosphate
  modified_base 11: mod_base = OTHER; note = 2'-deoxy-2'-fluoroadenosine-3'-phosphate
  modified_base 12: mod_base = OTHER; note = 2'-O-methylguanosine-3'-phosphate
  modified_base 13: mod_base = OTHER; note = 2'-O-methylcytidine-3'-phosphate
  modified_base 14: mod_base = OTHER; note = 2'-O-methyladenosine-3'-phosphate
  modified_base 15: mod_base = OTHER; note = 2'-O-methylcytidine-3'-phosphate
  modified_base 16: mod_base = OTHER; note = 2'-O-methyladenosine-3'-phosphate
  modified_base 17: mod_base = OTHER; note = 2'-O-methyluridine-3'-phosphate
  modified_base 18: mod_base = OTHER; note = 2'-O-methylguanosine-3'-phosphate
  modified_base 19: mod_base = OTHER; note = 2'-O-methyladenosine-3'-phosphorothioate
  modified_base 20: mod_base = OTHER; note = 2'-O-methyladenosine-3'-phosphorothioate
  modified_base 21: mod_base = OTHER; note = 2'-O-methyladenosine
ttgaaccaagagcacatgaaa

SEQ ID NO: 10879 - RNA, 21 nt, synthetic construct
  source 1..21: mol_type = other RNA
  modified_base 1: mod_base = OTHER; note = 2'-O-methyladenosine-3'-phosphorothioate
  modified_base 2: mod_base = OTHER; note = 2'-O-methyluridine-3'-phosphorothioate
  modified_base 3: mod_base = OTHER; note = 2'-O-methyluridine-3'-phosphate
  modified_base 4: mod_base = OTHER; note = 2'-O-methyluridine-3'-phosphate
  modified_base 5: mod_base = OTHER; note = 2'-O-methyluridine-3'-phosphate
  modified_base 6: mod_base = OTHER; note = 2'-O-docosanyl-adenosine-3'-phosphate
  modified_base 7: mod_base = OTHER; note = 2'-deoxy-2'-fluorocytidine-3'-phosphate
  modified_base 8: mod_base = OTHER; note = 2'-O-methyluridine-3'-phosphate
  modified_base 9: mod_base = OTHER; note = 2'-deoxy-2'-fluorouridine-3'-phosphate
  modified_base 10: mod_base = OTHER; note = 2'-deoxy-2'-fluoroguanosine-3'-phosphate
  modified_base 11: mod_base = OTHER; note = 2'-deoxy-2'-fluoroadenosine-3'-phosphate
  modified_base 12: mod_base = OTHER; note = 2'-O-methyladenosine-3'-phosphate
  modified_base 13: mod_base = OTHER; note = 2'-O-methylcytidine-3'-phosphate
  modified_base 14: mod_base = OTHER; note = 2'-O-methylcytidine-3'-phosphate
  modified_base 15: mod_base = OTHER; note = 2'-O-methyladenosine-3'-phosphate
  modified_base 16: mod_base = OTHER; note = 2'-O-methyladenosine-3'-phosphate
  modified_base 17: mod_base = OTHER; note = 2'-O-methylguanosine-3'-phosphate
  modified_base 18: mod_base = OTHER; note = 2'-O-methyladenosine-3'-phosphate
  modified_base 19: mod_base = OTHER; note = 2'-O-methylguanosine-3'-phosphorothioate
  modified_base 20: mod_base = OTHER; note = 2'-O-methylcytidine-3'-phosphorothioate
  modified_base 21: mod_base = OTHER; note = 2'-O-methyladenosine
attttacttgaaccaagagca

SEQ ID NO: 10880 - RNA, 21 nt, synthetic construct
  source 1..21: mol_type = other RNA
  modified_base 1: mod_base = OTHER; note = 2'-O-methyluridine-3'-phosphorothioate
  modified_base 2: mod_base = OTHER; note = 2'-O-methyluridine-3'-phosphorothioate
  modified_base 3: mod_base = OTHER; note = 2'-O-methyluridine-3'-phosphate
  modified_base 4: mod_base = OTHER; note = 2'-O-methyluridine-3'-phosphate
  modified_base 5: mod_base = OTHER; note = 2'-O-methyladenosine-3'-phosphate
  modified_base 6: mod_base = OTHER; note = 2'-O-docosanyl-cytidine-3'-phosphate
  modified_base 7: mod_base = OTHER; note = 2'-deoxy-2'-fluorouridine-3'-phosphate
  modified_base 8: mod_base = OTHER; note = 2'-O-methyluridine-3'-phosphate
  modified_base 9: mod_base = OTHER; note = 2'-deoxy-2'-fluoroguanosine-3'-phosphate
  modified_base 10: mod_base = OTHER; note = 2'-deoxy-2'-fluoroadenosine-3'-phosphate
  modified_base 11: mod_base = OTHER; note = 2'-deoxy-2'-fluoroadenosine-3'-phosphate
  modified_base 12: mod_base = OTHER; note = 2'-O-methylcytidine-3'-phosphate
  modified_base 13: mod_base = OTHER; note = 2'-O-methylcytidine-3'-phosphate
  modified_base 14: mod_base = OTHER; note = 2'-O-methyladenosine-3'-phosphate
  modified_base 15: mod_base = OTHER; note = 2'-O-methyladenosine-3'-phosphate
  modified_base 16: mod_base = OTHER; note = 2'-O-methylguanosine-3'-phosphate
  modified_base 17: mod_base = OTHER; note = 2'-O-methyladenosine-3'-phosphate
  modified_base 18: mod_base = OTHER; note = 2'-O-methylguanosine-3'-phosphate
  modified_base 19: mod_base = OTHER; note = 2'-O-methylcytidine-3'-phosphorothioate
  modified_base 20: mod_base = OTHER; note = 2'-O-methyladenosine-3'-phosphorothioate
  modified_base 21: mod_base = OTHER; note = 2'-O-methyladenosine
ttttacttgaaccaagagcaa

SEQ ID NO: 10881 - RNA, 21 nt, synthetic construct
  source 1..21: mol_type = other RNA
  modified_base 1: mod_base = OTHER; note = 2'-O-methyluridine-3'-phosphorothioate
  modified_base 2: mod_base = OTHER; note = 2'-O-methyluridine-3'-phosphorothioate
  modified_base 3: mod_base = OTHER; note = 2'-O-methyluridine-3'-phosphate
  modified_base 4: mod_base = OTHER; note = 2'-O-methyladenosine-3'-phosphate
  modified_base 5: mod_base = OTHER; note = 2'-O-methylcytidine-3'-phosphate
  modified_base 6: mod_base = OTHER; note = 2'-O-docosanyl-uridine-3'-phosphate
  modified_base 7: mod_base = OTHER; note = 2'-deoxy-2'-fluorouridine-3'-phosphate
  modified_base 8: mod_base = OTHER; note = 2'-O-methylguanosine-3'-phosphate
  modified_base 9: mod_base = OTHER; note = 2'-deoxy-2'-fluoroadenosine-3'-phosphate
  modified_base 10: mod_base = OTHER; note = 2'-deoxy-2'-fluoroadenosine-3'-phosphate
  modified_base 11: mod_base = OTHER; note = 2'-deoxy-2'-fluorocytidine-3'-phosphate
  modified_base 12: mod_base = OTHER; note = 2'-O-methylcytidine-3'-phosphate
  modified_base 13: mod_base = OTHER; note = 2'-O-methyladenosine-3'-phosphate
  modified_base 14: mod_base = OTHER; note = 2'-O-methyladenosine-3'-phosphate
  modified_base 15: mod_base = OTHER; note = 2'-O-methylguanosine-3'-phosphate
  modified_base 16: mod_base = OTHER; note = 2'-O-methyladenosine-3'-phosphate
  modified_base 17: mod_base = OTHER; note = 2'-O-methylguanosine-3'-phosphate
  modified_base 18: mod_base = OTHER; note = 2'-O-methylcytidine-3'-phosphate
  modified_base 19: mod_base = OTHER; note = 2'-O-methyladenosine-3'-phosphorothioate
  modified_base 20: mod_base = OTHER; note = 2'-O-methylcytidine-3'-phosphorothioate
  modified_base 21: mod_base = OTHER; note = 2'-O-methyladenosine
tttacttgaaccaagagcaca

SEQ ID NO: 10882 - RNA, 21 nt, synthetic construct
  source 1..21: mol_type = other RNA
  modified_base 1: mod_base = OTHER; note = 2'-O-methyluridine-3'-phosphorothioate
  modified_base 2: mod_base = OTHER; note = 2'-O-methyluridine-3'-phosphorothioate
  modified_base 3: mod_base = OTHER; note = 2'-O-methyladenosine-3'-phosphate
  modified_base 4: mod_base = OTHER; note = 2'-O-methylcytidine-3'-phosphate
  modified_base 5: mod_base = OTHER; note = 2'-O-methyluridine-3'-phosphate
  modified_base 6: mod_base = OTHER; note = 2'-O-docosanyl-uridine-3'-phosphate
  modified_base 7: mod_base = OTHER; note = 2'-deoxy-2'-fluoroguanosine-3'-phosphate
  modified_base 8: mod_base = OTHER; note = 2'-O-methyladenosine-3'-phosphate
  modified_base 9: mod_base = OTHER; note = 2'-deoxy-2'-fluoroadenosine-3'-phosphate
  modified_base 10: mod_base = OTHER; note = 2'-deoxy-2'-fluorocytidine-3'-phosphate
  modified_base 11: mod_base = OTHER; note = 2'-deoxy-2'-fluorocytidine-3'-phosphate
  modified_base 12: mod_base = OTHER; note = 2'-O-methyladenosine-3'-phosphate
  modified_base 13: mod_base = OTHER; note = 2'-O-methyladenosine-3'-phosphate
  modified_base 14: mod_base = OTHER; note = 2'-O-methylguanosine-3'-phosphate
  modified_base 15: mod_base = OTHER; note = 2'-O-methyladenosine-3'-phosphate
  modified_base 16: mod_base = OTHER; note = 2'-O-methylguanosine-3'-phosphate
  modified_base 17: mod_base = OTHER; note = 2'-O-methylcytidine-3'-phosphate
  modified_base 18: mod_base = OTHER; note = 2'-O-methyladenosine-3'-phosphate
  modified_base 19: mod_base = OTHER; note = 2'-O-methylcytidine-3'-phosphorothioate
  modified_base 20: mod_base = OTHER; note = 2'-O-methyladenosine-3'-phosphorothioate
  modified_base 21: mod_base = OTHER; note = 2'-O-methyladenosine
ttacttgaaccaagagcacaa

SEQ ID NO: 10883 - RNA, 21 nt, synthetic construct
  source 1..21: mol_type = other RNA
  modified_base 1: mod_base = OTHER; note = 2'-O-methyluridine-3'-phosphorothioate
  modified_base 2: mod_base = OTHER; note = 2'-O-methyladenosine-3'-phosphorothioate
  modified_base 3: mod_base = OTHER; note = 2'-O-methylcytidine-3'-phosphate
  modified_base 4: mod_base = OTHER; note = 2'-O-methyluridine-3'-phosphate
  modified_base 5: mod_base = OTHER; note = 2'-O-methyluridine-3'-phosphate
  modified_base 6: mod_base = OTHER; note = 2'-O-docosanyl-guanosine-3'-phosphate
  modified_base 7: mod_base = OTHER; note = 2'-deoxy-2'-fluoroadenosine-3'-phosphate
  modified_base 8: mod_base = OTHER; note = 2'-O-methyladenosine-3'-phosphate
  modified_base 9: mod_base = OTHER; note = 2'-deoxy-2'-fluorocytidine-3'-phosphate
  modified_base 10: mod_base = OTHER; note = 2'-deoxy-2'-fluorocytidine-3'-phosphate
  modified_base 11: mod_base = OTHER; note = 2'-deoxy-2'-fluoroadenosine-3'-phosphate
  modified_base 12: mod_base = OTHER; note = 2'-O-methyladenosine-3'-phosphate
  modified_base 13: mod_base = OTHER; note = 2'-O-methylguanosine-3'-phosphate
  modified_base 14: mod_base = OTHER; note = 2'-O-methyladenosine-3'-phosphate
  modified_base 15: mod_base = OTHER; note = 2'-O-methylguanosine-3'-phosphate
  modified_base 16: mod_base = OTHER; note = 2'-O-methylcytidine-3'-phosphate
  modified_base 17: mod_base = OTHER; note = 2'-O-methyladenosine-3'-phosphate
  modified_base 18: mod_base = OTHER; note = 2'-O-methylcytidine-3'-phosphate
  modified_base 19: mod_base = OTHER; note = 2'-O-methyladenosine-3'-phosphorothioate
  modified_base 20: mod_base = OTHER; note = 2'-O-methyluridine-3'-phosphorothioate
  modified_base 21: mod_base = OTHER; note = 2'-O-methyladenosine
tacttgaaccaagagcacata

SEQ ID NO: 10884 - RNA, 21 nt, synthetic construct
  source 1..21: mol_type = other RNA
  modified_base 1: mod_base = OTHER; note = 2'-O-methyladenosine-3'-phosphorothioate
  modified_base 2: mod_base = OTHER; note = 2'-O-methylcytidine-3'-phosphorothioate
  modified_base 3: mod_base = OTHER; note = 2'-O-methyluridine-3'-phosphate
  modified_base 4: mod_base = OTHER; note = 2'-O-methyluridine-3'-phosphate
  modified_base 5: mod_base = OTHER; note = 2'-O-methylguanosine-3'-phosphate
  modified_base 6: mod_base = OTHER; note = 2'-O-docosanyl-adenosine-3'-phosphate
  modified_base 7: mod_base = OTHER; note = 2'-deoxy-2'-fluoroadenosine-3'-phosphate
  modified_base 8: mod_base = OTHER; note = 2'-O-methylcytidine-3'-phosphate
  modified_base 9: mod_base = OTHER; note = 2'-deoxy-2'-fluorocytidine-3'-phosphate
  modified_base 10: mod_base = OTHER; note = 2'-deoxy-2'-fluoroadenosine-3'-phosphate
  modified_base 11: mod_base = OTHER; note = 2'-deoxy-2'-fluoroadenosine-3'-phosphate
  modified_base 12: mod_base = OTHER; note = 2'-O-methylguanosine-3'-phosphate
  modified_base 13: mod_base = OTHER; note = 2'-O-methyladenosine-3'-phosphate
  modified_base 14: mod_base = OTHER; note = 2'-O-methylguanosine-3'-phosphate
  modified_base 15: mod_base = OTHER; note = 2'-O-methylcytidine-3'-phosphate
  modified_base 16: mod_base = OTHER; note = 2'-O-methyladenosine-3'-phosphate
  modified_base 17: mod_base = OTHER; note = 2'-O-methylcytidine-3'-phosphate
  modified_base 18: mod_base = OTHER; note = 2'-O-methyladenosine-3'-phosphate
  modified_base 19: mod_base = OTHER; note = 2'-O-methyluridine-3'-phosphorothioate
  modified_base 20: mod_base = OTHER; note = 2'-O-methylguanosine-3'-phosphorothioate
  modified_base 21: mod_base = OTHER; note = 2'-O-methyladenosine
acttgaaccaagagcacatga

SEQ ID NO: 10885 - RNA, 21 nt, synthetic construct
  source 1..21: mol_type = other RNA
  modified_base 1: mod_base = OTHER; note = 2'-O-methylcytidine-3'-phosphorothioate
  modified_base 2: mod_base = OTHER; note = 2'-O-methyluridine-3'-phosphorothioate
  modified_base 3: mod_base = OTHER; note = 2'-O-methyluridine-3'-phosphate
  modified_base 4: mod_base = OTHER; note = 2'-O-methylguanosine-3'-phosphate
  modified_base 5: mod_base = OTHER; note = 2'-O-methyladenosine-3'-phosphate
  modified_base 6: mod_base = OTHER; note = 2'-O-docosanyl-adenosine-3'-phosphate
  modified_base 7: mod_base = OTHER; note = 2'-deoxy-2'-fluorocytidine-3'-phosphate
  modified_base 8: mod_base = OTHER; note = 2'-O-methylcytidine-3'-phosphate
  modified_base 9: mod_base = OTHER; note = 2'-deoxy-2'-fluoroadenosine-3'-phosphate
  modified_base 10: mod_base = OTHER; note = 2'-deoxy-2'-fluoroadenosine-3'-phosphate
  modified_base 11: mod_base = OTHER; note = 2'-deoxy-2'-fluoroguanosine-3'-phosphate
  modified_base 12: mod_base = OTHER; note = 2'-O-methyladenosine-3'-phosphate
  modified_base 13: mod_base = OTHER; note = 2'-O-methylguanosine-3'-phosphate
  modified_base 14: mod_base = OTHER; note = 2'-O-methylcytidine-3'-phosphate
  modified_base 15: mod_base = OTHER; note = 2'-O-methyladenosine-3'-phosphate
  modified_base 16: mod_base = OTHER; note = 2'-O-methylcytidine-3'-phosphate
  modified_base 17: mod_base = OTHER; note = 2'-O-methyladenosine-3'-phosphate
  modified_base 18: mod_base = OTHER; note = 2'-O-methyluridine-3'-phosphate
  modified_base 19: mod_base = OTHER; note = 2'-O-methylguanosine-3'-phosphorothioate
  modified_base 20: mod_base = OTHER; note = 2'-O-methyladenosine-3'-phosphorothioate
  modified_base 21: mod_base = OTHER; note = 2'-O-methyladenosine
cttgaaccaagagcacatgaa

SEQ ID NO: 10886 - RNA, 21 nt, synthetic construct
  source 1..21: mol_type = other RNA
  modified_base 1: mod_base = OTHER; note = 2'-O-methyluridine-3'-phosphorothioate
  modified_base 2: mod_base = OTHER; note = 2'-O-methylguanosine-3'-phosphorothioate
  modified_base 3: mod_base = OTHER; note = 2'-O-methyladenosine-3'-phosphate
  modified_base 4: mod_base = OTHER; note = 2'-O-methyladenosine-3'-phosphate
  modified_base 5: mod_base = OTHER; note = 2'-O-methylcytidine-3'-phosphate
  modified_base 6: mod_base = OTHER; note = 2'-O-docosanyl-cytidine-3'-phosphate
  modified_base 7: mod_base = OTHER; note = 2'-deoxy-2'-fluoroadenosine-3'-phosphate
  modified_base 8: mod_base = OTHER; note = 2'-O-methyladenosine-3'-phosphate
  modified_base 9: mod_base = OTHER; note = 2'-deoxy-2'-fluoroguanosine-3'-phosphate
  modified_base 10: mod_base = OTHER; note = 2'-deoxy-2'-fluoroadenosine-3'-phosphate
  modified_base 11: mod_base = OTHER; note = 2'-deoxy-2'-fluoroguanosine-3'-phosphate
  modified_base 12: mod_base = OTHER; note = 2'-O-methylcytidine-3'-phosphate
  modified_base 13: mod_base = OTHER; note = 2'-O-methyladenosine-3'-phosphate
  modified_base 14: mod_base = OTHER; note = 2'-O-methylcytidine-3'-phosphate
  modified_base 15: mod_base = OTHER; note = 2'-O-methyladenosine-3'-phosphate
  modified_base 16: mod_base = OTHER; note = 2'-O-methyluridine-3'-phosphate
  modified_base 17: mod_base = OTHER; note = 2'-O-methylguanosine-3'-phosphate
  modified_base 18: mod_base = OTHER; note = 2'-O-methyladenosine-3'-phosphate
  modified_base 19: mod_base = OTHER; note = 2'-O-methyladenosine-3'-phosphorothioate
  modified_base 20: mod_base = OTHER; note = 2'-O-methyluridine-3'-phosphorothioate
  modified_base 21: mod_base = OTHER; note = 2'-O-methyladenosine
tgaaccaagagcacatgaata

SEQ ID NO: 10887 - RNA, 21 nt, synthetic construct
  source 1..21: mol_type = other RNA
  modified_base 1: mod_base = OTHER; note = 2'-O-methylguanosine-3'-phosphorothioate
  modified_base 2: mod_base = OTHER; note = 2'-O-methyladenosine-3'-phosphorothioate
  modified_base 3: mod_base = OTHER; note = 2'-O-methyladenosine-3'-phosphate
  modified_base 4: mod_base = OTHER; note = 2'-O-methylcytidine-3'-phosphate
  modified_base 5: mod_base = OTHER; note = 2'-O-methylcytidine-3'-phosphate
  modified_base 6: mod_base = OTHER; note = 2'-O-docosanyl-adenosine-3'-phosphate
  modified_base 7: mod_base = OTHER; note = 2'-deoxy-2'-fluoroadenosine-3'-phosphate
  modified_base 8: mod_base = OTHER; note = 2'-O-methylguanosine-3'-phosphate
  modified_base 9: mod_base = OTHER; note = 2'-deoxy-2'-fluoroadenosine-3'-phosphate
  modified_base 10: mod_base = OTHER; note = 2'-deoxy-2'-fluoroguanosine-3'-phosphate
  modified_base 11: mod_base = OTHER; note = 2'-deoxy-2'-fluorocytidine-3'-phosphate
  modified_base 12: mod_base = OTHER; note = 2'-O-methyladenosine-3'-phosphate
  modified_base 13: mod_base = OTHER; note = 2'-O-methylcytidine-3'-phosphate
  modified_base 14: mod_base = OTHER; note = 2'-O-methyladenosine-3'-phosphate
  modified_base 15: mod_base = OTHER; note = 2'-O-methyluridine-3'-phosphate
  modified_base 16: mod_base = OTHER; note = 2'-O-methylguanosine-3'-phosphate
  modified_base 17: mod_base = OTHER; note = 2'-O-methyladenosine-3'-phosphate
  modified_base 18: mod_base = OTHER; note = 2'-O-methyladenosine-3'-phosphate
  modified_base 19: mod_base = OTHER; note = 2'-O-methyluridine-3'-phosphorothioate
  modified_base 20: mod_base = OTHER; note = 2'-O-methylguanosine-3'-phosphorothioate
  modified_base 21: mod_base = OTHER; note = 2'-O-methyladenosine
gaaccaagagcacatgaatga

SEQ ID NO: 10888 - RNA, 21 nt, synthetic construct
  source 1..21: mol_type = other RNA
  modified_base 1: mod_base = OTHER; note = 2'-O-methyladenosine-3'-phosphorothioate
  modified_base 2: mod_base = OTHER; note = 2'-O-methyladenosine-3'-phosphorothioate
  modified_base 3: mod_base = OTHER; note = 2'-O-methylcytidine-3'-phosphate
  modified_base 4: mod_base = OTHER; note = 2'-O-methylcytidine-3'-phosphate
  modified_base 5: mod_base = OTHER; note = 2'-O-methyladenosine-3'-phosphate
  modified_base 6: mod_base = OTHER; note = 2'-O-docosanyl-adenosine-3'-phosphate
  modified_base 7: mod_base = OTHER; note = 2'-deoxy-2'-fluoroguanosine-3'-phosphate
  modified_base 8: mod_base = OTHER; note = 2'-O-methyladenosine-3'-phosphate
  modified_base 9: mod_base = OTHER; note = 2'-deoxy-2'-fluoroguanosine-3'-phosphate
  modified_base 10: mod_base = OTHER; note = 2'-deoxy-2'-fluorocytidine-3'-phosphate
  modified_base 11: mod_base = OTHER; note = 2'-deoxy-2'-fluoroadenosine-3'-phosphate
  modified_base 12: mod_base = OTHER; note = 2'-O-methylcytidine-3'-phosphate
  modified_base 13: mod_base = OTHER; note = 2'-O-methyladenosine-3'-phosphate
  modified_base 14: mod_base = OTHER; note = 2'-O-methyluridine-3'-phosphate
  modified_base 15: mod_base = OTHER; note = 2'-O-methylguanosine-3'-phosphate
  modified_base 16: mod_base = OTHER; note = 2'-O-methyladenosine-3'-phosphate
  modified_base 17: mod_base = OTHER; note = 2'-O-methyladenosine-3'-phosphate
  modified_base 18: mod_base = OTHER; note = 2'-O-methyluridine-3'-phosphate
  modified_base 19: mod_base = OTHER; note = 2'-O-methylguanosine-3'-phosphorothioate
  modified_base 20: mod_base = OTHER; note = 2'-O-methyladenosine-3'-phosphorothioate
  modified_base 21: mod_base = OTHER; note = 2'-O-methyladenosine
aaccaagagcacatgaatgaa

SEQ ID NO: 10889 - RNA, 21 nt, synthetic construct
  source 1..21: mol_type = other RNA
  modified_base 1: mod_base = OTHER; note = 2'-O-methyladenosine-3'-phosphorothioate
  modified_base 2: mod_base = OTHER; note = 2'-O-methylcytidine-3'-phosphorothioate
  modified_base 3: mod_base = OTHER; note = 2'-O-methylcytidine-3'-phosphate
  modified_base 4: mod_base = OTHER; note = 2'-O-methyladenosine-3'-phosphate
  modified_base 5: mod_base = OTHER; note = 2'-O-methyladenosine-3'-phosphate
  modified_base 6: mod_base = OTHER; note = 2'-O-docosanyl-guanosine-3'-phosphate
  modified_base 7: mod_base = OTHER; note = 2'-deoxy-2'-fluoroadenosine-3'-phosphate
  modified_base 8: mod_base = OTHER; note = 2'-O-methylguanosine-3'-phosphate
  modified_base 9: mod_base = OTHER; note = 2'-deoxy-2'-fluorocytidine-3'-phosphate
  modified_base 10: mod_base = OTHER; note = 2'-deoxy-2'-fluoroadenosine-3'-phosphate
  modified_base 11: mod_base = OTHER; note = 2'-deoxy-2'-fluorocytidine-3'-phosphate
  modified_base 12: mod_base = OTHER; note = 2'-O-methyladenosine-3'-phosphate
  modified_base 13: mod_base = OTHER; note = 2'-O-methyluridine-3'-phosphate
  modified_base 14: mod_base = OTHER; note = 2'-O-methylguanosine-3'-phosphate
  modified_base 15: mod_base = OTHER; note = 2'-O-methyladenosine-3'-phosphate
  modified_base 16: mod_base = OTHER; note = 2'-O-methyladenosine-3'-phosphate
  modified_base 17: mod_base = OTHER; note = 2'-O-methyluridine-3'-phosphate
  modified_base 18: mod_base = OTHER; note = 2'-O-methylguanosine-3'-phosphate
  modified_base 19: mod_base = OTHER; note = 2'-O-methyladenosine-3'-phosphorothioate
  modified_base 20: mod_base = OTHER; note = 2'-O-methyladenosine-3'-phosphorothioate
  modified_base 21: mod_base = OTHER; note = 2'-O-methyladenosine
accaagagcacatgaatgaaa

SEQ ID NO: 10890 - RNA, 21 nt, synthetic construct
  source 1..21: mol_type = other RNA
  modified_base 1: mod_base = OTHER; note = 2'-O-methylcytidine-3'-phosphorothioate
  modified_base 2: mod_base = OTHER; note = 2'-O-methylcytidine-3'-phosphorothioate
  modified_base 3: mod_base = OTHER; note = 2'-O-methyladenosine-3'-phosphate
  modified_base 4: mod_base = OTHER; note = 2'-O-methyladenosine-3'-phosphate
  modified_base 5: mod_base = OTHER; note = 2'-O-methylguanosine-3'-phosphate
  modified_base 6: mod_base = OTHER; note = 2'-O-docosanyl-adenosine-3'-phosphate
  modified_base 7: mod_base = OTHER; note = 2'-deoxy-2'-fluoroguanosine-3'-phosphate
  modified_base 8: mod_base = OTHER; note = 2'-O-methylcytidine-3'-phosphate
  modified_base 9: mod_base = OTHER; note = 2'-deoxy-2'-fluoroadenosine-3'-phosphate
  modified_base 10: mod_base = OTHER; note = 2'-deoxy-2'-fluorocytidine-3'-phosphate
  modified_base 11: mod_base = OTHER; note = 2'-deoxy-2'-fluoroadenosine-3'-phosphate
  modified_base 12: mod_base = OTHER; note = 2'-O-methyluridine-3'-phosphate
  modified_base 13: mod_base = OTHER; note = 2'-O-methylguanosine-3'-phosphate
  modified_base 14: mod_base = OTHER; note = 2'-O-methyladenosine-3'-phosphate
  modified_base 15: mod_base = OTHER; note = 2'-O-methyladenosine-3'-phosphate
  modified_base 16: mod_base = OTHER; note = 2'-O-methyluridine-3'-phosphate
  modified_base 17: mod_base = OTHER; note = 2'-O-methylguanosine-3'-phosphate
  modified_base 18: mod_base = OTHER; note = 2'-O-methyladenosine-3'-phosphate
  modified_base 19: mod_base = OTHER; note = 2'-O-methyladenosine-3'-phosphorothioate
  modified_base 20: mod_base = OTHER; note = 2'-O-methylcytidine-3'-phosphorothioate
  modified_base 21: mod_base = OTHER; note = 2'-O-methyladenosine
ccaagagcacatgaatgaaca

SEQ ID NO: 10891 - RNA, 21 nt, synthetic construct
  source 1..21: mol_type = other RNA
  modified_base 1: mod_base = OTHER; note = 2'-O-methylcytidine-3'-phosphorothioate
  modified_base 2: mod_base = OTHER; note = 2'-O-methyladenosine-3'-phosphorothioate
  modified_base 3: mod_base = OTHER; note = 2'-O-methyladenosine-3'-phosphate
  modified_base 4: mod_base = OTHER; note = 2'-O-methylguanosine-3'-phosphate
  modified_base 5: mod_base = OTHER; note = 2'-O-methyladenosine-3'-phosphate
  modified_base 6: mod_base = OTHER; note = 2'-O-docosanyl-guanosine-3'-phosphate
  modified_base 7: mod_base = OTHER; note = 2'-deoxy-2'-fluorocytidine-3'-phosphate
  modified_base 8: mod_base = OTHER; note = 2'-O-methyladenosine-3'-phosphate
  modified_base 9: mod_base = OTHER; note = 2'-deoxy-2'-fluorocytidine-3'-phosphate
  modified_base 10: mod_base = OTHER; note = 2'-deoxy-2'-fluoroadenosine-3'-phosphate
  modified_base 11: mod_base = OTHER; note = 2'-deoxy-2'-fluorouridine-3'-phosphate
  modified_base 12: mod_base = OTHER; note = 2'-O-methylguanosine-3'-phosphate
  modified_base 13: mod_base = OTHER; note = 2'-O-methyladenosine-3'-phosphate
  modified_base 14: mod_base = OTHER; note = 2'-O-methyladenosine-3'-phosphate
  modified_base 15: mod_base = OTHER; note = 2'-O-methyluridine-3'-phosphate
  modified_base 16: mod_base = OTHER; note = 2'-O-methylguanosine-3'-phosphate
  modified_base 17: mod_base = OTHER; note = 2'-O-methyladenosine-3'-phosphate
  modified_base 18: mod_base = OTHER; note = 2'-O-methyladenosine-3'-phosphate
  modified_base 19: mod_base = OTHER; note = 2'-O-methylcytidine-3'-phosphorothioate
  modified_base 20: mod_base = OTHER; note = 2'-O-methyladenosine-3'-phosphorothioate
  modified_base 21: mod_base = OTHER; note = 2'-O-methyladenosine
caagagcacatgaatgaacaa

SEQ ID NO: 10892 - RNA, 21 nt, synthetic construct
  source 1..21: mol_type = other RNA
  modified_base 1: mod_base = OTHER; note = 2'-O-methyladenosine-3'-phosphorothioate
  modified_base 2: mod_base = OTHER; note = 2'-O-methyladenosine-3'-phosphorothioate
  modified_base 3: mod_base = OTHER; note = 2'-O-methylguanosine-3'-phosphate
  modified_base 4: mod_base = OTHER; note = 2'-O-methyladenosine-3'-phosphate
  modified_base 5: mod_base = OTHER; note = 2'-O-methylguanosine-3'-phosphate
  modified_base 6: mod_base = OTHER; note = 2'-O-docosanyl-cytidine-3'-phosphate
  modified_base 7: mod_base = OTHER; note = 2'-deoxy-2'-fluoroadenosine-3'-phosphate
  modified_base 8: mod_base = OTHER; note = 2'-O-methylcytidine-3'-phosphate
  modified_base 9: mod_base = OTHER; note = 2'-deoxy-2'-fluoroadenosine-3'-phosphate
  modified_base 10: mod_base = OTHER; note = 2'-deoxy-2'-fluorouridine-3'-phosphate
  modified_base 11: mod_base = OTHER; note = 2'-deoxy-2'-fluoroguanosine-3'-phosphate
  modified_base 12: mod_base = OTHER; note = 2'-O-methyladenosine-3'-phosphate
  modified_base 13: mod_base = OTHER; note = 2'-O-methyladenosine-3'-phosphate
  modified_base 14: mod_base = OTHER; note = 2'-O-methyluridine-3'-phosphate
  modified_base 15: mod_base = OTHER; note = 2'-O-methylguanosine-3'-phosphate
  modified_base 16: mod_base = OTHER; note = 2'-O-methyladenosine-3'-phosphate
  modified_base 17: mod_base = OTHER; note = 2'-O-methyladenosine-3'-phosphate
  modified_base 18: mod_base = OTHER; note = 2'-O-methylcytidine-3'-phosphate
  modified_base 19: mod_base = OTHER; note = 2'-O-methyladenosine-3'-phosphorothioate
  modified_base 20: mod_base = OTHER; note = 2'-O-methylguanosine-3'-phosphorothioate
  modified_base 21: mod_base = OTHER; note = 2'-O-methyladenosine
aagagcacatgaatgaacaga

SEQ ID NO: 10893 - RNA, 21 nt, synthetic construct
  source 1..21: mol_type = other RNA
  modified_base 1: mod_base = OTHER; note = 2'-O-methylguanosine-3'-phosphorothioate
  modified_base 2: mod_base = OTHER; note = 2'-O-methylguanosine-3'-phosphorothioate
  modified_base 3: mod_base = OTHER; note = 2'-O-methyladenosine-3'-phosphate
  modified_base 4: mod_base = OTHER; note = 2'-O-methyladenosine-3'-phosphate
  modified_base 5: mod_base = OTHER; note = 2'-O-methyladenosine-3'-phosphate
  modified_base 6: mod_base = OTHER; note = 2'-O-docosanyl-adenosine-3'-phosphate
  modified_base 7: mod_base = OTHER; note = 2'-deoxy-2'-fluoroguanosine-3'-phosphate
  modified_base 8: mod_base = OTHER; note = 2'-O-methyladenosine-3'-phosphate
  modified_base 9: mod_base = OTHER; note = 2'-deoxy-2'-fluorouridine-3'-phosphate
  modified_base 10: mod_base = OTHER; note = 2'-deoxy-2'-fluoroguanosine-3'-phosphate
  modified_base 11: mod_base = OTHER; note = 2'-deoxy-2'-fluorouridine-3'-phosphate
  modified_base 12: mod_base = OTHER; note = 2'-O-methyladenosine-3'-phosphate
  modified_base 13: mod_base = OTHER; note = 2'-O-methyladenosine-3'-phosphate
  modified_base 14: mod_base = OTHER; note = 2'-O-methyladenosine-3'-phosphate
  modified_base 15: mod_base = OTHER; note = 2'-O-methyladenosine-3'-phosphate
  modified_base 16: mod_base = OTHER; note = 2'-O-methyladenosine-3'-phosphate
  modified_base 17: mod_base = OTHER; note = 2'-O-methylcytidine-3'-phosphate
  modified_base 18: mod_base = OTHER; note = 2'-O-methyladenosine-3'-phosphate
  modified_base 19: mod_base = OTHER; note = 2'-O-methyluridine-3'-phosphorothioate
  modified_base 20: mod_base = OTHER; note = 2'-O-methyluridine-3'-phosphorothioate
  modified_base 21: mod_base = OTHER; note = 2'-O-methyladenosine
ggaaaagatgtaaaaacatta

SEQ ID NO: 10894 - RNA, 21 nt, synthetic construct
  source 1..21: mol_type = other RNA
  modified_base 1: mod_base = OTHER; note = 2'-O-methyluridine-3'-phosphorothioate
  modified_base 2: mod_base = OTHER; note = 2'-O-methyluridine-3'-phosphorothioate
  modified_base 3: mod_base = OTHER; note = 2'-O-methyluridine-3'-phosphate
  modified_base 4: mod_base = OTHER; note = 2'-O-methyluridine-3'-phosphate
  modified_base 5: mod_base = OTHER; note = 2'-O-methyluridine-3'-phosphate
  modified_base 6: mod_base = OTHER; note = 2'-O-docosanyl-uridine-3'-phosphate
  modified_base 7: mod_base = OTHER; note = 2'-deoxy-2'-fluorouridine-3'-phosphate
  modified_base 8: mod_base = OTHER; note = 2'-O-methylcytidine-3'-phosphate
  modified_base 9: mod_base = OTHER; note = 2'-deoxy-2'-fluorouridine-3'-phosphate
  modified_base 10: mod_base = OTHER; note = 2'-deoxy-2'-fluoroguanosine-3'-phosphate
  modified_base 11: mod_base = OTHER; note = 2'-deoxy-2'-fluoroadenosine-3'-phosphate
  modified_base 12: mod_base = OTHER; note = 2'-O-methylguanosine-3'-phosphate
  modified_base 13: mod_base = OTHER; note = 2'-O-methyladenosine-3'-phosphate
  modified_base 14: mod_base = OTHER; note = 2'-O-methyluridine-3'-phosphate
  modified_base 15: mod_base = OTHER; note = 2'-O-methylguanosine-3'-phosphate
  modified_base 16: mod_base = OTHER; note = 2'-O-methyladenosine-3'-phosphate
  modified_base 17: mod_base = OTHER; note = 2'-O-methyladenosine-3'-phosphate
  modified_base 18: mod_base = OTHER; note = 2'-O-methyladenosine-3'-phosphate
  modified_base 19: mod_base = OTHER; note = 2'-O-methyladenosine-3'-phosphorothioate
  modified_base 20: mod_base = OTHER; note = 2'-O-methylcytidine-3'-phosphorothioate
  modified_base 21: mod_base = OTHER; note = 2'-O-methyladenosine
tttttttctgagatgaaaaca

SEQ ID NO: 10895 - RNA, 21 nt, synthetic construct
  source 1..21: mol_type = other RNA
  modified_base 1: mod_base = OTHER; note = 2'-O-methyladenosine-3'-phosphorothioate
  modified_base 2: mod_base = OTHER; note = 2'-O-methyluridine-3'-phosphorothioate
  modified_base 3: mod_base = OTHER; note = 2'-O-methylguanosine-3'-phosphate
  modified_base 4: mod_base = OTHER; note = 2'-O-methylcytidine-3'-phosphate
  modified_base 5: mod_base = OTHER; note = 2'-O-methyladenosine-3'-phosphate
  modified_base 6: mod_base = OTHER; note = 2'-O-docosanyl-adenosine-3'-phosphate
  modified_base 7: mod_base = OTHER; note = 2'-deoxy-2'-fluoroadenosine-3'-phosphate
  modified_base 8: mod_base = OTHER; note = 2'-O-methyluridine-3'-phosphate
  modified_base 9: mod_base = OTHER; note = 2'-deoxy-2'-fluorouridine-3'-phosphate
  modified_base 10: mod_base = OTHER; note = 2'-deoxy-2'-fluoroadenosine-3'-phosphate
  modified_base 11: mod_base = OTHER; note = 2'-deoxy-2'-fluoroguanosine-3'-phosphate
  modified_base 12: mod_base = OTHER; note = 2'-O-methyladenosine-3'-phosphate
  modified_base 13: mod_base = OTHER; note = 2'-O-methylguanosine-3'-phosphate
  modified_base 14: mod_base = OTHER; note = 2'-O-methylcytidine-3'-phosphate
  modified_base 15: mod_base = OTHER; note = 2'-O-methyladenosine-3'-phosphate
  modified_base 16: mod_base = OTHER; note = 2'-O-methyluridine-3'-phosphate
  modified_base 17: mod_base = OTHER; note = 2'-O-methylguanosine-3'-phosphate
  modified_base 18: mod_base = OTHER; note = 2'-O-methylcytidine-3'-phosphate
  modified_base 19: mod_base = OTHER; note = 2'-O-methyluridine-3'-phosphorothioate
  modified_base 20: mod_base = OTHER; note = 2'-O-methyladenosine-3'-phosphorothioate
  modified_base 21: mod_base = OTHER; note = 2'-O-methyladenosine
atgcaaattagagcatgctaa

SEQ ID NO: 10896 - RNA, 21 nt, synthetic construct
  source 1..21: mol_type = other RNA
  modified_base 1: mod_base = OTHER; note = 2'-O-methyluridine-3'-phosphorothioate
  modified_base 2: mod_base = OTHER; note = 2'-O-methylguanosine-3'-phosphorothioate
  modified_base 3: mod_base = OTHER; note = 2'-O-methylcytidine-3'-phosphate
  modified_base 4: mod_base = OTHER; note = 2'-O-methyladenosine-3'-phosphate
  modified_base 5: mod_base = OTHER; note = 2'-O-methyladenosine-3'-phosphate
  modified_base 6: mod_base = OTHER; note = 2'-O-docosanyl-adenosine-3'-phosphate
  modified_base 7: mod_base = OTHER; note = 2'-deoxy-2'-fluorouridine-3'-phosphate
  modified_base 8: mod_base = OTHER; note = 2'-O-methyluridine-3'-phosphate
  modified_base 9: mod_base = OTHER; note = 2'-deoxy-2'-fluoroadenosine-3'-phosphate
  modified_base 10: mod_base = OTHER; note = 2'-deoxy-2'-fluoroguanosine-3'-phosphate
  modified_base 11: mod_base = OTHER; note = 2'-deoxy-2'-fluoroadenosine-3'-phosphate
  modified_base 12: mod_base = OTHER; note = 2'-O-methylguanosine-3'-phosphate
  modified_base 13: mod_base = OTHER; note = 2'-O-methylcytidine-3'-phosphate
  modified_base 14: mod_base = OTHER; note = 2'-O-methyladenosine-3'-phosphate
  modified_base 15: mod_base = OTHER; note = 2'-O-methyluridine-3'-phosphate
  modified_base 16: mod_base = OTHER; note = 2'-O-methylguanosine-3'-phosphate
  modified_base 17: mod_base = OTHER; note = 2'-O-methylcytidine-3'-phosphate
  modified_base 18: mod_base = OTHER; note = 2'-O-methyluridine-3'-phosphate
  modified_base 19: mod_base = OTHER; note = 2'-O-methyladenosine-3'-phosphorothioate
  modified_base 20: mod_base = OTHER; note = 2'-O-methyluridine-3'-phosphorothioate
  modified_base 21: mod_base = OTHER; note = 2'-O-methyladenosine
tgcaaattagagcatgctata

SEQ ID NO: 10897 - RNA, 21 nt, synthetic construct
  source 1..21: mol_type = other RNA
  modified_base 1: mod_base = OTHER; note = 2'-O-methyladenosine-3'-phosphorothioate
  modified_base 2: mod_base = OTHER; note = 2'-O-methyladenosine-3'-phosphorothioate
  modified_base 3: mod_base = OTHER; note = 2'-O-methyladenosine-3'-phosphate
  modified_base 4: mod_base = OTHER; note = 2'-O-methyluridine-3'-phosphate
  modified_base 5: mod_base = OTHER; note = 2'-O-methyluridine-3'-phosphate
  modified_base 6: mod_base = OTHER; note = 2'-O-docosanyl-adenosine-3'-phosphate
  modified_base 7: mod_base = OTHER; note = 2'-deoxy-2'-fluoroguanosine-3'-phosphate
  modified_base 8: mod_base = OTHER; note = 2'-O-methyladenosine-3'-phosphate
  modified_base 9: mod_base = OTHER; note = 2'-deoxy-2'-fluoroguanosine-3'-phosphate
  modified_base 10: mod_base = OTHER; note = 2'-deoxy-2'-fluorocytidine-3'-phosphate
  modified_base 11: mod_base = OTHER; note = 2'-deoxy-2'-fluoroadenosine-3'-phosphate
  modified_base 12: mod_base = OTHER; note = 2'-O-methyluridine-3'-phosphate
  modified_base 13: mod_base = OTHER; note = 2'-O-methylguanosine-3'-phosphate
  modified_base 14: mod_base = OTHER; note = 2'-O-methylcytidine-3'-phosphate
  modified_base 15: mod_base = OTHER; note = 2'-O-methyluridine-3'-phosphate
  modified_base 16: mod_base = OTHER; note = 2'-O-methyladenosine-3'-phosphate
  modified_base 17: mod_base = OTHER; note = 2'-O-methyluridine-3'-phosphate
  modified_base 18: mod_base = OTHER; note = 2'-O-methylcytidine-3'-phosphate
  modified_base 19: mod_base = OTHER; note = 2'-O-methyluridine-3'-phosphorothioate
  modified_base 20: mod_base = OTHER; note = 2'-O-methyluridine-3'-phosphorothioate
  modified_base 21: mod_base = OTHER; note = 2'-O-methyladenosine
aaattagagcatgctatctta

SEQ ID NO: 10898 - RNA, 21 nt, synthetic construct
  source 1..21: mol_type = other RNA
  modified_base 1: mod_base = OTHER; note = 2'-O-methyladenosine-3'-phosphorothioate
  modified_base 2: mod_base = OTHER; note = 2'-O-methylguanosine-3'-phosphorothioate
  modified_base 3: mod_base = OTHER; note = 2'-O-methyladenosine-3'-phosphate
  modified_base 4: mod_base = OTHER; note = 2'-O-methylguanosine-3'-phosphate
  modified_base 5: mod_base = OTHER; note = 2'-O-methylcytidine-3'-phosphate
  modified_base 6: mod_base = OTHER; note = 2'-O-docosanyl-adenosine-3'-phosphate
  modified_base 7: mod_base = OTHER; note = 2'-deoxy-2'-fluorouridine-3'-phosphate
  modified_base 8: mod_base = OTHER; note = 2'-O-methylguanosine-3'-phosphate
  modified_base 9: mod_base = OTHER; note = 2'-deoxy-2'-fluorocytidine-3'-phosphate
  modified_base 10: mod_base = OTHER; note = 2'-deoxy-2'-fluorouridine-3'-phosphate
  modified_base 11: mod_base = OTHER; note = 2'-deoxy-2'-fluoroadenosine-3'-phosphate
  modified_base 12: mod_base = OTHER; note = 2'-O-methyluridine-3'-phosphate
  modified_base 13: mod_base = OTHER; note = 2'-O-methylcytidine-3'-phosphate
  modified_base 14: mod_base = OTHER; note = 2'-O-methyluridine-3'-phosphate
  modified_base 15: mod_base = OTHER; note = 2'-O-methyluridine-3'-phosphate
  modified_base 16: mod_base = OTHER; note = 2'-O-methyluridine-3'-phosphate
  modified_base 17: mod_base = OTHER; note = 2'-O-methyladenosine-3'-phosphate
  modified_base 18: mod_base = OTHER; note = 2'-O-methylguanosine-3'-phosphate
  modified_base 19: mod_base = OTHER; note = 2'-O-methylguanosine-3'-phosphorothioate
  modified_base 20: mod_base = OTHER; note = 2'-O-methyluridine-3'-phosphorothioate
  modified_base 21: mod_base = OTHER; note = 2'-O-methyladenosine
agagcatgctatctttaggta

SEQ ID NO: 10899 - RNA, 21 nt, synthetic construct
  source 1..21: mol_type = other RNA
  modified_base 1: mod_base = OTHER; note = 2'-O-methylguanosine-3'-phosphorothioate
  modified_base 2: mod_base = OTHER; note = 2'-O-methylcytidine-3'-phosphorothioate
  modified_base 3: mod_base = OTHER; note = 2'-O-methyladenosine-3'-phosphate
  modified_base 4: mod_base = OTHER; note = 2'-O-methyluridine-3'-phosphate
  modified_base 5: mod_base = OTHER; note = 2'-O-methylguanosine-3'-phosphate
  modified_base 6: mod_base = OTHER; note = 2'-O-docosanyl-cytidine-3'-phosphate
  modified_base 7: mod_base = OTHER; note = 2'-deoxy-2'-fluorouridine-3'-phosphate
  modified_base 8: mod_base = OTHER; note = 2'-O-methyladenosine-3'-phosphate
  modified_base 9: mod_base = OTHER; note = 2'-deoxy-2'-fluorouridine-3'-phosphate
  modified_base 10: mod_base = OTHER; note = 2'-deoxy-2'-fluorocytidine-3'-phosphate
  modified_base 11: mod_base = OTHER; note = 2'-deoxy-2'-fluorouridine-3'-phosphate
  modified_base 12: mod_base = OTHER; note = 2'-O-methyluridine-3'-phosphate
  modified_base 13: mod_base = OTHER; note = 2'-O-methyluridine-3'-phosphate
  modified_base 14: mod_base = OTHER; note = 2'-O-methyladenosine-3'-phosphate
  modified_base 15: mod_base = OTHER; note = 2'-O-methylguanosine-3'-phosphate
  modified_base 16: mod_base = OTHER; note = 2'-O-methylguanosine-3'-phosphate
  modified_base 17: mod_base = OTHER; note = 2'-O-methyluridine-3'-phosphate
  modified_base 18: mod_base = OTHER; note = 2'-O-methylguanosine-3'-phosphate
  modified_base 19: mod_base = OTHER; note = 2'-O-methyladenosine-3'-phosphorothioate
  modified_base 20: mod_base = OTHER; note = 2'-O-methyluridine-3'-phosphorothioate
  modified_base 21: mod_base = OTHER; note = 2'-O-methyladenosine
gcatgctatctttaggtgata

SEQ ID NO: 10900 - RNA, 21 nt, synthetic construct
  source 1..21: mol_type = other RNA
  modified_base 1: mod_base = OTHER; note = 2'-O-methyluridine-3'-phosphorothioate
  modified_base 2: mod_base = OTHER; note = 2'-O-methylcytidine-3'-phosphorothioate
  modified_base 3: mod_base = OTHER; note = 2'-O-methyluridine-3'-phosphate
  modified_base 4: mod_base = OTHER; note = 2'-O-methyluridine-3'-phosphate
  modified_base 5: mod_base = OTHER; note = 2'-O-methyluridine-3'-phosphate
  modified_base 6: mod_base = OTHER; note = 2'-O-docosanyl-adenosine-3'-phosphate
  modified_base 7: mod_base = OTHER; note = 2'-deoxy-2'-fluoroguanosine-3'-phosphate
  modified_base 8: mod_base = OTHER; note = 2'-O-methylguanosine-3'-phosphate
  modified_base 9: mod_base = OTHER; note = 2'-deoxy-2'-fluorouridine-3'-phosphate
  modified_base 10: mod_base = OTHER; note = 2'-deoxy-2'-fluoroguanosine-3'-phosphate
  modified_base 11: mod_base = OTHER; note = 2'-deoxy-2'-fluoroadenosine-3'-phosphate
  modified_base 12: mod_base = OTHER; note = 2'-O-methyluridine-3'-phosphate
  modified_base 13: mod_base = OTHER; note = 2'-O-methylguanosine-3'-phosphate
  modified_base 14: mod_base = OTHER; note = 2'-O-methylcytidine-3'-phosphate
  modified_base 15: mod_base = OTHER; note = 2'-O-methyladenosine-3'-phosphate
  modified_base 16: mod_base = OTHER; note = 2'-O-methyladenosine-3'-phosphate
  modified_base 17: mod_base = OTHER; note = 2'-O-methyluridine-3'-phosphate
  modified_base 18: mod_base = OTHER; note = 2'-O-methylcytidine-3'-phosphate
  modified_base 19: mod_base = OTHER; note = 2'-O-methyluridine-3'-phosphorothioate
  modified_base 20: mod_base = OTHER; note = 2'-O-methyladenosine-3'-phosphorothioate
  modified_base 21: mod_base = OTHER; note = 2'-O-methyladenosine
tctttaggtgatgcaatctaa

SEQ ID NO: 10901 - RNA, 21 nt, synthetic construct
  source 1..21: mol_type = other RNA
  modified_base 1: mod_base = OTHER; note = 2'-O-methyladenosine-3'-phosphorothioate
  modified_base 2: mod_base = OTHER; note = 2'-O-methylguanosine-3'-phosphorothioate
  modified_base 3: mod_base = OTHER; note = 2'-O-methyluridine-3'-phosphate
  modified_base 4: mod_base = OTHER; note = 2'-O-methyluridine-3'-phosphate
  modified_base 5: mod_base = OTHER; note = 2'-O-methyladenosine-3'-phosphate
  modified_base 6: mod_base = OTHER; note = 2'-O-docosanyl-guanosine-3'-phosphate
  modified_base 7: mod_base = OTHER; note = 2'-deoxy-2'-fluorocytidine-3'-phosphate
  modified_base 8: mod_base = OTHER; note = 2'-O-methyladenosine-3'-phosphate
  modified_base 9: mod_base = OTHER; note = 2'-deoxy-2'-fluoroguanosine-3'-phosphate
  modified_base 10: mod_base = OTHER; note = 2'-deoxy-2'-fluoroguanosine-3'-phosphate
  modified_base 11: mod_base = OTHER; note = 2'-deoxy-2'-fluoroadenosine-3'-phosphate
  modified_base 12: mod_base = OTHER; note = 2'-O-methylcytidine-3'-phosphate
  modified_base 13: mod_base = OTHER; note = 2'-O-methyluridine-3'-phosphate
  modified_base 14: mod_base = OTHER; note = 2'-O-methyluridine-3'-phosphate
  modified_base 15: mod_base = OTHER; note = 2'-O-methyluridine-3'-phosphate
  modified_base 16: mod_base = OTHER; note = 2'-O-methyluridine-3'-phosphate
  modified_base 17: mod_base = OTHER; note = 2'-O-methyluridine-3'-phosphate
  modified_base 18: mod_base = OTHER; note = 2'-O-methyladenosine-3'-phosphate
  modified_base 19: mod_base = OTHER; note = 2'-O-methyladenosine-3'-phosphorothioate
  modified_base 20: mod_base = OTHER; note = 2'-O-methyladenosine-3'-phosphorothioate
  modified_base 21: mod_base = OTHER; note = 2'-O-methyladenosine
agttagcaggactttttaaaa

SEQ ID NO: 10902 - RNA, 21 nt, synthetic construct
  source 1..21: mol_type = other RNA
  modified_base 1: mod_base = OTHER; note = 2'-O-methylguanosine-3'-phosphorothioate
  modified_base 2: mod_base = OTHER; note = 2'-O-methyluridine-3'-phosphorothioate
  modified_base 3: mod_base = OTHER; note = 2'-O-methyluridine-3'-phosphate
  modified_base 4: mod_base = OTHER; note = 2'-O-methyladenosine-3'-phosphate
  modified_base 5: mod_base = OTHER; note = 2'-O-methylguanosine-3'-phosphate
  modified_base 6: mod_base = OTHER; note = 2'-O-docosanyl-cytidine-3'-phosphate
  modified_base 7: mod_base = OTHER; note = 2'-deoxy-2'-fluoroadenosine-3'-phosphate
  modified_base 8: mod_base = OTHER; note = 2'-O-methylguanosine-3'-phosphate
  modified_base 9: mod_base = OTHER; note = 2'-deoxy-2'-fluoroguanosine-3'-phosphate
  modified_base 10: mod_base = OTHER; note = 2'-deoxy-2'-fluoroadenosine-3'-phosphate
  modified_base 11: mod_base = OTHER; note = 2'-deoxy-2'-fluorocytidine-3'-phosphate
  modified_base 12: mod_base = OTHER; note = 2'-O-methyluridine-3'-phosphate
  modified_base 13: mod_base = OTHER; note = 2'-O-methyluridine-3'-phosphate
  modified_base 14: mod_base = OTHER; note = 2'-O-methyluridine-3'-phosphate
  modified_base 15: mod_base = OTHER; note = 2'-O-methyluridine-3'-phosphate
  modified_base 16: mod_base = OTHER; note = 2'-O-methyluridine-3'-phosphate
  modified_base 17: mod_base = OTHER; note = 2'-O-methyladenosine-3'-phosphate
  modified_base 18: mod_base = OTHER; note = 2'-O-methyladenosine-3'-phosphate
  modified_base 19: mod_base = OTHER; note = 2'-O-methyladenosine-3'-phosphorothioate
  modified_base 20: mod_base = OTHER; note = 2'-O-methyladenosine-3'-phosphorothioate
  modified_base 21: mod_base = OTHER; note = 2'-O-methyladenosine
gttagcaggactttttaaaaa

SEQ ID NO: 10903 - RNA, 21 nt, synthetic construct
  source 1..21: mol_type = other RNA
  modified_base 1: mod_base = OTHER; note = 2'-O-methyluridine-3'-phosphorothioate
  modified_base 2: mod_base = OTHER; note = 2'-O-methyluridine-3'-phosphorothioate
  modified_base 3: mod_base = OTHER; note = 2'-O-methyladenosine-3'-phosphate
  modified_base 4: mod_base = OTHER; note = 2'-O-methylguanosine-3'-phosphate
  modified_base 5: mod_base = OTHER; note = 2'-O-methylcytidine-3'-phosphate
  modified_base 6: mod_base = OTHER; note = 2'-O-docosanyl-adenosine-3'-phosphate
  modified_base 7: mod_base = OTHER; note = 2'-deoxy-2'-fluoroguanosine-3'-phosphate
  modified_base 8: mod_base = OTHER; note = 2'-O-methylguanosine-3'-phosphate
  modified_base 9: mod_base = OTHER; note = 2'-deoxy-2'-fluoroadenosine-3'-phosphate
  modified_base 10: mod_base = OTHER; note = 2'-deoxy-2'-fluorocytidine-3'-phosphate
  modified_base 11: mod_base = OTHER; note = 2'-deoxy-2'-fluorouridine-3'-phosphate
  modified_base 12: mod_base = OTHER; note = 2'-O-methyluridine-3'-phosphate
  modified_base 13: mod_base = OTHER; note = 2'-O-methyluridine-3'-phosphate
  modified_base 14: mod_base = OTHER; note = 2'-O-methyluridine-3'-phosphate
  modified_base 15: mod_base = OTHER; note = 2'-O-methyluridine-3'-phosphate
  modified_base 16: mod_base = OTHER; note = 2'-O-methyladenosine-3'-phosphate
  modified_base 17: mod_base = OTHER; note = 2'-O-methyladenosine-3'-phosphate
  modified_base 18: mod_base = OTHER; note = 2'-O-methyladenosine-3'-phosphate
  modified_base 19: mod_base = OTHER; note = 2'-O-methyladenosine-3'-phosphorothioate
  modified_base 20: mod_base = OTHER; note = 2'-O-methyladenosine-3'-phosphorothioate
  modified_base 21: mod_base = OTHER; note = 2'-O-methyladenosine
ttagcaggactttttaaaaaa

SEQ ID NO: 10904 - RNA, 21 nt, synthetic construct
  source 1..21: mol_type = other RNA
  modified_base 1: mod_base = OTHER; note = 2'-O-methyluridine-3'-phosphorothioate
  modified_base 2: mod_base = OTHER; note = 2'-O-methyladenosine-3'-phosphorothioate
  modified_base 3: mod_base = OTHER; note = 2'-O-methylguanosine-3'-phosphate
  modified_base 4: mod_base = OTHER; note = 2'-O-methylcytidine-3'-phosphate
  modified_base 5: mod_base = OTHER; note = 2'-O-methyladenosine-3'-phosphate
  modified_base 6: mod_base = OTHER; note = 2'-O-docosanyl-guanosine-3'-phosphate
  modified_base 7: mod_base = OTHER; note = 2'-deoxy-2'-fluoroguanosine-3'-phosphate
  modified_base 8: mod_base = OTHER; note = 2'-O-methyladenosine-3'-phosphate
  modified_base 9: mod_base = OTHER; note = 2'-deoxy-2'-fluorocytidine-3'-phosphate
  modified_base 10: mod_base = OTHER; note = 2'-deoxy-2'-fluorouridine-3'-phosphate
  modified_base 11: mod_base = OTHER; note = 2'-deoxy-2'-fluorouridine-3'-phosphate
  modified_base 12: mod_base = OTHER; note = 2'-O-methyluridine-3'-phosphate
  modified_base 13: mod_base = OTHER; note = 2'-O-methyluridine-3'-phosphate
  modified_base 14: mod_base = OTHER; note = 2'-O-methyluridine-3'-phosphate
  modified_base 15: mod_base = OTHER; note = 2'-O-methyladenosine-3'-phosphate
  modified_base 16: mod_base = OTHER; note = 2'-O-methyladenosine-3'-phosphate
  modified_base 17: mod_base = OTHER; note = 2'-O-methyladenosine-3'-phosphate
  modified_base 18: mod_base = OTHER; note = 2'-O-methyladenosine-3'-phosphate
  modified_base 19: mod_base = OTHER; note = 2'-O-methyladenosine-3'-phosphorothioate
  modified_base 20: mod_base = OTHER; note = 2'-O-methyluridine-3'-phosphorothioate
  modified_base 21: mod_base = OTHER; note = 2'-O-methyladenosine
tagcaggactttttaaaaata

SEQ ID NO: 10905 - RNA, 21 nt, synthetic construct
  source 1..21: mol_type = other RNA
  modified_base 1: mod_base = OTHER; note = 2'-O-methyluridine-3'-phosphorothioate
  modified_base 2: mod_base = OTHER; note = 2'-O-methylcytidine-3'-phosphorothioate
  modified_base 3: mod_base = OTHER; note = 2'-O-methyluridine-3'-phosphate
  modified_base 4: mod_base = OTHER; note = 2'-O-methyladenosine-3'-phosphate
  modified_base 5: mod_base = OTHER; note = 2'-O-methyladenosine-3'-phosphate
  modified_base 6: mod_base = OTHER; note = 2'-O-docosanyl-adenosine-3'-phosphate
  modified_base 7: mod_base = OTHER; note = 2'-deoxy-2'-fluorocytidine-3'-phosphate
  modified_base 8: mod_base = OTHER; note = 2'-O-methyluridine-3'-phosphate
  modified_base 9: mod_base = OTHER; note = 2'-deoxy-2'-fluorouridine-3'-phosphate
  modified_base 10: mod_base = OTHER; note = 2'-deoxy-2'-fluorouridine-3'-phosphate
  modified_base 11: mod_base = OTHER; note = 2'-deoxy-2'-fluoroadenosine-3'-phosphate
  modified_base 12: mod_base = OTHER; note = 2'-O-methyladenosine-3'-phosphate
  modified_base 13: mod_base = OTHER; note = 2'-O-methyluridine-3'-phosphate
  modified_base 14: mod_base = OTHER; note = 2'-O-methyladenosine-3'-phosphate
  modified_base 15: mod_base = OTHER; note = 2'-O-methyluridine-3'-phosphate
  modified_base 16: mod_base = OTHER; note = 2'-O-methyladenosine-3'-phosphate
  modified_base 17: mod_base = OTHER; note = 2'-O-methyluridine-3'-phosphate
  modified_base 18: mod_base = OTHER; note = 2'-O-methylcytidine-3'-phosphate
  modified_base 19: mod_base = OTHER; note = 2'-O-methylguanosine-3'-phosphorothioate
  modified_base 20: mod_base = OTHER; note = 2'-O-methyladenosine-3'-phosphorothioate
  modified_base 21: mod_base = OTHER; note = 2'-O-methyladenosine
tctaaactttaatatatcgaa

SEQ ID NO: 10906 - RNA, 21 nt, synthetic construct
  source 1..21: mol_type = other RNA
  modified_base 1: mod_base = OTHER; note = 2'-O-methylcytidine-3'-phosphorothioate
  modified_base 2: mod_base = OTHER; note = 2'-O-methyluridine-3'-phosphorothioate
  modified_base 3: mod_base = OTHER; note = 2'-O-methylcytidine-3'-phosphate
  modified_base 4: mod_base = OTHER; note = 2'-O-methyluridine-3'-phosphate
  modified_base 5: mod_base = OTHER; note = 2'-O-methyladenosine-3'-phosphate
  modified_base 6: mod_base = OTHER; note = 2'-O-docosanyl-adenosine-3'-phosphate
  modified_base 7: mod_base = OTHER; note = 2'-deoxy-2'-fluoroadenosine-3'-phosphate
  modified_base 8: mod_base = OTHER; note = 2'-O-methylcytidine-3'-phosphate
  modified_base 9: mod_base = OTHER; note = 2'-deoxy-2'-fluorouridine-3'-phosphate
  modified_base 10: mod_base = OTHER; note = 2'-deoxy-2'-fluorouridine-3'-phosphate
  modified_base 11: mod_base = OTHER; note = 2'-deoxy-2'-fluorouridine-3'-phosphate
  modified_base 12: mod_base = OTHER; note = 2'-O-methyladenosine-3'-phosphate
  modified_base 13: mod_base = OTHER; note = 2'-O-methyladenosine-3'-phosphate
  modified_base 14: mod_base = OTHER; note = 2'-O-methyluridine-3'-phosphate
  modified_base 15: mod_base = OTHER; note = 2'-O-methyladenosine-3'-phosphate
  modified_base 16: mod_base = OTHER; note = 2'-O-methyluridine-3'-phosphate
  modified_base 17: mod_base = OTHER; note = 2'-O-methyladenosine-3'-phosphate
  modified_base 18: mod_base = OTHER; note = 2'-O-methyluridine-3'-phosphate
  modified_base 19: mod_base = OTHER; note = 2'-O-methylcytidine-3'-phosphorothioate
  modified_base 20: mod_base = OTHER; note = 2'-O-methylguanosine-3'-phosphorothioate
  modified_base 21: mod_base = OTHER; note = 2'-O-methyladenosine
ctctaaactttaatatatcga

SEQ ID NO: 10907 - RNA, 21 nt, synthetic construct
  source 1..21: mol_type = other RNA
  modified_base 1: mod_base = OTHER; note = 2'-O-methyladenosine-3'-phosphorothioate
  modified_base 2: mod_base = OTHER; note = 2'-O-methyladenosine-3'-phosphorothioate
  modified_base 3: mod_base = OTHER; note = 2'-O-methyladenosine-3'-phosphate
  modified_base 4: mod_base = OTHER; note = 2'-O-methylcytidine-3'-phosphate
  modified_base 5: mod_base = OTHER; note = 2'-O-methyluridine-3'-phosphate
  modified_base 6: mod_base = OTHER; note = 2'-O-docosanyl-uridine-3'-phosphate
  modified_base 7: mod_base = OTHER; note = 2'-deoxy-2'-fluorouridine-3'-phosphate
  modified_base 8: mod_base = OTHER; note = 2'-O-methyladenosine-3'-phosphate
  modified_base 9: mod_base = OTHER; note = 2'-deoxy-2'-fluoroadenosine-3'-phosphate
  modified_base 10: mod_base = OTHER; note = 2'-deoxy-2'-fluorouridine-3'-phosphate
  modified_base 11: mod_base = OTHER; note = 2'-deoxy-2'-fluoroadenosine-3'-phosphate
  modified_base 12: mod_base = OTHER; note = 2'-O-methyluridine-3'-phosphate
  modified_base 13: mod_base = OTHER; note = 2'-O-methyladenosine-3'-phosphate
  modified_base 14: mod_base = OTHER; note = 2'-O-methyluridine-3'-phosphate
  modified_base 15: mod_base = OTHER; note = 2'-O-methylcytidine-3'-phosphate
  modified_base 16: mod_base = OTHER; note = 2'-O-methylguanosine-3'-phosphate
  modified_base 17: mod_base = OTHER; note = 2'-O-methyladenosine-3'-phosphate
  modified_base 18: mod_base = OTHER; note = 2'-O-methyladenosine-3'-phosphate
  modified_base 19: mod_base = OTHER; note = 2'-O-methylcytidine-3'-phosphorothioate
  modified_base 20: mod_base = OTHER; note = 2'-O-methylguanosine-3'-phosphorothioate
  modified_base 21: mod_base = OTHER; note = 2'-O-methyladenosine
aaactttaatatatcgaacga

SEQ ID NO: 10908 - RNA, 21 nt, synthetic construct
  source 1..21: mol_type = other RNA
  modified_base 1: mod_base = OTHER; note = 2'-O-methyladenosine-3'-phosphorothioate
  modified_base 2: mod_base = OTHER; note = 2'-O-methylcytidine-3'-phosphorothioate
  modified_base 3: mod_base = OTHER; note = 2'-O-methyluridine-3'-phosphate
  modified_base 4: mod_base = OTHER; note = 2'-O-methyluridine-3'-phosphate
  modified_base 5: mod_base = OTHER; note = 2'-O-methyluridine-3'-phosphate
  modified_base 6: mod_base = OTHER; note = 2'-O-docosanyl-adenosine-3'-phosphate
  modified_base 7: mod_base = OTHER; note = 2'-deoxy-2'-fluoroadenosine-3'-phosphate
  modified_base 8: mod_base = OTHER; note = 2'-O-methyluridine-3'-phosphate
  modified_base 9: mod_base = OTHER; note = 2'-deoxy-2'-fluoroadenosine-3'-phosphate
  modified_base 10: mod_base = OTHER; note = 2'-deoxy-2'-fluorouridine-3'-phosphate
  modified_base 11: mod_base = OTHER; note = 2'-deoxy-2'-fluoroadenosine-3'-phosphate
  modified_base 12: mod_base = OTHER; note = 2'-O-methyluridine-3'-phosphate
  modified_base 13: mod_base = OTHER; note = 2'-O-methylcytidine-3'-phosphate
  modified_base 14: mod_base = OTHER; note = 2'-O-methylguanosine-3'-phosphate
  modified_base 15: mod_base = OTHER; note = 2'-O-methyladenosine-3'-phosphate
  modified_base 16: mod_base = OTHER; note = 2'-O-methyladenosine-3'-phosphate
  modified_base 17: mod_base = OTHER; note = 2'-O-methylcytidine-3'-phosphate
  modified_base 18: mod_base = OTHER; note = 2'-O-methylguanosine-3'-phosphate
  modified_base 19: mod_base = OTHER; note = 2'-O-methyluridine-3'-phosphorothioate
  modified_base 20: mod_base = OTHER; note = 2'-O-methylguanosine-3'-phosphorothioate
  modified_base 21: mod_base = OTHER; note = 2'-O-methyladenosine
actttaatatatcgaacgtga

SEQ ID NO: 10909 - RNA, 21 nt, synthetic construct
  source 1..21: mol_type = other RNA
  modified_base 1: mod_base = OTHER; note = 2'-O-methylcytidine-3'-phosphorothioate
  modified_base 2: mod_base = OTHER; note = 2'-O-methyluridine-3'-phosphorothioate
  modified_base 3: mod_base = OTHER; note = 2'-O-methyluridine-3'-phosphate
  modified_base 4: mod_base = OTHER; note = 2'-O-methyluridine-3'-phosphate
  modified_base 5: mod_base = OTHER; note = 2'-O-methyladenosine-3'-phosphate
  modified_base 6: mod_base = OTHER; note = 2'-O-docosanyl-adenosine-3'-phosphate
  modified_base 7: mod_base = OTHER; note = 2'-deoxy-2'-fluorouridine-3'-phosphate
  modified_base 8: mod_base = OTHER; note = 2'-O-methyladenosine-3'-phosphate
  modified_base 9: mod_base = OTHER; note = 2'-deoxy-2'-fluorouridine-3'-phosphate
  modified_base 10: mod_base = OTHER; note = 2'-deoxy-2'-fluoroadenosine-3'-phosphate
  modified_base 11: mod_base = OTHER; note = 2'-deoxy-2'-fluorouridine-3'-phosphate
  modified_base 12: mod_base = OTHER; note = 2'-O-methylcytidine-3'-phosphate
  modified_base 13: mod_base = OTHER; note = 2'-O-methylguanosine-3'-phosphate
  modified_base 14: mod_base = OTHER; note = 2'-O-methyladenosine-3'-phosphate
  modified_base 15: mod_base = OTHER; note = 2'-O-methyladenosine-3'-phosphate
  modified_base 16: mod_base = OTHER; note = 2'-O-methylcytidine-3'-phosphate
  modified_base 17: mod_base = OTHER; note = 2'-O-methylguanosine-3'-phosphate
  modified_base 18: mod_base = OTHER; note = 2'-O-methyluridine-3'-phosphate
  modified_base 19: mod_base = OTHER; note = 2'-O-methylguanosine-3'-phosphorothioate
  modified_base 20: mod_base = OTHER; note = 2'-O-methyladenosine-3'-phosphorothioate
  modified_base 21: mod_base = OTHER; note = 2'-O-methyladenosine
ctttaatatatcgaacgtgaa

SEQ ID NO: 10910 - RNA, 21 nt, synthetic construct
  source 1..21: mol_type = other RNA
  modified_base 1: mod_base = OTHER; note = 2'-O-methyluridine-3'-phosphorothioate
  modified_base 2: mod_base = OTHER; note = 2'-O-methyluridine-3'-phosphorothioate
  modified_base 3: mod_base = OTHER; note = 2'-O-methyluridine-3'-phosphate
  modified_base 4: mod_base = OTHER; note = 2'-O-methyladenosine-3'-phosphate
  modified_base 5: mod_base = OTHER; note = 2'-O-methyladenosine-3'-phosphate
  modified_base 6: mod_base = OTHER; note = 2'-O-docosanyl-uridine-3'-phosphate
  modified_base 7: mod_base = OTHER; note = 2'-deoxy-2'-fluoroadenosine-3'-phosphate
  modified_base 8: mod_base = OTHER; note = 2'-O-methyluridine-3'-phosphate
  modified_base 9: mod_base = OTHER; note = 2'-deoxy-2'-fluoroadenosine-3'-phosphate
  modified_base 10: mod_base = OTHER; note = 2'-deoxy-2'-fluorouridine-3'-phosphate
  modified_base 11: mod_base = OTHER; note = 2'-deoxy-2'-fluorocytidine-3'-phosphate
  modified_base 12: mod_base = OTHER; note = 2'-O-methylguanosine-3'-phosphate
  modified_base 13: mod_base = OTHER; note = 2'-O-methyladenosine-3'-phosphate
  modified_base 14: mod_base = OTHER; note = 2'-O-methyladenosine-3'-phosphate
  modified_base 15: mod_base = OTHER; note = 2'-O-methylcytidine-3'-phosphate
  modified_base 16: mod_base = OTHER; note = 2'-O-methylguanosine-3'-phosphate
  modified_base 17: mod_base = OTHER; note = 2'-O-methyluridine-3'-phosphate
  modified_base 18: mod_base = OTHER; note = 2'-O-methylguanosine-3'-phosphate
  modified_base 19: mod_base = OTHER; note = 2'-O-methyladenosine-3'-phosphorothioate
  modified_base 20: mod_base = OTHER; note = 2'-O-methylguanosine-3'-phosphorothioate
  modified_base 21: mod_base = OTHER; note = 2'-O-methyladenosine
tttaatatatcgaacgtgaga

SEQ ID NO: 10911 - RNA, 21 nt, synthetic construct
  source 1..21: mol_type = other RNA
  modified_base 1: mod_base = OTHER; note = 2'-O-methyluridine-3'-phosphorothioate
  modified_base 2: mod_base = OTHER; note = 2'-O-methyluridine-3'-phosphorothioate
  modified_base 3: mod_base = OTHER; note = 2'-O-methyladenosine-3'-phosphate
  modified_base 4: mod_base = OTHER; note = 2'-O-methyladenosine-3'-phosphate
  modified_base 5: mod_base = OTHER; note = 2'-O-methyluridine-3'-phosphate
  modified_base 6: mod_base = OTHER; note = 2'-O-docosanyl-adenosine-3'-phosphate
  modified_base 7: mod_base = OTHER; note = 2'-deoxy-2'-fluorouridine-3'-phosphate
  modified_base 8: mod_base = OTHER; note = 2'-O-methyladenosine-3'-phosphate
  modified_base 9: mod_base = OTHER; note = 2'-deoxy-2'-fluorouridine-3'-phosphate
  modified_base 10: mod_base = OTHER; note = 2'-deoxy-2'-fluorocytidine-3'-phosphate
  modified_base 11: mod_base = OTHER; note = 2'-deoxy-2'-fluoroguanosine-3'-phosphate
  modified_base 12: mod_base = OTHER; note = 2'-O-methyladenosine-3'-phosphate
  modified_base 13: mod_base = OTHER; note = 2'-O-methyladenosine-3'-phosphate
  modified_base 14: mod_base = OTHER; note = 2'-O-methylcytidine-3'-phosphate
  modified_base 15: mod_base = OTHER; note = 2'-O-methylguanosine-3'-phosphate
  modified_base 16: mod_base = OTHER; note = 2'-O-methyluridine-3'-phosphate
  modified_base 17: mod_base = OTHER; note = 2'-O-methylguanosine-3'-phosphate
  modified_base 18: mod_base = OTHER; note = 2'-O-methyladenosine-3'-phosphate
  modified_base 19: mod_base = OTHER; note = 2'-O-methylguanosine-3'-phosphorothioate
  modified_base 20: mod_base = OTHER; note = 2'-O-methyladenosine-3'-phosphorothioate
  modified_base 21: mod_base = OTHER; note = 2'-O-methyladenosine
ttaatatatcgaacgtgagaa

SEQ ID NO: 10912 - RNA, 21 nt, synthetic construct
  source 1..21: mol_type = other RNA
  modified_base 1: mod_base = OTHER; note = 2'-O-methyluridine-3'-phosphorothioate
  modified_base 2: mod_base = OTHER; note = 2'-O-methyladenosine-3'-phosphorothioate
  modified_base 3: mod_base = OTHER; note = 2'-O-methyladenosine-3'-phosphate
  modified_base 4: mod_base = OTHER; note = 2'-O-methyluridine-3'-phosphate
  modified_base 5: mod_base = OTHER; note = 2'-O-methyladenosine-3'-phosphate
  modified_base 6: mod_base = OTHER; note = 2'-O-docosanyl-uridine-3'-phosphate
  modified_base 7: mod_base = OTHER; note = 2'-deoxy-2'-fluoroadenosine-3'-phosphate
  modified_base 8: mod_base = OTHER; note = 2'-O-methyluridine-3'-phosphate
  modified_base 9: mod_base = OTHER; note = 2'-deoxy-2'-fluorocytidine-3'-phosphate
  modified_base 10: mod_base = OTHER; note = 2'-deoxy-2'-fluoroguanosine-3'-phosphate
  modified_base 11: mod_base = OTHER; note = 2'-deoxy-2'-fluoroadenosine-3'-phosphate
  modified_base 12: mod_base = OTHER; note = 2'-O-methyladenosine-3'-phosphate
  modified_base 13: mod_base = OTHER; note = 2'-O-methylcytidine-3'-phosphate
  modified_base 14: mod_base = OTHER; note = 2'-O-methylguanosine-3'-phosphate
  modified_base 15: mod_base = OTHER; note = 2'-O-methyluridine-3'-phosphate
  modified_base 16: mod_base = OTHER; note = 2'-O-methylguanosine-3'-phosphate
  modified_base 17: mod_base = OTHER; note = 2'-O-methyladenosine-3'-phosphate
  modified_base 18: mod_base = OTHER; note = 2'-O-methylguanosine-3'-phosphate
  modified_base 19: mod_base = OTHER; note = 2'-O-methyladenosine-3'-phosphorothioate
  modified_base 20: mod_base = OTHER; note = 2'-O-methylguanosine-3'-phosphorothioate
  modified_base 21: mod_base = OTHER; note = 2'-O-methyladenosine
taatatatcgaacgtgagaga

SEQ ID NO: 10913 - RNA, 21 nt, synthetic construct
  source 1..21: mol_type = other RNA
  modified_base 1: mod_base = OTHER; note = 2'-O-methyladenosine-3'-phosphorothioate
  modified_base 2: mod_base = OTHER; note = 2'-O-methyladenosine-3'-phosphorothioate
  modified_base 3: mod_base = OTHER; note = 2'-O-methyluridine-3'-phosphate
  modified_base 4: mod_base = OTHER; note = 2'-O-methyladenosine-3'-phosphate
  modified_base 5: mod_base = OTHER; note = 2'-O-methyluridine-3'-phosphate
  modified_base 6: mod_base = OTHER; note = 2'-O-docosanyl-adenosine-3'-phosphate
  modified_base 7: mod_base = OTHER; note = 2'-deoxy-2'-fluorouridine-3'-phosphate
  modified_base 8: mod_base = OTHER; note = 2'-O-methylcytidine-3'-phosphate
  modified_base 9: mod_base = OTHER; note = 2'-deoxy-2'-fluoroguanosine-3'-phosphate
  modified_base 10: mod_base = OTHER; note = 2'-deoxy-2'-fluoroadenosine-3'-phosphate
  modified_base 11: mod_base = OTHER; note = 2'-deoxy-2'-fluoroadenosine-3'-phosphate
  modified_base 12: mod_base = OTHER; note = 2'-O-methylcytidine-3'-phosphate
  modified_base 13: mod_base = OTHER; note = 2'-O-methylguanosine-3'-phosphate
  modified_base 14: mod_base = OTHER; note = 2'-O-methyluridine-3'-phosphate
  modified_base 15: mod_base = OTHER; note = 2'-O-methylguanosine-3'-phosphate
  modified_base 16: mod_base = OTHER; note = 2'-O-methyladenosine-3'-phosphate
  modified_base 17: mod_base = OTHER; note = 2'-O-methylguanosine-3'-phosphate
  modified_base 18: mod_base = OTHER; note = 2'-O-methyladenosine-3'-phosphate
  modified_base 19: mod_base = OTHER; note = 2'-O-methylguanosine-3'-phosphorothioate
  modified_base 20: mod_base = OTHER; note = 2'-O-methyluridine-3'-phosphorothioate
  modified_base 21: mod_base = OTHER; note = 2'-O-methyladenosine
aatatatcgaacgtgagagta

SEQ ID NO: 10914 - RNA, 21 nt, synthetic construct
  source 1..21: mol_type = other RNA
  modified_base 1: mod_base = OTHER; note = 2'-O-methyladenosine-3'-phosphorothioate
  modified_base 2: mod_base = OTHER; note = 2'-O-methyluridine-3'-phosphorothioate
  modified_base 3: mod_base = OTHER; note = 2'-O-methyladenosine-3'-phosphate
  modified_base 4: mod_base = OTHER; note = 2'-O-methyluridine-3'-phosphate
  modified_base 5: mod_base = OTHER; note = 2'-O-methyladenosine-3'-phosphate
  modified_base 6: mod_base = OTHER; note = 2'-O-docosanyl-uridine-3'-phosphate
  modified_base 7: mod_base = OTHER; note = 2'-deoxy-2'-fluorocytidine-3'-phosphate
  modified_base 8: mod_base = OTHER; note = 2'-O-methylguanosine-3'-phosphate
  modified_base 9: mod_base = OTHER; note = 2'-deoxy-2'-fluoroadenosine-3'-phosphate
  modified_base 10: mod_base = OTHER; note = 2'-deoxy-2'-fluoroadenosine-3'-phosphate
  modified_base 11: mod_base = OTHER; note = 2'-deoxy-2'-fluorocytidine-3'-phosphate
  modified_base 12: mod_base = OTHER; note = 2'-O-methylguanosine-3'-phosphate
  modified_base 13: mod_base = OTHER; note = 2'-O-methyluridine-3'-phosphate
  modified_base 14: mod_base = OTHER; note = 2'-O-methylguanosine-3'-phosphate
  modified_base 15: mod_base = OTHER; note = 2'-O-methyladenosine-3'-phosphate
  modified_base 16: mod_base = OTHER; note = 2'-O-methylguanosine-3'-phosphate
  modified_base 17: mod_base = OTHER; note = 2'-O-methyladenosine-3'-phosphate
  modified_base 18: mod_base = OTHER; note = 2'-O-methylguanosine-3'-phosphate
  modified_base 19: mod_base = OTHER; note = 2'-O-methyluridine-3'-phosphorothioate
  modified_base 20: mod_base = OTHER; note = 2'-O-methylguanosine-3'-phosphorothioate
  modified_base 21: mod_base = OTHER; note = 2'-O-methyladenosine
atatatcgaacgtgagagtga

SEQ ID NO: 10915 - RNA, 21 nt, synthetic construct
  source 1..21: mol_type = other RNA
  modified_base 1: mod_base = OTHER; note = 2'-O-methyluridine-3'-phosphorothioate
  modified_base 2: mod_base = OTHER; note = 2'-O-methyladenosine-3'-phosphorothioate
  modified_base 3: mod_base = OTHER; note = 2'-O-methyluridine-3'-phosphate
  modified_base 4: mod_base = OTHER; note = 2'-O-methyladenosine-3'-phosphate
  modified_base 5: mod_base = OTHER; note = 2'-O-methyluridine-3'-phosphate
  modified_base 6: mod_base = OTHER; note = 2'-O-docosanyl-cytidine-3'-phosphate
  modified_base 7: mod_base = OTHER; note = 2'-deoxy-2'-fluoroguanosine-3'-phosphate
  modified_base 8: mod_base = OTHER; note = 2'-O-methyladenosine-3'-phosphate
  modified_base 9: mod_base = OTHER; note = 2'-deoxy-2'-fluoroadenosine-3'-phosphate
  modified_base 10: mod_base = OTHER; note = 2'-deoxy-2'-fluorocytidine-3'-phosphate
  modified_base 11: mod_base = OTHER; note = 2'-deoxy-2'-fluoroguanosine-3'-phosphate
  modified_base 12: mod_base = OTHER; note = 2'-O-methyluridine-3'-phosphate
  modified_base 13: mod_base = OTHER; note = 2'-O-methylguanosine-3'-phosphate
  modified_base 14: mod_base = OTHER; note = 2'-O-methyladenosine-3'-phosphate
  modified_base 15: mod_base = OTHER; note = 2'-O-methylguanosine-3'-phosphate
  modified_base 16: mod_base = OTHER; note = 2'-O-methyladenosine-3'-phosphate
  modified_base 17: mod_base = OTHER; note = 2'-O-methylguanosine-3'-phosphate
  modified_base 18: mod_base = OTHER; note = 2'-O-methyluridine-3'-phosphate
  modified_base 19: mod_base = OTHER; note = 2'-O-methylguanosine-3'-phosphorothioate
  modified_base 20: mod_base = OTHER; note = 2'-O-methylguanosine-3'-phosphorothioate
  modified_base 21: mod_base = OTHER; note = 2'-O-methyladenosine
tatatcgaacgtgagagtgga

SEQ ID NO: 10916 - RNA, 21 nt, synthetic construct
  source 1..21: mol_type = other RNA
  modified_base 1: mod_base = OTHER; note = 2'-O-methylguanosine-3'-phosphorothioate
  modified_base 2: mod_base = OTHER; note = 2'-O-methyluridine-3'-phosphorothioate
  modified_base 3: mod_base = OTHER; note = 2'-O-methyluridine-3'-phosphate
  modified_base 4: mod_base = OTHER; note = 2'-O-methylcytidine-3'-phosphate
  modified_base 5: mod_base = OTHER; note = 2'-O-methyluridine-3'-phosphate
  modified_base 6: mod_base = OTHER; note = 2'-O-docosanyl-uridine-3'-phosphate
  modified_base 7: mod_base = OTHER; note = 2'-deoxy-2'-fluorocytidine-3'-phosphate
  modified_base 8: mod_base = OTHER; note = 2'-O-methyladenosine-3'-phosphate
  modified_base 9: mod_base = OTHER; note = 2'-deoxy-2'-fluorouridine-3'-phosphate
  modified_base 10: mod_base = OTHER; note = 2'-deoxy-2'-fluoroadenosine-3'-phosphate
  modified_base 11: mod_base = OTHER; note = 2'-deoxy-2'-fluoroadenosine-3'-phosphate
  modified_base 12: mod_base = OTHER; note = 2'-O-methyluridine-3'-phosphate
  modified_base 13: mod_base = OTHER; note = 2'-O-methylcytidine-3'-phosphate
  modified_base 14: mod_base = OTHER; note = 2'-O-methylcytidine-3'-phosphate
  modified_base 15: mod_base = OTHER; note = 2'-O-methyladenosine-3'-phosphate
  modified_base 16: mod_base = OTHER; note = 2'-O-methylcytidine-3'-phosphate
  modified_base 17: mod_base = OTHER; note = 2'-O-methyluridine-3'-phosphate
  modified_base 18: mod_base = OTHER; note = 2'-O-methyladenosine-3'-phosphate
  modified_base 19: mod_base = OTHER; note = 2'-O-methylcytidine-3'-phosphorothioate
  modified_base 20: mod_base = OTHER; note = 2'-O-methyluridine-3'-phosphorothioate
  modified_base 21: mod_base = OTHER; note = 2'-O-methyladenosine
gttcttcataatccactacta

SEQ ID NO: 10917 - RNA, 21 nt, synthetic construct
  source 1..21: mol_type = other RNA
  modified_base 1: mod_base = OTHER; note = 2'-O-methyladenosine-3'-phosphorothioate
  modified_base 2: mod_base = OTHER; note = 2'-O-methylcytidine-3'-phosphorothioate
  modified_base 3: mod_base = OTHER; note = 2'-O-methylcytidine-3'-phosphate
  modified_base 4: mod_base = OTHER; note = 2'-O-methyladenosine-3'-phosphate
  modified_base 5: mod_base = OTHER; note = 2'-O-methylcytidine-3'-phosphate
  modified_base 6: mod_base = OTHER; note = 2'-O-docosanyl-uridine-3'-phosphate
  modified_base 7: mod_base = OTHER; note = 2'-deoxy-2'-fluoroadenosine-3'-phosphate
  modified_base 8: mod_base = OTHER; note = 2'-O-methyladenosine-3'-phosphate
  modified_base 9: mod_base = OTHER; note = 2'-deoxy-2'-fluoroadenosine-3'-phosphate
  modified_base 10: mod_base = OTHER; note = 2'-deoxy-2'-fluorocytidine-3'-phosphate
  modified_base 11: mod_base = OTHER; note = 2'-deoxy-2'-fluorouridine-3'-phosphate
  modified_base 12: mod_base = OTHER; note = 2'-O-methyluridine-3'-phosphate
  modified_base 13: mod_base = OTHER; note = 2'-O-methylguanosine-3'-phosphate
  modified_base 14: mod_base = OTHER; note = 2'-O-methyluridine-3'-phosphate
  modified_base 15: mod_base = OTHER; note = 2'-O-methyluridine-3'-phosphate
  modified_base 16: mod_base = OTHER; note = 2'-O-methylcytidine-3'-phosphate
  modified_base 17: mod_base = OTHER; note = 2'-O-methylcytidine-3'-phosphate
  modified_base 18: mod_base = OTHER; note = 2'-O-methyluridine-3'-phosphate
  modified_base 19: mod_base = OTHER; note = 2'-O-methyluridine-3'-phosphorothioate
  modified_base 20: mod_base = OTHER; note = 2'-O-methyluridine-3'-phosphorothioate
  modified_base 21: mod_base = OTHER; note = 2'-O-methyladenosine
accactaaacttgttccttta

SEQ ID NO: 10918 - RNA, 21 nt, synthetic construct
  source 1..21: mol_type = other RNA
  modified_base 1: mod_base = OTHER; note = 2'-O-methyluridine-3'-phosphorothioate
  modified_base 2: mod_base = OTHER; note = 2'-O-methylguanosine-3'-phosphorothioate
  modified_base 3: mod_base = OTHER; note = 2'-O-methyladenosine-3'-phosphate
  modified_base 4: mod_base = OTHER; note = 2'-O-methyladenosine-3'-phosphate
  modified_base 5: mod_base = OTHER; note = 2'-O-methylcytidine-3'-phosphate
  modified_base 6: mod_base = OTHER; note = 2'-O-docosanyl-cytidine-3'-phosphate
  modified_base 7: mod_base = OTHER; note = 2'-deoxy-2'-fluoroadenosine-3'-phosphate
  modified_base 8: mod_base = OTHER; note = 2'-O-methylcytidine-3'-phosphate
  modified_base 9: mod_base = OTHER; note = 2'-deoxy-2'-fluorouridine-3'-phosphate
  modified_base 10: mod_base = OTHER; note = 2'-deoxy-2'-fluoroadenosine-3'-phosphate
  modified_base 11: mod_base = OTHER; note = 2'-deoxy-2'-fluoroadenosine-3'-phosphate
  modified_base 12: mod_base = OTHER; note = 2'-O-methyladenosine-3'-phosphate
  modified_base 13: mod_base = OTHER; note = 2'-O-methylcytidine-3'-phosphate
  modified_base 14: mod_base = OTHER; note = 2'-O-methyluridine-3'-phosphate
  modified_base 15: mod_base = OTHER; note = 2'-O-methyluridine-3'-phosphate
  modified_base 16: mod_base = OTHER; note = 2'-O-methylguanosine-3'-phosphate
  modified_base 17: mod_base = OTHER; note = 2'-O-methyluridine-3'-phosphate
  modified_base 18: mod_base = OTHER; note = 2'-O-methyluridine-3'-phosphate
  modified_base 19: mod_base = OTHER; note = 2'-O-methylcytidine-3'-phosphorothioate
  modified_base 20: mod_base = OTHER; note = 2'-O-methylcytidine-3'-phosphorothioate
  modified_base 21: mod_base = OTHER; note = 2'-O-methyladenosine
tgaaccactaaacttgttcca

SEQ ID NO: 10919 - RNA, 21 nt, synthetic construct
  source 1..21: mol_type = other RNA
  modified_base 1: mod_base = OTHER; note = 2'-O-methylguanosine-3'-phosphorothioate
  modified_base 2: mod_base = OTHER; note = 2'-O-methyladenosine-3'-phosphorothioate
  modified_base 3: mod_base = OTHER; note = 2'-O-methyladenosine-3'-phosphate
  modified_base 4: mod_base = OTHER; note = 2'-O-methylcytidine-3'-phosphate
  modified_base 5: mod_base = OTHER; note = 2'-O-methylcytidine-3'-phosphate
  modified_base 6: mod_base = OTHER; note = 2'-O-docosanyl-adenosine-3'-phosphate
  modified_base 7: mod_base = OTHER; note = 2'-deoxy-2'-fluorocytidine-3'-phosphate
  modified_base 8: mod_base = OTHER; note = 2'-O-methyluridine-3'-phosphate
  modified_base 9: mod_base = OTHER; note = 2'-deoxy-2'-fluoroadenosine-3'-phosphate
  modified_base 10: mod_base = OTHER; note = 2'-deoxy-2'-fluoroadenosine-3'-phosphate
  modified_base 11: mod_base = OTHER; note = 2'-deoxy-2'-fluoroadenosine-3'-phosphate
  modified_base 12: mod_base = OTHER; note = 2'-O-methylcytidine-3'-phosphate
  modified_base 13: mod_base = OTHER; note = 2'-O-methyluridine-3'-phosphate
  modified_base 14: mod_base = OTHER; note = 2'-O-methyluridine-3'-phosphate
  modified_base 15: mod_base = OTHER; note = 2'-O-methylguanosine-3'-phosphate
  modified_base 16: mod_base = OTHER; note = 2'-O-methyluridine-3'-phosphate
  modified_base 17: mod_base = OTHER; note = 2'-O-methyluridine-3'-phosphate
  modified_base 18: mod_base = OTHER; note = 2'-O-methylcytidine-3'-phosphate
  modified_base 19: mod_base = OTHER; note = 2'-O-methylcytidine-3'-phosphorothioate
  modified_base 20: mod_base = OTHER; note = 2'-O-methyluridine-3'-phosphorothioate
  modified_base 21: mod_base = OTHER; note = 2'-O-methyladenosine
gaaccactaaacttgttccta

SEQ ID NO: 10920 - RNA, 21 nt, synthetic construct
  source 1..21: mol_type = other RNA
  modified_base 1: mod_base = OTHER; note = 2'-O-methyladenosine-3'-phosphorothioate
  modified_base 2: mod_base = OTHER; note = 2'-O-methyladenosine-3'-phosphorothioate
  modified_base 3: mod_base = OTHER; note = 2'-O-methylcytidine-3'-phosphate
  modified_base 4: mod_base = OTHER; note = 2'-O-methylcytidine-3'-phosphate
  modified_base 5: mod_base = OTHER; note = 2'-O-methyladenosine-3'-phosphate
  modified_base 6: mod_base = OTHER; note = 2'-O-docosanyl-cytidine-3'-phosphate
  modified_base 7: mod_base = OTHER; note = 2'-deoxy-2'-fluorouridine-3'-phosphate
  modified_base 8: mod_base = OTHER; note = 2'-O-methyladenosine-3'-phosphate
  modified_base 9: mod_base = OTHER; note = 2'-deoxy-2'-fluoroadenosine-3'-phosphate
  modified_base 10: mod_base = OTHER; note = 2'-deoxy-2'-fluoroadenosine-3'-phosphate
  modified_base 11: mod_base = OTHER; note = 2'-deoxy-2'-fluorocytidine-3'-phosphate
  modified_base 12: mod_base = OTHER; note = 2'-O-methyluridine-3'-phosphate
  modified_base 13: mod_base = OTHER; note = 2'-O-methyluridine-3'-phosphate
  modified_base 14: mod_base = OTHER; note = 2'-O-methylguanosine-3'-phosphate
  modified_base 15: mod_base = OTHER; note = 2'-O-methyluridine-3'-phosphate
  modified_base 16: mod_base = OTHER; note = 2'-O-methyluridine-3'-phosphate
  modified_base 17: mod_base = OTHER; note = 2'-O-methylcytidine-3'-phosphate
  modified_base 18: mod_base = OTHER; note = 2'-O-methylcytidine-3'-phosphate
  modified_base 19: mod_base = OTHER; note = 2'-O-methyluridine-3'-phosphorothioate
  modified_base 20: mod_base = OTHER; note = 2'-O-methyluridine-3'-phosphorothioate
  modified_base 21: mod_base = OTHER; note = 2'-O-methyladenosine
aaccactaaacttgttcctta

SEQ ID NO: 10921 - RNA, 21 nt, synthetic construct
  source 1..21: mol_type = other RNA
  modified_base 1: mod_base = OTHER; note = 2'-O-methylcytidine-3'-phosphorothioate
  modified_base 2: mod_base = OTHER; note = 2'-O-methylcytidine-3'-phosphorothioate
  modified_base 3: mod_base = OTHER; note = 2'-O-methyladenosine-3'-phosphate
  modified_base 4: mod_base = OTHER; note = 2'-O-methylcytidine-3'-phosphate
  modified_base 5: mod_base = OTHER; note = 2'-O-methyluridine-3'-phosphate
  modified_base 6: mod_base = OTHER; note = 2'-O-docosanyl-adenosine-3'-phosphate
  modified_base 7: mod_base = OTHER; note = 2'-deoxy-2'-fluoroadenosine-3'-phosphate
  modified_base 8: mod_base = OTHER; note = 2'-O-methyladenosine-3'-phosphate
  modified_base 9: mod_base = OTHER; note = 2'-deoxy-2'-fluorocytidine-3'-phosphate
  modified_base 10: mod_base = OTHER; note = 2'-deoxy-2'-fluorouridine-3'-phosphate
  modified_base 11: mod_base = OTHER; note = 2'-deoxy-2'-fluorouridine-3'-phosphate
  modified_base 12: mod_base = OTHER; note = 2'-O-methylguanosine-3'-phosphate
  modified_base 13: mod_base = OTHER; note = 2'-O-methyluridine-3'-phosphate
  modified_base 14: mod_base = OTHER; note = 2'-O-methyluridine-3'-phosphate
  modified_base 15: mod_base = OTHER; note = 2'-O-methylcytidine-3'-phosphate
  modified_base 16: mod_base = OTHER; note = 2'-O-methylcytidine-3'-phosphate
  modified_base 17: mod_base = OTHER; note = 2'-O-methyluridine-3'-phosphate
  modified_base 18: mod_base = OTHER; note = 2'-O-methyluridine-3'-phosphate
  modified_base 19: mod_base = OTHER; note = 2'-O-methyluridine-3'-phosphorothioate
  modified_base 20: mod_base = OTHER; note = 2'-O-methylcytidine-3'-phosphorothioate
  modified_base 21: mod_base = OTHER; note = 2'-O-methyladenosine
ccactaaacttgttcctttca

SEQ ID NO: 10922 - RNA, 21 nt, synthetic construct
  source 1..21: mol_type = other RNA
  modified_base 1: mod_base = OTHER; note = 2'-O-methylcytidine-3'-phosphorothioate
  modified_base 2: mod_base = OTHER; note = 2'-O-methyladenosine-3'-phosphorothioate
  modified_base 3: mod_base = OTHER; note = 2'-O-methylcytidine-3'-phosphate
  modified_base 4: mod_base = OTHER; note = 2'-O-methyluridine-3'-phosphate
  modified_base 5: mod_base = OTHER; note = 2'-O-methyladenosine-3'-phosphate
  modified_base 6: mod_base = OTHER; note = 2'-O-docosanyl-adenosine-3'-phosphate
  modified_base 7: mod_base = OTHER; note = 2'-deoxy-2'-fluoroadenosine-3'-phosphate
  modified_base 8: mod_base = OTHER; note = 2'-O-methylcytidine-3'-phosphate
  modified_base 9: mod_base = OTHER; note = 2'-deoxy-2'-fluorouridine-3'-phosphate
  modified_base 10: mod_base = OTHER; note = 2'-deoxy-2'-fluorouridine-3'-phosphate
  modified_base 11: mod_base = OTHER; note = 2'-deoxy-2'-fluoroguanosine-3'-phosphate
  modified_base 12: mod_base = OTHER; note = 2'-O-methyluridine-3'-phosphate
  modified_base 13: mod_base = OTHER; note = 2'-O-methyluridine-3'-phosphate
  modified_base 14: mod_base = OTHER; note = 2'-O-methylcytidine-3'-phosphate
  modified_base 15: mod_base = OTHER; note = 2'-O-methylcytidine-3'-phosphate
  modified_base 16: mod_base = OTHER; note = 2'-O-methyluridine-3'-phosphate
  modified_base 17: mod_base = OTHER; note = 2'-O-methyluridine-3'-phosphate
  modified_base 18: mod_base = OTHER; note = 2'-O-methyluridine-3'-phosphate
  modified_base 19: mod_base = OTHER; note = 2'-O-methylcytidine-3'-phosphorothioate
  modified_base 20: mod_base = OTHER; note = 2'-O-methyladenosine-3'-phosphorothioate
  modified_base 21: mod_base = OTHER; note = 2'-O-methyladenosine
cactaaacttgttcctttcaa

SEQ ID NO: 10923 - RNA, 21 nt, synthetic construct
  source 1..21: mol_type = other RNA
  modified_base 1: mod_base = OTHER; note = 2'-O-methyladenosine-3'-phosphorothioate
  modified_base 2: mod_base = OTHER; note = 2'-O-methylcytidine-3'-phosphorothioate
  modified_base 3: mod_base = OTHER; note = 2'-O-methyluridine-3'-phosphate
  modified_base 4: mod_base = OTHER; note = 2'-O-methyladenosine-3'-phosphate
  modified_base 5: mod_base = OTHER; note = 2'-O-methyladenosine-3'-phosphate
  modified_base 6: mod_base = OTHER; note = 2'-O-docosanyl-adenosine-3'-phosphate
  modified_base 7: mod_base = OTHER; note = 2'-deoxy-2'-fluorocytidine-3'-phosphate
  modified_base 8: mod_base = OTHER; note = 2'-O-methyluridine-3'-phosphate
  modified_base 9: mod_base = OTHER; note = 2'-deoxy-2'-fluorouridine-3'-phosphate
  modified_base 10: mod_base = OTHER; note = 2'-deoxy-2'-fluoroguanosine-3'-phosphate
  modified_base 11: mod_base = OTHER; note = 2'-deoxy-2'-fluorouridine-3'-phosphate
  modified_base 12: mod_base = OTHER; note = 2'-O-methyluridine-3'-phosphate
  modified_base 13: mod_base = OTHER; note = 2'-O-methylcytidine-3'-phosphate
  modified_base 14: mod_base = OTHER; note = 2'-O-methylcytidine-3'-phosphate
  modified_base 15: mod_base = OTHER; note = 2'-O-methyluridine-3'-phosphate
  modified_base 16: mod_base = OTHER; note = 2'-O-methyluridine-3'-phosphate
  modified_base 17: mod_base = OTHER; note = 2'-O-methyluridine-3'-phosphate
  modified_base 18: mod_base = OTHER; note = 2'-O-methylcytidine-3'-phosphate
  modified_base 19: mod_base = OTHER; note = 2'-O-methyladenosine-3'-phosphorothioate
  modified_base 20: mod_base = OTHER; note = 2'-O-methyluridine-3'-phosphorothioate
  modified_base 21: mod_base = OTHER; note = 2'-O-methyladenosine
actaaacttgttcctttcata

SEQ ID NO: 10924 - RNA, 21 nt, synthetic construct
  source 1..21: mol_type = other RNA
  modified_base 1: mod_base = OTHER; note = 2'-O-methylcytidine-3'-phosphorothioate
  modified_base 2: mod_base = OTHER; note = 2'-O-methyluridine-3'-phosphorothioate
  modified_base 3: mod_base = OTHER; note = 2'-O-methyladenosine-3'-phosphate
  modified_base 4: mod_base = OTHER; note = 2'-O-methyladenosine-3'-phosphate
  modified_base 5: mod_base = OTHER; note = 2'-O-methyladenosine-3'-phosphate
  modified_base 6: mod_base = OTHER; note = 2'-O-docosanyl-cytidine-3'-phosphate
  modified_base 7: mod_base = OTHER; note = 2'-deoxy-2'-fluorouridine-3'-phosphate
  modified_base 8: mod_base = OTHER; note = 2'-O-methyluridine-3'-phosphate
  modified_base 9: mod_base = OTHER; note = 2'-deoxy-2'-fluoroguanosine-3'-phosphate
  modified_base 10: mod_base = OTHER; note = 2'-deoxy-2'-fluorouridine-3'-phosphate
  modified_base 11: mod_base = OTHER; note = 2'-deoxy-2'-fluorouridine-3'-phosphate
  modified_base 12: mod_base = OTHER; note = 2'-O-methylcytidine-3'-phosphate
  modified_base 13: mod_base = OTHER; note = 2'-O-methylcytidine-3'-phosphate
  modified_base 14: mod_base = OTHER; note = 2'-O-methyluridine-3'-phosphate
  modified_base 15: mod_base = OTHER; note = 2'-O-methyluridine-3'-phosphate
  modified_base 16: mod_base = OTHER; note = 2'-O-methyluridine-3'-phosphate
  modified_base 17: mod_base = OTHER; note = 2'-O-methylcytidine-3'-phosphate
  modified_base 18: mod_base = OTHER; note = 2'-O-methyladenosine-3'-phosphate
  modified_base 19: mod_base = OTHER; note = 2'-O-methyluridine-3'-phosphorothioate
  modified_base 20: mod_base = OTHER; note = 2'-O-methyluridine-3'-phosphorothioate
  modified_base 21: mod_base = OTHER; note = 2'-O-methyladenosine
ctaaacttgttcctttcatta

SEQ ID NO: 10925 - RNA, 21 nt, synthetic construct
  source 1..21: mol_type = other RNA
  modified_base 1: mod_base = OTHER; note = 2'-O-methyluridine-3'-phosphorothioate
  modified_base 2: mod_base = OTHER; note = 2'-O-methyladenosine-3'-phosphorothioate
  modified_base 3: mod_base = OTHER; note = 2'-O-methyladenosine-3'-phosphate
  modified_base 4: mod_base = OTHER; note = 2'-O-methyladenosine-3'-phosphate
  modified_base 5: mod_base = OTHER; note = 2'-O-methylcytidine-3'-phosphate
  modified_base 6: mod_base = OTHER; note = 2'-O-docosanyl-uridine-3'-phosphate
  modified_base 7: mod_base = OTHER; note = 2'-deoxy-2'-fluorouridine-3'-phosphate
  modified_base 8: mod_base = OTHER; note = 2'-O-methylguanosine-3'-phosphate
  modified_base 9: mod_base = OTHER; note = 2'-deoxy-2'-fluorouridine-3'-phosphate
  modified_base 10: mod_base = OTHER; note = 2'-deoxy-2'-fluorouridine-3'-phosphate
  modified_base 11: mod_base = OTHER; note = 2'-deoxy-2'-fluorocytidine-3'-phosphate
  modified_base 12: mod_base = OTHER; note = 2'-O-methylcytidine-3'-phosphate
  modified_base 13: mod_base = OTHER; note = 2'-O-methyluridine-3'-phosphate
  modified_base 14: mod_base = OTHER; note = 2'-O-methyluridine-3'-phosphate
  modified_base 15: mod_base = OTHER; note = 2'-O-methyluridine-3'-phosphate
  modified_base 16: mod_base = OTHER; note = 2'-O-methylcytidine-3'-phosphate
  modified_base 17: mod_base = OTHER; note = 2'-O-methyladenosine-3'-phosphate
  modified_base 18: mod_base = OTHER; note = 2'-O-methyluridine-3'-phosphate
  modified_base 19: mod_base = OTHER; note = 2'-O-methyluridine-3'-phosphorothioate
  modified_base 20: mod_base = OTHER; note = 2'-O-methyluridine-3'-phosphorothioate
  modified_base 21: mod_base = OTHER; note = 2'-O-methyladenosine
taaacttgttcctttcattta

SEQ ID NO: 10926 - RNA, 21 nt, synthetic construct
  source 1..21: mol_type = other RNA
  modified_base 1: mod_base = OTHER; note = 2'-O-methyladenosine-3'-phosphorothioate
  modified_base 2: mod_base = OTHER; note = 2'-O-methyladenosine-3'-phosphorothioate
  modified_base 3: mod_base = OTHER; note = 2'-O-methyladenosine-3'-phosphate
  modified_base 4: mod_base = OTHER; note = 2'-O-methylcytidine-3'-phosphate
  modified_base 5: mod_base = OTHER; note = 2'-O-methyluridine-3'-phosphate
  modified_base 6: mod_base = OTHER; note = 2'-O-docosanyl-uridine-3'-phosphate
  modified_base 7: mod_base = OTHER; note = 2'-deoxy-2'-fluoroguanosine-3'-phosphate
  modified_base 8: mod_base = OTHER; note = 2'-O-methyluridine-3'-phosphate
  modified_base 9: mod_base = OTHER; note = 2'-deoxy-2'-fluorouridine-3'-phosphate
  modified_base 10: mod_base = OTHER; note = 2'-deoxy-2'-fluorocytidine-3'-phosphate
  modified_base 11: mod_base = OTHER; note = 2'-deoxy-2'-fluorocytidine-3'-phosphate
  modified_base 12: mod_base = OTHER; note = 2'-O-methyluridine-3'-phosphate
  modified_base 13: mod_base = OTHER; note = 2'-O-methyluridine-3'-phosphate
  modified_base 14: mod_base = OTHER; note = 2'-O-methyluridine-3'-phosphate
  modified_base 15: mod_base = OTHER; note = 2'-O-methylcytidine-3'-phosphate
  modified_base 16: mod_base = OTHER; note = 2'-O-methyladenosine-3'-phosphate
  modified_base 17: mod_base = OTHER; note = 2'-O-methyluridine-3'-phosphate
  modified_base 18: mod_base = OTHER; note = 2'-O-methyluridine-3'-phosphate
  modified_base 19: mod_base = OTHER; note = 2'-O-methyluridine-3'-phosphorothioate
  modified_base 20: mod_base = OTHER; note = 2'-O-methyladenosine-3'-phosphorothioate
  modified_base 21: mod_base = OTHER; note = 2'-O-methyladenosine
aaacttgttcctttcatttaa

SEQ ID NO: 10927 - RNA, 21 nt, synthetic construct
  source 1..21: mol_type = other RNA
  modified_base 1: mod_base = OTHER; note = 2'-O-methyladenosine-3'-phosphorothioate
  modified_base 2: mod_base = OTHER; note = 2'-O-methyladenosine-3'-phosphorothioate
  modified_base 3: mod_base = OTHER; note = 2'-O-methylcytidine-3'-phosphate
  modified_base 4: mod_base = OTHER; note = 2'-O-methyluridine-3'-phosphate
  modified_base 5: mod_base = OTHER; note = 2'-O-methyluridine-3'-phosphate
  modified_base 6: mod_base = OTHER; note = 2'-O-docosanyl-guanosine-3'-phosphate
  modified_base 7: mod_base = OTHER; note = 2'-deoxy-2'-fluorouridine-3'-phosphate
  modified_base 8: mod_base = OTHER; note = 2'-O-methyluridine-3'-phosphate
  modified_base 9: mod_base = OTHER; note = 2'-deoxy-2'-fluorocytidine-3'-phosphate
  modified_base 10: mod_base = OTHER; note = 2'-deoxy-2'-fluorocytidine-3'-phosphate
  modified_base 11: mod_base = OTHER; note = 2'-deoxy-2'-fluorouridine-3'-phosphate
  modified_base 12: mod_base = OTHER; note = 2'-O-methyluridine-3'-phosphate
  modified_base 13: mod_base = OTHER; note = 2'-O-methyluridine-3'-phosphate
  modified_base 14: mod_base = OTHER; note = 2'-O-methylcytidine-3'-phosphate
  modified_base 15: mod_base = OTHER; note = 2'-O-methyladenosine-3'-phosphate
  modified_base 16: mod_base = OTHER; note = 2'-O-methyluridine-3'-phosphate
  modified_base 17: mod_base = OTHER; note = 2'-O-methyluridine-3'-phosphate
  modified_base 18: mod_base = OTHER; note = 2'-O-methyluridine-3'-phosphate
  modified_base 19: mod_base = OTHER; note = 2'-O-methyladenosine-3'-phosphorothioate
  modified_base 20: mod_base = OTHER; note = 2'-O-methylcytidine-3'-phosphorothioate
  modified_base 21: mod_base = OTHER; note = 2'-O-methyladenosine
aacttgttcctttcatttaca

SEQ ID NO: 10928 - RNA, 21 nt, synthetic construct
  source 1..21: mol_type = other RNA
  modified_base 1: mod_base = OTHER; note = 2'-O-methyladenosine-3'-phosphorothioate
  modified_base 2: mod_base = OTHER; note = 2'-O-methylcytidine-3'-phosphorothioate
  modified_base 3: mod_base = OTHER; note = 2'-O-methyluridine-3'-phosphate
  modified_base 4: mod_base = OTHER; note = 2'-O-methyluridine-3'-phosphate
  modified_base 5: mod_base = OTHER; note = 2'-O-methylguanosine-3'-phosphate
  modified_base 6: mod_base = OTHER; note = 2'-O-docosanyl-uridine-3'-phosphate
  modified_base 7: mod_base = OTHER; note = 2'-deoxy-2'-fluorouridine-3'-phosphate
  modified_base 8: mod_base = OTHER; note = 2'-O-methylcytidine-3'-phosphate
  modified_base 9: mod_base = OTHER; note = 2'-deoxy-2'-fluorocytidine-3'-phosphate
  modified_base 10: mod_base = OTHER; note = 2'-deoxy-2'-fluorouridine-3'-phosphate
  modified_base 11: mod_base = OTHER; note = 2'-deoxy-2'-fluorouridine-3'-phosphate
  modified_base 12: mod_base = OTHER; note = 2'-O-methyluridine-3'-phosphate
  modified_base 13: mod_base = OTHER; note = 2'-O-methylcytidine-3'-phosphate
  modified_base 14: mod_base = OTHER; note = 2'-O-methyladenosine-3'-phosphate
  modified_base 15: mod_base = OTHER; note = 2'-O-methyluridine-3'-phosphate
  modified_base 16: mod_base = OTHER; note = 2'-O-methyluridine-3'-phosphate
  modified_base 17: mod_base = OTHER; note = 2'-O-methyluridine-3'-phosphate
  modified_base 18: mod_base = OTHER; note = 2'-O-methyladenosine-3'-phosphate
  modified_base 19: mod_base = OTHER; note = 2'-O-methylcytidine-3'-phosphorothioate
  modified_base 20: mod_base = OTHER; note = 2'-O-methyladenosine-3'-phosphorothioate
  modified_base 21: mod_base = OTHER; note = 2'-O-methyladenosine
acttgttcctttcatttacaa

SEQ ID NO: 10929 - RNA, 21 nt, synthetic construct
  source 1..21: mol_type = other RNA
  modified_base 1: mod_base = OTHER; note = 2'-O-methylcytidine-3'-phosphorothioate
  modified_base 2: mod_base = OTHER; note = 2'-O-methyluridine-3'-phosphorothioate
  modified_base 3: mod_base = OTHER; note = 2'-O-methyluridine-3'-phosphate
  modified_base 4: mod_base = OTHER; note = 2'-O-methylguanosine-3'-phosphate
  modified_base 5: mod_base = OTHER; note = 2'-O-methyluridine-3'-phosphate
  modified_base 6: mod_base = OTHER; note = 2'-O-docosanyl-uridine-3'-phosphate
  modified_base 7: mod_base = OTHER; note = 2'-deoxy-2'-fluorocytidine-3'-phosphate
  modified_base 8: mod_base = OTHER; note = 2'-O-methylcytidine-3'-phosphate
  modified_base 9: mod_base = OTHER; note = 2'-deoxy-2'-fluorouridine-3'-phosphate
  modified_base 10: mod_base = OTHER; note = 2'-deoxy-2'-fluorouridine-3'-phosphate
  modified_base 11: mod_base = OTHER; note = 2'-deoxy-2'-fluorouridine-3'-phosphate
  modified_base 12: mod_base = OTHER; note = 2'-O-methylcytidine-3'-phosphate
  modified_base 13: mod_base = OTHER; note = 2'-O-methyladenosine-3'-phosphate
  modified_base 14: mod_base = OTHER; note = 2'-O-methyluridine-3'-phosphate
  modified_base 15: mod_base = OTHER; note = 2'-O-methyluridine-3'-phosphate
  modified_base 16: mod_base = OTHER; note = 2'-O-methyluridine-3'-phosphate
  modified_base 17: mod_base = OTHER; note = 2'-O-methyladenosine-3'-phosphate
  modified_base 18: mod_base = OTHER; note = 2'-O-methylcytidine-3'-phosphate
  modified_base 19: mod_base = OTHER; note = 2'-O-methyladenosine-3'-phosphorothioate
  modified_base 20: mod_base = OTHER; note = 2'-O-methyladenosine-3'-phosphorothioate
  modified_base 21: mod_base = OTHER; note = 2'-O-methyladenosine
cttgttcctttcatttacaaa

SEQ ID NO: 10930 - RNA, 21 nt, synthetic construct
  source 1..21: mol_type = other RNA
  modified_base 1: mod_base = OTHER; note = 2'-O-methyluridine-3'-phosphorothioate
  modified_base 2: mod_base = OTHER; note = 2'-O-methyluridine-3'-phosphorothioate
  modified_base 3: mod_base = OTHER; note = 2'-O-methylguanosine-3'-phosphate
  modified_base 4: mod_base = OTHER; note = 2'-O-methyluridine-3'-phosphate
  modified_base 5: mod_base = OTHER; note = 2'-O-methyluridine-3'-phosphate
  modified_base 6: mod_base = OTHER; note = 2'-O-docosanyl-cytidine-3'-phosphate
  modified_base 7: mod_base = OTHER; note = 2'-deoxy-2'-fluorocytidine-3'-phosphate
  modified_base 8: mod_base = OTHER; note = 2'-O-methyluridine-3'-phosphate
  modified_base 9: mod_base = OTHER; note = 2'-deoxy-2'-fluorouridine-3'-phosphate
  modified_base 10: mod_base = OTHER; note = 2'-deoxy-2'-fluorouridine-3'-phosphate
  modified_base 11: mod_base = OTHER; note = 2'-deoxy-2'-fluorocytidine-3'-phosphate
  modified_base 12: mod_base = OTHER; note = 2'-O-methyladenosine-3'-phosphate
  modified_base 13: mod_base = OTHER; note = 2'-O-methyluridine-3'-phosphate
  modified_base 14: mod_base = OTHER; note = 2'-O-methyluridine-3'-phosphate
  modified_base 15: mod_base = OTHER; note = 2'-O-methyluridine-3'-phosphate
  modified_base 16: mod_base = OTHER; note = 2'-O-methyladenosine-3'-phosphate
  modified_base 17: mod_base = OTHER; note = 2'-O-methylcytidine-3'-phosphate
  modified_base 18: mod_base = OTHER; note = 2'-O-methyladenosine-3'-phosphate
  modified_base 19: mod_base = OTHER; note = 2'-O-methyladenosine-3'-phosphorothioate
  modified_base 20: mod_base = OTHER; note = 2'-O-methyladenosine-3'-phosphorothioate
  modified_base 21: mod_base = OTHER; note = 2'-O-methyladenosine
ttgttcctttcatttacaaaa

SEQ ID NO: 10931 - RNA, 21 nt, synthetic construct
  source 1..21: mol_type = other RNA
  modified_base 1: mod_base = OTHER; note = 2'-O-methyluridine-3'-phosphorothioate
  modified_base 2: mod_base = OTHER; note = 2'-O-methylguanosine-3'-phosphorothioate
  modified_base 3: mod_base = OTHER; note = 2'-O-methyluridine-3'-phosphate
  modified_base 4: mod_base = OTHER; note = 2'-O-methyluridine-3'-phosphate
  modified_base 5: mod_base = OTHER; note = 2'-O-methylcytidine-3'-phosphate
  modified_base 6: mod_base = OTHER; note = 2'-O-docosanyl-cytidine-3'-phosphate
  modified_base 7: mod_base = OTHER; note = 2'-deoxy-2'-fluorouridine-3'-phosphate
  modified_base 8: mod_base = OTHER; note = 2'-O-methyluridine-3'-phosphate
  modified_base 9: mod_base = OTHER; note = 2'-deoxy-2'-fluorouridine-3'-phosphate
  modified_base 10: mod_base = OTHER; note = 2'-deoxy-2'-fluorocytidine-3'-phosphate
  modified_base 11: mod_base = OTHER; note = 2'-deoxy-2'-fluoroadenosine-3'-phosphate
  modified_base 12: mod_base = OTHER; note = 2'-O-methyluridine-3'-phosphate
  modified_base 13: mod_base = OTHER; note = 2'-O-methyluridine-3'-phosphate
  modified_base 14: mod_base = OTHER; note = 2'-O-methyluridine-3'-phosphate
  modified_base 15: mod_base = OTHER; note = 2'-O-methyladenosine-3'-phosphate
  modified_base 16: mod_base = OTHER; note = 2'-O-methylcytidine-3'-phosphate
  modified_base 17: mod_base = OTHER; note = 2'-O-methyladenosine-3'-phosphate
  modified_base 18: mod_base = OTHER; note = 2'-O-methyladenosine-3'-phosphate
  modified_base 19: mod_base = OTHER; note = 2'-O-methyladenosine-3'-phosphorothioate
  modified_base 20: mod_base = OTHER; note = 2'-O-methyladenosine-3'-phosphorothioate
  modified_base 21: mod_base = OTHER; note = 2'-O-methyladenosine
tgttcctttcatttacaaaaa

SEQ ID NO: 10932 - RNA, 21 nt, synthetic construct
  source 1..21: mol_type = other RNA
  modified_base 1: mod_base = OTHER; note = 2'-O-methylguanosine-3'-phosphorothioate
  modified_base 2: mod_base = OTHER; note = 2'-O-methyluridine-3'-phosphorothioate
  modified_base 3: mod_base = OTHER; note = 2'-O-methyluridine-3'-phosphate
  modified_base 4: mod_base = OTHER; note = 2'-O-methylcytidine-3'-phosphate
  modified_base 5: mod_base = OTHER; note = 2'-O-methylcytidine-3'-phosphate
  modified_base 6: mod_base = OTHER; note = 2'-O-docosanyl-uridine-3'-phosphate
  modified_base 7: mod_base = OTHER; note = 2'-deoxy-2'-fluorouridine-3'-phosphate
  modified_base 8: mod_base = OTHER; note = 2'-O-methyluridine-3'-phosphate
  modified_base 9: mod_base = OTHER; note = 2'-deoxy-2'-fluorocytidine-3'-phosphate
  modified_base 10: mod_base = OTHER; note = 2'-deoxy-2'-fluoroadenosine-3'-phosphate
  modified_base 11: mod_base = OTHER; note = 2'-deoxy-2'-fluorouridine-3'-phosphate
  modified_base 12: mod_base = OTHER; note = 2'-O-methyluridine-3'-phosphate
  modified_base 13: mod_base = OTHER; note = 2'-O-methyluridine-3'-phosphate
  modified_base 14: mod_base = OTHER; note = 2'-O-methyladenosine-3'-phosphate
  modified_base 15: mod_base = OTHER; note = 2'-O-methylcytidine-3'-phosphate
  modified_base 16: mod_base = OTHER; note = 2'-O-methyladenosine-3'-phosphate
  modified_base 17: mod_base = OTHER; note = 2'-O-methyladenosine-3'-phosphate
  modified_base 18: mod_base = OTHER; note = 2'-O-methyladenosine-3'-phosphate
  modified_base 19: mod_base = OTHER; note = 2'-O-methyladenosine-3'-phosphorothioate
  modified_base 20: mod_base = OTHER; note = 2'-O-methylguanosine-3'-phosphorothioate
  modified_base 21: mod_base = OTHER; note = 2'-O-methyladenosine
gttcctttcatttacaaaaga

SEQ ID NO: 10933 - RNA, 21 nt, synthetic construct
  source 1..21: mol_type = other RNA
  modified_base 1: mod_base = OTHER; note = 2'-O-methyluridine-3'-phosphorothioate
  modified_base 2: mod_base = OTHER; note = 2'-O-methyluridine-3'-phosphorothioate
  modified_base 3: mod_base = OTHER; note = 2'-O-methylcytidine-3'-phosphate
  modified_base 4: mod_base = OTHER; note = 2'-O-methylcytidine-3'-phosphate
  modified_base 5: mod_base = OTHER; note = 2'-O-methyluridine-3'-phosphate
  modified_base 6: mod_base = OTHER; note = 2'-O-docosanyl-uridine-3'-phosphate
  modified_base 7: mod_base = OTHER; note = 2'-deoxy-2'-fluorouridine-3'-phosphate
  modified_base 8: mod_base = OTHER; note = 2'-O-methylcytidine-3'-phosphate
  modified_base 9: mod_base = OTHER; note = 2'-deoxy-2'-fluoroadenosine-3'-phosphate
  modified_base 10: mod_base = OTHER; note = 2'-deoxy-2'-fluorouridine-3'-phosphate
  modified_base 11: mod_base = OTHER; note = 2'-deoxy-2'-fluorouridine-3'-phosphate
  modified_base 12: mod_base = OTHER; note = 2'-O-methyluridine-3'-phosphate
  modified_base 13: mod_base = OTHER; note = 2'-O-methyladenosine-3'-phosphate
  modified_base 14: mod_base = OTHER; note = 2'-O-methylcytidine-3'-phosphate
  modified_base 15: mod_base = OTHER; note = 2'-O-methyladenosine-3'-phosphate
  modified_base 16: mod_base = OTHER; note = 2'-O-methyladenosine-3'-phosphate
  modified_base 17: mod_base = OTHER; note = 2'-O-methyladenosine-3'-phosphate
  modified_base 18: mod_base = OTHER; note = 2'-O-methyladenosine-3'-phosphate
  modified_base 19: mod_base = OTHER; note = 2'-O-methylguanosine-3'-phosphorothioate
  modified_base 20: mod_base = OTHER; note = 2'-O-methyladenosine-3'-phosphorothioate
  modified_base 21: mod_base = OTHER; note = 2'-O-methyladenosine
ttcctttcatttacaaaagaa

SEQ ID NO: 10934 - RNA, 21 nt, synthetic construct
  source 1..21: mol_type = other RNA
  modified_base 1: mod_base = OTHER; note = 2'-O-methyluridine-3'-phosphorothioate
  modified_base 2: mod_base = OTHER; note = 2'-O-methylcytidine-3'-phosphorothioate
  modified_base 3: mod_base = OTHER; note = 2'-O-methylcytidine-3'-phosphate
  modified_base 4: mod_base = OTHER; note = 2'-O-methyluridine-3'-phosphate
  modified_base 5: mod_base = OTHER; note = 2'-O-methyluridine-3'-phosphate
  modified_base 6: mod_base = OTHER; note = 2'-O-docosanyl-uridine-3'-phosphate
  modified_base 7: mod_base = OTHER; note = 2'-deoxy-2'-fluorocytidine-3'-phosphate
  modified_base 8: mod_base = OTHER; note = 2'-O-methyladenosine-3'-phosphate
  modified_base 9: mod_base = OTHER; note = 2'-deoxy-2'-fluorouridine-3'-phosphate
  modified_base 10: mod_base = OTHER; note = 2'-deoxy-2'-fluorouridine-3'-phosphate
  modified_base 11: mod_base = OTHER; note = 2'-deoxy-2'-fluorouridine-3'-phosphate
  modified_base 12: mod_base = OTHER; note = 2'-O-methyladenosine-3'-phosphate
  modified_base 13: mod_base = OTHER; note = 2'-O-methylcytidine-3'-phosphate
  modified_base 14: mod_base = OTHER; note = 2'-O-methyladenosine-3'-phosphate
  modified_base 15: mod_base = OTHER; note = 2'-O-methyladenosine-3'-phosphate
  modified_base 16: mod_base = OTHER; note = 2'-O-methyladenosine-3'-phosphate
  modified_base 17: mod_base = OTHER; note = 2'-O-methyladenosine-3'-phosphate
  modified_base 18: mod_base = OTHER; note = 2'-O-methylguanosine-3'-phosphate
  modified_base 19: mod_base = OTHER; note = 2'-O-methyladenosine-3'-phosphorothioate
  modified_base 20: mod_base = OTHER; note = 2'-O-methylguanosine-3'-phosphorothioate
  modified_base 21: mod_base = OTHER; note = 2'-O-methyladenosine
tcctttcatttacaaaagaga

SEQ ID NO: 10935 - RNA, 21 nt, synthetic construct
  source 1..21: mol_type = other RNA
  modified_base 1: mod_base = OTHER; note = 2'-O-methylcytidine-3'-phosphorothioate
  modified_base 2: mod_base = OTHER; note = 2'-O-methylcytidine-3'-phosphorothioate
  modified_base 3: mod_base = OTHER; note = 2'-O-methyluridine-3'-phosphate
  modified_base 4: mod_base = OTHER; note = 2'-O-methyluridine-3'-phosphate
  modified_base 5: mod_base = OTHER; note = 2'-O-methyluridine-3'-phosphate
  modified_base 6: mod_base = OTHER; note = 2'-O-docosanyl-cytidine-3'-phosphate
  modified_base 7: mod_base = OTHER; note = 2'-deoxy-2'-fluoroadenosine-3'-phosphate
  modified_base 8: mod_base = OTHER; note = 2'-O-methyluridine-3'-phosphate
  modified_base 9: mod_base = OTHER; note = 2'-deoxy-2'-fluorouridine-3'-phosphate
  modified_base 10: mod_base = OTHER; note = 2'-deoxy-2'-fluorouridine-3'-phosphate
  modified_base 11: mod_base = OTHER; note = 2'-deoxy-2'-fluoroadenosine-3'-phosphate
  modified_base 12: mod_base = OTHER; note = 2'-O-methylcytidine-3'-phosphate
  modified_base 13: mod_base = OTHER; note = 2'-O-methyladenosine-3'-phosphate
  modified_base 14: mod_base = OTHER; note = 2'-O-methyladenosine-3'-phosphate
  modified_base 15: mod_base = OTHER; note = 2'-O-methyladenosine-3'-phosphate
  modified_base 16: mod_base = OTHER; note = 2'-O-methyladenosine-3'-phosphate
  modified_base 17: mod_base = OTHER; note = 2'-O-methylguanosine-3'-phosphate
  modified_base 18: mod_base = OTHER; note = 2'-O-methyladenosine-3'-phosphate
  modified_base 19: mod_base = OTHER; note = 2'-O-methylguanosine-3'-phosphorothioate
  modified_base 20: mod_base = OTHER; note = 2'-O-methyladenosine-3'-phosphorothioate
  modified_base 21: mod_base = OTHER; note = 2'-O-methyladenosine
cctttcatttacaaaagagaa

SEQ ID NO: 10936 - RNA, 21 nt, synthetic construct
  source 1..21: mol_type = other RNA
  modified_base 1: mod_base = OTHER; note = 2'-O-methylcytidine-3'-phosphorothioate
  modified_base 2: mod_base = OTHER; note = 2'-O-methyluridine-3'-phosphorothioate
  modified_base 3: mod_base = OTHER; note = 2'-O-methyluridine-3'-phosphate
  modified_base 4: mod_base = OTHER; note = 2'-O-methyluridine-3'-phosphate
  modified_base 5: mod_base = OTHER; note = 2'-O-methylcytidine-3'-phosphate
  modified_base 6: mod_base = OTHER; note = 2'-O-docosanyl-adenosine-3'-phosphate
  modified_base 7: mod_base = OTHER; note = 2'-deoxy-2'-fluorouridine-3'-phosphate
  modified_base 8: mod_base = OTHER; note = 2'-O-methyluridine-3'-phosphate
  modified_base 9: mod_base = OTHER; note = 2'-deoxy-2'-fluorouridine-3'-phosphate
  modified_base 10: mod_base = OTHER; note = 2'-deoxy-2'-fluoroadenosine-3'-phosphate
  modified_base 11: mod_base = OTHER; note = 2'-deoxy-2'-fluorocytidine-3'-phosphate
  modified_base 12: mod_base = OTHER; note = 2'-O-methyladenosine-3'-phosphate
  modified_base 13: mod_base = OTHER; note = 2'-O-methyladenosine-3'-phosphate
  modified_base 14: mod_base = OTHER; note = 2'-O-methyladenosine-3'-phosphate
  modified_base 15: mod_base = OTHER; note = 2'-O-methyladenosine-3'-phosphate
  modified_base 16: mod_base = OTHER; note = 2'-O-methylguanosine-3'-phosphate
  modified_base 17: mod_base = OTHER; note = 2'-O-methyladenosine-3'-phosphate
  modified_base 18: mod_base = OTHER; note = 2'-O-methylguanosine-3'-phosphate
  modified_base 19: mod_base = OTHER; note = 2'-O-methyladenosine-3'-phosphorothioate
  modified_base 20: mod_base = OTHER; note = 2'-O-methyluridine-3'-phosphorothioate
  modified_base 21: mod_base = OTHER; note = 2'-O-methyladenosine
ctttcatttacaaaagagata

SEQ ID NO: 10937 - RNA, 21 nt, synthetic construct
  source 1..21: mol_type = other RNA
  modified_base 1: mod_base = OTHER; note = 2'-O-methyluridine-3'-phosphorothioate
  modified_base 2: mod_base = OTHER; note = 2'-O-methyluridine-3'-phosphorothioate
  modified_base 3: mod_base = OTHER; note = 2'-O-methyluridine-3'-phosphate
  modified_base 4: mod_base = OTHER; note = 2'-O-methylcytidine-3'-phosphate
  modified_base 5: mod_base = OTHER; note = 2'-O-methyladenosine-3'-phosphate
  modified_base 6: mod_base = OTHER; note = 2'-O-docosanyl-uridine-3'-phosphate
  modified_base 7: mod_base = OTHER; note = 2'-deoxy-2'-fluorouridine-3'-phosphate
  modified_base 8: mod_base = OTHER; note = 2'-O-methyluridine-3'-phosphate
  modified_base 9: mod_base = OTHER; note = 2'-deoxy-2'-fluoroadenosine-3'-phosphate
  modified_base 10: mod_base = OTHER; note = 2'-deoxy-2'-fluorocytidine-3'-phosphate
  modified_base 11: mod_base = OTHER; note = 2'-deoxy-2'-fluoroadenosine-3'-phosphate
  modified_base 12: mod_base = OTHER; note = 2'-O-methyladenosine-3'-phosphate
  modified_base 13: mod_base = OTHER; note = 2'-O-methyladenosine-3'-phosphate
  modified_base 14: mod_base = OTHER; note = 2'-O-methyladenosine-3'-phosphate
  modified_base 15: mod_base = OTHER; note = 2'-O-methylguanosine-3'-phosphate
  modified_base 16: mod_base = OTHER; note = 2'-O-methyladenosine-3'-phosphate
  modified_base 17: mod_base = OTHER; note = 2'-O-methylguanosine-3'-phosphate
  modified_base 18: mod_base = OTHER; note = 2'-O-methyladenosine-3'-phosphate
  modified_base 19: mod_base = OTHER; note = 2'-O-methyluridine-3'-phosphorothioate
  modified_base 20: mod_base = OTHER; note = 2'-O-methyladenosine-3'-phosphorothioate
  modified_base 21: mod_base = OTHER; note = 2'-O-methyladenosine
tttcatttacaaaagagataa

SEQ ID NO: 10938 - RNA, 21 nt, synthetic construct
  source 1..21: mol_type = other RNA
  modified_base 1: mod_base = OTHER; note = 2'-O-methyluridine-3'-phosphorothioate
  modified_base 2: mod_base = OTHER; note = 2'-O-methyluridine-3'-phosphorothioate
  modified_base 3: mod_base = OTHER; note = 2'-O-methylcytidine-3'-phosphate
  modified_base 4: mod_base = OTHER; note = 2'-O-methyladenosine-3'-phosphate
  modified_base 5: mod_base = OTHER; note = 2'-O-methyluridine-3'-phosphate
  modified_base 6: mod_base = OTHER; note = 2'-O-docosanyl-uridine-3'-phosphate
  modified_base 7: mod_base = OTHER; note = 2'-deoxy-2'-fluorouridine-3'-phosphate
  modified_base 8: mod_base = OTHER; note = 2'-O-methyladenosine-3'-phosphate
  modified_base 9: mod_base = OTHER; note = 2'-deoxy-2'-fluorocytidine-3'-phosphate
  modified_base 10: mod_base = OTHER; note = 2'-deoxy-2'-fluoroadenosine-3'-phosphate
  modified_base 11: mod_base = OTHER; note = 2'-deoxy-2'-fluoroadenosine-3'-phosphate
  modified_base 12: mod_base = OTHER; note = 2'-O-methyladenosine-3'-phosphate
  modified_base 13: mod_base = OTHER; note = 2'-O-methyladenosine-3'-phosphate
  modified_base 14: mod_base = OTHER; note = 2'-O-methylguanosine-3'-phosphate
  modified_base 15: mod_base = OTHER; note = 2'-O-methyladenosine-3'-phosphate
  modified_base 16: mod_base = OTHER; note = 2'-O-methylguanosine-3'-phosphate
  modified_base 17: mod_base = OTHER; note = 2'-O-methyladenosine-3'-phosphate
  modified_base 18: mod_base = OTHER; note = 2'-O-methyluridine-3'-phosphate
  modified_base 19: mod_base = OTHER; note = 2'-O-methyladenosine-3'-phosphorothioate
  modified_base 20: mod_base = OTHER; note = 2'-O-methylcytidine-3'-phosphorothioate
  modified_base 21: mod_base = OTHER; note = 2'-O-methyladenosine
ttcatttacaaaagagataca

SEQ ID NO: 10939 - RNA, 21 nt, synthetic construct
  source 1..21: mol_type = other RNA
  modified_base 1: mod_base = OTHER; note = 2'-O-methyluridine-3'-phosphorothioate
  modified_base 2: mod_base = OTHER; note = 2'-O-methylcytidine-3'-phosphorothioate
  modified_base 3: mod_base = OTHER; note = 2'-O-methyladenosine-3'-phosphate
  modified_base 4: mod_base = OTHER; note = 2'-O-methyluridine-3'-phosphate
  modified_base 5: mod_base = OTHER; note = 2'-O-methyluridine-3'-phosphate
  modified_base 6: mod_base = OTHER; note = 2'-O-docosanyl-uridine-3'-phosphate
  modified_base 7: mod_base = OTHER; note = 2'-deoxy-2'-fluoroadenosine-3'-phosphate
  modified_base 8: mod_base = OTHER; note = 2'-O-methylcytidine-3'-phosphate
  modified_base 9: mod_base = OTHER; note = 2'-deoxy-2'-fluoroadenosine-3'-phosphate
  modified_base 10: mod_base = OTHER; note = 2'-deoxy-2'-fluoroadenosine-3'-phosphate
  modified_base 11: mod_base = OTHER; note = 2'-deoxy-2'-fluoroadenosine-3'-phosphate
  modified_base 12: mod_base = OTHER; note = 2'-O-methyladenosine-3'-phosphate
  modified_base 13: mod_base = OTHER; note = 2'-O-methylguanosine-3'-phosphate
  modified_base 14: mod_base = OTHER; note = 2'-O-methyladenosine-3'-phosphate
  modified_base 15: mod_base = OTHER; note = 2'-O-methylguanosine-3'-phosphate
  modified_base 16: mod_base = OTHER; note = 2'-O-methyladenosine-3'-phosphate
  modified_base 17: mod_base = OTHER; note = 2'-O-methyluridine-3'-phosphate
  modified_base 18: mod_base = OTHER; note = 2'-O-methyladenosine-3'-phosphate
  modified_base 19: mod_base = OTHER; note = 2'-O-methylcytidine-3'-phosphorothioate
  modified_base 20: mod_base = OTHER; note = 2'-O-methylcytidine-3'-phosphorothioate
  modified_base 21: mod_base = OTHER; note = 2'-O-methyladenosine
tcatttacaaaagagatacca

SEQ ID NO: 10940 - RNA, 21 nt, synthetic construct
  source 1..21: mol_type = other RNA
  modified_base 1: mod_base = OTHER; note = 2'-O-methylcytidine-3'-phosphorothioate
  modified_base 2: mod_base = OTHER; note = 2'-O-methyladenosine-3'-phosphorothioate
  modified_base 3: mod_base = OTHER; note = 2'-O-methyluridine-3'-phosphate
  modified_base 4: mod_base = OTHER; note = 2'-O-methyluridine-3'-phosphate
  modified_base 5: mod_base = OTHER; note = 2'-O-methyluridine-3'-phosphate
  modified_base 6: mod_base = OTHER; note = 2'-O-docosanyl-adenosine-3'-phosphate
  modified_base 7: mod_base = OTHER; note = 2'-deoxy-2'-fluorocytidine-3'-phosphate
  modified_base 8: mod_base = OTHER; note = 2'-O-methyladenosine-3'-phosphate
  modified_base 9: mod_base = OTHER; note = 2'-deoxy-2'-fluoroadenosine-3'-phosphate
  modified_base 10: mod_base = OTHER; note = 2'-deoxy-2'-fluoroadenosine-3'-phosphate
  modified_base 11: mod_base = OTHER; note = 2'-deoxy-2'-fluoroadenosine-3'-phosphate
  modified_base 12: mod_base = OTHER; note = 2'-O-methylguanosine-3'-phosphate
  modified_base 13: mod_base = OTHER; note = 2'-O-methyladenosine-3'-phosphate
  modified_base 14: mod_base = OTHER; note = 2'-O-methylguanosine-3'-phosphate
  modified_base 15: mod_base = OTHER; note = 2'-O-methyladenosine-3'-phosphate
  modified_base 16: mod_base = OTHER; note = 2'-O-methyluridine-3'-phosphate
  modified_base 17: mod_base = OTHER; note = 2'-O-methyladenosine-3'-phosphate
  modified_base 18: mod_base = OTHER; note = 2'-O-methylcytidine-3'-phosphate
  modified_base 19: mod_base = OTHER; note = 2'-O-methylcytidine-3'-phosphorothioate
  modified_base 20: mod_base = OTHER; note = 2'-O-methyluridine-3'-phosphorothioate
  modified_base 21: mod_base = OTHER; note = 2'-O-methyladenosine
catttacaaaagagataccta

SEQ ID NO: 10941 - RNA, 21 nt, synthetic construct
  source 1..21: mol_type = other RNA
  modified_base 1: mod_base = OTHER; note = 2'-O-methyladenosine-3'-phosphorothioate
  modified_base 2: mod_base = OTHER; note = 2'-O-methyluridine-3'-phosphorothioate
  modified_base 3: mod_base = OTHER; note = 2'-O-methyluridine-3'-phosphate
  modified_base 4: mod_base = OTHER; note = 2'-O-methyluridine-3'-phosphate
  modified_base 5: mod_base = OTHER; note = 2'-O-methyladenosine-3'-phosphate
  modified_base 6: mod_base = OTHER; note = 2'-O-docosanyl-cytidine-3'-phosphate
  modified_base 7: mod_base = OTHER; note = 2'-deoxy-2'-fluoroadenosine-3'-phosphate
  modified_base 8: mod_base = OTHER; note = 2'-O-methyladenosine-3'-phosphate
  modified_base 9: mod_base = OTHER; note = 2'-deoxy-2'-fluoroadenosine-3'-phosphate
  modified_base 10: mod_base = OTHER; note = 2'-deoxy-2'-fluoroadenosine-3'-phosphate
  modified_base 11: mod_base = OTHER; note = 2'-deoxy-2'-fluoroguanosine-3'-phosphate
  modified_base 12: mod_base = OTHER; note = 2'-O-methyladenosine-3'-phosphate
  modified_base 13: mod_base = OTHER; note = 2'-O-methylguanosine-3'-phosphate
  modified_base 14: mod_base = OTHER; note = 2'-O-methyladenosine-3'-phosphate
  modified_base 15: mod_base = OTHER; note = 2'-O-methyluridine-3'-phosphate
  modified_base 16: mod_base = OTHER; note = 2'-O-methyladenosine-3'-phosphate
  modified_base 17: mod_base = OTHER; note = 2'-O-methylcytidine-3'-phosphate
  modified_base 18: mod_base = OTHER; note = 2'-O-methylcytidine-3'-phosphate
  modified_base 19: mod_base = OTHER; note = 2'-O-methyluridine-3'-phosphorothioate
  modified_base 20: mod_base = OTHER; note = 2'-O-methylguanosine-3'-phosphorothioate
  modified_base 21: mod_base = OTHER; note = 2'-O-methyladenosine
atttacaaaagagatacctga

SEQ ID NO: 10942 - RNA, 21 nt, synthetic construct
  source 1..21: mol_type = other RNA
  modified_base 1: mod_base = OTHER; note = 2'-O-methyluridine-3'-phosphorothioate
  modified_base 2: mod_base = OTHER; note = 2'-O-methyluridine-3'-phosphorothioate
  modified_base 3: mod_base = OTHER; note = 2'-O-methyluridine-3'-phosphate
  modified_base 4: mod_base = OTHER; note = 2'-O-methyladenosine-3'-phosphate
  modified_base 5: mod_base = OTHER; note = 2'-O-methylcytidine-3'-phosphate
  modified_base 6: mod_base = OTHER; note = 2'-O-docosanyl-adenosine-3'-phosphate
  modified_base 7: mod_base = OTHER; note = 2'-deoxy-2'-fluoroadenosine-3'-phosphate
  modified_base 8: mod_base = OTHER; note = 2'-O-methyladenosine-3'-phosphate
  modified_base 9: mod_base = OTHER; note = 2'-deoxy-2'-fluoroadenosine-3'-phosphate
  modified_base 10: mod_base = OTHER; note = 2'-deoxy-2'-fluoroguanosine-3'-phosphate
  modified_base 11: mod_base = OTHER; note = 2'-deoxy-2'-fluoroadenosine-3'-phosphate
  modified_base 12: mod_base = OTHER; note = 2'-O-methylguanosine-3'-phosphate
  modified_base 13: mod_base = OTHER; note = 2'-O-methyladenosine-3'-phosphate
  modified_base 14: mod_base = OTHER; note = 2'-O-methyluridine-3'-phosphate
  modified_base 15: mod_base = OTHER; note = 2'-O-methyladenosine-3'-phosphate
  modified_base 16: mod_base = OTHER; note = 2'-O-methylcytidine-3'-phosphate
  modified_base 17: mod_base = OTHER; note = 2'-O-methylcytidine-3'-phosphate
  modified_base 18: mod_base = OTHER; note = 2'-O-methyluridine-3'-phosphate
  modified_base 19: mod_base = OTHER; note = 2'-O-methylguanosine-3'-phosphorothioate
  modified_base 20: mod_base = OTHER; note = 2'-O-methyladenosine-3'-phosphorothioate
  modified_base 21: mod_base = OTHER; note = 2'-O-methyladenosine
tttacaaaagagatacctgaa

SEQ ID NO: 10943 - RNA, 21 nt, synthetic construct
  source 1..21: mol_type = other RNA
  modified_base 1: mod_base = OTHER; note = 2'-O-methyluridine-3'-phosphorothioate
  modified_base 2: mod_base = OTHER; note = 2'-O-methyluridine-3'-phosphorothioate
  modified_base 3: mod_base = OTHER; note = 2'-O-methyladenosine-3'-phosphate
  modified_base 4: mod_base = OTHER; note = 2'-O-methylcytidine-3'-phosphate
  modified_base 5: mod_base = OTHER; note = 2'-O-methyladenosine-3'-phosphate
  modified_base 6: mod_base = OTHER; note = 2'-O-docosanyl-adenosine-3'-phosphate
  modified_base 7: mod_base = OTHER; note = 2'-deoxy-2'-fluoroadenosine-3'-phosphate
  modified_base 8: mod_base = OTHER; note = 2'-O-methyladenosine-3'-phosphate
  modified_base 9: mod_base = OTHER; note = 2'-deoxy-2'-fluoroguanosine-3'-phosphate
  modified_base 10: mod_base = OTHER; note = 2'-deoxy-2'-fluoroadenosine-3'-phosphate
  modified_base 11: mod_base = OTHER; note = 2'-deoxy-2'-fluoroguanosine-3'-phosphate
  modified_base 12: mod_base = OTHER; note = 2'-O-methyladenosine-3'-phosphate
  modified_base 13: mod_base = OTHER; note = 2'-O-methyluridine-3'-phosphate
  modified_base 14: mod_base = OTHER; note = 2'-O-methyladenosine-3'-phosphate
  modified_base 15: mod_base = OTHER; note = 2'-O-methylcytidine-3'-phosphate
  modified_base 16: mod_base = OTHER; note = 2'-O-methylcytidine-3'-phosphate
  modified_base 17: mod_base = OTHER; note = 2'-O-methyluridine-3'-phosphate
  modified_base 18: mod_base = OTHER; note = 2'-O-methylguanosine-3'-phosphate
  modified_base 19: mod_base = OTHER; note = 2'-O-methyladenosine-3'-phosphorothioate
  modified_base 20: mod_base = OTHER; note = 2'-O-methylcytidine-3'-phosphorothioate
  modified_base 21: mod_base = OTHER; note = 2'-O-methyladenosine
ttacaaaagagatacctgaca

SEQ ID NO: 10944 - RNA, 21 nt, synthetic construct
  source 1..21: mol_type = other RNA
  modified_base 1: mod_base = OTHER; note = 2'-O-methyluridine-3'-phosphorothioate
  modified_base 2: mod_base = OTHER; note = 2'-O-methyladenosine-3'-phosphorothioate
  modified_base 3: mod_base = OTHER; note = 2'-O-methylcytidine-3'-phosphate
  modified_base 4: mod_base = OTHER; note = 2'-O-methyladenosine-3'-phosphate
  modified_base 5: mod_base = OTHER; note = 2'-O-methyladenosine-3'-phosphate
  modified_base 6: mod_base = OTHER; note = 2'-O-docosanyl-adenosine-3'-phosphate
  modified_base 7: mod_base = OTHER; note = 2'-deoxy-2'-fluoroadenosine-3'-phosphate
  modified_base 8: mod_base = OTHER; note = 2'-O-methylguanosine-3'-phosphate
  modified_base 9: mod_base = OTHER; note = 2'-deoxy-2'-fluoroadenosine-3'-phosphate
  modified_base 10: mod_base = OTHER; note = 2'-deoxy-2'-fluoroguanosine-3'-phosphate
  modified_base 11: mod_base = OTHER; note = 2'-deoxy-2'-fluoroadenosine-3'-phosphate
  modified_base 12: mod_base = OTHER; note = 2'-O-methyluridine-3'-phosphate
  modified_base 13: mod_base = OTHER; note = 2'-O-methyladenosine-3'-phosphate
  modified_base 14: mod_base = OTHER; note = 2'-O-methylcytidine-3'-phosphate
  modified_base 15: mod_base = OTHER; note = 2'-O-methylcytidine-3'-phosphate
  modified_base 16: mod_base = OTHER; note = 2'-O-methyluridine-3'-phosphate
  modified_base 17: mod_base = OTHER; note = 2'-O-methylguanosine-3'-phosphate
  modified_base 18: mod_base = OTHER; note = 2'-O-methyladenosine-3'-phosphate
  modified_base 19: mod_base = OTHER; note = 2'-O-methylcytidine-3'-phosphorothioate
  modified_base 20: mod_base = OTHER; note = 2'-O-methyladenosine-3'-phosphorothioate
  modified_base 21: mod_base = OTHER; note = 2'-O-methyladenosine
tacaaaagagatacctgacaa

SEQ ID NO: 10945 - RNA, 21 nt, synthetic construct
  source 1..21: mol_type = other RNA
  modified_base 1: mod_base = OTHER; note = 2'-O-methyladenosine-3'-phosphorothioate
  modified_base 2: mod_base = OTHER; note = 2'-O-methylcytidine-3'-phosphorothioate
  modified_base 3: mod_base = OTHER; note = 2'-O-methyladenosine-3'-phosphate
  modified_base 4: mod_base = OTHER; note = 2'-O-methyladenosine-3'-phosphate
  modified_base 5: mod_base = OTHER; note = 2'-O-methyladenosine-3'-phosphate
  modified_base 6: mod_base = OTHER; note = 2'-O-docosanyl-adenosine-3'-phosphate
  modified_base 7: mod_base = OTHER; note = 2'-deoxy-2'-fluoroguanosine-3'-phosphate
  modified_base 8: mod_base = OTHER; note = 2'-O-methyladenosine-3'-phosphate
  modified_base 9: mod_base = OTHER; note = 2'-deoxy-2'-fluoroguanosine-3'-phosphate
  modified_base 10: mod_base = OTHER; note = 2'-deoxy-2'-fluoroadenosine-3'-phosphate
  modified_base 11: mod_base = OTHER; note = 2'-deoxy-2'-fluorouridine-3'-phosphate
  modified_base 12: mod_base = OTHER; note = 2'-O-methyladenosine-3'-phosphate
  modified_base 13: mod_base = OTHER; note = 2'-O-methylcytidine-3'-phosphate
  modified_base 14: mod_base = OTHER; note = 2'-O-methylcytidine-3'-phosphate
  modified_base 15: mod_base = OTHER; note = 2'-O-methyluridine-3'-phosphate
  modified_base 16: mod_base = OTHER; note = 2'-O-methylguanosine-3'-phosphate
  modified_base 17: mod_base = OTHER; note = 2'-O-methyladenosine-3'-phosphate
  modified_base 18: mod_base = OTHER; note = 2'-O-methylcytidine-3'-phosphate
  modified_base 19: mod_base = OTHER; note = 2'-O-methyladenosine-3'-phosphorothioate
  modified_base 20: mod_base = OTHER; note = 2'-O-methyluridine-3'-phosphorothioate
  modified_base 21: mod_base = OTHER; note = 2'-O-methyladenosine
acaaaagagatacctgacata

SEQ ID NO: 10946 - RNA, 21 nt, synthetic construct
  source 1..21: mol_type = other RNA
  modified_base 1: mod_base = OTHER; note = 2'-O-methylcytidine-3'-phosphorothioate
  modified_base 2: mod_base = OTHER; note = 2'-O-methyladenosine-3'-phosphorothioate
  modified_base 3: mod_base = OTHER; note = 2'-O-methyladenosine-3'-phosphate
  modified_base 4: mod_base = OTHER; note = 2'-O-methyladenosine-3'-phosphate
  modified_base 5: mod_base = OTHER; note = 2'-O-methyladenosine-3'-phosphate
  modified_base 6: mod_base = OTHER; note = 2'-O-docosanyl-guanosine-3'-phosphate
  modified_base 7: mod_base = OTHER; note = 2'-deoxy-2'-fluoroadenosine-3'-phosphate
  modified_base 8: mod_base = OTHER; note = 2'-O-methylguanosine-3'-phosphate
  modified_base 9: mod_base = OTHER; note = 2'-deoxy-2'-fluoroadenosine-3'-phosphate
  modified_base 10: mod_base = OTHER; note = 2'-deoxy-2'-fluorouridine-3'-phosphate
  modified_base 11: mod_base = OTHER; note = 2'-deoxy-2'-fluoroadenosine-3'-phosphate
  modified_base 12: mod_base = OTHER; note = 2'-O-methylcytidine-3'-phosphate
  modified_base 13: mod_base = OTHER; note = 2'-O-methylcytidine-3'-phosphate
  modified_base 14: mod_base = OTHER; note = 2'-O-methyluridine-3'-phosphate
  modified_base 15: mod_base = OTHER; note = 2'-O-methylguanosine-3'-phosphate
  modified_base 16: mod_base = OTHER; note = 2'-O-methyladenosine-3'-phosphate
  modified_base 17: mod_base = OTHER; note = 2'-O-methylcytidine-3'-phosphate
  modified_base 18: mod_base = OTHER; note = 2'-O-methyladenosine-3'-phosphate
  modified_base 19: mod_base = OTHER; note = 2'-O-methyluridine-3'-phosphorothioate
  modified_base 20: mod_base = OTHER; note = 2'-O-methylcytidine-3'-phosphorothioate
  modified_base 21: mod_base = OTHER; note = 2'-O-methyladenosine
caaaagagatacctgacatca

SEQ ID NO: 10947 - RNA, 21 nt, synthetic construct
  source 1..21: mol_type = other RNA
  modified_base 1: mod_base = OTHER; note = 2'-O-methyladenosine-3'-phosphorothioate
  modified_base 2: mod_base = OTHER; note = 2'-O-methyladenosine-3'-phosphorothioate
  modified_base 3: mod_base = OTHER; note = 2'-O-methyladenosine-3'-phosphate
  modified_base 4: mod_base = OTHER; note = 2'-O-methyladenosine-3'-phosphate
  modified_base 5: mod_base = OTHER; note = 2'-O-methylguanosine-3'-phosphate
  modified_base 6: mod_base = OTHER; note = 2'-O-docosanyl-adenosine-3'-phosphate
  modified_base 7: mod_base = OTHER; note = 2'-deoxy-2'-fluoroguanosine-3'-phosphate
  modified_base 8: mod_base = OTHER; note = 2'-O-methyladenosine-3'-phosphate
  modified_base 9: mod_base = OTHER; note = 2'-deoxy-2'-fluorouridine-3'-phosphate
  modified_base 10: mod_base = OTHER; note = 2'-deoxy-2'-fluoroadenosine-3'-phosphate
  modified_base 11: mod_base = OTHER; note = 2'-deoxy-2'-fluorocytidine-3'-phosphate
  modified_base 12: mod_base = OTHER; note = 2'-O-methylcytidine-3'-phosphate
  modified_base 13: mod_base = OTHER; note = 2'-O-methyluridine-3'-phosphate
  modified_base 14: mod_base = OTHER; note = 2'-O-methylguanosine-3'-phosphate
  modified_base 15: mod_base = OTHER; note = 2'-O-methyladenosine-3'-phosphate
  modified_base 16: mod_base = OTHER; note = 2'-O-methylcytidine-3'-phosphate
  modified_base 17: mod_base = OTHER; note = 2'-O-methyladenosine-3'-phosphate
  modified_base 18: mod_base = OTHER; note = 2'-O-methyluridine-3'-phosphate
  modified_base 19: mod_base = OTHER; note = 2'-O-methylcytidine-3'-phosphorothioate
  modified_base 20: mod_base = OTHER; note = 2'-O-methylcytidine-3'-phosphorothioate
  modified_base 21: mod_base = OTHER; note = 2'-O-methyladenosine
aaaagagatacctgacatcca

SEQ ID NO: 10948 - RNA, 21 nt, synthetic construct
  source 1..21: mol_type = other RNA
  modified_base 1: mod_base = OTHER; note = 2'-O-methylcytidine-3'-phosphorothioate
  modified_base 2: mod_base = OTHER; note = 2'-O-methyluridine-3'-phosphorothioate
  modified_base 3: mod_base = OTHER; note = 2'-O-methylguanosine-3'-phosphate
  modified_base 4: mod_base = OTHER; note = 2'-O-methyladenosine-3'-phosphate
  modified_base 5: mod_base = OTHER; note = 2'-O-methylguanosine-3'-phosphate
  modified_base 6: mod_base = OTHER; note = 2'-O-docosanyl-adenosine-3'-phosphate
  modified_base 7: mod_base = OTHER; note = 2'-deoxy-2'-fluorocytidine-3'-phosphate
  modified_base 8: mod_base = OTHER; note = 2'-O-methyladenosine-3'-phosphate
  modified_base 9: mod_base = OTHER; note = 2'-deoxy-2'-fluorocytidine-3'-phosphate
  modified_base 10: mod_base = OTHER; note = 2'-deoxy-2'-fluorouridine-3'-phosphate
  modified_base 11: mod_base = OTHER; note = 2'-deoxy-2'-fluoroguanosine-3'-phosphate
  modified_base 12: mod_base = OTHER; note = 2'-O-methyladenosine-3'-phosphate
  modified_base 13: mod_base = OTHER; note = 2'-O-methylguanosine-3'-phosphate
  modified_base 14: mod_base = OTHER; note = 2'-O-methyladenosine-3'-phosphate
  modified_base 15: mod_base = OTHER; note = 2'-O-methyladenosine-3'-phosphate
  modified_base 16: mod_base = OTHER; note = 2'-O-methyladenosine-3'-phosphate
  modified_base 17: mod_base = OTHER; note = 2'-O-methyluridine-3'-phosphate
  modified_base 18: mod_base = OTHER; note = 2'-O-methylguanosine-3'-phosphate
  modified_base 19: mod_base = OTHER; note = 2'-O-methyluridine-3'-phosphorothioate
  modified_base 20: mod_base = OTHER; note = 2'-O-methylcytidine-3'-phosphorothioate
  modified_base 21: mod_base = OTHER; note = 2'-O-methyladenosine
ctgagacactgagaaatgtca

SEQ ID NO: 10949 - RNA, 21 nt, synthetic construct
  source 1..21: mol_type = other RNA
  modified_base 1: mod_base = OTHER; note = 2'-O-methylcytidine-3'-phosphorothioate
  modified_base 2: mod_base = OTHER; note = 2'-O-methylcytidine-3'-phosphorothioate
  modified_base 3: mod_base = OTHER; note = 2'-O-methyluridine-3'-phosphate
  modified_base 4: mod_base = OTHER; note = 2'-O-methylguanosine-3'-phosphate
  modified_base 5: mod_base = OTHER; note = 2'-O-methyladenosine-3'-phosphate
  modified_base 6: mod_base = OTHER; note = 2'-O-docosanyl-adenosine-3'-phosphate
  modified_base 7: mod_base = OTHER; note = 2'-deoxy-2'-fluoroguanosine-3'-phosphate
  modified_base 8: mod_base = OTHER; note = 2'-O-methyluridine-3'-phosphate
  modified_base 9: mod_base = OTHER; note = 2'-deoxy-2'-fluorocytidine-3'-phosphate
  modified_base 10: mod_base = OTHER; note = 2'-deoxy-2'-fluoroadenosine-3'-phosphate
  modified_base 11: mod_base = OTHER; note = 2'-deoxy-2'-fluorocytidine-3'-phosphate
  modified_base 12: mod_base = OTHER; note = 2'-O-methyladenosine-3'-phosphate
  modified_base 13: mod_base = OTHER; note = 2'-O-methylcytidine-3'-phosphate
  modified_base 14: mod_base = OTHER; note = 2'-O-methyladenosine-3'-phosphate
  modified_base 15: mod_base = OTHER; note = 2'-O-methylguanosine-3'-phosphate
  modified_base 16: mod_base = OTHER; note = 2'-O-methylcytidine-3'-phosphate
  modified_base 17: mod_base = OTHER; note = 2'-O-methyluridine-3'-phosphate
  modified_base 18: mod_base = OTHER; note = 2'-O-methyladenosine-3'-phosphate
  modified_base 19: mod_base = OTHER; note = 2'-O-methyladenosine-3'-phosphorothioate
  modified_base 20: mod_base = OTHER; note = 2'-O-methyluridine-3'-phosphorothioate
  modified_base 21: mod_base = OTHER; note = 2'-O-methyladenosine
cctgaagtcacacagctaata

SEQ ID NO: 10950 - RNA, 21 nt, synthetic construct
  source 1..21: mol_type = other RNA
  modified_base 1: mod_base = OTHER; note = 2'-O-methyluridine-3'-phosphorothioate
  modified_base 2: mod_base = OTHER; note = 2'-O-methylcytidine-3'-phosphorothioate
  modified_base 3: mod_base = OTHER; note = 2'-O-methylcytidine-3'-phosphate
  modified_base 4: mod_base = OTHER; note = 2'-O-methyluridine-3'-phosphate
  modified_base 5: mod_base = OTHER; note = 2'-O-methylguanosine-3'-phosphate
  modified_base 6: mod_base = OTHER; note = 2'-O-docosanyl-adenosine-3'-phosphate
  modified_base 7: mod_base = OTHER; note = 2'-deoxy-2'-fluoroguanosine-3'-phosphate
  modified_base 8: mod_base = OTHER; note = 2'-O-methyladenosine-3'-phosphate
  modified_base 9: mod_base = OTHER; note = 2'-deoxy-2'-fluorocytidine-3'-phosphate
  modified_base 10: mod_base = OTHER; note = 2'-deoxy-2'-fluoroadenosine-3'-phosphate
  modified_base 11: mod_base = OTHER; note = 2'-deoxy-2'-fluorocytidine-3'-phosphate
  modified_base 12: mod_base = OTHER; note = 2'-O-methyluridine-3'-phosphate
  modified_base 13: mod_base = OTHER; note = 2'-O-methylguanosine-3'-phosphate
  modified_base 14: mod_base = OTHER; note = 2'-O-methyladenosine-3'-phosphate
  modified_base 15: mod_base = OTHER; note = 2'-O-methylguanosine-3'-phosphate
  modified_base 16: mod_base = OTHER; note = 2'-O-methyladenosine-3'-phosphate
  modified_base 17: mod_base = OTHER; note = 2'-O-methyladenosine-3'-phosphate
  modified_base 18: mod_base = OTHER; note = 2'-O-methyladenosine-3'-phosphate
  modified_base 19: mod_base = OTHER; note = 2'-O-methyluridine-3'-phosphorothioate
  modified_base 20: mod_base = OTHER; note = 2'-O-methylguanosine-3'-phosphorothioate
  modified_base 21: mod_base = OTHER; note = 2'-O-methyladenosine
tcctgagacactgagaaatga

SEQ ID NO: 10951 - RNA, 21 nt, synthetic construct
  source 1..21: mol_type = other RNA
  modified_base 1: mod_base = OTHER; note = 2'-O-methylguanosine-3'-phosphorothioate
  modified_base 2: mod_base = OTHER; note = 2'-O-methyladenosine-3'-phosphorothioate
  modified_base 3: mod_base = OTHER; note = 2'-O-methylguanosine-3'-phosphate
  modified_base 4: mod_base = OTHER; note = 2'-O-methyladenosine-3'-phosphate
  modified_base 5: mod_base = OTHER; note = 2'-O-methylcytidine-3'-phosphate
  modified_base 6: mod_base = OTHER; note = 2'-O-docosanyl-adenosine-3'-phosphate
  modified_base 7: mod_base = OTHER; note = 2'-deoxy-2'-fluorocytidine-3'-phosphate
  modified_base 8: mod_base = OTHER; note = 2'-O-methyluridine-3'-phosphate
  modified_base 9: mod_base = OTHER; note = 2'-deoxy-2'-fluoroguanosine-3'-phosphate
  modified_base 10: mod_base = OTHER; note = 2'-deoxy-2'-fluoroadenosine-3'-phosphate
  modified_base 11: mod_base = OTHER; note = 2'-deoxy-2'-fluoroguanosine-3'-phosphate
  modified_base 12: mod_base = OTHER; note = 2'-O-methyladenosine-3'-phosphate
  modified_base 13: mod_base = OTHER; note = 2'-O-methyladenosine-3'-phosphate
  modified_base 14: mod_base = OTHER; note = 2'-O-methyladenosine-3'-phosphate
  modified_base 15: mod_base = OTHER; note = 2'-O-methyluridine-3'-phosphate
  modified_base 16: mod_base = OTHER; note = 2'-O-methylguanosine-3'-phosphate
  modified_base 17: mod_base = OTHER; note = 2'-O-methyluridine-3'-phosphate
  modified_base 18: mod_base = OTHER; note = 2'-O-methylcytidine-3'-phosphate
  modified_base 19: mod_base = OTHER; note = 2'-O-methylcytidine-3'-phosphorothioate
  modified_base 20: mod_base = OTHER; note = 2'-O-methyluridine-3'-phosphorothioate
  modified_base 21: mod_base = OTHER; note = 2'-O-methyladenosine
gagacactgagaaatgtccta

SEQ ID NO: 10952 - RNA, 21 nt, synthetic construct
  source 1..21: mol_type = other RNA
  modified_base 1: mod_base = OTHER; note = 2'-O-methyladenosine-3'-phosphorothioate
  modified_base 2: mod_base = OTHER; note = 2'-O-methylguanosine-3'-phosphorothioate
  modified_base 3: mod_base = OTHER; note = 2'-O-methyladenosine-3'-phosphate
  modified_base 4: mod_base = OTHER; note = 2'-O-methyladenosine-3'-phosphate
  modified_base 5: mod_base = OTHER; note = 2'-O-methyladenosine-3'-phosphate
  modified_base 6: mod_base = OTHER; note = 2'-O-docosanyl-uridine-3'-phosphate
  modified_base 7: mod_base = OTHER; note = 2'-deoxy-2'-fluoroguanosine-3'-phosphate
  modified_base 8: mod_base = OTHER; note = 2'-O-methyluridine-3'-phosphate
  modified_base 9: mod_base = OTHER; note = 2'-deoxy-2'-fluorocytidine-3'-phosphate
  modified_base 10: mod_base = OTHER; note = 2'-deoxy-2'-fluorocytidine-3'-phosphate
  modified_base 11: mod_base = OTHER; note = 2'-deoxy-2'-fluorouridine-3'-phosphate
  modified_base 12: mod_base = OTHER; note = 2'-O-methylguanosine-3'-phosphate
  modified_base 13: mod_base = OTHER; note = 2'-O-methyladenosine-3'-phosphate
  modified_base 14: mod_base = OTHER; note = 2'-O-methyladenosine-3'-phosphate
  modified_base 15: mod_base = OTHER; note = 2'-O-methylguanosine-3'-phosphate
  modified_base 16: mod_base = OTHER; note = 2'-O-methyluridine-3'-phosphate
  modified_base 17: mod_base = OTHER; note = 2'-O-methylcytidine-3'-phosphate
  modified_base 18: mod_base = OTHER; note = 2'-O-methyladenosine-3'-phosphate
  modified_base 19: mod_base = OTHER; note = 2'-O-methylcytidine-3'-phosphorothioate
  modified_base 20: mod_base = OTHER; note = 2'-O-methyladenosine-3'-phosphorothioate
  modified_base 21: mod_base = OTHER; note = 2'-O-methyladenosine
agaaatgtcctgaagtcacaa

SEQ ID NO: 10953 - RNA, 21 nt, synthetic construct
  source 1..21: mol_type = other RNA
  modified_base 1: mod_base = OTHER; note = 2'-O-methyluridine-3'-phosphorothioate
  modified_base 2: mod_base = OTHER; note = 2'-O-methylguanosine-3'-phosphorothioate
  modified_base 3: mod_base = OTHER; note = 2'-O-methyluridine-3'-phosphate
  modified_base 4: mod_base = OTHER; note = 2'-O-methylguanosine-3'-phosphate
  modified_base 5: mod_base = OTHER; note = 2'-O-methyladenosine-3'-phosphate
  modified_base 6: mod_base = OTHER; note = 2'-O-docosanyl-uridine-3'-phosphate
  modified_base 7: mod_base = OTHER; note = 2'-deoxy-2'-fluoroadenosine-3'-phosphate
  modified_base 8: mod_base = OTHER; note = 2'-O-methyladenosine-3'-phosphate
  modified_base 9: mod_base = OTHER; note = 2'-deoxy-2'-fluorouridine-3'-phosphate
  modified_base 10: mod_base = OTHER; note = 2'-deoxy-2'-fluoroguanosine-3'-phosphate
  modified_base 11: mod_base = OTHER; note = 2'-deoxy-2'-fluoroadenosine-3'-phosphate
  modified_base 12: mod_base = OTHER; note = 2'-O-methyladenosine-3'-phosphate
  modified_base 13: mod_base = OTHER; note = 2'-O-methylcytidine-3'-phosphate
  modified_base 14: mod_base = OTHER; note = 2'-O-methyladenosine-3'-phosphate
  modified_base 15: mod_base = OTHER; note = 2'-O-methylcytidine-3'-phosphate
  modified_base 16: mod_base = OTHER; note = 2'-O-methylcytidine-3'-phosphate
  modified_base 17: mod_base = OTHER; note = 2'-O-methylguanosine-3'-phosphate
  modified_base 18: mod_base = OTHER; note = 2'-O-methyluridine-3'-phosphate
  modified_base 19: mod_base = OTHER; note = 2'-O-methyladenosine-3'-phosphorothioate
  modified_base 20: mod_base = OTHER; note = 2'-O-methyladenosine-3'-phosphorothioate
  modified_base 21: mod_base = OTHER; note = 2'-O-methyladenosine
tgtgataatgaacaccgtaaa

SEQ ID NO: 10954 - RNA, 21 nt, synthetic construct
  source 1..21: mol_type = other RNA
  modified_base 1: mod_base = OTHER; note = 2'-O-methyluridine-3'-phosphorothioate
  modified_base 2: mod_base = OTHER; note = 2'-O-methyladenosine-3'-phosphorothioate
  modified_base 3: mod_base = OTHER; note = 2'-O-methylguanosine-3'-phosphate
  modified_base 4: mod_base = OTHER; note = 2'-O-methylguanosine-3'-phosphate
  modified_base 5: mod_base = OTHER; note = 2'-O-methyluridine-3'-phosphate
  modified_base 6: mod_base = OTHER; note = 2'-O-docosanyl-cytidine-3'-phosphate
  modified_base 7: mod_base = OTHER; note = 2'-deoxy-2'-fluorocytidine-3'-phosphate
  modified_base 8: mod_base = OTHER; note = 2'-O-methyladenosine-3'-phosphate
  modified_base 9: mod_base = OTHER; note = 2'-deoxy-2'-fluoroadenosine-3'-phosphate
  modified_base 10: mod_base = OTHER; note = 2'-deoxy-2'-fluoroadenosine-3'-phosphate
  modified_base 11: mod_base = OTHER; note = 2'-deoxy-2'-fluorouridine-3'-phosphate
  modified_base 12: mod_base = OTHER; note = 2'-O-methylcytidine-3'-phosphate
  modified_base 13: mod_base = OTHER; note = 2'-O-methyluridine-3'-phosphate
  modified_base 14: mod_base = OTHER; note = 2'-O-methyluridine-3'-phosphate
  modified_base 15: mod_base = OTHER; note = 2'-O-methylguanosine-3'-phosphate
  modified_base 16: mod_base = OTHER; note = 2'-O-methyluridine-3'-phosphate
  modified_base 17: mod_base = OTHER; note = 2'-O-methylguanosine-3'-phosphate
  modified_base 18: mod_base = OTHER; note = 2'-O-methyladenosine-3'-phosphate
  modified_base 19: mod_base = OTHER; note = 2'-O-methyluridine-3'-phosphorothioate
  modified_base 20: mod_base = OTHER; note = 2'-O-methyladenosine-3'-phosphorothioate
  modified_base 21: mod_base = OTHER; note = 2'-O-methyladenosine
taggtccaaatcttgtgataa

SEQ ID NO: 10955 - RNA, 21 nt, synthetic construct
  source 1..21: mol_type = other RNA
  modified_base 1: mod_base = OTHER; note = 2'-O-methyladenosine-3'-phosphorothioate
  modified_base 2: mod_base = OTHER; note = 2'-O-methylguanosine-3'-phosphorothioate
  modified_base 3: mod_base = OTHER; note = 2'-O-methylguanosine-3'-phosphate
  modified_base 4: mod_base = OTHER; note = 2'-O-methyluridine-3'-phosphate
  modified_base 5: mod_base = OTHER; note = 2'-O-methylcytidine-3'-phosphate
  modified_base 6: mod_base = OTHER; note = 2'-O-docosanyl-cytidine-3'-phosphate
  modified_base 7: mod_base = OTHER; note = 2'-deoxy-2'-fluoroadenosine-3'-phosphate
  modified_base 8: mod_base = OTHER; note = 2'-O-methyladenosine-3'-phosphate
  modified_base 9: mod_base = OTHER; note = 2'-deoxy-2'-fluoroadenosine-3'-phosphate
  modified_base 10: mod_base = OTHER; note = 2'-deoxy-2'-fluorouridine-3'-phosphate
  modified_base 11: mod_base = OTHER; note = 2'-deoxy-2'-fluorocytidine-3'-phosphate
  modified_base 12: mod_base = OTHER; note = 2'-O-methyluridine-3'-phosphate
  modified_base 13: mod_base = OTHER; note = 2'-O-methyluridine-3'-phosphate
  modified_base 14: mod_base = OTHER; note = 2'-O-methylguanosine-3'-phosphate
  modified_base 15: mod_base = OTHER; note = 2'-O-methyluridine-3'-phosphate
  modified_base 16: mod_base = OTHER; note = 2'-O-methylguanosine-3'-phosphate
  modified_base 17: mod_base = OTHER; note = 2'-O-methyladenosine-3'-phosphate
  modified_base 18: mod_base = OTHER; note = 2'-O-methyluridine-3'-phosphate
  modified_base 19: mod_base = OTHER; note = 2'-O-methyladenosine-3'-phosphorothioate
  modified_base 20: mod_base = OTHER; note = 2'-O-methyladenosine-3'-phosphorothioate
  modified_base 21: mod_base = OTHER; note = 2'-O-methyladenosine
aggtccaaatcttgtgataaa

SEQ ID NO: 10956 - RNA, 21 nt, synthetic construct
  source 1..21: mol_type = other RNA
  modified_base 1: mod_base = OTHER; note = 2'-O-methylguanosine-3'-phosphorothioate
  modified_base 2: mod_base = OTHER; note = 2'-O-methyluridine-3'-phosphorothioate
  modified_base 3: mod_base = OTHER; note = 2'-O-methylcytidine-3'-phosphate
  modified_base 4: mod_base = OTHER; note = 2'-O-methylcytidine-3'-phosphate
  modified_base 5: mod_base = OTHER; note = 2'-O-methyladenosine-3'-phosphate
  modified_base 6: mod_base = OTHER; note = 2'-O-docosanyl-adenosine-3'-phosphate
  modified_base 7: mod_base = OTHER; note = 2'-deoxy-2'-fluoroadenosine-3'-phosphate
  modified_base 8: mod_base = OTHER; note = 2'-O-methyluridine-3'-phosphate
  modified_base 9: mod_base = OTHER; note = 2'-deoxy-2'-fluorocytidine-3'-phosphate
  modified_base 10: mod_base = OTHER; note = 2'-deoxy-2'-fluorouridine-3'-phosphate
  modified_base 11: mod_base = OTHER; note = 2'-deoxy-2'-fluorouridine-3'-phosphate
  modified_base 12: mod_base = OTHER; note = 2'-O-methylguanosine-3'-phosphate
  modified_base 13: mod_base = OTHER; note = 2'-O-methyluridine-3'-phosphate
  modified_base 14: mod_base = OTHER; note = 2'-O-methylguanosine-3'-phosphate
  modified_base 15: mod_base = OTHER; note = 2'-O-methyladenosine-3'-phosphate
  modified_base 16: mod_base = OTHER; note = 2'-O-methyluridine-3'-phosphate
  modified_base 17: mod_base = OTHER; note = 2'-O-methyladenosine-3'-phosphate
  modified_base 18: mod_base = OTHER; note = 2'-O-methyladenosine-3'-phosphate
  modified_base 19: mod_base = OTHER; note = 2'-O-methyluridine-3'-phosphorothioate
  modified_base 20: mod_base = OTHER; note = 2'-O-methylguanosine-3'-phosphorothioate
  modified_base 21: mod_base = OTHER; note = 2'-O-methyladenosine
gtccaaatcttgtgataatga

SEQ ID NO: 10957 - RNA, 21 nt, synthetic construct
  source 1..21: mol_type = other RNA
  modified_base 1: mod_base = OTHER; note = 2'-O-methylcytidine-3'-phosphorothioate
  modified_base 2: mod_base = OTHER; note = 2'-O-methylcytidine-3'-phosphorothioate
  modified_base 3: mod_base = OTHER; note = 2'-O-methyladenosine-3'-phosphate
  modified_base 4: mod_base = OTHER; note = 2'-O-methyladenosine-3'-phosphate
  modified_base 5: mod_base = OTHER; note = 2'-O-methyladenosine-3'-phosphate
  modified_base 6: mod_base = OTHER; note = 2'-O-docosanyl-uridine-3'-phosphate
  modified_base 7: mod_base = OTHER; note = 2'-deoxy-2'-fluorocytidine-3'-phosphate
  modified_base 8: mod_base = OTHER; note = 2'-O-methyluridine-3'-phosphate
  modified_base 9: mod_base = OTHER; note = 2'-deoxy-2'-fluorouridine-3'-phosphate
  modified_base 10: mod_base = OTHER; note = 2'-deoxy-2'-fluoroguanosine-3'-phosphate
  modified_base 11: mod_base = OTHER; note = 2'-deoxy-2'-fluorouridine-3'-phosphate
  modified_base 12: mod_base = OTHER; note = 2'-O-methylguanosine-3'-phosphate
  modified_base 13: mod_base = OTHER; note = 2'-O-methyladenosine-3'-phosphate
  modified_base 14: mod_base = OTHER; note = 2'-O-methyluridine-3'-phosphate
  modified_base 15: mod_base = OTHER; note = 2'-O-methyladenosine-3'-phosphate
  modified_base 16: mod_base = OTHER; note = 2'-O-methyladenosine-3'-phosphate
  modified_base 17: mod_base = OTHER; note = 2'-O-methyluridine-3'-phosphate
  modified_base 18: mod_base = OTHER; note = 2'-O-methylguanosine-3'-phosphate
  modified_base 19: mod_base = OTHER; note = 2'-O-methyladenosine-3'-phosphorothioate
  modified_base 20: mod_base = OTHER; note = 2'-O-methyladenosine-3'-phosphorothioate
  modified_base 21: mod_base = OTHER; note = 2'-O-methyladenosine
ccaaatcttgtgataatgaaa

SEQ ID NO: 10958 - RNA, 21 nt, synthetic construct
  source 1..21: mol_type = other RNA
  modified_base 1: mod_base = OTHER; note = 2'-O-methyladenosine-3'-phosphorothioate
  modified_base 2: mod_base = OTHER; note = 2'-O-methyladenosine-3'-phosphorothioate
  modified_base 3: mod_base = OTHER; note = 2'-O-methyladenosine-3'-phosphate
  modified_base 4: mod_base = OTHER; note = 2'-O-methyluridine-3'-phosphate
  modified_base 5: mod_base = OTHER; note = 2'-O-methylcytidine-3'-phosphate
  modified_base 6: mod_base = OTHER; note = 2'-O-docosanyl-uridine-3'-phosphate
  modified_base 7: mod_base = OTHER; note = 2'-deoxy-2'-fluorouridine-3'-phosphate
  modified_base 8: mod_base = OTHER; note = 2'-O-methylguanosine-3'-phosphate
  modified_base 9: mod_base = OTHER; note = 2'-deoxy-2'-fluorouridine-3'-phosphate
  modified_base 10: mod_base = OTHER; note = 2'-deoxy-2'-fluoroguanosine-3'-phosphate
  modified_base 11: mod_base = OTHER; note = 2'-deoxy-2'-fluoroadenosine-3'-phosphate
  modified_base 12: mod_base = OTHER; note = 2'-O-methyluridine-3'-phosphate
  modified_base 13: mod_base = OTHER; note = 2'-O-methyladenosine-3'-phosphate
  modified_base 14: mod_base = OTHER; note = 2'-O-methyladenosine-3'-phosphate
  modified_base 15: mod_base = OTHER; note = 2'-O-methyluridine-3'-phosphate
  modified_base 16: mod_base = OTHER; note = 2'-O-methylguanosine-3'-phosphate
  modified_base 17: mod_base = OTHER; note = 2'-O-methyladenosine-3'-phosphate
  modified_base 18: mod_base = OTHER; note = 2'-O-methyladenosine-3'-phosphate
  modified_base 19: mod_base = OTHER; note = 2'-O-methylcytidine-3'-phosphorothioate
  modified_base 20: mod_base = OTHER; note = 2'-O-methyladenosine-3'-phosphorothioate
  modified_base 21: mod_base = OTHER; note = 2'-O-methyladenosine
aaatcttgtgataatgaacaa

SEQ ID NO: 10959 - RNA, 21 nt, synthetic construct
  source 1..21: mol_type = other RNA
  modified_base 1: mod_base = OTHER; note = 2'-O-methylguanosine-3'-phosphorothioate
  modified_base 2: mod_base = OTHER; note = 2'-O-methylguanosine-3'-phosphorothioate
  modified_base 3: mod_base = OTHER; note = 2'-O-methyluridine-3'-phosphate
  modified_base 4: mod_base = OTHER; note = 2'-O-methyluridine-3'-phosphate
  modified_base 5: mod_base = OTHER; note = 2'-O-methyladenosine-3'-phosphate
  modified_base 6: mod_base = OTHER; note = 2'-O-docosanyl-guanosine-3'-phosphate
  modified_base 7: mod_base = OTHER; note = 2'-deoxy-2'-fluorocytidine-3'-phosphate
  modified_base 8: mod_base = OTHER; note = 2'-O-methyluridine-3'-phosphate
  modified_base 9: mod_base = OTHER; note = 2'-deoxy-2'-fluoroadenosine-3'-phosphate
  modified_base 10: mod_base = OTHER; note = 2'-deoxy-2'-fluoroguanosine-3'-phosphate
  modified_base 11: mod_base = OTHER; note = 2'-deoxy-2'-fluorocytidine-3'-phosphate
  modified_base 12: mod_base = OTHER; note = 2'-O-methyluridine-3'-phosphate
  modified_base 13: mod_base = OTHER; note = 2'-O-methyluridine-3'-phosphate
  modified_base 14: mod_base = OTHER; note = 2'-O-methylcytidine-3'-phosphate
  modified_base 15: mod_base = OTHER; note = 2'-O-methylcytidine-3'-phosphate
  modified_base 16: mod_base = OTHER; note = 2'-O-methyluridine-3'-phosphate
  modified_base 17: mod_base = OTHER; note = 2'-O-methyladenosine-3'-phosphate
  modified_base 18: mod_base = OTHER; note = 2'-O-methylcytidine-3'-phosphate
  modified_base 19: mod_base = OTHER; note = 2'-O-methyluridine-3'-phosphorothioate
  modified_base 20: mod_base = OTHER; note = 2'-O-methyluridine-3'-phosphorothioate
  modified_base 21: mod_base = OTHER; note = 2'-O-methyladenosine
ggttagctagcttcctactta

SEQ ID NO: 10960 - RNA, 21 nt, synthetic construct
  source 1..21: mol_type = other RNA
  modified_base 1: mod_base = OTHER; note = 2'-O-methylguanosine-3'-phosphorothioate
  modified_base 2: mod_base = OTHER; note = 2'-O-methyluridine-3'-phosphorothioate
  modified_base 3: mod_base = OTHER; note = 2'-O-methyluridine-3'-phosphate
  modified_base 4: mod_base = OTHER; note = 2'-O-methyladenosine-3'-phosphate
  modified_base 5: mod_base = OTHER; note = 2'-O-methylguanosine-3'-phosphate
  modified_base 6: mod_base = OTHER; note = 2'-O-docosanyl-cytidine-3'-phosphate
  modified_base 7: mod_base = OTHER; note = 2'-deoxy-2'-fluorouridine-3'-phosphate
  modified_base 8: mod_base = OTHER; note = 2'-O-methyladenosine-3'-phosphate
  modified_base 9: mod_base = OTHER; note = 2'-deoxy-2'-fluoroguanosine-3'-phosphate
  modified_base 10: mod_base = OTHER; note = 2'-deoxy-2'-fluorocytidine-3'-phosphate
  modified_base 11: mod_base = OTHER; note = 2'-deoxy-2'-fluorouridine-3'-phosphate
  modified_base 12: mod_base = OTHER; note = 2'-O-methyluridine-3'-phosphate
  modified_base 13: mod_base = OTHER; note = 2'-O-methylcytidine-3'-phosphate
  modified_base 14: mod_base = OTHER; note = 2'-O-methylcytidine-3'-phosphate
  modified_base 15: mod_base = OTHER; note = 2'-O-methyluridine-3'-phosphate
  modified_base 16: mod_base = OTHER; note = 2'-O-methyladenosine-3'-phosphate
  modified_base 17: mod_base = OTHER; note = 2'-O-methylcytidine-3'-phosphate
  modified_base 18: mod_base = OTHER; note = 2'-O-methyluridine-3'-phosphate
  modified_base 19: mod_base = OTHER; note = 2'-O-methyluridine-3'-phosphorothioate
  modified_base 20: mod_base = OTHER; note = 2'-O-methyluridine-3'-phosphorothioate
  modified_base 21: mod_base = OTHER; note = 2'-O-methyladenosine
gttagctagcttcctacttta

SEQ ID NO: 10961 - RNA, 21 nt, synthetic construct
  source 1..21: mol_type = other RNA
  modified_base 1: mod_base = OTHER; note = 2'-O-methyladenosine-3'-phosphorothioate
  modified_base 2: mod_base = OTHER; note = 2'-O-methylguanosine-3'-phosphorothioate
  modified_base 3: mod_base = OTHER; note = 2'-O-methylcytidine-3'-phosphate
  modified_base 4: mod_base = OTHER; note = 2'-O-methyluridine-3'-phosphate
  modified_base 5: mod_base = OTHER; note = 2'-O-methyluridine-3'-phosphate
  modified_base 6: mod_base = OTHER; note = 2'-O-docosanyl-cytidine-3'-phosphate
  modified_base 7: mod_base = OTHER; note = 2'-deoxy-2'-fluorocytidine-3'-phosphate
  modified_base 8: mod_base = OTHER; note = 2'-O-methyluridine-3'-phosphate
  modified_base 9: mod_base = OTHER; note = 2'-deoxy-2'-fluoroadenosine-3'-phosphate
  modified_base 10: mod_base = OTHER; note = 2'-deoxy-2'-fluorocytidine-3'-phosphate
  modified_base 11: mod_base = OTHER; note = 2'-deoxy-2'-fluorouridine-3'-phosphate
  modified_base 12: mod_base = OTHER; note = 2'-O-methyluridine-3'-phosphate
  modified_base 13: mod_base = OTHER; note = 2'-O-methyluridine-3'-phosphate
  modified_base 14: mod_base = OTHER; note = 2'-O-methylcytidine-3'-phosphate
  modified_base 15: mod_base = OTHER; note = 2'-O-methylcytidine-3'-phosphate
  modified_base 16: mod_base = OTHER; note = 2'-O-methylcytidine-3'-phosphate
  modified_base 17: mod_base = OTHER; note = 2'-O-methyluridine-3'-phosphate
  modified_base 18: mod_base = OTHER; note = 2'-O-methyluridine-3'-phosphate
  modified_base 19: mod_base = OTHER; note = 2'-O-methylguanosine-3'-phosphorothioate
  modified_base 20: mod_base = OTHER; note = 2'-O-methyladenosine-3'-phosphorothioate
  modified_base 21: mod_base = OTHER; note = 2'-O-methyladenosine
agcttcctactttcccttgaa

SEQ ID NO: 10962 - RNA, 21 nt, synthetic construct
  source 1..21: mol_type = other RNA
  modified_base 1: mod_base = OTHER; note = 2'-O-methylcytidine-3'-phosphorothioate
  modified_base 2: mod_base = OTHER; note = 2'-O-methylcytidine-3'-phosphorothioate
  modified_base 3: mod_base = OTHER; note = 2'-O-methyluridine-3'-phosphate
  modified_base 4: mod_base = OTHER; note = 2'-O-methyladenosine-3'-phosphate
  modified_base 5: mod_base = OTHER; note = 2'-O-methylcytidine-3'-phosphate
  modified_base 6: mod_base = OTHER; note = 2'-O-docosanyl-uridine-3'-phosphate
  modified_base 7: mod_base = OTHER; note = 2'-deoxy-2'-fluorouridine-3'-phosphate
  modified_base 8: mod_base = OTHER; note = 2'-O-methyluridine-3'-phosphate
  modified_base 9: mod_base = OTHER; note = 2'-deoxy-2'-fluorocytidine-3'-phosphate
  modified_base 10: mod_base = OTHER; note = 2'-deoxy-2'-fluorocytidine-3'-phosphate
  modified_base 11: mod_base = OTHER; note = 2'-deoxy-2'-fluorocytidine-3'-phosphate
  modified_base 12: mod_base = OTHER; note = 2'-O-methyluridine-3'-phosphate
  modified_base 13: mod_base = OTHER; note = 2'-O-methyluridine-3'-phosphate
  modified_base 14: mod_base = OTHER; note = 2'-O-methylguanosine-3'-phosphate
  modified_base 15: mod_base = OTHER; note = 2'-O-methyladenosine-3'-phosphate
  modified_base 16: mod_base = OTHER; note = 2'-O-methyladenosine-3'-phosphate
  modified_base 17: mod_base = OTHER; note = 2'-O-methyluridine-3'-phosphate
  modified_base 18: mod_base = OTHER; note = 2'-O-methyladenosine-3'-phosphate
  modified_base 19: mod_base = OTHER; note = 2'-O-methylguanosine-3'-phosphorothioate
  modified_base 20: mod_base = OTHER; note = 2'-O-methyluridine-3'-phosphorothioate
  modified_base 21: mod_base = OTHER; note = 2'-O-methyladenosine
cctactttcccttgaatagta

SEQ ID NO: 10963 - RNA, 21 nt, synthetic construct
  source 1..21: mol_type = other RNA
  modified_base 1: mod_base = OTHER; note = 2'-O-methylcytidine-3'-phosphorothioate
  modified_base 2: mod_base = OTHER; note = 2'-O-methyluridine-3'-phosphorothioate
  modified_base 3: mod_base = OTHER; note = 2'-O-methyladenosine-3'-phosphate
  modified_base 4: mod_base = OTHER; note = 2'-O-methylcytidine-3'-phosphate
  modified_base 5: mod_base = OTHER; note = 2'-O-methyluridine-3'-phosphate
  modified_base 6: mod_base = OTHER; note = 2'-O-docosanyl-uridine-3'-phosphate
  modified_base 7: mod_base = OTHER; note = 2'-deoxy-2'-fluorouridine-3'-phosphate
  modified_base 8: mod_base = OTHER; note = 2'-O-methylcytidine-3'-phosphate
  modified_base 9: mod_base = OTHER; note = 2'-deoxy-2'-fluorocytidine-3'-phosphate
  modified_base 10: mod_base = OTHER; note = 2'-deoxy-2'-fluorocytidine-3'-phosphate
  modified_base 11: mod_base = OTHER; note = 2'-deoxy-2'-fluorouridine-3'-phosphate
  modified_base 12: mod_base = OTHER; note = 2'-O-methyluridine-3'-phosphate
  modified_base 13: mod_base = OTHER; note = 2'-O-methylguanosine-3'-phosphate
  modified_base 14: mod_base = OTHER; note = 2'-O-methyladenosine-3'-phosphate
  modified_base 15: mod_base = OTHER; note = 2'-O-methyladenosine-3'-phosphate
  modified_base 16: mod_base = OTHER; note = 2'-O-methyluridine-3'-phosphate
  modified_base 17: mod_base = OTHER; note = 2'-O-methyladenosine-3'-phosphate
  modified_base 18: mod_base = OTHER; note = 2'-O-methylguanosine-3'-phosphate
  modified_base 19: mod_base = OTHER; note = 2'-O-methyluridine-3'-phosphorothioate
  modified_base 20: mod_base = OTHER; note = 2'-O-methylguanosine-3'-phosphorothioate
  modified_base 21: mod_base = OTHER; note = 2'-O-methyladenosine
ctactttcccttgaatagtga

SEQ ID NO: 10964 - RNA, 21 nt, synthetic construct
  source 1..21: mol_type = other RNA
  modified_base 1: mod_base = OTHER; note = 2'-O-methyluridine-3'-phosphorothioate
  modified_base 2: mod_base = OTHER; note = 2'-O-methylcytidine-3'-phosphorothioate
  modified_base 3: mod_base = OTHER; note = 2'-O-methylcytidine-3'-phosphate
  modified_base 4: mod_base = OTHER; note = 2'-O-methylcytidine-3'-phosphate
  modified_base 5: mod_base = OTHER; note = 2'-O-methyluridine-3'-phosphate
  modified_base 6: mod_base = OTHER; note = 2'-O-docosanyl-uridine-3'-phosphate
  modified_base 7: mod_base = OTHER; note = 2'-deoxy-2'-fluoroguanosine-3'-phosphate
  modified_base 8: mod_base = OTHER; note = 2'-O-methyladenosine-3'-phosphate
  modified_base 9: mod_base = OTHER; note = 2'-deoxy-2'-fluoroadenosine-3'-phosphate
  modified_base 10: mod_base = OTHER; note = 2'-deoxy-2'-fluorouridine-3'-phosphate
  modified_base 11: mod_base = OTHER; note = 2'-deoxy-2'-fluoroadenosine-3'-phosphate
  modified_base 12: mod_base = OTHER; note = 2'-O-methylguanosine-3'-phosphate
  modified_base 13: mod_base = OTHER; note = 2'-O-methyluridine-3'-phosphate
  modified_base 14: mod_base = OTHER; note = 2'-O-methylguanosine-3'-phosphate
  modified_base 15: mod_base = OTHER; note = 2'-O-methylcytidine-3'-phosphate
  modified_base 16: mod_base = OTHER; note = 2'-O-methyluridine-3'-phosphate
  modified_base 17: mod_base = OTHER; note = 2'-O-methyluridine-3'-phosphate
  modified_base 18: mod_base = OTHER; note = 2'-O-methyluridine-3'-phosphate
  modified_base 19: mod_base = OTHER; note = 2'-O-methyluridine-3'-phosphorothioate
  modified_base 20: mod_base = OTHER; note = 2'-O-methylcytidine-3'-phosphorothioate
  modified_base 21: mod_base = OTHER; note = 2'-O-methyladenosine
tcccttgaatagtgcttttca

SEQ ID NO: 10965 - RNA, 21 nt, synthetic construct
  source 1..21: mol_type = other RNA
  modified_base 1: mod_base = OTHER; note = 2'-O-methylcytidine-3'-phosphorothioate
  modified_base 2: mod_base = OTHER; note = 2'-O-methylcytidine-3'-phosphorothioate
  modified_base 3: mod_base = OTHER; note = 2'-O-methylcytidine-3'-phosphate
  modified_base 4: mod_base = OTHER; note = 2'-O-methyluridine-3'-phosphate
  modified_base 5: mod_base = OTHER; note = 2'-O-methyluridine-3'-phosphate
  modified_base 6: mod_base = OTHER; note = 2'-O-docosanyl-guanosine-3'-phosphate
  modified_base 7: mod_base = OTHER; note = 2'-deoxy-2'-fluoroadenosine-3'-phosphate
  modified_base 8: mod_base = OTHER; note = 2'-O-methyladenosine-3'-phosphate
  modified_base 9: mod_base = OTHER; note = 2'-deoxy-2'-fluorouridine-3'-phosphate
  modified_base 10: mod_base = OTHER; note = 2'-deoxy-2'-fluoroadenosine-3'-phosphate
  modified_base 11: mod_base = OTHER; note = 2'-deoxy-2'-fluoroguanosine-3'-phosphate
  modified_base 12: mod_base = OTHER; note = 2'-O-methyluridine-3'-phosphate
  modified_base 13: mod_base = OTHER; note = 2'-O-methylguanosine-3'-phosphate
  modified_base 14: mod_base = OTHER; note = 2'-O-methylcytidine-3'-phosphate
  modified_base 15: mod_base = OTHER; note = 2'-O-methyluridine-3'-phosphate
  modified_base 16: mod_base = OTHER; note = 2'-O-methyluridine-3'-phosphate
  modified_base 17: mod_base = OTHER; note = 2'-O-methyluridine-3'-phosphate
  modified_base 18: mod_base = OTHER; note = 2'-O-methyluridine-3'-phosphate
  modified_base 19: mod_base = OTHER; note = 2'-O-methylcytidine-3'-phosphorothioate
  modified_base 20: mod_base = OTHER; note = 2'-O-methyluridine-3'-phosphorothioate
  modified_base 21: mod_base = OTHER; note = 2'-O-methyladenosine
cccttgaatagtgcttttcta

SEQ ID NO: 10966 - RNA, 21 nt, synthetic construct
  source 1..21: mol_type = other RNA
  modified_base 1: mod_base = OTHER; note = 2'-O-methylcytidine-3'-phosphorothioate
  modified_base 2: mod_base = OTHER; note = 2'-O-methylcytidine-3'-phosphorothioate
  modified_base 3: mod_base = OTHER; note = 2'-O-methyluridine-3'-phosphate
  modified_base 4: mod_base = OTHER; note = 2'-O-methyluridine-3'-phosphate
  modified_base 5: mod_base = OTHER; note = 2'-O-methylguanosine-3'-phosphate
  modified_base 6: mod_base = OTHER; note = 2'-O-docosanyl-adenosine-3'-phosphate
  modified_base 7: mod_base = OTHER; note = 2'-deoxy-2'-fluoroadenosine-3'-phosphate
  modified_base 8: mod_base = OTHER; note = 2'-O-methyluridine-3'-phosphate
  modified_base 9: mod_base = OTHER; note = 2'-deoxy-2'-fluoroadenosine-3'-phosphate
  modified_base 10: mod_base = OTHER; note = 2'-deoxy-2'-fluoroguanosine-3'-phosphate
  modified_base 11: mod_base = OTHER; note = 2'-deoxy-2'-fluorouridine-3'-phosphate
  modified_base 12: mod_base = OTHER; note = 2'-O-methylguanosine-3'-phosphate
  modified_base 13: mod_base = OTHER; note = 2'-O-methylcytidine-3'-phosphate
  modified_base 14: mod_base = OTHER; note = 2'-O-methyluridine-3'-phosphate
  modified_base 15: mod_base = OTHER; note = 2'-O-methyluridine-3'-phosphate
  modified_base 16: mod_base = OTHER; note = 2'-O-methyluridine-3'-phosphate
  modified_base 17: mod_base = OTHER; note = 2'-O-methyluridine-3'-phosphate
  modified_base 18: mod_base = OTHER; note = 2'-O-methylcytidine-3'-phosphate
  modified_base 19: mod_base = OTHER; note = 2'-O-methyluridine-3'-phosphorothioate
  modified_base 20: mod_base = OTHER; note = 2'-O-methylcytidine-3'-phosphorothioate
  modified_base 21: mod_base = OTHER; note = 2'-O-methyladenosine
ccttgaatagtgcttttctca

SEQ ID NO: 10967 - RNA, 21 nt, synthetic construct
  source 1..21: mol_type = other RNA
  modified_base 1: mod_base = OTHER; note = 2'-O-methylcytidine-3'-phosphorothioate
  modified_base 2: mod_base = OTHER; note = 2'-O-methyluridine-3'-phosphorothioate
  modified_base 3: mod_base = OTHER; note = 2'-O-methyluridine-3'-phosphate
  modified_base 4: mod_base = OTHER; note = 2'-O-methylguanosine-3'-phosphate
  modified_base 5: mod_base = OTHER; note = 2'-O-methyladenosine-3'-phosphate
  modified_base 6: mod_base = OTHER; note = 2'-O-docosanyl-adenosine-3'-phosphate
  modified_base 7: mod_base = OTHER; note = 2'-deoxy-2'-fluorouridine-3'-phosphate
  modified_base 8: mod_base = OTHER; note = 2'-O-methyladenosine-3'-phosphate
  modified_base 9: mod_base = OTHER; note = 2'-deoxy-2'-fluoroguanosine-3'-phosphate
  modified_base 10: mod_base = OTHER; note = 2'-deoxy-2'-fluorouridine-3'-phosphate
  modified_base 11: mod_base = OTHER; note = 2'-deoxy-2'-fluoroguanosine-3'-phosphate
  modified_base 12: mod_base = OTHER; note = 2'-O-methylcytidine-3'-phosphate
  modified_base 13: mod_base = OTHER; note = 2'-O-methyluridine-3'-phosphate
  modified_base 14: mod_base = OTHER; note = 2'-O-methyluridine-3'-phosphate
  modified_base 15: mod_base = OTHER; note = 2'-O-methyluridine-3'-phosphate
  modified_base 16: mod_base = OTHER; note = 2'-O-methyluridine-3'-phosphate
  modified_base 17: mod_base = OTHER; note = 2'-O-methylcytidine-3'-phosphate
  modified_base 18: mod_base = OTHER; note = 2'-O-methyluridine-3'-phosphate
  modified_base 19: mod_base = OTHER; note = 2'-O-methylcytidine-3'-phosphorothioate
  modified_base 20: mod_base = OTHER; note = 2'-O-methylcytidine-3'-phosphorothioate
  modified_base 21: mod_base = OTHER; note = 2'-O-methyladenosine
cttgaatagtgcttttctcca

SEQ ID NO: 10968 - RNA, 21 nt, synthetic construct
  source 1..21: mol_type = other RNA
  modified_base 1: mod_base = OTHER; note = 2'-O-methyluridine-3'-phosphorothioate
  modified_base 2: mod_base = OTHER; note = 2'-O-methylguanosine-3'-phosphorothioate
  modified_base 3: mod_base = OTHER; note = 2'-O-methyladenosine-3'-phosphate
  modified_base 4: mod_base = OTHER; note = 2'-O-methyladenosine-3'-phosphate
  modified_base 5: mod_base = OTHER; note = 2'-O-methyluridine-3'-phosphate
  modified_base 6: mod_base = OTHER; note = 2'-O-docosanyl-adenosine-3'-phosphate
  modified_base 7: mod_base = OTHER; note = 2'-deoxy-2'-fluoroguanosine-3'-phosphate
  modified_base 8: mod_base = OTHER; note = 2'-O-methyluridine-3'-phosphate
  modified_base 9: mod_base = OTHER; note = 2'-deoxy-2'-fluoroguanosine-3'-phosphate
  modified_base 10: mod_base = OTHER; note = 2'-deoxy-2'-fluorocytidine-3'-phosphate
  modified_base 11: mod_base = OTHER; note = 2'-deoxy-2'-fluorouridine-3'-phosphate
  modified_base 12: mod_base = OTHER; note = 2'-O-methyluridine-3'-phosphate
  modified_base 13: mod_base = OTHER; note = 2'-O-methyluridine-3'-phosphate
  modified_base 14: mod_base = OTHER; note = 2'-O-methyluridine-3'-phosphate
  modified_base 15: mod_base = OTHER; note = 2'-O-methylcytidine-3'-phosphate
  modified_base 16: mod_base = OTHER; note = 2'-O-methyluridine-3'-phosphate
  modified_base 17: mod_base = OTHER; note = 2'-O-methylcytidine-3'-phosphate
  modified_base 18: mod_base = OTHER; note = 2'-O-methylcytidine-3'-phosphate
  modified_base 19: mod_base = OTHER; note = 2'-O-methylcytidine-3'-phosphorothioate
  modified_base 20: mod_base = OTHER; note = 2'-O-methyluridine-3'-phosphorothioate
  modified_base 21: mod_base = OTHER; note = 2'-O-methyladenosine
tgaatagtgcttttctcccta

SEQ ID NO: 10969 - RNA, 21 nt, synthetic construct
  source 1..21: mol_type = other RNA
  modified_base 1: mod_base = OTHER; note = 2'-O-methylguanosine-3'-phosphorothioate
  modified_base 2: mod_base = OTHER; note = 2'-O-methylcytidine-3'-phosphorothioate
  modified_base 3: mod_base = OTHER; note = 2'-O-methyluridine-3'-phosphate
  modified_base 4: mod_base = OTHER; note = 2'-O-methyluridine-3'-phosphate
  modified_base 5: mod_base = OTHER; note = 2'-O-methyluridine-3'-phosphate
  modified_base 6: mod_base = OTHER; note = 2'-O-docosanyl-uridine-3'-phosphate
  modified_base 7: mod_base = OTHER; note = 2'-deoxy-2'-fluorocytidine-3'-phosphate
  modified_base 8: mod_base = OTHER; note = 2'-O-methyluridine-3'-phosphate
  modified_base 9: mod_base = OTHER; note = 2'-deoxy-2'-fluorocytidine-3'-phosphate
  modified_base 10: mod_base = OTHER; note = 2'-deoxy-2'-fluorocytidine-3'-phosphate
  modified_base 11: mod_base = OTHER; note = 2'-deoxy-2'-fluorocytidine-3'-phosphate
  modified_base 12: mod_base = OTHER; note = 2'-O-methyluridine-3'-phosphate
  modified_base 13: mod_base = OTHER; note = 2'-O-methyladenosine-3'-phosphate
  modified_base 14: mod_base = OTHER; note = 2'-O-methyluridine-3'-phosphate
  modified_base 15: mod_base = OTHER; note = 2'-O-methylguanosine-3'-phosphate
  modified_base 16: mod_base = OTHER; note = 2'-O-methyluridine-3'-phosphate
  modified_base 17: mod_base = OTHER; note = 2'-O-methyladenosine-3'-phosphate
  modified_base 18: mod_base = OTHER; note = 2'-O-methyladenosine-3'-phosphate
  modified_base 19: mod_base = OTHER; note = 2'-O-methyluridine-3'-phosphorothioate
  modified_base 20: mod_base = OTHER; note = 2'-O-methyladenosine-3'-phosphorothioate
  modified_base 21: mod_base = OTHER; note = 2'-O-methyladenosine
gcttttctccctatgtaataa

SEQ ID NO: 10970 - RNA, 21 nt, synthetic construct
  source 1..21: mol_type = other RNA
  modified_base 1: mod_base = OTHER; note = 2'-O-methyladenosine-3'-phosphorothioate
  modified_base 2: mod_base = OTHER; note = 2'-O-methylguanosine-3'-phosphorothioate
  modified_base 3: mod_base = OTHER; note = 2'-O-methyladenosine-3'-phosphate
  modified_base 4: mod_base = OTHER; note = 2'-O-methyladenosine-3'-phosphate
  modified_base 5: mod_base = OTHER; note = 2'-O-methylguanosine-3'-phosphate
  modified_base 6: mod_base = OTHER; note = 2'-O-docosanyl-guanosine-3'-phosphate
  modified_base 7: mod_base = OTHER; note = 2'-deoxy-2'-fluorocytidine-3'-phosphate
  modified_base 8: mod_base = OTHER; note = 2'-O-methyladenosine-3'-phosphate
  modified_base 9: mod_base = OTHER; note = 2'-deoxy-2'-fluorouridine-3'-phosphate
  modified_base 10: mod_base = OTHER; note = 2'-deoxy-2'-fluoroadenosine-3'-phosphate
  modified_base 11: mod_base = OTHER; note = 2'-deoxy-2'-fluorouridine-3'-phosphate
  modified_base 12: mod_base = OTHER; note = 2'-O-methyluridine-3'-phosphate
  modified_base 13: mod_base = OTHER; note = 2'-O-methylguanosine-3'-phosphate
  modified_base 14: mod_base = OTHER; note = 2'-O-methyladenosine-3'-phosphate
  modified_base 15: mod_base = OTHER; note = 2'-O-methylguanosine-3'-phosphate
  modified_base 16: mod_base = OTHER; note = 2'-O-methyluridine-3'-phosphate
  modified_base 17: mod_base = OTHER; note = 2'-O-methyluridine-3'-phosphate
  modified_base 18: mod_base = OTHER; note = 2'-O-methyladenosine-3'-phosphate
  modified_base 19: mod_base = OTHER; note = 2'-O-methyluridine-3'-phosphorothioate
  modified_base 20: mod_base = OTHER; note = 2'-O-methyluridine-3'-phosphorothioate
  modified_base 21: mod_base = OTHER; note = 2'-O-methyladenosine
agaaggcatattgagttatta

SEQ ID NO: 10971 - RNA, 21 nt, synthetic construct
  source 1..21: mol_type = other RNA
  modified_base 1: mod_base = OTHER; note = 2'-O-methyluridine-3'-phosphorothioate
  modified_base 2: mod_base = OTHER; note = 2'-O-methylguanosine-3'-phosphorothioate
  modified_base 3: mod_base = OTHER; note = 2'-O-methyluridine-3'-phosphate
  modified_base 4: mod_base = OTHER; note = 2'-O-methylguanosine-3'-phosphate
  modified_base 5: mod_base = OTHER; note = 2'-O-methylguanosine-3'-phosphate
  modified_base 6: mod_base = OTHER; note = 2'-O-docosanyl-uridine-3'-phosphate
  modified_base 7: mod_base = OTHER; note = 2'-deoxy-2'-fluorouridine-3'-phosphate
  modified_base 8: mod_base = OTHER; note = 2'-O-methyluridine-3'-phosphate
  modified_base 9: mod_base = OTHER; note = 2'-deoxy-2'-fluoroadenosine-3'-phosphate
  modified_base 10: mod_base = OTHER; note = 2'-deoxy-2'-fluoroguanosine-3'-phosphate
  modified_base 11: mod_base = OTHER; note = 2'-deoxy-2'-fluoroadenosine-3'-phosphate
  modified_base 12: mod_base = OTHER; note = 2'-O-methyladenosine-3'-phosphate
  modified_base 13: mod_base = OTHER; note = 2'-O-methylguanosine-3'-phosphate
  modified_base 14: mod_base = OTHER; note = 2'-O-methylguanosine-3'-phosphate
  modified_base 15: mod_base = OTHER; note = 2'-O-methylcytidine-3'-phosphate
  modified_base 16: mod_base = OTHER; note = 2'-O-methyladenosine-3'-phosphate
  modified_base 17: mod_base = OTHER; note = 2'-O-methyluridine-3'-phosphate
  modified_base 18: mod_base = OTHER; note = 2'-O-methyladenosine-3'-phosphate
  modified_base 19: mod_base = OTHER; note = 2'-O-methyluridine-3'-phosphorothioate
  modified_base 20: mod_base = OTHER; note = 2'-O-methyluridine-3'-phosphorothioate
  modified_base 21: mod_base = OTHER; note = 2'-O-methyladenosine
tgtggtttagaaggcatatta

SEQ ID NO: 10972 - RNA, 21 nt, synthetic construct
  source 1..21: mol_type = other RNA
  modified_base 1: mod_base = OTHER; note = 2'-O-methyluridine-3'-phosphorothioate
  modified_base 2: mod_base = OTHER; note = 2'-O-methyluridine-3'-phosphorothioate
  modified_base 3: mod_base = OTHER; note = 2'-O-methyluridine-3'-phosphate
  modified_base 4: mod_base = OTHER; note = 2'-O-methyladenosine-3'-phosphate
  modified_base 5: mod_base = OTHER; note = 2'-O-methylguanosine-3'-phosphate
  modified_base 6: mod_base = OTHER; note = 2'-O-docosanyl-adenosine-3'-phosphate
  modified_base 7: mod_base = OTHER; note = 2'-deoxy-2'-fluoroadenosine-3'-phosphate
  modified_base 8: mod_base = OTHER; note = 2'-O-methylguanosine-3'-phosphate
  modified_base 9: mod_base = OTHER; note = 2'-deoxy-2'-fluoroguanosine-3'-phosphate
  modified_base 10: mod_base = OTHER; note = 2'-deoxy-2'-fluorocytidine-3'-phosphate
  modified_base 11: mod_base = OTHER; note = 2'-deoxy-2'-fluoroadenosine-3'-phosphate
  modified_base 12: mod_base = OTHER; note = 2'-O-methyluridine-3'-phosphate
  modified_base 13: mod_base = OTHER; note = 2'-O-methyladenosine-3'-phosphate
  modified_base 14: mod_base = OTHER; note = 2'-O-methyluridine-3'-phosphate
  modified_base 15: mod_base = OTHER; note = 2'-O-methyluridine-3'-phosphate
  modified_base 16: mod_base = OTHER; note = 2'-O-methylguanosine-3'-phosphate
  modified_base 17: mod_base = OTHER; note = 2'-O-methyladenosine-3'-phosphate
  modified_base 18: mod_base = OTHER; note = 2'-O-methylguanosine-3'-phosphate
  modified_base 19: mod_base = OTHER; note = 2'-O-methyluridine-3'-phosphorothioate
  modified_base 20: mod_base = OTHER; note = 2'-O-methyluridine-3'-phosphorothioate
  modified_base 21: mod_base = OTHER; note = 2'-O-methyladenosine
tttagaaggcatattgagtta

SEQ ID NO: 10973 - RNA, 21 nt, synthetic construct
  source 1..21: mol_type = other RNA
  modified_base 1: mod_base = OTHER; note = 2'-O-methyluridine-3'-phosphorothioate
  modified_base 2: mod_base = OTHER; note = 2'-O-methyladenosine-3'-phosphorothioate
  modified_base 3: mod_base = OTHER; note = 2'-O-methylguanosine-3'-phosphate
  modified_base 4: mod_base = OTHER; note = 2'-O-methyladenosine-3'-phosphate
  modified_base 5: mod_base = OTHER; note = 2'-O-methyladenosine-3'-phosphate
  modified_base 6: mod_base = OTHER; note = 2'-O-docosanyl-guanosine-3'-phosphate
  modified_base 7: mod_base = OTHER; note = 2'-deoxy-2'-fluoroguanosine-3'-phosphate
  modified_base 8: mod_base = OTHER; note = 2'-O-methylcytidine-3'-phosphate
  modified_base 9: mod_base = OTHER; note = 2'-deoxy-2'-fluoroadenosine-3'-phosphate
  modified_base 10: mod_base = OTHER; note = 2'-deoxy-2'-fluorouridine-3'-phosphate
  modified_base 11: mod_base = OTHER; note = 2'-deoxy-2'-fluoroadenosine-3'-phosphate
  modified_base 12: mod_base = OTHER; note = 2'-O-methyluridine-3'-phosphate
  modified_base 13: mod_base = OTHER; note = 2'-O-methyluridine-3'-phosphate
  modified_base 14: mod_base = OTHER; note = 2'-O-methylguanosine-3'-phosphate
  modified_base 15: mod_base = OTHER; note = 2'-O-methyladenosine-3'-phosphate
  modified_base 16: mod_base = OTHER; note = 2'-O-methylguanosine-3'-phosphate
  modified_base 17: mod_base = OTHER; note = 2'-O-methyluridine-3'-phosphate
  modified_base 18: mod_base = OTHER; note = 2'-O-methyluridine-3'-phosphate
  modified_base 19: mod_base = OTHER; note = 2'-O-methyladenosine-3'-phosphorothioate
  modified_base 20: mod_base = OTHER; note = 2'-O-methyluridine-3'-phosphorothioate
  modified_base 21: mod_base = OTHER; note = 2'-O-methyladenosine
tagaaggcatattgagttata

SEQ ID NO: 10974 - RNA, 21 nt, synthetic construct
  source 1..21: mol_type = other RNA
  modified_base 1: mod_base = OTHER; note = 2'-O-methylcytidine-3'-phosphorothioate
  modified_base 2: mod_base = OTHER; note = 2'-O-methyladenosine-3'-phosphorothioate
  modified_base 3: mod_base = OTHER; note = 2'-O-methyluridine-3'-phosphate
  modified_base 4: mod_base = OTHER; note = 2'-O-methyladenosine-3'-phosphate
  modified_base 5: mod_base = OTHER; note = 2'-O-methyluridine-3'-phosphate
  modified_base 6: mod_base = OTHER; note = 2'-O-docosanyl-uridine-3'-phosphate
  modified_base 7: mod_base = OTHER; note = 2'-deoxy-2'-fluoroguanosine-3'-phosphate
  modified_base 8: mod_base = OTHER; note = 2'-O-methyladenosine-3'-phosphate
  modified_base 9: mod_base = OTHER; note = 2'-deoxy-2'-fluoroguanosine-3'-phosphate
  modified_base 10: mod_base = OTHER; note = 2'-deoxy-2'-fluorouridine-3'-phosphate
  modified_base 11: mod_base = OTHER; note = 2'-deoxy-2'-fluorouridine-3'-phosphate
  modified_base 12: mod_base = OTHER; note = 2'-O-methyladenosine-3'-phosphate
  modified_base 13: mod_base = OTHER; note = 2'-O-methyluridine-3'-phosphate
  modified_base 14: mod_base = OTHER; note = 2'-O-methyluridine-3'-phosphate
  modified_base 15: mod_base = OTHER; note = 2'-O-methyluridine-3'-phosphate
  modified_base 16: mod_base = OTHER; note = 2'-O-methyluridine-3'-phosphate
  modified_base 17: mod_base = OTHER; note = 2'-O-methylguanosine-3'-phosphate
  modified_base 18: mod_base = OTHER; note = 2'-O-methylcytidine-3'-phosphate
  modified_base 19: mod_base = OTHER; note = 2'-O-methyladenosine-3'-phosphorothioate
  modified_base 20: mod_base = OTHER; note = 2'-O-methylguanosine-3'-phosphorothioate
  modified_base 21: mod_base = OTHER; note = 2'-O-methyladenosine
catattgagttattttgcaga

SEQ ID NO: 10975 - RNA, 21 nt, synthetic construct
  source 1..21: mol_type = other RNA
  modified_base 1: mod_base = OTHER; note = 2'-O-methyluridine-3'-phosphorothioate
  modified_base 2: mod_base = OTHER; note = 2'-O-methyladenosine-3'-phosphorothioate
  modified_base 3: mod_base = OTHER; note = 2'-O-methyluridine-3'-phosphate
  modified_base 4: mod_base = OTHER; note = 2'-O-methyluridine-3'-phosphate
  modified_base 5: mod_base = OTHER; note = 2'-O-methyluridine-3'-phosphate
  modified_base 6: mod_base = OTHER; note = 2'-O-docosanyl-uridine-3'-phosphate
  modified_base 7: mod_base = OTHER; note = 2'-deoxy-2'-fluoroguanosine-3'-phosphate
  modified_base 8: mod_base = OTHER; note = 2'-O-methylcytidine-3'-phosphate
  modified_base 9: mod_base = OTHER; note = 2'-deoxy-2'-fluoroadenosine-3'-phosphate
  modified_base 10: mod_base = OTHER; note = 2'-deoxy-2'-fluoroguanosine-3'-phosphate
  modified_base 11: mod_base = OTHER; note = 2'-deoxy-2'-fluoroadenosine-3'-phosphate
  modified_base 12: mod_base = OTHER; note = 2'-O-methyladenosine-3'-phosphate
  modified_base 13: mod_base = OTHER; note = 2'-O-methyluridine-3'-phosphate
  modified_base 14: mod_base = OTHER; note = 2'-O-methylcytidine-3'-phosphate
  modified_base 15: mod_base = OTHER; note = 2'-O-methyladenosine-3'-phosphate
  modified_base 16: mod_base = OTHER; note = 2'-O-methyluridine-3'-phosphate
  modified_base 17: mod_base = OTHER; note = 2'-O-methyladenosine-3'-phosphate
  modified_base 18: mod_base = OTHER; note = 2'-O-methyladenosine-3'-phosphate
  modified_base 19: mod_base = OTHER; note = 2'-O-methyluridine-3'-phosphorothioate
  modified_base 20: mod_base = OTHER; note = 2'-O-methylguanosine-3'-phosphorothioate
  modified_base 21: mod_base = OTHER; note = 2'-O-methyladenosine
tattttgcagaatcataatga

SEQ ID NO: 10976 - RNA, 21 nt, synthetic construct
  source 1..21: mol_type = other RNA
  modified_base 1: mod_base = OTHER; note = 2'-O-methyladenosine-3'-phosphorothioate
  modified_base 2: mod_base = OTHER; note = 2'-O-methyluridine-3'-phosphorothioate
  modified_base 3: mod_base = OTHER; note = 2'-O-methyluridine-3'-phosphate
  modified_base 4: mod_base = OTHER; note = 2'-O-methyluridine-3'-phosphate
  modified_base 5: mod_base = OTHER; note = 2'-O-methyluridine-3'-phosphate
  modified_base 6: mod_base = OTHER; note = 2'-O-docosanyl-guanosine-3'-phosphate
  modified_base 7: mod_base = OTHER; note = 2'-deoxy-2'-fluorocytidine-3'-phosphate
  modified_base 8: mod_base = OTHER; note = 2'-O-methyladenosine-3'-phosphate
  modified_base 9: mod_base = OTHER; note = 2'-deoxy-2'-fluoroguanosine-3'-phosphate
  modified_base 10: mod_base = OTHER; note = 2'-deoxy-2'-fluoroadenosine-3'-phosphate
  modified_base 11: mod_base = OTHER; note = 2'-deoxy-2'-fluoroadenosine-3'-phosphate
  modified_base 12: mod_base = OTHER; note = 2'-O-methyluridine-3'-phosphate
  modified_base 13: mod_base = OTHER; note = 2'-O-methylcytidine-3'-phosphate
  modified_base 14: mod_base = OTHER; note = 2'-O-methyladenosine-3'-phosphate
  modified_base 15: mod_base = OTHER; note = 2'-O-methyluridine-3'-phosphate
  modified_base 16: mod_base = OTHER; note = 2'-O-methyladenosine-3'-phosphate
  modified_base 17: mod_base = OTHER; note = 2'-O-methyladenosine-3'-phosphate
  modified_base 18: mod_base = OTHER; note = 2'-O-methyluridine-3'-phosphate
  modified_base 19: mod_base = OTHER; note = 2'-O-methylguanosine-3'-phosphorothioate
  modified_base 20: mod_base = OTHER; note = 2'-O-methylguanosine-3'-phosphorothioate
  modified_base 21: mod_base = OTHER; note = 2'-O-methyladenosine
attttgcagaatcataatgga

SEQ ID NO: 10977 - RNA, 21 nt, synthetic construct
  source 1..21: mol_type = other RNA
  modified_base 1: mod_base = OTHER; note = 2'-O-methyluridine-3'-phosphorothioate
  modified_base 2: mod_base = OTHER; note = 2'-O-methyluridine-3'-phosphorothioate
  modified_base 3: mod_base = OTHER; note = 2'-O-methyluridine-3'-phosphate
  modified_base 4: mod_base = OTHER; note = 2'-O-methyluridine-3'-phosphate
  modified_base 5: mod_base = OTHER; note = 2'-O-methylguanosine-3'-phosphate
  modified_base 6: mod_base = OTHER; note = 2'-O-docosanyl-cytidine-3'-phosphate
  modified_base 7: mod_base = OTHER; note = 2'-deoxy-2'-fluoroadenosine-3'-phosphate
  modified_base 8: mod_base = OTHER; note = 2'-O-methylguanosine-3'-phosphate
  modified_base 9: mod_base = OTHER; note = 2'-deoxy-2'-fluoroadenosine-3'-phosphate
  modified_base 10: mod_base = OTHER; note = 2'-deoxy-2'-fluoroadenosine-3'-phosphate
  modified_base 11: mod_base = OTHER; note = 2'-deoxy-2'-fluorouridine-3'-phosphate
  modified_base 12: mod_base = OTHER; note = 2'-O-methylcytidine-3'-phosphate
  modified_base 13: mod_base = OTHER; note = 2'-O-methyladenosine-3'-phosphate
  modified_base 14: mod_base = OTHER; note = 2'-O-methyluridine-3'-phosphate
  modified_base 15: mod_base = OTHER; note = 2'-O-methyladenosine-3'-phosphate
  modified_base 16: mod_base = OTHER; note = 2'-O-methyladenosine-3'-phosphate
  modified_base 17: mod_base = OTHER; note = 2'-O-methyluridine-3'-phosphate
  modified_base 18: mod_base = OTHER; note = 2'-O-methylguanosine-3'-phosphate
  modified_base 19: mod_base = OTHER; note = 2'-O-methylguanosine-3'-phosphorothioate
  modified_base 20: mod_base = OTHER; note = 2'-O-methyladenosine-3'-phosphorothioate
  modified_base 21: mod_base = OTHER; note = 2'-O-methyladenosine
ttttgcagaatcataatggaa

SEQ ID NO: 10978 - RNA, 21 nt, synthetic construct
  source 1..21: mol_type = other RNA
  modified_base 1: mod_base = OTHER; note = 2'-O-methyluridine-3'-phosphorothioate
  modified_base 2: mod_base = OTHER; note = 2'-O-methyluridine-3'-phosphorothioate
  modified_base 3: mod_base = OTHER; note = 2'-O-methyluridine-3'-phosphate
  modified_base 4: mod_base = OTHER; note = 2'-O-methylguanosine-3'-phosphate
  modified_base 5: mod_base = OTHER; note = 2'-O-methylcytidine-3'-phosphate
  modified_base 6: mod_base = OTHER; note = 2'-O-docosanyl-adenosine-3'-phosphate
  modified_base 7: mod_base = OTHER; note = 2'-deoxy-2'-fluoroguanosine-3'-phosphate
  modified_base 8: mod_base = OTHER; note = 2'-O-methyladenosine-3'-phosphate
  modified_base 9: mod_base = OTHER; note = 2'-deoxy-2'-fluoroadenosine-3'-phosphate
  modified_base 10: mod_base = OTHER; note = 2'-deoxy-2'-fluorouridine-3'-phosphate
  modified_base 11: mod_base = OTHER; note = 2'-deoxy-2'-fluorocytidine-3'-phosphate
  modified_base 12: mod_base = OTHER; note = 2'-O-methyladenosine-3'-phosphate
  modified_base 13: mod_base = OTHER; note = 2'-O-methyluridine-3'-phosphate
  modified_base 14: mod_base = OTHER; note = 2'-O-methyladenosine-3'-phosphate
  modified_base 15: mod_base = OTHER; note = 2'-O-methyladenosine-3'-phosphate
  modified_base 16: mod_base = OTHER; note = 2'-O-methyluridine-3'-phosphate
  modified_base 17: mod_base = OTHER; note = 2'-O-methylguanosine-3'-phosphate
  modified_base 18: mod_base = OTHER; note = 2'-O-methylguanosine-3'-phosphate
  modified_base 19: mod_base = OTHER; note = 2'-O-methyladenosine-3'-phosphorothioate
  modified_base 20: mod_base = OTHER; note = 2'-O-methylcytidine-3'-phosphorothioate
  modified_base 21: mod_base = OTHER; note = 2'-O-methyladenosine
tttgcagaatcataatggaca

SEQ ID NO: 10979 - RNA, 21 nt, synthetic construct
  source 1..21: mol_type = other RNA
  modified_base 1: mod_base = OTHER; note = 2'-O-methyluridine-3'-phosphorothioate
  modified_base 2: mod_base = OTHER; note = 2'-O-methyluridine-3'-phosphorothioate
  modified_base 3: mod_base = OTHER; note = 2'-O-methylguanosine-3'-phosphate
  modified_base 4: mod_base = OTHER; note = 2'-O-methylcytidine-3'-phosphate
  modified_base 5: mod_base = OTHER; note = 2'-O-methyladenosine-3'-phosphate
  modified_base 6: mod_base = OTHER; note = 2'-O-docosanyl-guanosine-3'-phosphate
  modified_base 7: mod_base = OTHER; note = 2'-deoxy-2'-fluoroadenosine-3'-phosphate
  modified_base 8: mod_base = OTHER; note = 2'-O-methyladenosine-3'-phosphate
  modified_base 9: mod_base = OTHER; note = 2'-deoxy-2'-fluorouridine-3'-phosphate
  modified_base 10: mod_base = OTHER; note = 2'-deoxy-2'-fluorocytidine-3'-phosphate
  modified_base 11: mod_base = OTHER; note = 2'-deoxy-2'-fluoroadenosine-3'-phosphate
  modified_base 12: mod_base = OTHER; note = 2'-O-methyluridine-3'-phosphate
  modified_base 13: mod_base = OTHER; note = 2'-O-methyladenosine-3'-phosphate
  modified_base 14: mod_base = OTHER; note = 2'-O-methyladenosine-3'-phosphate
  modified_base 15: mod_base = OTHER; note = 2'-O-methyluridine-3'-phosphate
  modified_base 16: mod_base = OTHER; note = 2'-O-methylguanosine-3'-phosphate
  modified_base 17: mod_base = OTHER; note = 2'-O-methylguanosine-3'-phosphate
  modified_base 18: mod_base = OTHER; note = 2'-O-methyladenosine-3'-phosphate
  modified_base 19: mod_base = OTHER; note = 2'-O-methylcytidine-3'-phosphorothioate
  modified_base 20: mod_base = OTHER; note = 2'-O-methylcytidine-3'-phosphorothioate
  modified_base 21: mod_base = OTHER; note = 2'-O-methyladenosine
ttgcagaatcataatggacca

SEQ ID NO: 10980 - RNA, 21 nt, synthetic construct
  source 1..21: mol_type = other RNA
  modified_base 1: mod_base = OTHER; note = 2'-O-methyluridine-3'-phosphorothioate
  modified_base 2: mod_base = OTHER; note = 2'-O-methylguanosine-3'-phosphorothioate
  modified_base 3: mod_base = OTHER; note = 2'-O-methylcytidine-3'-phosphate
  modified_base 4: mod_base = OTHER; note = 2'-O-methyladenosine-3'-phosphate
  modified_base 5: mod_base = OTHER; note = 2'-O-methylguanosine-3'-phosphate
  modified_base 6: mod_base = OTHER; note = 2'-O-docosanyl-adenosine-3'-phosphate
  modified_base 7: mod_base = OTHER; note = 2'-deoxy-2'-fluoroadenosine-3'-phosphate
  modified_base 8: mod_base = OTHER; note = 2'-O-methyluridine-3'-phosphate
  modified_base 9: mod_base = OTHER; note = 2'-deoxy-2'-fluorocytidine-3'-phosphate
  modified_base 10: mod_base = OTHER; note = 2'-deoxy-2'-fluoroadenosine-3'-phosphate
  modified_base 11: mod_base = OTHER; note = 2'-deoxy-2'-fluorouridine-3'-phosphate
  modified_base 12: mod_base = OTHER; note = 2'-O-methyladenosine-3'-phosphate
  modified_base 13: mod_base = OTHER; note = 2'-O-methyladenosine-3'-phosphate
  modified_base 14: mod_base = OTHER; note = 2'-O-methyluridine-3'-phosphate
  modified_base 15: mod_base = OTHER; note = 2'-O-methylguanosine-3'-phosphate
  modified_base 16: mod_base = OTHER; note = 2'-O-methylguanosine-3'-phosphate
  modified_base 17: mod_base = OTHER; note = 2'-O-methyladenosine-3'-phosphate
  modified_base 18: mod_base = OTHER; note = 2'-O-methylcytidine-3'-phosphate
  modified_base 19: mod_base = OTHER; note = 2'-O-methylcytidine-3'-phosphorothioate
  modified_base 20: mod_base = OTHER; note = 2'-O-methylcytidine-3'-phosphorothioate
  modified_base 21: mod_base = OTHER; note = 2'-O-methyladenosine
tgcagaatcataatggaccca

SEQ ID NO: 10981 - RNA, 21 nt, synthetic construct
  source 1..21: mol_type = other RNA
  modified_base 1: mod_base = OTHER; note = 2'-O-methylguanosine-3'-phosphorothioate
  modified_base 2: mod_base = OTHER; note = 2'-O-methylcytidine-3'-phosphorothioate
  modified_base 3: mod_base = OTHER; note = 2'-O-methyladenosine-3'-phosphate
  modified_base 4: mod_base = OTHER; note = 2'-O-methylguanosine-3'-phosphate
  modified_base 5: mod_base = OTHER; note = 2'-O-methyladenosine-3'-phosphate
  modified_base 6: mod_base = OTHER; note = 2'-O-docosanyl-adenosine-3'-phosphate
  modified_base 7: mod_base = OTHER; note = 2'-deoxy-2'-fluorouridine-3'-phosphate
  modified_base 8: mod_base = OTHER; note = 2'-O-methylcytidine-3'-phosphate
  modified_base 9: mod_base = OTHER; note = 2'-deoxy-2'-fluoroadenosine-3'-phosphate
  modified_base 10: mod_base = OTHER; note = 2'-deoxy-2'-fluorouridine-3'-phosphate
  modified_base 11: mod_base = OTHER; note = 2'-deoxy-2'-fluoroadenosine-3'-phosphate
  modified_base 12: mod_base = OTHER; note = 2'-O-methyladenosine-3'-phosphate
  modified_base 13: mod_base = OTHER; note = 2'-O-methyluridine-3'-phosphate
  modified_base 14: mod_base = OTHER; note = 2'-O-methylguanosine-3'-phosphate
  modified_base 15: mod_base = OTHER; note = 2'-O-methylguanosine-3'-phosphate
  modified_base 16: mod_base = OTHER; note = 2'-O-methyladenosine-3'-phosphate
  modified_base 17: mod_base = OTHER; note = 2'-O-methylcytidine-3'-phosphate
  modified_base 18: mod_base = OTHER; note = 2'-O-methylcytidine-3'-phosphate
  modified_base 19: mod_base = OTHER; note = 2'-O-methylcytidine-3'-phosphorothioate
  modified_base 20: mod_base = OTHER; note = 2'-O-methylguanosine-3'-phosphorothioate
  modified_base 21: mod_base = OTHER; note = 2'-O-methyladenosine
gcagaatcataatggacccga

SEQ ID NO: 10982 - RNA, 21 nt, synthetic construct
  source 1..21: mol_type = other RNA
  modified_base 1: mod_base = OTHER; note = 2'-O-methylcytidine-3'-phosphorothioate
  modified_base 2: mod_base = OTHER; note = 2'-O-methyladenosine-3'-phosphorothioate
  modified_base 3: mod_base = OTHER; note = 2'-O-methylguanosine-3'-phosphate
  modified_base 4: mod_base = OTHER; note = 2'-O-methyladenosine-3'-phosphate
  modified_base 5: mod_base = OTHER; note = 2'-O-methyladenosine-3'-phosphate
  modified_base 6: mod_base = OTHER; note = 2'-O-docosanyl-uridine-3'-phosphate
  modified_base 7: mod_base = OTHER; note = 2'-deoxy-2'-fluorocytidine-3'-phosphate
  modified_base 8: mod_base = OTHER; note = 2'-O-methyladenosine-3'-phosphate
  modified_base 9: mod_base = OTHER; note = 2'-deoxy-2'-fluorouridine-3'-phosphate
  modified_base 10: mod_base = OTHER; note = 2'-deoxy-2'-fluoroadenosine-3'-phosphate
  modified_base 11: mod_base = OTHER; note = 2'-deoxy-2'-fluoroadenosine-3'-phosphate
  modified_base 12: mod_base = OTHER; note = 2'-O-methyluridine-3'-phosphate
  modified_base 13: mod_base = OTHER; note = 2'-O-methylguanosine-3'-phosphate
  modified_base 14: mod_base = OTHER; note = 2'-O-methylguanosine-3'-phosphate
  modified_base 15: mod_base = OTHER; note = 2'-O-methyladenosine-3'-phosphate
  modified_base 16: mod_base = OTHER; note = 2'-O-methylcytidine-3'-phosphate
  modified_base 17: mod_base = OTHER; note = 2'-O-methylcytidine-3'-phosphate
  modified_base 18: mod_base = OTHER; note = 2'-O-methylcytidine-3'-phosphate
  modified_base 19: mod_base = OTHER; note = 2'-O-methylguanosine-3'-phosphorothioate
  modified_base 20: mod_base = OTHER; note = 2'-O-methylcytidine-3'-phosphorothioate
  modified_base 21: mod_base = OTHER; note = 2'-O-methyladenosine
cagaatcataatggacccgca

SEQ ID NO: 10983 - RNA, 21 nt, synthetic construct
  source 1..21: mol_type = other RNA
  modified_base 1: mod_base = OTHER; note = 2'-O-methyladenosine-3'-phosphorothioate
  modified_base 2: mod_base = OTHER; note = 2'-O-methylguanosine-3'-phosphorothioate
  modified_base 3: mod_base = OTHER; note = 2'-O-methyladenosine-3'-phosphate
  modified_base 4: mod_base = OTHER; note = 2'-O-methyladenosine-3'-phosphate
  modified_base 5: mod_base = OTHER; note = 2'-O-methyluridine-3'-phosphate
  modified_base 6: mod_base = OTHER; note = 2'-O-docosanyl-cytidine-3'-phosphate
  modified_base 7: mod_base = OTHER; note = 2'-deoxy-2'-fluoroadenosine-3'-phosphate
  modified_base 8: mod_base = OTHER; note = 2'-O-methyluridine-3'-phosphate
  modified_base 9: mod_base = OTHER; note = 2'-deoxy-2'-fluoroadenosine-3'-phosphate
  modified_base 10: mod_base = OTHER; note = 2'-deoxy-2'-fluoroadenosine-3'-phosphate
  modified_base 11: mod_base = OTHER; note = 2'-deoxy-2'-fluorouridine-3'-phosphate
  modified_base 12: mod_base = OTHER; note = 2'-O-methylguanosine-3'-phosphate
  modified_base 13: mod_base = OTHER; note = 2'-O-methylguanosine-3'-phosphate
  modified_base 14: mod_base = OTHER; note = 2'-O-methyladenosine-3'-phosphate
  modified_base 15: mod_base = OTHER; note = 2'-O-methylcytidine-3'-phosphate
  modified_base 16: mod_base = OTHER; note = 2'-O-methylcytidine-3'-phosphate
  modified_base 17: mod_base = OTHER; note = 2'-O-methylcytidine-3'-phosphate
  modified_base 18: mod_base = OTHER; note = 2'-O-methylguanosine-3'-phosphate
  modified_base 19: mod_base = OTHER; note = 2'-O-methylcytidine-3'-phosphorothioate
  modified_base 20: mod_base = OTHER; note = 2'-O-methyladenosine-3'-phosphorothioate
  modified_base 21: mod_base = OTHER; note = 2'-O-methyladenosine
agaatcataatggacccgcaa

SEQ ID NO: 10984 - RNA, 21 nt, synthetic construct
  source 1..21: mol_type = other RNA
  modified_base 1: mod_base = OTHER; note = 2'-O-methylguanosine-3'-phosphorothioate
  modified_base 2: mod_base = OTHER; note = 2'-O-methyladenosine-3'-phosphorothioate
  modified_base 3: mod_base = OTHER; note = 2'-O-methyladenosine-3'-phosphate
  modified_base 4: mod_base = OTHER; note = 2'-O-methyluridine-3'-phosphate
  modified_base 5: mod_base = OTHER; note = 2'-O-methylcytidine-3'-phosphate
  modified_base 6: mod_base = OTHER; note = 2'-O-docosanyl-adenosine-3'-phosphate
  modified_base 7: mod_base = OTHER; note = 2'-deoxy-2'-fluorouridine-3'-phosphate
  modified_base 8: mod_base = OTHER; note = 2'-O-methyladenosine-3'-phosphate
  modified_base 9: mod_base = OTHER; note = 2'-deoxy-2'-fluoroadenosine-3'-phosphate
  modified_base 10: mod_base = OTHER; note = 2'-deoxy-2'-fluorouridine-3'-phosphate
  modified_base 11: mod_base = OTHER; note = 2'-deoxy-2'-fluoroguanosine-3'-phosphate
  modified_base 12: mod_base = OTHER; note = 2'-O-methylguanosine-3'-phosphate
  modified_base 13: mod_base = OTHER; note = 2'-O-methyladenosine-3'-phosphate
  modified_base 14: mod_base = OTHER; note = 2'-O-methylcytidine-3'-phosphate
  modified_base 15: mod_base = OTHER; note = 2'-O-methylcytidine-3'-phosphate
  modified_base 16: mod_base = OTHER; note = 2'-O-methylcytidine-3'-phosphate
  modified_base 17: mod_base = OTHER; note = 2'-O-methylguanosine-3'-phosphate
  modified_base 18: mod_base = OTHER; note = 2'-O-methylcytidine-3'-phosphate
  modified_base 19: mod_base = OTHER; note = 2'-O-methyladenosine-3'-phosphorothioate
  modified_base 20: mod_base = OTHER; note = 2'-O-methylcytidine-3'-phosphorothioate
  modified_base 21: mod_base = OTHER; note = 2'-O-methyladenosine
gaatcataatggacccgcaca

SEQ ID NO: 10985 - RNA, 21 nt, synthetic construct
  source 1..21: mol_type = other RNA
  modified_base 1: mod_base = OTHER; note = 2'-O-methyladenosine-3'-phosphorothioate
  modified_base 2: mod_base = OTHER; note = 2'-O-methyladenosine-3'-phosphorothioate
  modified_base 3: mod_base = OTHER; note = 2'-O-methyluridine-3'-phosphate
  modified_base 4: mod_base = OTHER; note = 2'-O-methylcytidine-3'-phosphate
  modified_base 5: mod_base = OTHER; note = 2'-O-methyladenosine-3'-phosphate
  modified_base 6: mod_base = OTHER; note = 2'-O-docosanyl-uridine-3'-phosphate
  modified_base 7: mod_base = OTHER; note = 2'-deoxy-2'-fluoroadenosine-3'-phosphate
  modified_base 8: mod_base = OTHER; note = 2'-O-methyladenosine-3'-phosphate
  modified_base 9: mod_base = OTHER; note = 2'-deoxy-2'-fluorouridine-3'-phosphate
  modified_base 10: mod_base = OTHER; note = 2'-deoxy-2'-fluoroguanosine-3'-phosphate
  modified_base 11: mod_base = OTHER; note = 2'-deoxy-2'-fluoroguanosine-3'-phosphate
  modified_base 12: mod_base = OTHER; note = 2'-O-methyladenosine-3'-phosphate
  modified_base 13: mod_base = OTHER; note = 2'-O-methylcytidine-3'-phosphate
  modified_base 14: mod_base = OTHER; note = 2'-O-methylcytidine-3'-phosphate
  modified_base 15: mod_base = OTHER; note = 2'-O-methylcytidine-3'-phosphate
  modified_base 16: mod_base = OTHER; note = 2'-O-methylguanosine-3'-phosphate
  modified_base 17: mod_base = OTHER; note = 2'-O-methylcytidine-3'-phosphate
  modified_base 18: mod_base = OTHER; note = 2'-O-methyladenosine-3'-phosphate
  modified_base 19: mod_base = OTHER; note = 2'-O-methylcytidine-3'-phosphorothioate
  modified_base 20: mod_base = OTHER; note = 2'-O-methyladenosine-3'-phosphorothioate
  modified_base 21: mod_base = OTHER; note = 2'-O-methyladenosine
aatcataatggacccgcacaa

SEQ ID NO: 10986 - RNA, 21 nt, synthetic construct
  source 1..21: mol_type = other RNA
  modified_base 1: mod_base = OTHER; note = 2'-O-methyladenosine-3'-phosphorothioate
  modified_base 2: mod_base = OTHER; note = 2'-O-methyluridine-3'-phosphorothioate
  modified_base 3: mod_base = OTHER; note = 2'-O-methylcytidine-3'-phosphate
  modified_base 4: mod_base = OTHER; note = 2'-O-methyladenosine-3'-phosphate
  modified_base 5: mod_base = OTHER; note = 2'-O-methyluridine-3'-phosphate
  modified_base 6: mod_base = OTHER; note = 2'-O-docosanyl-adenosine-3'-phosphate
  modified_base 7: mod_base = OTHER; note = 2'-deoxy-2'-fluoroadenosine-3'-phosphate
  modified_base 8: mod_base = OTHER; note = 2'-O-methyluridine-3'-phosphate
  modified_base 9: mod_base = OTHER; note = 2'-deoxy-2'-fluoroguanosine-3'-phosphate
  modified_base 10: mod_base = OTHER; note = 2'-deoxy-2'-fluoroguanosine-3'-phosphate
  modified_base 11: mod_base = OTHER; note = 2'-deoxy-2'-fluoroadenosine-3'-phosphate
  modified_base 12: mod_base = OTHER; note = 2'-O-methylcytidine-3'-phosphate
  modified_base 13: mod_base = OTHER; note = 2'-O-methylcytidine-3'-phosphate
  modified_base 14: mod_base = OTHER; note = 2'-O-methylcytidine-3'-phosphate
  modified_base 15: mod_base = OTHER; note = 2'-O-methylguanosine-3'-phosphate
  modified_base 16: mod_base = OTHER; note = 2'-O-methylcytidine-3'-phosphate
  modified_base 17: mod_base = OTHER; note = 2'-O-methyladenosine-3'-phosphate
  modified_base 18: mod_base = OTHER; note = 2'-O-methylcytidine-3'-phosphate
  modified_base 19: mod_base = OTHER; note = 2'-O-methyladenosine-3'-phosphorothioate
  modified_base 20: mod_base = OTHER; note = 2'-O-methyladenosine-3'-phosphorothioate
  modified_base 21: mod_base = OTHER; note = 2'-O-methyladenosine
atcataatggacccgcacaaa

SEQ ID NO: 10987 - RNA, 21 nt, synthetic construct
  source 1..21: mol_type = other RNA
  modified_base 1: mod_base = OTHER; note = 2'-O-methyluridine-3'-phosphorothioate
  modified_base 2: mod_base = OTHER; note = 2'-O-methylcytidine-3'-phosphorothioate
  modified_base 3: mod_base = OTHER; note = 2'-O-methyladenosine-3'-phosphate
  modified_base 4: mod_base = OTHER; note = 2'-O-methyluridine-3'-phosphate
  modified_base 5: mod_base = OTHER; note = 2'-O-methyladenosine-3'-phosphate
  modified_base 6: mod_base = OTHER; note = 2'-O-docosanyl-adenosine-3'-phosphate
  modified_base 7: mod_base = OTHER; note = 2'-deoxy-2'-fluorouridine-3'-phosphate
  modified_base 8: mod_base = OTHER; note = 2'-O-methylguanosine-3'-phosphate
  modified_base 9: mod_base = OTHER; note = 2'-deoxy-2'-fluoroguanosine-3'-phosphate
  modified_base 10: mod_base = OTHER; note = 2'-deoxy-2'-fluoroadenosine-3'-phosphate
  modified_base 11: mod_base = OTHER; note = 2'-deoxy-2'-fluorocytidine-3'-phosphate
  modified_base 12: mod_base = OTHER; note = 2'-O-methylcytidine-3'-phosphate
  modified_base 13: mod_base = OTHER; note = 2'-O-methylcytidine-3'-phosphate
  modified_base 14: mod_base = OTHER; note = 2'-O-methylguanosine-3'-phosphate
  modified_base 15: mod_base = OTHER; note = 2'-O-methylcytidine-3'-phosphate
  modified_base 16: mod_base = OTHER; note = 2'-O-methyladenosine-3'-phosphate
  modified_base 17: mod_base = OTHER; note = 2'-O-methylcytidine-3'-phosphate
  modified_base 18: mod_base = OTHER; note = 2'-O-methyladenosine-3'-phosphate
  modified_base 19: mod_base = OTHER; note = 2'-O-methyladenosine-3'-phosphorothioate
  modified_base 20: mod_base = OTHER; note = 2'-O-methyladenosine-3'-phosphorothioate
  modified_base 21: mod_base = OTHER; note = 2'-O-methyladenosine
tcataatggacccgcacaaaa

SEQ ID NO: 10988 - RNA, 21 nt, synthetic construct
  source 1..21: mol_type = other RNA
  modified_base 1: mod_base = OTHER; note = 2'-O-methylcytidine-3'-phosphorothioate
  modified_base 2: mod_base = OTHER; note = 2'-O-methyladenosine-3'-phosphorothioate
  modified_base 3: mod_base = OTHER; note = 2'-O-methyluridine-3'-phosphate
  modified_base 4: mod_base = OTHER; note = 2'-O-methyladenosine-3'-phosphate
  modified_base 5: mod_base = OTHER; note = 2'-O-methyladenosine-3'-phosphate
  modified_base 6: mod_base = OTHER; note = 2'-O-docosanyl-uridine-3'-phosphate
  modified_base 7: mod_base = OTHER; note = 2'-deoxy-2'-fluoroguanosine-3'-phosphate
  modified_base 8: mod_base = OTHER; note = 2'-O-methylguanosine-3'-phosphate
  modified_base 9: mod_base = OTHER; note = 2'-deoxy-2'-fluoroadenosine-3'-phosphate
  modified_base 10: mod_base = OTHER; note = 2'-deoxy-2'-fluorocytidine-3'-phosphate
  modified_base 11: mod_base = OTHER; note = 2'-deoxy-2'-fluorocytidine-3'-phosphate
  modified_base 12: mod_base = OTHER; note = 2'-O-methylcytidine-3'-phosphate
  modified_base 13: mod_base = OTHER; note = 2'-O-methylguanosine-3'-phosphate
  modified_base 14: mod_base = OTHER; note = 2'-O-methylcytidine-3'-phosphate
  modified_base 15: mod_base = OTHER; note = 2'-O-methyladenosine-3'-phosphate
  modified_base 16: mod_base = OTHER; note = 2'-O-methylcytidine-3'-phosphate
  modified_base 17: mod_base = OTHER; note = 2'-O-methyladenosine-3'-phosphate
  modified_base 18: mod_base = OTHER; note = 2'-O-methyladenosine-3'-phosphate
  modified_base 19: mod_base = OTHER; note = 2'-O-methyladenosine-3'-phosphorothioate
  modified_base 20: mod_base = OTHER; note = 2'-O-methyladenosine-3'-phosphorothioate
  modified_base 21: mod_base = OTHER; note = 2'-O-methyladenosine
cataatggacccgcacaaaaa

SEQ ID NO: 10989 - RNA, 21 nt, synthetic construct
  source 1..21: mol_type = other RNA
  modified_base 1: mod_base = OTHER; note = 2'-O-methyladenosine-3'-phosphorothioate
  modified_base 2: mod_base = OTHER; note = 2'-O-methyluridine-3'-phosphorothioate
  modified_base 3: mod_base = OTHER; note = 2'-O-methyladenosine-3'-phosphate
  modified_base 4: mod_base = OTHER; note = 2'-O-methyladenosine-3'-phosphate
  modified_base 5: mod_base = OTHER; note = 2'-O-methyluridine-3'-phosphate
  modified_base 6: mod_base = OTHER; note = 2'-O-docosanyl-guanosine-3'-phosphate
  modified_base 7: mod_base = OTHER; note = 2'-deoxy-2'-fluoroguanosine-3'-phosphate
  modified_base 8: mod_base = OTHER; note = 2'-O-methyladenosine-3'-phosphate
  modified_base 9: mod_base = OTHER; note = 2'-deoxy-2'-fluorocytidine-3'-phosphate
  modified_base 10: mod_base = OTHER; note = 2'-deoxy-2'-fluorocytidine-3'-phosphate
  modified_base 11: mod_base = OTHER; note = 2'-deoxy-2'-fluorocytidine-3'-phosphate
  modified_base 12: mod_base = OTHER; note = 2'-O-methylguanosine-3'-phosphate
  modified_base 13: mod_base = OTHER; note = 2'-O-methylcytidine-3'-phosphate
  modified_base 14: mod_base = OTHER; note = 2'-O-methyladenosine-3'-phosphate
  modified_base 15: mod_base = OTHER; note = 2'-O-methylcytidine-3'-phosphate
  modified_base 16: mod_base = OTHER; note = 2'-O-methyladenosine-3'-phosphate
  modified_base 17: mod_base = OTHER; note = 2'-O-methyladenosine-3'-phosphate
  modified_base 18: mod_base = OTHER; note = 2'-O-methyladenosine-3'-phosphate
  modified_base 19: mod_base = OTHER; note = 2'-O-methyladenosine-3'-phosphorothioate
  modified_base 20: mod_base = OTHER; note = 2'-O-methyluridine-3'-phosphorothioate
  modified_base 21: mod_base = OTHER; note = 2'-O-methyladenosine
ataatggacccgcacaaaata

SEQ ID NO: 10990 - RNA, 21 nt, synthetic construct
  source 1..21: mol_type = other RNA
  modified_base 1: mod_base = OTHER; note = 2'-O-methyladenosine-3'-phosphorothioate
  modified_base 2: mod_base = OTHER; note = 2'-O-methyluridine-3'-phosphorothioate
  modified_base 3: mod_base = OTHER; note = 2'-O-methylcytidine-3'-phosphate
  modified_base 4: mod_base = OTHER; note = 2'-O-methyluridine-3'-phosphate
  modified_base 5: mod_base = OTHER; note = 2'-O-methylcytidine-3'-phosphate
  modified_base 6: mod_base = OTHER; note = 2'-O-docosanyl-adenosine-3'-phosphate
  modified_base 7: mod_base = OTHER; note = 2'-deoxy-2'-fluoroguanosine-3'-phosphate
  modified_base 8: mod_base = OTHER; note = 2'-O-methyladenosine-3'-phosphate
  modified_base 9: mod_base = OTHER; note = 2'-deoxy-2'-fluoroadenosine-3'-phosphate
  modified_base 10: mod_base = OTHER; note = 2'-deoxy-2'-fluorocytidine-3'-phosphate
  modified_base 11: mod_base = OTHER; note = 2'-deoxy-2'-fluorocytidine-3'-phosphate
  modified_base 12: mod_base = OTHER; note = 2'-O-methyladenosine-3'-phosphate
  modified_base 13: mod_base = OTHER; note = 2'-O-methyluridine-3'-phosphate
  modified_base 14: mod_base = OTHER; note = 2'-O-methyladenosine-3'-phosphate
  modified_base 15: mod_base = OTHER; note = 2'-O-methyluridine-3'-phosphate
  modified_base 16: mod_base = OTHER; note = 2'-O-methylcytidine-3'-phosphate
  modified_base 17: mod_base = OTHER; note = 2'-O-methyluridine-3'-phosphate
  modified_base 18: mod_base = OTHER; note = 2'-O-methylguanosine-3'-phosphate
  modified_base 19: mod_base = OTHER; note = 2'-O-methyluridine-3'-phosphorothioate
  modified_base 20: mod_base = OTHER; note = 2'-O-methyluridine-3'-phosphorothioate
  modified_base 21: mod_base = OTHER; note = 2'-O-methyladenosine
atctcagaaccatatctgtta

SEQ ID NO: 10991 - RNA, 21 nt, synthetic construct
  source 1..21: mol_type = other RNA
  modified_base 1: mod_base = OTHER; note = 2'-O-methyluridine-3'-phosphorothioate
  modified_base 2: mod_base = OTHER; note = 2'-O-methylguanosine-3'-phosphorothioate
  modified_base 3: mod_base = OTHER; note = 2'-O-methyladenosine-3'-phosphate
  modified_base 4: mod_base = OTHER; note = 2'-O-methylcytidine-3'-phosphate
  modified_base 5: mod_base = OTHER; note = 2'-O-methyladenosine-3'-phosphate
  modified_base 6: mod_base = OTHER; note = 2'-O-docosanyl-uridine-3'-phosphate
  modified_base 7: mod_base = OTHER; note = 2'-deoxy-2'-fluorouridine-3'-phosphate
  modified_base 8: mod_base = OTHER; note = 2'-O-methyluridine-3'-phosphate
  modified_base 9: mod_base = OTHER; note = 2'-deoxy-2'-fluorouridine-3'-phosphate
  modified_base 10: mod_base = OTHER; note = 2'-deoxy-2'-fluorouridine-3'-phosphate
  modified_base 11: mod_base = OTHER; note = 2'-deoxy-2'-fluorouridine-3'-phosphate
  modified_base 12: mod_base = OTHER; note = 2'-O-methylcytidine-3'-phosphate
  modified_base 13: mod_base = OTHER; note = 2'-O-methyluridine-3'-phosphate
  modified_base 14: mod_base = OTHER; note = 2'-O-methylcytidine-3'-phosphate
  modified_base 15: mod_base = OTHER; note = 2'-O-methyladenosine-3'-phosphate
  modified_base 16: mod_base = OTHER; note = 2'-O-methyluridine-3'-phosphate
  modified_base 17: mod_base = OTHER; note = 2'-O-methyladenosine-3'-phosphate
  modified_base 18: mod_base = OTHER; note = 2'-O-methylguanosine-3'-phosphate
  modified_base 19: mod_base = OTHER; note = 2'-O-methyladenosine-3'-phosphorothioate
  modified_base 20: mod_base = OTHER; note = 2'-O-methyladenosine-3'-phosphorothioate
  modified_base 21: mod_base = OTHER; note = 2'-O-methyladenosine
tgacattttttctcatagaaa

SEQ ID NO: 10992 - RNA, 21 nt, synthetic construct
  source 1..21: mol_type = other RNA
  modified_base 1: mod_base = OTHER; note = 2'-O-methyluridine-3'-phosphorothioate
  modified_base 2: mod_base = OTHER; note = 2'-O-methyladenosine-3'-phosphorothioate
  modified_base 3: mod_base = OTHER; note = 2'-O-methyladenosine-3'-phosphate
  modified_base 4: mod_base = OTHER; note = 2'-O-methyluridine-3'-phosphate
  modified_base 5: mod_base = OTHER; note = 2'-O-methylguanosine-3'-phosphate
  modified_base 6: mod_base = OTHER; note = 2'-O-docosanyl-guanosine-3'-phosphate
  modified_base 7: mod_base = OTHER; note = 2'-deoxy-2'-fluoroadenosine-3'-phosphate
  modified_base 8: mod_base = OTHER; note = 2'-O-methylcytidine-3'-phosphate
  modified_base 9: mod_base = OTHER; note = 2'-deoxy-2'-fluorocytidine-3'-phosphate
  modified_base 10: mod_base = OTHER; note = 2'-deoxy-2'-fluorocytidine-3'-phosphate
  modified_base 11: mod_base = OTHER; note = 2'-deoxy-2'-fluoroguanosine-3'-phosphate
  modified_base 12: mod_base = OTHER; note = 2'-O-methylcytidine-3'-phosphate
  modified_base 13: mod_base = OTHER; note = 2'-O-methyladenosine-3'-phosphate
  modified_base 14: mod_base = OTHER; note = 2'-O-methylcytidine-3'-phosphate
  modified_base 15: mod_base = OTHER; note = 2'-O-methyladenosine-3'-phosphate
  modified_base 16: mod_base = OTHER; note = 2'-O-methyladenosine-3'-phosphate
  modified_base 17: mod_base = OTHER; note = 2'-O-methyladenosine-3'-phosphate
  modified_base 18: mod_base = OTHER; note = 2'-O-methyladenosine-3'-phosphate
  modified_base 19: mod_base = OTHER; note = 2'-O-methyluridine-3'-phosphorothioate
  modified_base 20: mod_base = OTHER; note = 2'-O-methylcytidine-3'-phosphorothioate
  modified_base 21: mod_base = OTHER; note = 2'-O-methyladenosine
taatggacccgcacaaaatca

SEQ ID NO: 10993 - RNA, 21 nt, synthetic construct
  source 1..21: mol_type = other RNA
  modified_base 1: mod_base = OTHER; note = 2'-O-methyladenosine-3'-phosphorothioate
  modified_base 2: mod_base = OTHER; note = 2'-O-methyladenosine-3'-phosphorothioate
  modified_base 3: mod_base = OTHER; note = 2'-O-methyluridine-3'-phosphate
  modified_base 4: mod_base = OTHER; note = 2'-O-methylguanosine-3'-phosphate
  modified_base 5: mod_base = OTHER; note = 2'-O-methylguanosine-3'-phosphate
  modified_base 6: mod_base = OTHER; note = 2'-O-docosanyl-adenosine-3'-phosphate
  modified_base 7: mod_base = OTHER; note = 2'-deoxy-2'-fluorocytidine-3'-phosphate
  modified_base 8: mod_base = OTHER; note = 2'-O-methylcytidine-3'-phosphate
  modified_base 9: mod_base = OTHER; note = 2'-deoxy-2'-fluorocytidine-3'-phosphate
  modified_base 10: mod_base = OTHER; note = 2'-deoxy-2'-fluoroguanosine-3'-phosphate
  modified_base 11: mod_base = OTHER; note = 2'-deoxy-2'-fluorocytidine-3'-phosphate
  modified_base 12: mod_base = OTHER; note = 2'-O-methyladenosine-3'-phosphate
  modified_base 13: mod_base = OTHER; note = 2'-O-methylcytidine-3'-phosphate
  modified_base 14: mod_base = OTHER; note = 2'-O-methyladenosine-3'-phosphate
  modified_base 15: mod_base = OTHER; note = 2'-O-methyladenosine-3'-phosphate
  modified_base 16: mod_base = OTHER; note = 2'-O-methyladenosine-3'-phosphate
  modified_base 17: mod_base = OTHER; note = 2'-O-methyladenosine-3'-phosphate
  modified_base 18: mod_base = OTHER; note = 2'-O-methyluridine-3'-phosphate
  modified_base 19: mod_base = OTHER; note = 2'-O-methylcytidine-3'-phosphorothioate
  modified_base 20: mod_base = OTHER; note = 2'-O-methyluridine-3'-phosphorothioate
  modified_base 21: mod_base = OTHER; note = 2'-O-methyladenosine
aatggacccgcacaaaatcta

SEQ ID NO: 10994 - RNA, 21 nt, synthetic construct
  source 1..21: mol_type = other RNA
  modified_base 1: mod_base = OTHER; note = 2'-O-methyladenosine-3'-phosphorothioate
  modified_base 2: mod_base = OTHER; note = 2'-O-methyluridine-3'-phosphorothioate
  modified_base 3: mod_base = OTHER; note = 2'-O-methylguanosine-3'-phosphate
  modified_base 4: mod_base = OTHER; note = 2'-O-methylguanosine-3'-phosphate
  modified_base 5: mod_base = OTHER; note = 2'-O-methyladenosine-3'-phosphate
  modified_base 6: mod_base = OTHER; note = 2'-O-docosanyl-cytidine-3'-phosphate
  modified_base 7: mod_base = OTHER; note = 2'-deoxy-2'-fluorocytidine-3'-phosphate
  modified_base 8: mod_base = OTHER; note = 2'-O-methylcytidine-3'-phosphate
  modified_base 9: mod_base = OTHER; note = 2'-deoxy-2'-fluoroguanosine-3'-phosphate
  modified_base 10: mod_base = OTHER; note = 2'-deoxy-2'-fluorocytidine-3'-phosphate
  modified_base 11: mod_base = OTHER; note = 2'-deoxy-2'-fluoroadenosine-3'-phosphate
  modified_base 12: mod_base = OTHER; note = 2'-O-methylcytidine-3'-phosphate
  modified_base 13: mod_base = OTHER; note = 2'-O-methyladenosine-3'-phosphate
  modified_base 14: mod_base = OTHER; note = 2'-O-methyladenosine-3'-phosphate
  modified_base 15: mod_base = OTHER; note = 2'-O-methyladenosine-3'-phosphate
  modified_base 16: mod_base = OTHER; note = 2'-O-methyladenosine-3'-phosphate
  modified_base 17: mod_base = OTHER; note = 2'-O-methyluridine-3'-phosphate
  modified_base 18: mod_base = OTHER; note = 2'-O-methylcytidine-3'-phosphate
  modified_base 19: mod_base = OTHER; note = 2'-O-methyluridine-3'-phosphorothioate
  modified_base 20: mod_base = OTHER; note = 2'-O-methylcytidine-3'-phosphorothioate
  modified_base 21: mod_base = OTHER; note = 2'-O-methyladenosine
atggacccgcacaaaatctca

SEQ ID NO: 10995 - RNA, 21 nt, synthetic construct
  source 1..21: mol_type = other RNA
  modified_base 1: mod_base = OTHER; note = 2'-O-methyluridine-3'-phosphorothioate
  modified_base 2: mod_base = OTHER; note = 2'-O-methylguanosine-3'-phosphorothioate
  modified_base 3: mod_base = OTHER; note = 2'-O-methylguanosine-3'-phosphate
  modified_base 4: mod_base = OTHER; note = 2'-O-methyladenosine-3'-phosphate
  modified_base 5: mod_base = OTHER; note = 2'-O-methylcytidine-3'-phosphate
  modified_base 6: mod_base = OTHER; note = 2'-O-docosanyl-cytidine-3'-phosphate
  modified_base 7: mod_base = OTHER; note = 2'-deoxy-2'-fluorocytidine-3'-phosphate
  modified_base 8: mod_base = OTHER; note = 2'-O-methylguanosine-3'-phosphate
  modified_base 9: mod_base = OTHER; note = 2'-deoxy-2'-fluorocytidine-3'-phosphate
  modified_base 10: mod_base = OTHER; note = 2'-deoxy-2'-fluoroadenosine-3'-phosphate
  modified_base 11: mod_base = OTHER; note = 2'-deoxy-2'-fluorocytidine-3'-phosphate
  modified_base 12: mod_base = OTHER; note = 2'-O-methyladenosine-3'-phosphate
  modified_base 13: mod_base = OTHER; note = 2'-O-methyladenosine-3'-phosphate
  modified_base 14: mod_base = OTHER; note = 2'-O-methyladenosine-3'-phosphate
  modified_base 15: mod_base = OTHER; note = 2'-O-methyladenosine-3'-phosphate
  modified_base 16: mod_base = OTHER; note = 2'-O-methyluridine-3'-phosphate
  modified_base 17: mod_base = OTHER; note = 2'-O-methylcytidine-3'-phosphate
  modified_base 18: mod_base = OTHER; note = 2'-O-methyluridine-3'-phosphate
  modified_base 19: mod_base = OTHER; note = 2'-O-methylcytidine-3'-phosphorothioate
  modified_base 20: mod_base = OTHER; note = 2'-O-methyladenosine-3'-phosphorothioate
  modified_base 21: mod_base = OTHER; note = 2'-O-methyladenosine
tggacccgcacaaaatctcaa

SEQ ID NO: 10996 - RNA, 21 nt, synthetic construct
  source 1..21: mol_type = other RNA
  modified_base 1: mod_base = OTHER; note = 2'-O-methylguanosine-3'-phosphorothioate
  modified_base 2: mod_base = OTHER; note = 2'-O-methylguanosine-3'-phosphorothioate
  modified_base 3: mod_base = OTHER; note = 2'-O-methyladenosine-3'-phosphate
  modified_base 4: mod_base = OTHER; note = 2'-O-methylcytidine-3'-phosphate
  modified_base 5: mod_base = OTHER; note = 2'-O-methylcytidine-3'-phosphate
  modified_base 6: mod_base = OTHER; note = 2'-O-docosanyl-cytidine-3'-phosphate
  modified_base 7: mod_base = OTHER; note = 2'-deoxy-2'-fluoroguanosine-3'-phosphate
  modified_base 8: mod_base = OTHER; note = 2'-O-methylcytidine-3'-phosphate
  modified_base 9: mod_base = OTHER; note = 2'-deoxy-2'-fluoroadenosine-3'-phosphate
  modified_base 10: mod_base = OTHER; note = 2'-deoxy-2'-fluorocytidine-3'-phosphate
  modified_base 11: mod_base = OTHER; note = 2'-deoxy-2'-fluoroadenosine-3'-phosphate
  modified_base 12: mod_base = OTHER; note = 2'-O-methyladenosine-3'-phosphate
  modified_base 13: mod_base = OTHER; note = 2'-O-methyladenosine-3'-phosphate
  modified_base 14: mod_base = OTHER; note = 2'-O-methyladenosine-3'-phosphate
  modified_base 15: mod_base = OTHER; note = 2'-O-methyluridine-3'-phosphate
  modified_base 16: mod_base = OTHER; note = 2'-O-methylcytidine-3'-phosphate
  modified_base 17: mod_base = OTHER; note = 2'-O-methyluridine-3'-phosphate
  modified_base 18: mod_base = OTHER; note = 2'-O-methylcytidine-3'-phosphate
  modified_base 19: mod_base = OTHER; note = 2'-O-methyladenosine-3'-phosphorothioate
  modified_base 20: mod_base = OTHER; note = 2'-O-methylguanosine-3'-phosphorothioate
  modified_base 21: mod_base = OTHER; note = 2'-O-methyladenosine
ggacccgcacaaaatctcaga

SEQ ID NO: 10997 - RNA, 21 nt, synthetic construct
  source 1..21: mol_type = other RNA
  modified_base 1: mod_base = OTHER; note = 2'-O-methylguanosine-3'-phosphorothioate
  modified_base 2: mod_base = OTHER; note = 2'-O-methyladenosine-3'-phosphorothioate
  modified_base 3: mod_base = OTHER; note = 2'-O-methylcytidine-3'-phosphate
  modified_base 4: mod_base = OTHER; note = 2'-O-methylcytidine-3'-phosphate
  modified_base 5: mod_base = OTHER; note = 2'-O-methylcytidine-3'-phosphate
  modified_base 6: mod_base = OTHER; note = 2'-O-docosanyl-guanosine-3'-phosphate
  modified_base 7: mod_base = OTHER; note = 2'-deoxy-2'-fluorocytidine-3'-phosphate
  modified_base 8: mod_base = OTHER; note = 2'-O-methyladenosine-3'-phosphate
  modified_base 9: mod_base = OTHER; note = 2'-deoxy-2'-fluorocytidine-3'-phosphate
  modified_base 10: mod_base = OTHER; note = 2'-deoxy-2'-fluoroadenosine-3'-phosphate
  modified_base 11: mod_base = OTHER; note = 2'-deoxy-2'-fluoroadenosine-3'-phosphate
  modified_base 12: mod_base = OTHER; note = 2'-O-methyladenosine-3'-phosphate
  modified_base 13: mod_base = OTHER; note = 2'-O-methyladenosine-3'-phosphate
  modified_base 14: mod_base = OTHER; note = 2'-O-methyluridine-3'-phosphate
  modified_base 15: mod_base = OTHER; note = 2'-O-methylcytidine-3'-phosphate
  modified_base 16: mod_base = OTHER; note = 2'-O-methyluridine-3'-phosphate
  modified_base 17: mod_base = OTHER; note = 2'-O-methylcytidine-3'-phosphate
  modified_base 18: mod_base = OTHER; note = 2'-O-methyladenosine-3'-phosphate
  modified_base 19: mod_base = OTHER; note = 2'-O-methylguanosine-3'-phosphorothioate
  modified_base 20: mod_base = OTHER; note = 2'-O-methyladenosine-3'-phosphorothioate
  modified_base 21: mod_base = OTHER; note = 2'-O-methyladenosine
gacccgcacaaaatctcagaa

SEQ ID NO: 10998 - RNA, 21 nt, synthetic construct
  source 1..21: mol_type = other RNA
  modified_base 1: mod_base = OTHER; note = 2'-O-methyladenosine-3'-phosphorothioate
  modified_base 2: mod_base = OTHER; note = 2'-O-methylcytidine-3'-phosphorothioate
  modified_base 3: mod_base = OTHER; note = 2'-O-methylcytidine-3'-phosphate
  modified_base 4: mod_base = OTHER; note = 2'-O-methylcytidine-3'-phosphate
  modified_base 5: mod_base = OTHER; note = 2'-O-methylguanosine-3'-phosphate
  modified_base 6: mod_base = OTHER; note = 2'-O-docosanyl-cytidine-3'-phosphate
  modified_base 7: mod_base = OTHER; note = 2'-deoxy-2'-fluoroadenosine-3'-phosphate
  modified_base 8: mod_base = OTHER; note = 2'-O-methylcytidine-3'-phosphate
  modified_base 9: mod_base = OTHER; note = 2'-deoxy-2'-fluoroadenosine-3'-phosphate
  modified_base 10: mod_base = OTHER; note = 2'-deoxy-2'-fluoroadenosine-3'-phosphate
  modified_base 11: mod_base = OTHER; note = 2'-deoxy-2'-fluoroadenosine-3'-phosphate
  modified_base 12: mod_base = OTHER; note = 2'-O-methyladenosine-3'-phosphate
  modified_base 13: mod_base = OTHER; note = 2'-O-methyluridine-3'-phosphate
  modified_base 14: mod_base = OTHER; note = 2'-O-methylcytidine-3'-phosphate
  modified_base 15: mod_base = OTHER; note = 2'-O-methyluridine-3'-phosphate
  modified_base 16: mod_base = OTHER; note = 2'-O-methylcytidine-3'-phosphate
  modified_base 17: mod_base = OTHER; note = 2'-O-methyladenosine-3'-phosphate
  modified_base 18: mod_base = OTHER; note = 2'-O-methylguanosine-3'-phosphate
  modified_base 19: mod_base = OTHER; note = 2'-O-methyladenosine-3'-phosphorothioate
  modified_base 20: mod_base = OTHER; note = 2'-O-methyladenosine-3'-phosphorothioate
  modified_base 21: mod_base = OTHER; note = 2'-O-methyladenosine
acccgcacaaaatctcagaaa

SEQ ID NO: 10999 - RNA, 21 nt, synthetic construct
  source 1..21: mol_type = other RNA
  modified_base 1: mod_base = OTHER; note = 2'-O-methylcytidine-3'-phosphorothioate
  modified_base 2: mod_base = OTHER; note = 2'-O-methylcytidine-3'-phosphorothioate
  modified_base 3: mod_base = OTHER; note = 2'-O-methylcytidine-3'-phosphate
  modified_base 4: mod_base = OTHER; note = 2'-O-methylguanosine-3'-phosphate
  modified_base 5: mod_base = OTHER; note = 2'-O-methylcytidine-3'-phosphate
  modified_base 6: mod_base = OTHER; note = 2'-O-docosanyl-adenosine-3'-phosphate
  modified_base 7: mod_base = OTHER; note = 2'-deoxy-2'-fluorocytidine-3'-phosphate
  modified_base 8: mod_base = OTHER; note = 2'-O-methyladenosine-3'-phosphate
  modified_base 9: mod_base = OTHER; note = 2'-deoxy-2'-fluoroadenosine-3'-phosphate
  modified_base 10: mod_base = OTHER; note = 2'-deoxy-2'-fluoroadenosine-3'-phosphate
  modified_base 11: mod_base = OTHER; note = 2'-deoxy-2'-fluoroadenosine-3'-phosphate
  modified_base 12: mod_base = OTHER; note = 2'-O-methyluridine-3'-phosphate
  modified_base 13: mod_base = OTHER; note = 2'-O-methylcytidine-3'-phosphate
  modified_base 14: mod_base = OTHER; note = 2'-O-methyluridine-3'-phosphate
  modified_base 15: mod_base = OTHER; note = 2'-O-methylcytidine-3'-phosphate
  modified_base 16: mod_base = OTHER; note = 2'-O-methyladenosine-3'-phosphate
  modified_base 17: mod_base = OTHER; note = 2'-O-methylguanosine-3'-phosphate
  modified_base 18: mod_base = OTHER; note = 2'-O-methyladenosine-3'-phosphate
  modified_base 19: mod_base = OTHER; note = 2'-O-methyladenosine-3'-phosphorothioate
  modified_base 20: mod_base = OTHER; note = 2'-O-methylcytidine-3'-phosphorothioate
  modified_base 21: mod_base = OTHER; note = 2'-O-methyladenosine
cccgcacaaaatctcagaaca

SEQ ID NO: 11000 - RNA, 21 nt, synthetic construct
  source 1..21: mol_type = other RNA
  modified_base 1: mod_base = OTHER; note = 2'-O-methylcytidine-3'-phosphorothioate
  modified_base 2: mod_base = OTHER; note = 2'-O-methylcytidine-3'-phosphorothioate
  modified_base 3: mod_base = OTHER; note = 2'-O-methylguanosine-3'-phosphate
  modified_base 4: mod_base = OTHER; note = 2'-O-methylcytidine-3'-phosphate
  modified_base 5: mod_base = OTHER; note = 2'-O-methyladenosine-3'-phosphate
  modified_base 6: mod_base = OTHER; note = 2'-O-docosanyl-cytidine-3'-phosphate
  modified_base 7: mod_base = OTHER; note = 2'-deoxy-2'-fluoroadenosine-3'-phosphate
  modified_base 8: mod_base = OTHER; note = 2'-O-methyladenosine-3'-phosphate
  modified_base 9: mod_base = OTHER; note = 2'-deoxy-2'-fluoroadenosine-3'-phosphate
  modified_base 10: mod_base = OTHER; note = 2'-deoxy-2'-fluoroadenosine-3'-phosphate
  modified_base 11: mod_base = OTHER; note = 2'-deoxy-2'-fluorouridine-3'-phosphate
  modified_base 12: mod_base = OTHER; note = 2'-O-methylcytidine-3'-phosphate
  modified_base 13: mod_base = OTHER; note = 2'-O-methyluridine-3'-phosphate
  modified_base 14: mod_base = OTHER; note = 2'-O-methylcytidine-3'-phosphate
  modified_base 15: mod_base = OTHER; note = 2'-O-methyladenosine-3'-phosphate
  modified_base 16: mod_base = OTHER; note = 2'-O-methylguanosine-3'-phosphate
  modified_base 17: mod_base = OTHER; note = 2'-O-methyladenosine-3'-phosphate
  modified_base 18: mod_base = OTHER; note = 2'-O-methyladenosine-3'-phosphate
  modified_base 19: mod_base = OTHER; note = 2'-O-methylcytidine-3'-phosphorothioate
  modified_base 20: mod_base = OTHER; note = 2'-O-methylcytidine-3'-phosphorothioate
  modified_base 21: mod_base = OTHER; note = 2'-O-methyladenosine
ccgcacaaaatctcagaacca

SEQ ID NO: 11001 - RNA, 21 nt, synthetic construct
  source 1..21: mol_type = other RNA
  modified_base 1: mod_base = OTHER; note = 2'-O-methylcytidine-3'-phosphorothioate
  modified_base 2: mod_base = OTHER; note = 2'-O-methylguanosine-3'-phosphorothioate
  modified_base 3: mod_base = OTHER; note = 2'-O-methylcytidine-3'-phosphate
  modified_base 4: mod_base = OTHER; note = 2'-O-methyladenosine-3'-phosphate
  modified_base 5: mod_base = OTHER; note = 2'-O-methylcytidine-3'-phosphate
  modified_base 6: mod_base = OTHER; note = 2'-O-docosanyl-adenosine-3'-phosphate
  modified_base 7: mod_base = OTHER; note = 2'-deoxy-2'-fluoroadenosine-3'-phosphate
  modified_base 8: mod_base = OTHER; note = 2'-O-methyladenosine-3'-phosphate
  modified_base 9: mod_base = OTHER; note = 2'-deoxy-2'-fluoroadenosine-3'-phosphate
  modified_base 10: mod_base = OTHER; note = 2'-deoxy-2'-fluorouridine-3'-phosphate
  modified_base 11: mod_base = OTHER; note = 2'-deoxy-2'-fluorocytidine-3'-phosphate
  modified_base 12: mod_base = OTHER; note = 2'-O-methyluridine-3'-phosphate
  modified_base 13: mod_base = OTHER; note = 2'-O-methylcytidine-3'-phosphate
  modified_base 14: mod_base = OTHER; note = 2'-O-methyladenosine-3'-phosphate
  modified_base 15: mod_base = OTHER; note = 2'-O-methylguanosine-3'-phosphate
  modified_base 16: mod_base = OTHER; note = 2'-O-methyladenosine-3'-phosphate
  modified_base 17: mod_base = OTHER; note = 2'-O-methyladenosine-3'-phosphate
  modified_base 18: mod_base = OTHER; note = 2'-O-methylcytidine-3'-phosphate
  modified_base 19: mod_base = OTHER; note = 2'-O-methylcytidine-3'-phosphorothioate
  modified_base 20: mod_base = OTHER; note = 2'-O-methyladenosine-3'-phosphorothioate
  modified_base 21: mod_base = OTHER; note = 2'-O-methyladenosine
cgcacaaaatctcagaaccaa

SEQ ID NO: 11002 - RNA, 21 nt, synthetic construct
  source 1..21: mol_type = other RNA
  modified_base 1: mod_base = OTHER; note = 2'-O-methylguanosine-3'-phosphorothioate
  modified_base 2: mod_base = OTHER; note = 2'-O-methylcytidine-3'-phosphorothioate
  modified_base 3: mod_base = OTHER; note = 2'-O-methyladenosine-3'-phosphate
  modified_base 4: mod_base = OTHER; note = 2'-O-methylcytidine-3'-phosphate
  modified_base 5: mod_base = OTHER; note = 2'-O-methyladenosine-3'-phosphate
  modified_base 6: mod_base = OTHER; note = 2'-O-docosanyl-adenosine-3'-phosphate
  modified_base 7: mod_base = OTHER; note = 2'-deoxy-2'-fluoroadenosine-3'-phosphate
  modified_base 8: mod_base = OTHER; note = 2'-O-methyladenosine-3'-phosphate
  modified_base 9: mod_base = OTHER; note = 2'-deoxy-2'-fluorouridine-3'-phosphate
  modified_base 10: mod_base = OTHER; note = 2'-deoxy-2'-fluorocytidine-3'-phosphate
  modified_base 11: mod_base = OTHER; note = 2'-deoxy-2'-fluorouridine-3'-phosphate
  modified_base 12: mod_base = OTHER; note = 2'-O-methylcytidine-3'-phosphate
  modified_base 13: mod_base = OTHER; note = 2'-O-methyladenosine-3'-phosphate
  modified_base 14: mod_base = OTHER; note = 2'-O-methylguanosine-3'-phosphate
  modified_base 15: mod_base = OTHER; note = 2'-O-methyladenosine-3'-phosphate
  modified_base 16: mod_base = OTHER; note = 2'-O-methyladenosine-3'-phosphate
  modified_base 17: mod_base = OTHER; note = 2'-O-methylcytidine-3'-phosphate
  modified_base 18: mod_base = OTHER; note = 2'-O-methylcytidine-3'-phosphate
  modified_base 19: mod_base = OTHER; note = 2'-O-methyladenosine-3'-phosphorothioate
  modified_base 20: mod_base = OTHER; note = 2'-O-methyluridine-3'-phosphorothioate
  modified_base 21: mod_base = OTHER; note = 2'-O-methyladenosine
gcacaaaatctcagaaccata

SEQ ID NO: 11003 - RNA, 21 nt, synthetic construct
  source 1..21: mol_type = other RNA
  modified_base 1: mod_base = OTHER; note = 2'-O-methylcytidine-3'-phosphorothioate
  modified_base 2: mod_base = OTHER; note = 2'-O-methyladenosine-3'-phosphorothioate
  modified_base 3: mod_base = OTHER; note = 2'-O-methylcytidine-3'-phosphate
  modified_base 4: mod_base = OTHER; note = 2'-O-methyladenosine-3'-phosphate
  modified_base 5: mod_base = OTHER; note = 2'-O-methyladenosine-3'-phosphate
  modified_base 6: mod_base = OTHER; note = 2'-O-docosanyl-adenosine-3'-phosphate
  modified_base 7: mod_base = OTHER; note = 2'-deoxy-2'-fluoroadenosine-3'-phosphate
  modified_base 8: mod_base = OTHER; note = 2'-O-methyluridine-3'-phosphate
  modified_base 9: mod_base = OTHER; note = 2'-deoxy-2'-fluorocytidine-3'-phosphate
  modified_base 10: mod_base = OTHER; note = 2'-deoxy-2'-fluorouridine-3'-phosphate
  modified_base 11: mod_base = OTHER; note = 2'-deoxy-2'-fluorocytidine-3'-phosphate
  modified_base 12: mod_base = OTHER; note = 2'-O-methyladenosine-3'-phosphate
  modified_base 13: mod_base = OTHER; note = 2'-O-methylguanosine-3'-phosphate
  modified_base 14: mod_base = OTHER; note = 2'-O-methyladenosine-3'-phosphate
  modified_base 15: mod_base = OTHER; note = 2'-O-methyladenosine-3'-phosphate
  modified_base 16: mod_base = OTHER; note = 2'-O-methylcytidine-3'-phosphate
  modified_base 17: mod_base = OTHER; note = 2'-O-methylcytidine-3'-phosphate
  modified_base 18: mod_base = OTHER; note = 2'-O-methyladenosine-3'-phosphate
  modified_base 19: mod_base = OTHER; note = 2'-O-methyluridine-3'-phosphorothioate
  modified_base 20: mod_base = OTHER; note = 2'-O-methyladenosine-3'-phosphorothioate
  modified_base 21: mod_base = OTHER; note = 2'-O-methyladenosine
cacaaaatctcagaaccataa

SEQ ID NO: 11004 - RNA, 21 nt, synthetic construct
  source 1..21: mol_type = other RNA
  modified_base 1: mod_base = OTHER; note = 2'-O-methyladenosine-3'-phosphorothioate
  modified_base 2: mod_base = OTHER; note = 2'-O-methylcytidine-3'-phosphorothioate
  modified_base 3: mod_base = OTHER; note = 2'-O-methyladenosine-3'-phosphate
  modified_base 4: mod_base = OTHER; note = 2'-O-methyladenosine-3'-phosphate
  modified_base 5: mod_base = OTHER; note = 2'-O-methyladenosine-3'-phosphate
  modified_base 6: mod_base = OTHER; note = 2'-O-docosanyl-adenosine-3'-phosphate
  modified_base 7: mod_base = OTHER; note = 2'-deoxy-2'-fluorouridine-3'-phosphate
  modified_base 8: mod_base = OTHER; note = 2'-O-methylcytidine-3'-phosphate
  modified_base 9: mod_base = OTHER; note = 2'-deoxy-2'-fluorouridine-3'-phosphate
  modified_base 10: mod_base = OTHER; note = 2'-deoxy-2'-fluorocytidine-3'-phosphate
  modified_base 11: mod_base = OTHER; note = 2'-deoxy-2'-fluoroadenosine-3'-phosphate
  modified_base 12: mod_base = OTHER; note = 2'-O-methylguanosine-3'-phosphate
  modified_base 13: mod_base = OTHER; note = 2'-O-methyladenosine-3'-phosphate
  modified_base 14: mod_base = OTHER; note = 2'-O-methyladenosine-3'-phosphate
  modified_base 15: mod_base = OTHER; note = 2'-O-methylcytidine-3'-phosphate
  modified_base 16: mod_base = OTHER; note = 2'-O-methylcytidine-3'-phosphate
  modified_base 17: mod_base = OTHER; note = 2'-O-methyladenosine-3'-phosphate
  modified_base 18: mod_base = OTHER; note = 2'-O-methyluridine-3'-phosphate
  modified_base 19: mod_base = OTHER; note = 2'-O-methyladenosine-3'-phosphorothioate
  modified_base 20: mod_base = OTHER; note = 2'-O-methyluridine-3'-phosphorothioate
  modified_base 21: mod_base = OTHER; note = 2'-O-methyladenosine
acaaaatctcagaaccatata

SEQ ID NO: 11005 - RNA, 21 nt, synthetic construct
  source 1..21: mol_type = other RNA
  modified_base 1: mod_base = OTHER; note = 2'-O-methylcytidine-3'-phosphorothioate
  modified_base 2: mod_base = OTHER; note = 2'-O-methyladenosine-3'-phosphorothioate
  modified_base 3: mod_base = OTHER; note = 2'-O-methyladenosine-3'-phosphate
  modified_base 4: mod_base = OTHER; note = 2'-O-methyladenosine-3'-phosphate
  modified_base 5: mod_base = OTHER; note = 2'-O-methyladenosine-3'-phosphate
  modified_base 6: mod_base = OTHER; note = 2'-O-docosanyl-uridine-3'-phosphate
  modified_base 7: mod_base = OTHER; note = 2'-deoxy-2'-fluorocytidine-3'-phosphate
  modified_base 8: mod_base = OTHER; note = 2'-O-methyluridine-3'-phosphate
  modified_base 9: mod_base = OTHER; note = 2'-deoxy-2'-fluorocytidine-3'-phosphate
  modified_base 10: mod_base = OTHER; note = 2'-deoxy-2'-fluoroadenosine-3'-phosphate
  modified_base 11: mod_base = OTHER; note = 2'-deoxy-2'-fluoroguanosine-3'-phosphate
  modified_base 12: mod_base = OTHER; note = 2'-O-methyladenosine-3'-phosphate
  modified_base 13: mod_base = OTHER; note = 2'-O-methyladenosine-3'-phosphate
  modified_base 14: mod_base = OTHER; note = 2'-O-methylcytidine-3'-phosphate
  modified_base 15: mod_base = OTHER; note = 2'-O-methylcytidine-3'-phosphate
  modified_base 16: mod_base = OTHER; note = 2'-O-methyladenosine-3'-phosphate
  modified_base 17: mod_base = OTHER; note = 2'-O-methyluridine-3'-phosphate
  modified_base 18: mod_base = OTHER; note = 2'-O-methyladenosine-3'-phosphate
  modified_base 19: mod_base = OTHER; note = 2'-O-methyluridine-3'-phosphorothioate
  modified_base 20: mod_base = OTHER; note = 2'-O-methylcytidine-3'-phosphorothioate
  modified_base 21: mod_base = OTHER; note = 2'-O-methyladenosine
caaaatctcagaaccatatca

SEQ ID NO: 11006 - RNA, 21 nt, synthetic construct
  source 1..21: mol_type = other RNA
  modified_base 1: mod_base = OTHER; note = 2'-O-methyladenosine-3'-phosphorothioate
  modified_base 2: mod_base = OTHER; note = 2'-O-methyladenosine-3'-phosphorothioate
  modified_base 3: mod_base = OTHER; note = 2'-O-methyladenosine-3'-phosphate
  modified_base 4: mod_base = OTHER; note = 2'-O-methyladenosine-3'-phosphate
  modified_base 5: mod_base = OTHER; note = 2'-O-methyluridine-3'-phosphate
  modified_base 6: mod_base = OTHER; note = 2'-O-docosanyl-cytidine-3'-phosphate
  modified_base 7: mod_base = OTHER; note = 2'-deoxy-2'-fluorouridine-3'-phosphate
  modified_base 8: mod_base = OTHER; note = 2'-O-methylcytidine-3'-phosphate
  modified_base 9: mod_base = OTHER; note = 2'-deoxy-2'-fluoroadenosine-3'-phosphate
  modified_base 10: mod_base = OTHER; note = 2'-deoxy-2'-fluoroguanosine-3'-phosphate
  modified_base 11: mod_base = OTHER; note = 2'-deoxy-2'-fluoroadenosine-3'-phosphate
  modified_base 12: mod_base = OTHER; note = 2'-O-methyladenosine-3'-phosphate
  modified_base 13: mod_base = OTHER; note = 2'-O-methylcytidine-3'-phosphate
  modified_base 14: mod_base = OTHER; note = 2'-O-methylcytidine-3'-phosphate
  modified_base 15: mod_base = OTHER; note = 2'-O-methyladenosine-3'-phosphate
  modified_base 16: mod_base = OTHER; note = 2'-O-methyluridine-3'-phosphate
  modified_base 17: mod_base = OTHER; note = 2'-O-methyladenosine-3'-phosphate
  modified_base 18: mod_base = OTHER; note = 2'-O-methyluridine-3'-phosphate
  modified_base 19: mod_base = OTHER; note = 2'-O-methylcytidine-3'-phosphorothioate
  modified_base 20: mod_base = OTHER; note = 2'-O-methyluridine-3'-phosphorothioate
  modified_base 21: mod_base = OTHER; note = 2'-O-methyladenosine
aaaatctcagaaccatatcta

SEQ ID NO: 11007 - RNA, 21 nt, synthetic construct
  source 1..21: mol_type = other RNA
  modified_base 1: mod_base = OTHER; note = 2'-O-methyladenosine-3'-phosphorothioate
  modified_base 2: mod_base = OTHER; note = 2'-O-methyladenosine-3'-phosphorothioate
  modified_base 3: mod_base = OTHER; note = 2'-O-methyladenosine-3'-phosphate
  modified_base 4: mod_base = OTHER; note = 2'-O-methyluridine-3'-phosphate
  modified_base 5: mod_base = OTHER; note = 2'-O-methylcytidine-3'-phosphate
  modified_base 6: mod_base = OTHER; note = 2'-O-docosanyl-uridine-3'-phosphate
  modified_base 7: mod_base = OTHER; note = 2'-deoxy-2'-fluorocytidine-3'-phosphate
  modified_base 8: mod_base = OTHER; note = 2'-O-methyladenosine-3'-phosphate
  modified_base 9: mod_base = OTHER; note = 2'-deoxy-2'-fluoroguanosine-3'-phosphate
  modified_base 10: mod_base = OTHER; note = 2'-deoxy-2'-fluoroadenosine-3'-phosphate
  modified_base 11: mod_base = OTHER; note = 2'-deoxy-2'-fluoroadenosine-3'-phosphate
  modified_base 12: mod_base = OTHER; note = 2'-O-methylcytidine-3'-phosphate
  modified_base 13: mod_base = OTHER; note = 2'-O-methylcytidine-3'-phosphate
  modified_base 14: mod_base = OTHER; note = 2'-O-methyladenosine-3'-phosphate
  modified_base 15: mod_base = OTHER; note = 2'-O-methyluridine-3'-phosphate
  modified_base 16: mod_base = OTHER; note = 2'-O-methyladenosine-3'-phosphate
  modified_base 17: mod_base = OTHER; note = 2'-O-methyluridine-3'-phosphate
  modified_base 18: mod_base = OTHER; note = 2'-O-methylcytidine-3'-phosphate
  modified_base 19: mod_base = OTHER; note = 2'-O-methyluridine-3'-phosphorothioate
  modified_base 20: mod_base = OTHER; note = 2'-O-methylguanosine-3'-phosphorothioate
  modified_base 21: mod_base = OTHER; note = 2'-O-methyladenosine
aaatctcagaaccatatctga

SEQ ID NO: 11008 - RNA, 21 nt, synthetic construct
  source 1..21: mol_type = other RNA
  modified_base 1: mod_base = OTHER; note = 2'-O-methyladenosine-3'-phosphorothioate
  modified_base 2: mod_base = OTHER; note = 2'-O-methyladenosine-3'-phosphorothioate
  modified_base 3: mod_base = OTHER; note = 2'-O-methyluridine-3'-phosphate
  modified_base 4: mod_base = OTHER; note = 2'-O-methylcytidine-3'-phosphate
  modified_base 5: mod_base = OTHER; note = 2'-O-methyluridine-3'-phosphate
  modified_base 6: mod_base = OTHER; note = 2'-O-docosanyl-cytidine-3'-phosphate
  modified_base 7: mod_base = OTHER; note = 2'-deoxy-2'-fluoroadenosine-3'-phosphate
  modified_base 8: mod_base = OTHER; note = 2'-O-methylguanosine-3'-phosphate
  modified_base 9: mod_base = OTHER; note = 2'-deoxy-2'-fluoroadenosine-3'-phosphate
  modified_base 10: mod_base = OTHER; note = 2'-deoxy-2'-fluoroadenosine-3'-phosphate
  modified_base 11: mod_base = OTHER; note = 2'-deoxy-2'-fluorocytidine-3'-phosphate
  modified_base 12: mod_base = OTHER; note = 2'-O-methylcytidine-3'-phosphate
  modified_base 13: mod_base = OTHER; note = 2'-O-methyladenosine-3'-phosphate
  modified_base 14: mod_base = OTHER; note = 2'-O-methyluridine-3'-phosphate
  modified_base 15: mod_base = OTHER; note = 2'-O-methyladenosine-3'-phosphate
  modified_base 16: mod_base = OTHER; note = 2'-O-methyluridine-3'-phosphate
  modified_base 17: mod_base = OTHER; note = 2'-O-methylcytidine-3'-phosphate
  modified_base 18: mod_base = OTHER; note = 2'-O-methyluridine-3'-phosphate
  modified_base 19: mod_base = OTHER; note = 2'-O-methylguanosine-3'-phosphorothioate
  modified_base 20: mod_base = OTHER; note = 2'-O-methyluridine-3'-phosphorothioate
  modified_base 21: mod_base = OTHER; note = 2'-O-methyladenosine
aatctcagaaccatatctgta

SEQ ID NO: 11009 - RNA, 21 nt, synthetic construct
  source 1..21: mol_type = other RNA
  modified_base 1: mod_base = OTHER; note = 2'-O-methyluridine-3'-phosphorothioate
  modified_base 2: mod_base = OTHER; note = 2'-O-methylcytidine-3'-phosphorothioate
  modified_base 3: mod_base = OTHER; note = 2'-O-methyluridine-3'-phosphate
  modified_base 4: mod_base = OTHER; note = 2'-O-methylcytidine-3'-phosphate
  modified_base 5: mod_base = OTHER; note = 2'-O-methyladenosine-3'-phosphate
  modified_base 6: mod_base = OTHER; note = 2'-O-docosanyl-guanosine-3'-phosphate
  modified_base 7: mod_base = OTHER; note = 2'-deoxy-2'-fluoroadenosine-3'-phosphate
  modified_base 8: mod_base = OTHER; note = 2'-O-methyladenosine-3'-phosphate
  modified_base 9: mod_base = OTHER; note = 2'-deoxy-2'-fluorocytidine-3'-phosphate
  modified_base 10: mod_base = OTHER; note = 2'-deoxy-2'-fluorocytidine-3'-phosphate
  modified_base 11: mod_base = OTHER; note = 2'-deoxy-2'-fluoroadenosine-3'-phosphate
  modified_base 12: mod_base = OTHER; note = 2'-O-methyluridine-3'-phosphate
  modified_base 13: mod_base = OTHER; note = 2'-O-methyladenosine-3'-phosphate
  modified_base 14: mod_base = OTHER; note = 2'-O-methyluridine-3'-phosphate
  modified_base 15: mod_base = OTHER; note = 2'-O-methylcytidine-3'-phosphate
  modified_base 16: mod_base = OTHER; note = 2'-O-methyluridine-3'-phosphate
  modified_base 17: mod_base = OTHER; note = 2'-O-methylguanosine-3'-phosphate
  modified_base 18: mod_base = OTHER; note = 2'-O-methyluridine-3'-phosphate
  modified_base 19: mod_base = OTHER; note = 2'-O-methyluridine-3'-phosphorothioate
  modified_base 20: mod_base = OTHER; note = 2'-O-methylguanosine-3'-phosphorothioate
  modified_base 21: mod_base = OTHER; note = 2'-O-methyladenosine
tctcagaaccatatctgttga

SEQ ID NO: 11010 - RNA, 21 nt, synthetic construct
  source 1..21: mol_type = other RNA
  modified_base 1: mod_base = OTHER; note = 2'-O-methylcytidine-3'-phosphorothioate
  modified_base 2: mod_base = OTHER; note = 2'-O-methyluridine-3'-phosphorothioate
  modified_base 3: mod_base = OTHER; note = 2'-O-methylcytidine-3'-phosphate
  modified_base 4: mod_base = OTHER; note = 2'-O-methyladenosine-3'-phosphate
  modified_base 5: mod_base = OTHER; note = 2'-O-methylguanosine-3'-phosphate
  modified_base 6: mod_base = OTHER; note = 2'-O-docosanyl-adenosine-3'-phosphate
  modified_base 7: mod_base = OTHER; note = 2'-deoxy-2'-fluoroadenosine-3'-phosphate
  modified_base 8: mod_base = OTHER; note = 2'-O-methylcytidine-3'-phosphate
  modified_base 9: mod_base = OTHER; note = 2'-deoxy-2'-fluorocytidine-3'-phosphate
  modified_base 10: mod_base = OTHER; note = 2'-deoxy-2'-fluoroadenosine-3'-phosphate
  modified_base 11: mod_base = OTHER; note = 2'-deoxy-2'-fluorouridine-3'-phosphate
  modified_base 12: mod_base = OTHER; note = 2'-O-methyladenosine-3'-phosphate
  modified_base 13: mod_base = OTHER; note = 2'-O-methyluridine-3'-phosphate
  modified_base 14: mod_base = OTHER; note = 2'-O-methylcytidine-3'-phosphate
  modified_base 15: mod_base = OTHER; note = 2'-O-methyluridine-3'-phosphate
  modified_base 16: mod_base = OTHER; note = 2'-O-methylguanosine-3'-phosphate
  modified_base 17: mod_base = OTHER; note = 2'-O-methyluridine-3'-phosphate
  modified_base 18: mod_base = OTHER; note = 2'-O-methyluridine-3'-phosphate
  modified_base 19: mod_base = OTHER; note = 2'-O-methylguanosine-3'-phosphorothioate
  modified_base 20: mod_base = OTHER; note = 2'-O-methyladenosine-3'-phosphorothioate
  modified_base 21: mod_base = OTHER; note = 2'-O-methyladenosine
ctcagaaccatatctgttgaa

SEQ ID NO: 11011 - RNA, 21 nt, synthetic construct
  source 1..21: mol_type = other RNA
  modified_base 1: mod_base = OTHER; note = 2'-O-methyluridine-3'-phosphorothioate
  modified_base 2: mod_base = OTHER; note = 2'-O-methylcytidine-3'-phosphorothioate
  modified_base 3: mod_base = OTHER; note = 2'-O-methyladenosine-3'-phosphate
  modified_base 4: mod_base = OTHER; note = 2'-O-methylguanosine-3'-phosphate
  modified_base 5: mod_base = OTHER; note = 2'-O-methyladenosine-3'-phosphate
  modified_base 6: mod_base = OTHER; note = 2'-O-docosanyl-adenosine-3'-phosphate
  modified_base 7: mod_base = OTHER; note = 2'-deoxy-2'-fluorocytidine-3'-phosphate
  modified_base 8: mod_base = OTHER; note = 2'-O-methylcytidine-3'-phosphate
  modified_base 9: mod_base = OTHER; note = 2'-deoxy-2'-fluoroadenosine-3'-phosphate
  modified_base 10: mod_base = OTHER; note = 2'-deoxy-2'-fluorouridine-3'-phosphate
  modified_base 11: mod_base = OTHER; note = 2'-deoxy-2'-fluoroadenosine-3'-phosphate
  modified_base 12: mod_base = OTHER; note = 2'-O-methyluridine-3'-phosphate
  modified_base 13: mod_base = OTHER; note = 2'-O-methylcytidine-3'-phosphate
  modified_base 14: mod_base = OTHER; note = 2'-O-methyluridine-3'-phosphate
  modified_base 15: mod_base = OTHER; note = 2'-O-methylguanosine-3'-phosphate
  modified_base 16: mod_base = OTHER; note = 2'-O-methyluridine-3'-phosphate
  modified_base 17: mod_base = OTHER; note = 2'-O-methyluridine-3'-phosphate
  modified_base 18: mod_base = OTHER; note = 2'-O-methylguanosine-3'-phosphate
  modified_base 19: mod_base = OTHER; note = 2'-O-methyladenosine-3'-phosphorothioate
  modified_base 20: mod_base = OTHER; note = 2'-O-methylcytidine-3'-phosphorothioate
  modified_base 21: mod_base = OTHER; note = 2'-O-methyladenosine
tcagaaccatatctgttgaca

SEQ ID NO: 11012 - RNA, 21 nt, synthetic construct
  source 1..21: mol_type = other RNA
  modified_base 1: mod_base = OTHER; note = 2'-O-methylcytidine-3'-phosphorothioate
  modified_base 2: mod_base = OTHER; note = 2'-O-methyladenosine-3'-phosphorothioate
  modified_base 3: mod_base = OTHER; note = 2'-O-methylguanosine-3'-phosphate
  modified_base 4: mod_base = OTHER; note = 2'-O-methyladenosine-3'-phosphate
  modified_base 5: mod_base = OTHER; note = 2'-O-methyladenosine-3'-phosphate
  modified_base 6: mod_base = OTHER; note = 2'-O-docosanyl-cytidine-3'-phosphate
  modified_base 7: mod_base = OTHER; note = 2'-deoxy-2'-fluorocytidine-3'-phosphate
  modified_base 8: mod_base = OTHER; note = 2'-O-methyladenosine-3'-phosphate
  modified_base 9: mod_base = OTHER; note = 2'-deoxy-2'-fluorouridine-3'-phosphate
  modified_base 10: mod_base = OTHER; note = 2'-deoxy-2'-fluoroadenosine-3'-phosphate
  modified_base 11: mod_base = OTHER; note = 2'-deoxy-2'-fluorouridine-3'-phosphate
  modified_base 12: mod_base = OTHER; note = 2'-O-methylcytidine-3'-phosphate
  modified_base 13: mod_base = OTHER; note = 2'-O-methyluridine-3'-phosphate
  modified_base 14: mod_base = OTHER; note = 2'-O-methylguanosine-3'-phosphate
  modified_base 15: mod_base = OTHER; note = 2'-O-methyluridine-3'-phosphate
  modified_base 16: mod_base = OTHER; note = 2'-O-methyluridine-3'-phosphate
  modified_base 17: mod_base = OTHER; note = 2'-O-methylguanosine-3'-phosphate
  modified_base 18: mod_base = OTHER; note = 2'-O-methyladenosine-3'-phosphate
  modified_base 19: mod_base = OTHER; note = 2'-O-methylcytidine-3'-phosphorothioate
  modified_base 20: mod_base = OTHER; note = 2'-O-methyladenosine-3'-phosphorothioate
  modified_base 21: mod_base = OTHER; note = 2'-O-methyladenosine
cagaaccatatctgttgacaa

SEQ ID NO: 11013 - RNA, 21 nt, synthetic construct
  source 1..21: mol_type = other RNA
  modified_base 1: mod_base = OTHER; note = 2'-O-methyladenosine-3'-phosphorothioate
  modified_base 2: mod_base = OTHER; note = 2'-O-methylguanosine-3'-phosphorothioate
  modified_base 3: mod_base = OTHER; note = 2'-O-methyladenosine-3'-phosphate
  modified_base 4: mod_base = OTHER; note = 2'-O-methyladenosine-3'-phosphate
  modified_base 5: mod_base = OTHER; note = 2'-O-methylcytidine-3'-phosphate
  modified_base 6: mod_base = OTHER; note = 2'-O-docosanyl-cytidine-3'-phosphate
  modified_base 7: mod_base = OTHER; note = 2'-deoxy-2'-fluoroadenosine-3'-phosphate
  modified_base 8: mod_base = OTHER; note = 2'-O-methyluridine-3'-phosphate
  modified_base 9: mod_base = OTHER; note = 2'-deoxy-2'-fluoroadenosine-3'-phosphate
  modified_base 10: mod_base = OTHER; note = 2'-deoxy-2'-fluorouridine-3'-phosphate
  modified_base 11: mod_base = OTHER; note = 2'-deoxy-2'-fluorocytidine-3'-phosphate
  modified_base 12: mod_base = OTHER; note = 2'-O-methyluridine-3'-phosphate
  modified_base 13: mod_base = OTHER; note = 2'-O-methylguanosine-3'-phosphate
  modified_base 14: mod_base = OTHER; note = 2'-O-methyluridine-3'-phosphate
  modified_base 15: mod_base = OTHER; note = 2'-O-methyluridine-3'-phosphate
  modified_base 16: mod_base = OTHER; note = 2'-O-methylguanosine-3'-phosphate
  modified_base 17: mod_base = OTHER; note = 2'-O-methyladenosine-3'-phosphate
  modified_base 18: mod_base = OTHER; note = 2'-O-methylcytidine-3'-phosphate
  modified_base 19: mod_base = OTHER; note = 2'-O-methyladenosine-3'-phosphorothioate
  modified_base 20: mod_base = OTHER; note = 2'-O-methyluridine-3'-phosphorothioate
  modified_base 21: mod_base = OTHER; note = 2'-O-methyladenosine
agaaccatatctgttgacata

SEQ ID NO: 11014 - RNA, 21 nt, synthetic construct
  source 1..21: mol_type = other RNA
  modified_base 1: mod_base = OTHER; note = 2'-O-methylguanosine-3'-phosphorothioate
  modified_base 2: mod_base = OTHER; note = 2'-O-methyladenosine-3'-phosphorothioate
  modified_base 3: mod_base = OTHER; note = 2'-O-methyladenosine-3'-phosphate
  modified_base 4: mod_base = OTHER; note = 2'-O-methylcytidine-3'-phosphate
  modified_base 5: mod_base = OTHER; note = 2'-O-methylcytidine-3'-phosphate
  modified_base 6: mod_base = OTHER; note = 2'-O-docosanyl-adenosine-3'-phosphate
  modified_base 7: mod_base = OTHER; note = 2'-deoxy-2'-fluorouridine-3'-phosphate
  modified_base 8: mod_base = OTHER; note = 2'-O-methyladenosine-3'-phosphate
  modified_base 9: mod_base = OTHER; note = 2'-deoxy-2'-fluorouridine-3'-phosphate
  modified_base 10: mod_base = OTHER; note = 2'-deoxy-2'-fluorocytidine-3'-phosphate
  modified_base 11: mod_base = OTHER; note = 2'-deoxy-2'-fluorouridine-3'-phosphate
  modified_base 12: mod_base = OTHER; note = 2'-O-methylguanosine-3'-phosphate
  modified_base 13: mod_base = OTHER; note = 2'-O-methyluridine-3'-phosphate
  modified_base 14: mod_base = OTHER; note = 2'-O-methyluridine-3'-phosphate
  modified_base 15: mod_base = OTHER; note = 2'-O-methylguanosine-3'-phosphate
  modified_base 16: mod_base = OTHER; note = 2'-O-methyladenosine-3'-phosphate
  modified_base 17: mod_base = OTHER; note = 2'-O-methylcytidine-3'-phosphate
  modified_base 18: mod_base = OTHER; note = 2'-O-methyladenosine-3'-phosphate
  modified_base 19: mod_base = OTHER; note = 2'-O-methyluridine-3'-phosphorothioate
  modified_base 20: mod_base = OTHER; note = 2'-O-methyluridine-3'-phosphorothioate
  modified_base 21: mod_base = OTHER; note = 2'-O-methyladenosine
gaaccatatctgttgacatta

SEQ ID NO: 11015 - RNA, 21 nt, synthetic construct
  source 1..21: mol_type = other RNA
  modified_base 1: mod_base = OTHER; note = 2'-O-methyladenosine-3'-phosphorothioate
  modified_base 2: mod_base = OTHER; note = 2'-O-methyladenosine-3'-phosphorothioate
  modified_base 3: mod_base = OTHER; note = 2'-O-methylcytidine-3'-phosphate
  modified_base 4: mod_base = OTHER; note = 2'-O-methylcytidine-3'-phosphate
  modified_base 5: mod_base = OTHER; note = 2'-O-methyladenosine-3'-phosphate
  modified_base 6: mod_base = OTHER; note = 2'-O-docosanyl-uridine-3'-phosphate
  modified_base 7: mod_base = OTHER; note = 2'-deoxy-2'-fluoroadenosine-3'-phosphate
  modified_base 8: mod_base = OTHER; note = 2'-O-methyluridine-3'-phosphate
  modified_base 9: mod_base = OTHER; note = 2'-deoxy-2'-fluorocytidine-3'-phosphate
  modified_base 10: mod_base = OTHER; note = 2'-deoxy-2'-fluorouridine-3'-phosphate
  modified_base 11: mod_base = OTHER; note = 2'-deoxy-2'-fluoroguanosine-3'-phosphate
  modified_base 12: mod_base = OTHER; note = 2'-O-methyluridine-3'-phosphate
  modified_base 13: mod_base = OTHER; note = 2'-O-methyluridine-3'-phosphate
  modified_base 14: mod_base = OTHER; note = 2'-O-methylguanosine-3'-phosphate
  modified_base 15: mod_base = OTHER; note = 2'-O-methyladenosine-3'-phosphate
  modified_base 16: mod_base = OTHER; note = 2'-O-methylcytidine-3'-phosphate
  modified_base 17: mod_base = OTHER; note = 2'-O-methyladenosine-3'-phosphate
  modified_base 18: mod_base = OTHER; note = 2'-O-methyluridine-3'-phosphate
  modified_base 19: mod_base = OTHER; note = 2'-O-methyluridine-3'-phosphorothioate
  modified_base 20: mod_base = OTHER; note = 2'-O-methyluridine-3'-phosphorothioate
  modified_base 21: mod_base = OTHER; note = 2'-O-methyladenosine
aaccatatctgttgacattta

SEQ ID NO: 11016 - RNA, 21 nt, synthetic construct
  source 1..21: mol_type = other RNA
  modified_base 1: mod_base = OTHER; note = 2'-O-methyladenosine-3'-phosphorothioate
  modified_base 2: mod_base = OTHER; note = 2'-O-methylcytidine-3'-phosphorothioate
  modified_base 3: mod_base = OTHER; note = 2'-O-methylcytidine-3'-phosphate
  modified_base 4: mod_base = OTHER; note = 2'-O-methyladenosine-3'-phosphate
  modified_base 5: mod_base = OTHER; note = 2'-O-methyluridine-3'-phosphate
  modified_base 6: mod_base = OTHER; note = 2'-O-docosanyl-adenosine-3'-phosphate
  modified_base 7: mod_base = OTHER; note = 2'-deoxy-2'-fluorouridine-3'-phosphate
  modified_base 8: mod_base = OTHER; note = 2'-O-methylcytidine-3'-phosphate
  modified_base 9: mod_base = OTHER; note = 2'-deoxy-2'-fluorouridine-3'-phosphate
  modified_base 10: mod_base = OTHER; note = 2'-deoxy-2'-fluoroguanosine-3'-phosphate
  modified_base 11: mod_base = OTHER; note = 2'-deoxy-2'-fluorouridine-3'-phosphate
  modified_base 12: mod_base = OTHER; note = 2'-O-methyluridine-3'-phosphate
  modified_base 13: mod_base = OTHER; note = 2'-O-methylguanosine-3'-phosphate
  modified_base 14: mod_base = OTHER; note = 2'-O-methyladenosine-3'-phosphate
  modified_base 15: mod_base = OTHER; note = 2'-O-methylcytidine-3'-phosphate
  modified_base 16: mod_base = OTHER; note = 2'-O-methyladenosine-3'-phosphate
  modified_base 17: mod_base = OTHER; note = 2'-O-methyluridine-3'-phosphate
  modified_base 18: mod_base = OTHER; note = 2'-O-methyluridine-3'-phosphate
  modified_base 19: mod_base = OTHER; note = 2'-O-methyluridine-3'-phosphorothioate
  modified_base 20: mod_base = OTHER; note = 2'-O-methyluridine-3'-phosphorothioate
  modified_base 21: mod_base = OTHER; note = 2'-O-methyladenosine
accatatctgttgacatttta

SEQ ID NO: 11017 - RNA, 21 nt, synthetic construct
  source 1..21: mol_type = other RNA
  modified_base 1: mod_base = OTHER; note = 2'-O-methylcytidine-3'-phosphorothioate
  modified_base 2: mod_base = OTHER; note = 2'-O-methylcytidine-3'-phosphorothioate
  modified_base 3: mod_base = OTHER; note = 2'-O-methyladenosine-3'-phosphate
  modified_base 4: mod_base = OTHER; note = 2'-O-methyluridine-3'-phosphate
  modified_base 5: mod_base = OTHER; note = 2'-O-methyladenosine-3'-phosphate
  modified_base 6: mod_base = OTHER; note = 2'-O-docosanyl-uridine-3'-phosphate
  modified_base 7: mod_base = OTHER; note = 2'-deoxy-2'-fluorocytidine-3'-phosphate
  modified_base 8: mod_base = OTHER; note = 2'-O-methyluridine-3'-phosphate
  modified_base 9: mod_base = OTHER; note = 2'-deoxy-2'-fluoroguanosine-3'-phosphate
  modified_base 10: mod_base = OTHER; note = 2'-deoxy-2'-fluorouridine-3'-phosphate
  modified_base 11: mod_base = OTHER; note = 2'-deoxy-2'-fluorouridine-3'-phosphate
  modified_base 12: mod_base = OTHER; note = 2'-O-methylguanosine-3'-phosphate
  modified_base 13: mod_base = OTHER; note = 2'-O-methyladenosine-3'-phosphate
  modified_base 14: mod_base = OTHER; note = 2'-O-methylcytidine-3'-phosphate
  modified_base 15: mod_base = OTHER; note = 2'-O-methyladenosine-3'-phosphate
  modified_base 16: mod_base = OTHER; note = 2'-O-methyluridine-3'-phosphate
  modified_base 17: mod_base = OTHER; note = 2'-O-methyluridine-3'-phosphate
  modified_base 18: mod_base = OTHER; note = 2'-O-methyluridine-3'-phosphate
  modified_base 19: mod_base = OTHER; note = 2'-O-methyluridine-3'-phosphorothioate
  modified_base 20: mod_base = OTHER; note = 2'-O-methyluridine-3'-phosphorothioate
  modified_base 21: mod_base = OTHER; note = 2'-O-methyladenosine
ccatatctgttgacattttta

SEQ ID NO: 11018 - RNA, 21 nt, synthetic construct
  source 1..21: mol_type = other RNA
  modified_base 1: mod_base = OTHER; note = 2'-O-methylcytidine-3'-phosphorothioate
  modified_base 2: mod_base = OTHER; note = 2'-O-methyladenosine-3'-phosphorothioate
  modified_base 3: mod_base = OTHER; note = 2'-O-methyluridine-3'-phosphate
  modified_base 4: mod_base = OTHER; note = 2'-O-methyladenosine-3'-phosphate
  modified_base 5: mod_base = OTHER; note = 2'-O-methyluridine-3'-phosphate
  modified_base 6: mod_base = OTHER; note = 2'-O-docosanyl-cytidine-3'-phosphate
  modified_base 7: mod_base = OTHER; note = 2'-deoxy-2'-fluorouridine-3'-phosphate
  modified_base 8: mod_base = OTHER; note = 2'-O-methylguanosine-3'-phosphate
  modified_base 9: mod_base = OTHER; note = 2'-deoxy-2'-fluorouridine-3'-phosphate
  modified_base 10: mod_base = OTHER; note = 2'-deoxy-2'-fluorouridine-3'-phosphate
  modified_base 11: mod_base = OTHER; note = 2'-deoxy-2'-fluoroguanosine-3'-phosphate
  modified_base 12: mod_base = OTHER; note = 2'-O-methyladenosine-3'-phosphate
  modified_base 13: mod_base = OTHER; note = 2'-O-methylcytidine-3'-phosphate
  modified_base 14: mod_base = OTHER; note = 2'-O-methyladenosine-3'-phosphate
  modified_base 15: mod_base = OTHER; note = 2'-O-methyluridine-3'-phosphate
  modified_base 16: mod_base = OTHER; note = 2'-O-methyluridine-3'-phosphate
  modified_base 17: mod_base = OTHER; note = 2'-O-methyluridine-3'-phosphate
  modified_base 18: mod_base = OTHER; note = 2'-O-methyluridine-3'-phosphate
  modified_base 19: mod_base = OTHER; note = 2'-O-methyluridine-3'-phosphorothioate
  modified_base 20: mod_base = OTHER; note = 2'-O-methyluridine-3'-phosphorothioate
  modified_base 21: mod_base = OTHER; note = 2'-O-methyladenosine
catatctgttgacatttttta

SEQ ID NO: 11019 - RNA, 21 nt, synthetic construct
  source 1..21: mol_type = other RNA
  modified_base 1: mod_base = OTHER; note = 2'-O-methyladenosine-3'-phosphorothioate
  modified_base 2: mod_base = OTHER; note = 2'-O-methyluridine-3'-phosphorothioate
  modified_base 3: mod_base = OTHER; note = 2'-O-methyladenosine-3'-phosphate
  modified_base 4: mod_base = OTHER; note = 2'-O-methyluridine-3'-phosphate
  modified_base 5: mod_base = OTHER; note = 2'-O-methylcytidine-3'-phosphate
  modified_base 6: mod_base = OTHER; note = 2'-O-docosanyl-uridine-3'-phosphate
  modified_base 7: mod_base = OTHER; note = 2'-deoxy-2'-fluoroguanosine-3'-phosphate
  modified_base 8: mod_base = OTHER; note = 2'-O-methyluridine-3'-phosphate
  modified_base 9: mod_base = OTHER; note = 2'-deoxy-2'-fluorouridine-3'-phosphate
  modified_base 10: mod_base = OTHER; note = 2'-deoxy-2'-fluoroguanosine-3'-phosphate
  modified_base 11: mod_base = OTHER; note = 2'-deoxy-2'-fluoroadenosine-3'-phosphate
  modified_base 12: mod_base = OTHER; note = 2'-O-methylcytidine-3'-phosphate
  modified_base 13: mod_base = OTHER; note = 2'-O-methyladenosine-3'-phosphate
  modified_base 14: mod_base = OTHER; note = 2'-O-methyluridine-3'-phosphate
  modified_base 15: mod_base = OTHER; note = 2'-O-methyluridine-3'-phosphate
  modified_base 16: mod_base = OTHER; note = 2'-O-methyluridine-3'-phosphate
  modified_base 17: mod_base = OTHER; note = 2'-O-methyluridine-3'-phosphate
  modified_base 18: mod_base = OTHER; note = 2'-O-methyluridine-3'-phosphate
  modified_base 19: mod_base = OTHER; note = 2'-O-methyluridine-3'-phosphorothioate
  modified_base 20: mod_base = OTHER; note = 2'-O-methylcytidine-3'-phosphorothioate
  modified_base 21: mod_base = OTHER; note = 2'-O-methyladenosine
atatctgttgacattttttca

SEQ ID NO: 11020 - RNA, 21 nt, synthetic construct
  source 1..21: mol_type = other RNA
  modified_base 1: mod_base = OTHER; note = 2'-O-methyluridine-3'-phosphorothioate
  modified_base 2: mod_base = OTHER; note = 2'-O-methyladenosine-3'-phosphorothioate
  modified_base 3: mod_base = OTHER; note = 2'-O-methyluridine-3'-phosphate
  modified_base 4: mod_base = OTHER; note = 2'-O-methylcytidine-3'-phosphate
  modified_base 5: mod_base = OTHER; note = 2'-O-methyluridine-3'-phosphate
  modified_base 6: mod_base = OTHER; note = 2'-O-docosanyl-guanosine-3'-phosphate
  modified_base 7: mod_base = OTHER; note = 2'-deoxy-2'-fluorouridine-3'-phosphate
  modified_base 8: mod_base = OTHER; note = 2'-O-methyluridine-3'-phosphate
  modified_base 9: mod_base = OTHER; note = 2'-deoxy-2'-fluoroguanosine-3'-phosphate
  modified_base 10: mod_base = OTHER; note = 2'-deoxy-2'-fluoroadenosine-3'-phosphate
  modified_base 11: mod_base = OTHER; note = 2'-deoxy-2'-fluorocytidine-3'-phosphate
  modified_base 12: mod_base = OTHER; note = 2'-O-methyladenosine-3'-phosphate
  modified_base 13: mod_base = OTHER; note = 2'-O-methyluridine-3'-phosphate
  modified_base 14: mod_base = OTHER; note = 2'-O-methyluridine-3'-phosphate
  modified_base 15: mod_base = OTHER; note = 2'-O-methyluridine-3'-phosphate
  modified_base 16: mod_base = OTHER; note = 2'-O-methyluridine-3'-phosphate
  modified_base 17: mod_base = OTHER; note = 2'-O-methyluridine-3'-phosphate
  modified_base 18: mod_base = OTHER; note = 2'-O-methyluridine-3'-phosphate
  modified_base 19: mod_base = OTHER; note = 2'-O-methylcytidine-3'-phosphorothioate
  modified_base 20: mod_base = OTHER; note = 2'-O-methyluridine-3'-phosphorothioate
  modified_base 21: mod_base = OTHER; note = 2'-O-methyladenosine
tatctgttgacattttttcta

SEQ ID NO: 11021 - RNA, 21 nt, synthetic construct
  source 1..21: mol_type = other RNA
  modified_base 1: mod_base = OTHER; note = 2'-O-methyladenosine-3'-phosphorothioate
  modified_base 2: mod_base = OTHER; note = 2'-O-methyluridine-3'-phosphorothioate
  modified_base 3: mod_base = OTHER; note = 2'-O-methylcytidine-3'-phosphate
  modified_base 4: mod_base = OTHER; note = 2'-O-methyluridine-3'-phosphate
  modified_base 5: mod_base = OTHER; note = 2'-O-methylguanosine-3'-phosphate
  modified_base 6: mod_base = OTHER; note = 2'-O-docosanyl-uridine-3'-phosphate
  modified_base 7: mod_base = OTHER; note = 2'-deoxy-2'-fluorouridine-3'-phosphate
  modified_base 8: mod_base = OTHER; note = 2'-O-methylguanosine-3'-phosphate
  modified_base 9: mod_base = OTHER; note = 2'-deoxy-2'-fluoroadenosine-3'-phosphate
  modified_base 10: mod_base = OTHER; note = 2'-deoxy-2'-fluorocytidine-3'-phosphate
  modified_base 11: mod_base = OTHER; note = 2'-deoxy-2'-fluoroadenosine-3'-phosphate
  modified_base 12: mod_base = OTHER; note = 2'-O-methyluridine-3'-phosphate
  modified_base 13: mod_base = OTHER; note = 2'-O-methyluridine-3'-phosphate
  modified_base 14: mod_base = OTHER; note = 2'-O-methyluridine-3'-phosphate
  modified_base 15: mod_base = OTHER; note = 2'-O-methyluridine-3'-phosphate
  modified_base 16: mod_base = OTHER; note = 2'-O-methyluridine-3'-phosphate
  modified_base 17: mod_base = OTHER; note = 2'-O-methyluridine-3'-phosphate
  modified_base 18: mod_base = OTHER; note = 2'-O-methylcytidine-3'-phosphate
  modified_base 19: mod_base = OTHER; note = 2'-O-methyluridine-3'-phosphorothioate
  modified_base 20: mod_base = OTHER; note = 2'-O-methylcytidine-3'-phosphorothioate
  modified_base 21: mod_base = OTHER; note = 2'-O-methyladenosine
atctgttgacattttttctca

SEQ ID NO: 11022 - RNA, 21 nt, synthetic construct
  source 1..21: mol_type = other RNA
  modified_base 1: mod_base = OTHER; note = 2'-O-methyluridine-3'-phosphorothioate
  modified_base 2: mod_base = OTHER; note = 2'-O-methylcytidine-3'-phosphorothioate
  modified_base 3: mod_base = OTHER; note = 2'-O-methyluridine-3'-phosphate
  modified_base 4: mod_base = OTHER; note = 2'-O-methylguanosine-3'-phosphate
  modified_base 5: mod_base = OTHER; note = 2'-O-methyluridine-3'-phosphate
  modified_base 6: mod_base = OTHER; note = 2'-O-docosanyl-uridine-3'-phosphate
  modified_base 7: mod_base = OTHER; note = 2'-deoxy-2'-fluoroguanosine-3'-phosphate
  modified_base 8: mod_base = OTHER; note = 2'-O-methyladenosine-3'-phosphate
  modified_base 9: mod_base = OTHER; note = 2'-deoxy-2'-fluorocytidine-3'-phosphate
  modified_base 10: mod_base = OTHER; note = 2'-deoxy-2'-fluoroadenosine-3'-phosphate
  modified_base 11: mod_base = OTHER; note = 2'-deoxy-2'-fluorouridine-3'-phosphate
  modified_base 12: mod_base = OTHER; note = 2'-O-methyluridine-3'-phosphate
  modified_base 13: mod_base = OTHER; note = 2'-O-methyluridine-3'-phosphate
  modified_base 14: mod_base = OTHER; note = 2'-O-methyluridine-3'-phosphate
  modified_base 15: mod_base = OTHER; note = 2'-O-methyluridine-3'-phosphate
  modified_base 16: mod_base = OTHER; note = 2'-O-methyluridine-3'-phosphate
  modified_base 17: mod_base = OTHER; note = 2'-O-methylcytidine-3'-phosphate
  modified_base 18: mod_base = OTHER; note = 2'-O-methyluridine-3'-phosphate
  modified_base 19: mod_base = OTHER; note = 2'-O-methylcytidine-3'-phosphorothioate
  modified_base 20: mod_base = OTHER; note = 2'-O-methyladenosine-3'-phosphorothioate
  modified_base 21: mod_base = OTHER; note = 2'-O-methyladenosine
tctgttgacattttttctcaa

SEQ ID NO: 11023 - RNA, 21 nt, synthetic construct
  source 1..21: mol_type = other RNA
  modified_base 1: mod_base = OTHER; note = 2'-O-methylcytidine-3'-phosphorothioate
  modified_base 2: mod_base = OTHER; note = 2'-O-methyluridine-3'-phosphorothioate
  modified_base 3: mod_base = OTHER; note = 2'-O-methylguanosine-3'-phosphate
  modified_base 4: mod_base = OTHER; note = 2'-O-methyluridine-3'-phosphate
  modified_base 5: mod_base = OTHER; note = 2'-O-methyluridine-3'-phosphate
  modified_base 6: mod_base = OTHER; note = 2'-O-docosanyl-guanosine-3'-phosphate
  modified_base 7: mod_base = OTHER; note = 2'-deoxy-2'-fluoroadenosine-3'-phosphate
  modified_base 8: mod_base = OTHER; note = 2'-O-methylcytidine-3'-phosphate
  modified_base 9: mod_base = OTHER; note = 2'-deoxy-2'-fluoroadenosine-3'-phosphate
  modified_base 10: mod_base = OTHER; note = 2'-deoxy-2'-fluorouridine-3'-phosphate
  modified_base 11: mod_base = OTHER; note = 2'-deoxy-2'-fluorouridine-3'-phosphate
  modified_base 12: mod_base = OTHER; note = 2'-O-methyluridine-3'-phosphate
  modified_base 13: mod_base = OTHER; note = 2'-O-methyluridine-3'-phosphate
  modified_base 14: mod_base = OTHER; note = 2'-O-methyluridine-3'-phosphate
  modified_base 15: mod_base = OTHER; note = 2'-O-methyluridine-3'-phosphate
  modified_base 16: mod_base = OTHER; note = 2'-O-methylcytidine-3'-phosphate
  modified_base 17: mod_base = OTHER; note = 2'-O-methyluridine-3'-phosphate
  modified_base 18: mod_base = OTHER; note = 2'-O-methylcytidine-3'-phosphate
  modified_base 19: mod_base = OTHER; note = 2'-O-methyladenosine-3'-phosphorothioate
  modified_base 20: mod_base = OTHER; note = 2'-O-methyluridine-3'-phosphorothioate
  modified_base 21: mod_base = OTHER; note = 2'-O-methyladenosine
ctgttgacattttttctcata

SEQ ID NO: 11024 - RNA, 21 nt, synthetic construct
  source 1..21: mol_type = other RNA
  modified_base 1: mod_base = OTHER; note = 2'-O-methyluridine-3'-phosphorothioate
  modified_base 2: mod_base = OTHER; note = 2'-O-methylguanosine-3'-phosphorothioate
  modified_base 3: mod_base = OTHER; note = 2'-O-methyluridine-3'-phosphate
  modified_base 4: mod_base = OTHER; note = 2'-O-methyluridine-3'-phosphate
  modified_base 5: mod_base = OTHER; note = 2'-O-methylguanosine-3'-phosphate
  modified_base 6: mod_base = OTHER; note = 2'-O-docosanyl-adenosine-3'-phosphate
  modified_base 7: mod_base = OTHER; note = 2'-deoxy-2'-fluorocytidine-3'-phosphate
  modified_base 8: mod_base = OTHER; note = 2'-O-methyladenosine-3'-phosphate
  modified_base 9: mod_base = OTHER; note = 2'-deoxy-2'-fluorouridine-3'-phosphate
  modified_base 10: mod_base = OTHER; note = 2'-deoxy-2'-fluorouridine-3'-phosphate
  modified_base 11: mod_base = OTHER; note = 2'-deoxy-2'-fluorouridine-3'-phosphate
  modified_base 12: mod_base = OTHER; note = 2'-O-methyluridine-3'-phosphate
  modified_base 13: mod_base = OTHER; note = 2'-O-methyluridine-3'-phosphate
  modified_base 14: mod_base = OTHER; note = 2'-O-methyluridine-3'-phosphate
  modified_base 15: mod_base = OTHER; note = 2'-O-methylcytidine-3'-phosphate
  modified_base 16: mod_base = OTHER; note = 2'-O-methyluridine-3'-phosphate
  modified_base 17: mod_base = OTHER; note = 2'-O-methylcytidine-3'-phosphate
  modified_base 18: mod_base = OTHER; note = 2'-O-methyladenosine-3'-phosphate
  modified_base 19: mod_base = OTHER; note = 2'-O-methyluridine-3'-phosphorothioate
  modified_base 20: mod_base = OTHER; note = 2'-O-methyladenosine-3'-phosphorothioate
  modified_base 21: mod_base = OTHER; note = 2'-O-methyladenosine
tgttgacattttttctcataa

SEQ ID NO: 11025 - RNA, 21 nt, synthetic construct
  source 1..21: mol_type = other RNA
  modified_base 1: mod_base = OTHER; note = 2'-O-methylguanosine-3'-phosphorothioate
  modified_base 2: mod_base = OTHER; note = 2'-O-methyluridine-3'-phosphorothioate
  modified_base 3: mod_base = OTHER; note = 2'-O-methyluridine-3'-phosphate
  modified_base 4: mod_base = OTHER; note = 2'-O-methylguanosine-3'-phosphate
  modified_base 5: mod_base = OTHER; note = 2'-O-methyladenosine-3'-phosphate
  modified_base 6: mod_base = OTHER; note = 2'-O-docosanyl-cytidine-3'-phosphate
  modified_base 7: mod_base = OTHER; note = 2'-deoxy-2'-fluoroadenosine-3'-phosphate
  modified_base 8: mod_base = OTHER; note = 2'-O-methyluridine-3'-phosphate
  modified_base 9: mod_base = OTHER; note = 2'-deoxy-2'-fluorouridine-3'-phosphate
  modified_base 10: mod_base = OTHER; note = 2'-deoxy-2'-fluorouridine-3'-phosphate
  modified_base 11: mod_base = OTHER; note = 2'-deoxy-2'-fluorouridine-3'-phosphate
  modified_base 12: mod_base = OTHER; note = 2'-O-methyluridine-3'-phosphate
  modified_base 13: mod_base = OTHER; note = 2'-O-methyluridine-3'-phosphate
  modified_base 14: mod_base = OTHER; note = 2'-O-methylcytidine-3'-phosphate
  modified_base 15: mod_base = OTHER; note = 2'-O-methyluridine-3'-phosphate
  modified_base 16: mod_base = OTHER; note = 2'-O-methylcytidine-3'-phosphate
  modified_base 17: mod_base = OTHER; note = 2'-O-methyladenosine-3'-phosphate
  modified_base 18: mod_base = OTHER; note = 2'-O-methyluridine-3'-phosphate
  modified_base 19: mod_base = OTHER; note = 2'-O-methyladenosine-3'-phosphorothioate
  modified_base 20: mod_base = OTHER; note = 2'-O-methylguanosine-3'-phosphorothioate
  modified_base 21: mod_base = OTHER; note = 2'-O-methyladenosine
gttgacattttttctcataga

SEQ ID NO: 11026 - RNA, 21 nt, synthetic construct
  source 1..21: mol_type = other RNA
  modified_base 1: mod_base = OTHER; note = 2'-O-methyluridine-3'-phosphorothioate
  modified_base 2: mod_base = OTHER; note = 2'-O-methyluridine-3'-phosphorothioate
  modified_base 3: mod_base = OTHER; note = 2'-O-methylguanosine-3'-phosphate
  modified_base 4: mod_base = OTHER; note = 2'-O-methyladenosine-3'-phosphate
  modified_base 5: mod_base = OTHER; note = 2'-O-methylcytidine-3'-phosphate
  modified_base 6: mod_base = OTHER; note = 2'-O-docosanyl-adenosine-3'-phosphate
  modified_base 7: mod_base = OTHER; note = 2'-deoxy-2'-fluorouridine-3'-phosphate
  modified_base 8: mod_base = OTHER; note = 2'-O-methyluridine-3'-phosphate
  modified_base 9: mod_base = OTHER; note = 2'-deoxy-2'-fluorouridine-3'-phosphate
  modified_base 10: mod_base = OTHER; note = 2'-deoxy-2'-fluorouridine-3'-phosphate
  modified_base 11: mod_base = OTHER; note = 2'-deoxy-2'-fluorouridine-3'-phosphate
  modified_base 12: mod_base = OTHER; note = 2'-O-methyluridine-3'-phosphate
  modified_base 13: mod_base = OTHER; note = 2'-O-methylcytidine-3'-phosphate
  modified_base 14: mod_base = OTHER; note = 2'-O-methyluridine-3'-phosphate
  modified_base 15: mod_base = OTHER; note = 2'-O-methylcytidine-3'-phosphate
  modified_base 16: mod_base = OTHER; note = 2'-O-methyladenosine-3'-phosphate
  modified_base 17: mod_base = OTHER; note = 2'-O-methyluridine-3'-phosphate
  modified_base 18: mod_base = OTHER; note = 2'-O-methyladenosine-3'-phosphate
  modified_base 19: mod_base = OTHER; note = 2'-O-methylguanosine-3'-phosphorothioate
  modified_base 20: mod_base = OTHER; note = 2'-O-methyladenosine-3'-phosphorothioate
  modified_base 21: mod_base = OTHER; note = 2'-O-methyladenosine
ttgacattttttctcatagaa

SEQ ID NO: 11027 - RNA, 21 nt, synthetic construct
  source 1..21: mol_type = other RNA
  modified_base 1: mod_base = OTHER; note = 2'-O-methyluridine-3'-phosphorothioate
  modified_base 2: mod_base = OTHER; note = 2'-O-methylcytidine-3'-phosphorothioate
  modified_base 3: mod_base = OTHER; note = 2'-O-methyluridine-3'-phosphate
  modified_base 4: mod_base = OTHER; note = 2'-O-methylcytidine-3'-phosphate
  modified_base 5: mod_base = OTHER; note = 2'-O-methyladenosine-3'-phosphate
  modified_base 6: mod_base = OTHER; note = 2'-O-docosanyl-uridine-3'-phosphate
  modified_base 7: mod_base = OTHER; note = 2'-deoxy-2'-fluoroadenosine-3'-phosphate
  modified_base 8: mod_base = OTHER; note = 2'-O-methylguanosine-3'-phosphate
  modified_base 9: mod_base = OTHER; note = 2'-deoxy-2'-fluoroadenosine-3'-phosphate
  modified_base 10: mod_base = OTHER; note = 2'-deoxy-2'-fluoroadenosine-3'-phosphate
  modified_base 11: mod_base = OTHER; note = 2'-deoxy-2'-fluoroadenosine-3'-phosphate
  modified_base 12: mod_base = OTHER; note = 2'-O-methyluridine-3'-phosphate
  modified_base 13: mod_base = OTHER; note = 2'-O-methyladenosine-3'-phosphate
  modified_base 14: mod_base = OTHER; note = 2'-O-methyluridine-3'-phosphate
  modified_base 15: mod_base = OTHER; note = 2'-O-methylcytidine-3'-phosphate
  modified_base 16: mod_base = OTHER; note = 2'-O-methyladenosine-3'-phosphate
  modified_base 17: mod_base = OTHER; note = 2'-O-methyluridine-3'-phosphate
  modified_base 18: mod_base = OTHER; note = 2'-O-methylguanosine-3'-phosphate
  modified_base 19: mod_base = OTHER; note = 2'-O-methylguanosine-3'-phosphorothioate
  modified_base 20: mod_base = OTHER; note = 2'-O-methyluridine-3'-phosphorothioate
  modified_base 21: mod_base = OTHER; note = 2'-O-methyladenosine
tctcatagaaatatcatggta

SEQ ID NO: 11028 - RNA, 21 nt, synthetic construct
  source 1..21: mol_type = other RNA
  modified_base 1: mod_base = OTHER; note = 2'-O-methylcytidine-3'-phosphorothioate
  modified_base 2: mod_base = OTHER; note = 2'-O-methyluridine-3'-phosphorothioate
  modified_base 3: mod_base = OTHER; note = 2'-O-methylcytidine-3'-phosphate
  modified_base 4: mod_base = OTHER; note = 2'-O-methyladenosine-3'-phosphate
  modified_base 5: mod_base = OTHER; note = 2'-O-methyluridine-3'-phosphate
  modified_base 6: mod_base = OTHER; note = 2'-O-docosanyl-adenosine-3'-phosphate
  modified_base 7: mod_base = OTHER; note = 2'-deoxy-2'-fluoroguanosine-3'-phosphate
  modified_base 8: mod_base = OTHER; note = 2'-O-methyladenosine-3'-phosphate
  modified_base 9: mod_base = OTHER; note = 2'-deoxy-2'-fluoroadenosine-3'-phosphate
  modified_base 10: mod_base = OTHER; note = 2'-deoxy-2'-fluoroadenosine-3'-phosphate
  modified_base 11: mod_base = OTHER; note = 2'-deoxy-2'-fluorouridine-3'-phosphate
  modified_base 12: mod_base = OTHER; note = 2'-O-methyladenosine-3'-phosphate
  modified_base 13: mod_base = OTHER; note = 2'-O-methyluridine-3'-phosphate
  modified_base 14: mod_base = OTHER; note = 2'-O-methylcytidine-3'-phosphate
  modified_base 15: mod_base = OTHER; note = 2'-O-methyladenosine-3'-phosphate
  modified_base 16: mod_base = OTHER; note = 2'-O-methyluridine-3'-phosphate
  modified_base 17: mod_base = OTHER; note = 2'-O-methylguanosine-3'-phosphate
  modified_base 18: mod_base = OTHER; note = 2'-O-methylguanosine-3'-phosphate
  modified_base 19: mod_base = OTHER; note = 2'-O-methyluridine-3'-phosphorothioate
  modified_base 20: mod_base = OTHER; note = 2'-O-methyluridine-3'-phosphorothioate
  modified_base 21: mod_base = OTHER; note = 2'-O-methyladenosine
ctcatagaaatatcatggtta

SEQ ID NO: 11029 - RNA, 21 nt, synthetic construct
  source 1..21: mol_type = other RNA
  modified_base 1: mod_base = OTHER; note = 2'-O-methyluridine-3'-phosphorothioate
  modified_base 2: mod_base = OTHER; note = 2'-O-methylcytidine-3'-phosphorothioate
  modified_base 3: mod_base = OTHER; note = 2'-O-methyladenosine-3'-phosphate
  modified_base 4: mod_base = OTHER; note = 2'-O-methyluridine-3'-phosphate
  modified_base 5: mod_base = OTHER; note = 2'-O-methyladenosine-3'-phosphate
  modified_base 6: mod_base = OTHER; note = 2'-O-docosanyl-guanosine-3'-phosphate
  modified_base 7: mod_base = OTHER; note = 2'-deoxy-2'-fluoroadenosine-3'-phosphate
  modified_base 8: mod_base = OTHER; note = 2'-O-methyladenosine-3'-phosphate
  modified_base 9: mod_base = OTHER; note = 2'-deoxy-2'-fluoroadenosine-3'-phosphate
  modified_base 10: mod_base = OTHER; note = 2'-deoxy-2'-fluorouridine-3'-phosphate
  modified_base 11: mod_base = OTHER; note = 2'-deoxy-2'-fluoroadenosine-3'-phosphate
  modified_base 12: mod_base = OTHER; note = 2'-O-methyluridine-3'-phosphate
  modified_base 13: mod_base = OTHER; note = 2'-O-methylcytidine-3'-phosphate
  modified_base 14: mod_base = OTHER; note = 2'-O-methyladenosine-3'-phosphate
  modified_base 15: mod_base = OTHER; note = 2'-O-methyluridine-3'-phosphate
  modified_base 16: mod_base = OTHER; note = 2'-O-methylguanosine-3'-phosphate
  modified_base 17: mod_base = OTHER; note = 2'-O-methylguanosine-3'-phosphate
  modified_base 18: mod_base = OTHER; note = 2'-O-methyluridine-3'-phosphate
  modified_base 19: mod_base = OTHER; note = 2'-O-methyluridine-3'-phosphorothioate
  modified_base 20: mod_base = OTHER; note = 2'-O-methyladenosine-3'-phosphorothioate
  modified_base 21: mod_base = OTHER; note = 2'-O-methyladenosine
tcatagaaatatcatggttaa

SEQ ID NO: 11030 - RNA, 21 nt, synthetic construct
  source 1..21: mol_type = other RNA
  modified_base 1: mod_base = OTHER; note = 2'-O-methylcytidine-3'-phosphorothioate
  modified_base 2: mod_base = OTHER; note = 2'-O-methyladenosine-3'-phosphorothioate
  modified_base 3: mod_base = OTHER; note = 2'-O-methyluridine-3'-phosphate
  modified_base 4: mod_base = OTHER; note = 2'-O-methyluridine-3'-phosphate
  modified_base 5: mod_base = OTHER; note = 2'-O-methyluridine-3'-phosphate
  modified_base 6: mod_base = OTHER; note = 2'-O-docosanyl-guanosine-3'-phosphate
  modified_base 7: mod_base = OTHER; note = 2'-deoxy-2'-fluorouridine-3'-phosphate
  modified_base 8: mod_base = OTHER; note = 2'-O-methyluridine-3'-phosphate
  modified_base 9: mod_base = OTHER; note = 2'-deoxy-2'-fluoroadenosine-3'-phosphate
  modified_base 10: mod_base = OTHER; note = 2'-deoxy-2'-fluoroadenosine-3'-phosphate
  modified_base 11: mod_base = OTHER; note = 2'-deoxy-2'-fluorouridine-3'-phosphate
  modified_base 12: mod_base = OTHER; note = 2'-O-methylguanosine-3'-phosphate
  modified_base 13: mod_base = OTHER; note = 2'-O-methyladenosine-3'-phosphate
  modified_base 14: mod_base = OTHER; note = 2'-O-methylguanosine-3'-phosphate
  modified_base 15: mod_base = OTHER; note = 2'-O-methylcytidine-3'-phosphate
  modified_base 16: mod_base = OTHER; note = 2'-O-methyladenosine-3'-phosphate
  modified_base 17: mod_base = OTHER; note = 2'-O-methyluridine-3'-phosphate
  modified_base 18: mod_base = OTHER; note = 2'-O-methyluridine-3'-phosphate
  modified_base 19: mod_base = OTHER; note = 2'-O-methyladenosine-3'-phosphorothioate
  modified_base 20: mod_base = OTHER; note = 2'-O-methyladenosine-3'-phosphorothioate
  modified_base 21: mod_base = OTHER; note = 2'-O-methyladenosine
catttgttaatgagcattaaa

SEQ ID NO: 11031 - RNA, 21 nt, synthetic construct
  source 1..21: mol_type = other RNA
  modified_base 1: mod_base = OTHER; note = 2'-O-methyladenosine-3'-phosphorothioate
  modified_base 2: mod_base = OTHER; note = 2'-O-methyluridine-3'-phosphorothioate
  modified_base 3: mod_base = OTHER; note = 2'-O-methylguanosine-3'-phosphate
  modified_base 4: mod_base = OTHER; note = 2'-O-methyladenosine-3'-phosphate
  modified_base 5: mod_base = OTHER; note = 2'-O-methylguanosine-3'-phosphate
  modified_base 6: mod_base = OTHER; note = 2'-O-docosanyl-cytidine-3'-phosphate
  modified_base 7: mod_base = OTHER; note = 2'-deoxy-2'-fluoroadenosine-3'-phosphate
  modified_base 8: mod_base = OTHER; note = 2'-O-methyluridine-3'-phosphate
  modified_base 9: mod_base = OTHER; note = 2'-deoxy-2'-fluorouridine-3'-phosphate
  modified_base 10: mod_base = OTHER; note = 2'-deoxy-2'-fluoroadenosine-3'-phosphate
  modified_base 11: mod_base = OTHER; note = 2'-deoxy-2'-fluoroadenosine-3'-phosphate
  modified_base 12: mod_base = OTHER; note = 2'-O-methyluridine-3'-phosphate
  modified_base 13: mod_base = OTHER; note = 2'-O-methylguanosine-3'-phosphate
  modified_base 14: mod_base = OTHER; note = 2'-O-methyluridine-3'-phosphate
  modified_base 15: mod_base = OTHER; note = 2'-O-methyluridine-3'-phosphate
  modified_base 16: mod_base = OTHER; note = 2'-O-methyluridine-3'-phosphate
  modified_base 17: mod_base = OTHER; note = 2'-O-methyluridine-3'-phosphate
  modified_base 18: mod_base = OTHER; note = 2'-O-methylcytidine-3'-phosphate
  modified_base 19: mod_base = OTHER; note = 2'-O-methyluridine-3'-phosphorothioate
  modified_base 20: mod_base = OTHER; note = 2'-O-methylguanosine-3'-phosphorothioate
  modified_base 21: mod_base = OTHER; note = 2'-O-methyladenosine
atgagcattaatgttttctga

SEQ ID NO: 11032 - RNA, 21 nt, synthetic construct
  source 1..21: mol_type = other RNA
  modified_base 1: mod_base = OTHER; note = 2'-O-methylguanosine-3'-phosphorothioate
  modified_base 2: mod_base = OTHER; note = 2'-O-methyladenosine-3'-phosphorothioate
  modified_base 3: mod_base = OTHER; note = 2'-O-methyladenosine-3'-phosphate
  modified_base 4: mod_base = OTHER; note = 2'-O-methylcytidine-3'-phosphate
  modified_base 5: mod_base = OTHER; note = 2'-O-methyladenosine-3'-phosphate
  modified_base 6: mod_base = OTHER; note = 2'-O-docosanyl-cytidine-3'-phosphate
  modified_base 7: mod_base = OTHER; note = 2'-deoxy-2'-fluorouridine-3'-phosphate
  modified_base 8: mod_base = OTHER; note = 2'-O-methyluridine-3'-phosphate
  modified_base 9: mod_base = OTHER; note = 2'-deoxy-2'-fluorocytidine-3'-phosphate
  modified_base 10: mod_base = OTHER; note = 2'-deoxy-2'-fluorocytidine-3'-phosphate
  modified_base 11: mod_base = OTHER; note = 2'-deoxy-2'-fluoroadenosine-3'-phosphate
  modified_base 12: mod_base = OTHER; note = 2'-O-methyladenosine-3'-phosphate
  modified_base 13: mod_base = OTHER; note = 2'-O-methyladenosine-3'-phosphate
  modified_base 14: mod_base = OTHER; note = 2'-O-methylguanosine-3'-phosphate
  modified_base 15: mod_base = OTHER; note = 2'-O-methyladenosine-3'-phosphate
  modified_base 16: mod_base = OTHER; note = 2'-O-methyluridine-3'-phosphate
  modified_base 17: mod_base = OTHER; note = 2'-O-methyluridine-3'-phosphate
  modified_base 18: mod_base = OTHER; note = 2'-O-methyladenosine-3'-phosphate
  modified_base 19: mod_base = OTHER; note = 2'-O-methyladenosine-3'-phosphorothioate
  modified_base 20: mod_base = OTHER; note = 2'-O-methyluridine-3'-phosphorothioate
  modified_base 21: mod_base = OTHER; note = 2'-O-methyladenosine
gaacacttccaaagattaata

SEQ ID NO: 11033 - RNA, 21 nt, synthetic construct
  source 1..21: mol_type = other RNA
  modified_base 1: mod_base = OTHER; note = 2'-O-methyluridine-3'-phosphorothioate
  modified_base 2: mod_base = OTHER; note = 2'-O-methyluridine-3'-phosphorothioate
  modified_base 3: mod_base = OTHER; note = 2'-O-methyluridine-3'-phosphate
  modified_base 4: mod_base = OTHER; note = 2'-O-methylguanosine-3'-phosphate
  modified_base 5: mod_base = OTHER; note = 2'-O-methyluridine-3'-phosphate
  modified_base 6: mod_base = OTHER; note = 2'-O-docosanyl-uridine-3'-phosphate
  modified_base 7: mod_base = OTHER; note = 2'-deoxy-2'-fluoroadenosine-3'-phosphate
  modified_base 8: mod_base = OTHER; note = 2'-O-methyladenosine-3'-phosphate
  modified_base 9: mod_base = OTHER; note = 2'-deoxy-2'-fluorouridine-3'-phosphate
  modified_base 10: mod_base = OTHER; note = 2'-deoxy-2'-fluoroguanosine-3'-phosphate
  modified_base 11: mod_base = OTHER; note = 2'-deoxy-2'-fluoroadenosine-3'-phosphate
  modified_base 12: mod_base = OTHER; note = 2'-O-methylguanosine-3'-phosphate
  modified_base 13: mod_base = OTHER; note = 2'-O-methylcytidine-3'-phosphate
  modified_base 14: mod_base = OTHER; note = 2'-O-methyladenosine-3'-phosphate
  modified_base 15: mod_base = OTHER; note = 2'-O-methyluridine-3'-phosphate
  modified_base 16: mod_base = OTHER; note = 2'-O-methyluridine-3'-phosphate
  modified_base 17: mod_base = OTHER; note = 2'-O-methyladenosine-3'-phosphate
  modified_base 18: mod_base = OTHER; note = 2'-O-methyladenosine-3'-phosphate
  modified_base 19: mod_base = OTHER; note = 2'-O-methyluridine-3'-phosphorothioate
  modified_base 20: mod_base = OTHER; note = 2'-O-methylguanosine-3'-phosphorothioate
  modified_base 21: mod_base = OTHER; note = 2'-O-methyladenosine
tttgttaatgagcattaatga

SEQ ID NO: 11034 - RNA, 21 nt, synthetic construct
  source 1..21: mol_type = other RNA
  modified_base 1: mod_base = OTHER; note = 2'-O-methyluridine-3'-phosphorothioate
  modified_base 2: mod_base = OTHER; note = 2'-O-methyladenosine-3'-phosphorothioate
  modified_base 3: mod_base = OTHER; note = 2'-O-methyladenosine-3'-phosphate
  modified_base 4: mod_base = OTHER; note = 2'-O-methyluridine-3'-phosphate
  modified_base 5: mod_base = OTHER; note = 2'-O-methylguanosine-3'-phosphate
  modified_base 6: mod_base = OTHER; note = 2'-O-docosanyl-adenosine-3'-phosphate
  modified_base 7: mod_base = OTHER; note = 2'-deoxy-2'-fluoroguanosine-3'-phosphate
  modified_base 8: mod_base = OTHER; note = 2'-O-methylcytidine-3'-phosphate
  modified_base 9: mod_base = OTHER; note = 2'-deoxy-2'-fluoroadenosine-3'-phosphate
  modified_base 10: mod_base = OTHER; note = 2'-deoxy-2'-fluorouridine-3'-phosphate
  modified_base 11: mod_base = OTHER; note = 2'-deoxy-2'-fluorouridine-3'-phosphate
  modified_base 12: mod_base = OTHER; note = 2'-O-methyladenosine-3'-phosphate
  modified_base 13: mod_base = OTHER; note = 2'-O-methyladenosine-3'-phosphate
  modified_base 14: mod_base = OTHER; note = 2'-O-methyluridine-3'-phosphate
  modified_base 15: mod_base = OTHER; note = 2'-O-methylguanosine-3'-phosphate
  modified_base 16: mod_base = OTHER; note = 2'-O-methyluridine-3'-phosphate
  modified_base 17: mod_base = OTHER; note = 2'-O-methyluridine-3'-phosphate
  modified_base 18: mod_base = OTHER; note = 2'-O-methyluridine-3'-phosphate
  modified_base 19: mod_base = OTHER; note = 2'-O-methyluridine-3'-phosphorothioate
  modified_base 20: mod_base = OTHER; note = 2'-O-methylcytidine-3'-phosphorothioate
  modified_base 21: mod_base = OTHER; note = 2'-O-methyladenosine
taatgagcattaatgttttca

SEQ ID NO: 11035 - RNA, 21 nt, synthetic construct
  source 1..21: mol_type = other RNA
  modified_base 1: mod_base = OTHER; note = 2'-O-methyluridine-3'-phosphorothioate
  modified_base 2: mod_base = OTHER; note = 2'-O-methylguanosine-3'-phosphorothioate
  modified_base 3: mod_base = OTHER; note = 2'-O-methyladenosine-3'-phosphate
  modified_base 4: mod_base = OTHER; note = 2'-O-methylguanosine-3'-phosphate
  modified_base 5: mod_base = OTHER; note = 2'-O-methylcytidine-3'-phosphate
  modified_base 6: mod_base = OTHER; note = 2'-O-docosanyl-adenosine-3'-phosphate
  modified_base 7: mod_base = OTHER; note = 2'-deoxy-2'-fluorouridine-3'-phosphate
  modified_base 8: mod_base = OTHER; note = 2'-O-methyluridine-3'-phosphate
  modified_base 9: mod_base = OTHER; note = 2'-deoxy-2'-fluoroadenosine-3'-phosphate
  modified_base 10: mod_base = OTHER; note = 2'-deoxy-2'-fluoroadenosine-3'-phosphate
  modified_base 11: mod_base = OTHER; note = 2'-deoxy-2'-fluorouridine-3'-phosphate
  modified_base 12: mod_base = OTHER; note = 2'-O-methylguanosine-3'-phosphate
  modified_base 13: mod_base = OTHER; note = 2'-O-methyluridine-3'-phosphate
  modified_base 14: mod_base = OTHER; note = 2'-O-methyluridine-3'-phosphate
  modified_base 15: mod_base = OTHER; note = 2'-O-methyluridine-3'-phosphate
  modified_base 16: mod_base = OTHER; note = 2'-O-methyluridine-3'-phosphate
  modified_base 17: mod_base = OTHER; note = 2'-O-methylcytidine-3'-phosphate
  modified_base 18: mod_base = OTHER; note = 2'-O-methyluridine-3'-phosphate
  modified_base 19: mod_base = OTHER; note = 2'-O-methylguanosine-3'-phosphorothioate
  modified_base 20: mod_base = OTHER; note = 2'-O-methyladenosine-3'-phosphorothioate
  modified_base 21: mod_base = OTHER; note = 2'-O-methyladenosine
tgagcattaatgttttctgaa

SEQ ID NO: 11036 - RNA, 21 nt, synthetic construct
  source 1..21: mol_type = other RNA
  modified_base 1: mod_base = OTHER; note = 2'-O-methylguanosine-3'-phosphorothioate
  modified_base 2: mod_base = OTHER; note = 2'-O-methyladenosine-3'-phosphorothioate
  modified_base 3: mod_base = OTHER; note = 2'-O-methylguanosine-3'-phosphate
  modified_base 4: mod_base = OTHER; note = 2'-O-methylcytidine-3'-phosphate
  modified_base 5: mod_base = OTHER; note = 2'-O-methyladenosine-3'-phosphate
  modified_base 6: mod_base = OTHER; note = 2'-O-docosanyl-uridine-3'-phosphate
  modified_base 7: mod_base = OTHER; note = 2'-deoxy-2'-fluorouridine-3'-phosphate
  modified_base 8: mod_base = OTHER; note = 2'-O-methyladenosine-3'-phosphate
  modified_base 9: mod_base = OTHER; note = 2'-deoxy-2'-fluoroadenosine-3'-phosphate
  modified_base 10: mod_base = OTHER; note = 2'-deoxy-2'-fluorouridine-3'-phosphate
  modified_base 11: mod_base = OTHER; note = 2'-deoxy-2'-fluoroguanosine-3'-phosphate
  modified_base 12: mod_base = OTHER; note = 2'-O-methyluridine-3'-phosphate
  modified_base 13: mod_base = OTHER; note = 2'-O-methyluridine-3'-phosphate
  modified_base 14: mod_base = OTHER; note = 2'-O-methyluridine-3'-phosphate
  modified_base 15: mod_base = OTHER; note = 2'-O-methyluridine-3'-phosphate
  modified_base 16: mod_base = OTHER; note = 2'-O-methylcytidine-3'-phosphate
  modified_base 17: mod_base = OTHER; note = 2'-O-methyluridine-3'-phosphate
  modified_base 18: mod_base = OTHER; note = 2'-O-methylguanosine-3'-phosphate
  modified_base 19: mod_base = OTHER; note = 2'-O-methyladenosine-3'-phosphorothioate
  modified_base 20: mod_base = OTHER; note = 2'-O-methyladenosine-3'-phosphorothioate
  modified_base 21: mod_base = OTHER; note = 2'-O-methyladenosine
gagcattaatgttttctgaaa

SEQ ID NO: 11037 - RNA, 21 nt, synthetic construct
  source 1..21: mol_type = other RNA
  modified_base 1: mod_base = OTHER; note = 2'-O-methyladenosine-3'-phosphorothioate
  modified_base 2: mod_base = OTHER; note = 2'-O-methylguanosine-3'-phosphorothioate
  modified_base 3: mod_base = OTHER; note = 2'-O-methylcytidine-3'-phosphate
  modified_base 4: mod_base = OTHER; note = 2'-O-methyladenosine-3'-phosphate
  modified_base 5: mod_base = OTHER; note = 2'-O-methyluridine-3'-phosphate
  modified_base 6: mod_base = OTHER; note = 2'-O-docosanyl-uridine-3'-phosphate
  modified_base 7: mod_base = OTHER; note = 2'-deoxy-2'-fluoroadenosine-3'-phosphate
  modified_base 8: mod_base = OTHER; note = 2'-O-methyladenosine-3'-phosphate
  modified_base 9: mod_base = OTHER; note = 2'-deoxy-2'-fluorouridine-3'-phosphate
  modified_base 10: mod_base = OTHER; note = 2'-deoxy-2'-fluoroguanosine-3'-phosphate
  modified_base 11: mod_base = OTHER; note = 2'-deoxy-2'-fluorouridine-3'-phosphate
  modified_base 12: mod_base = OTHER; note = 2'-O-methyluridine-3'-phosphate
  modified_base 13: mod_base = OTHER; note = 2'-O-methyluridine-3'-phosphate
  modified_base 14: mod_base = OTHER; note = 2'-O-methyluridine-3'-phosphate
  modified_base 15: mod_base = OTHER; note = 2'-O-methylcytidine-3'-phosphate
  modified_base 16: mod_base = OTHER; note = 2'-O-methyluridine-3'-phosphate
  modified_base 17: mod_base = OTHER; note = 2'-O-methylguanosine-3'-phosphate
  modified_base 18: mod_base = OTHER; note = 2'-O-methyladenosine-3'-phosphate
  modified_base 19: mod_base = OTHER; note = 2'-O-methyladenosine-3'-phosphorothioate
  modified_base 20: mod_base = OTHER; note = 2'-O-methylcytidine-3'-phosphorothioate
  modified_base 21: mod_base = OTHER; note = 2'-O-methyladenosine
agcattaatgttttctgaaca

SEQ ID NO: 11038 - RNA, 21 nt, synthetic construct
  source 1..21: mol_type = other RNA
  modified_base 1: mod_base = OTHER; note = 2'-O-methylguanosine-3'-phosphorothioate
  modified_base 2: mod_base = OTHER; note = 2'-O-methylcytidine-3'-phosphorothioate
  modified_base 3: mod_base = OTHER; note = 2'-O-methyladenosine-3'-phosphate
  modified_base 4: mod_base = OTHER; note = 2'-O-methyluridine-3'-phosphate
  modified_base 5: mod_base = OTHER; note = 2'-O-methyluridine-3'-phosphate
  modified_base 6: mod_base = OTHER; note = 2'-O-docosanyl-adenosine-3'-phosphate
  modified_base 7: mod_base = OTHER; note = 2'-deoxy-2'-fluoroadenosine-3'-phosphate
  modified_base 8: mod_base = OTHER; note = 2'-O-methyluridine-3'-phosphate
  modified_base 9: mod_base = OTHER; note = 2'-deoxy-2'-fluoroguanosine-3'-phosphate
  modified_base 10: mod_base = OTHER; note = 2'-deoxy-2'-fluorouridine-3'-phosphate
  modified_base 11: mod_base = OTHER; note = 2'-deoxy-2'-fluorouridine-3'-phosphate
  modified_base 12: mod_base = OTHER; note = 2'-O-methyluridine-3'-phosphate
  modified_base 13: mod_base = OTHER; note = 2'-O-methyluridine-3'-phosphate
  modified_base 14: mod_base = OTHER; note = 2'-O-methylcytidine-3'-phosphate
  modified_base 15: mod_base = OTHER; note = 2'-O-methyluridine-3'-phosphate
  modified_base 16: mod_base = OTHER; note = 2'-O-methylguanosine-3'-phosphate
  modified_base 17: mod_base = OTHER; note = 2'-O-methyladenosine-3'-phosphate
  modified_base 18: mod_base = OTHER; note = 2'-O-methyladenosine-3'-phosphate
  modified_base 19: mod_base = OTHER; note = 2'-O-methylcytidine-3'-phosphorothioate
  modified_base 20: mod_base = OTHER; note = 2'-O-methyladenosine-3'-phosphorothioate
  modified_base 21: mod_base = OTHER; note = 2'-O-methyladenosine
gcattaatgttttctgaacaa

SEQ ID NO: 11039 - RNA, 21 nt, synthetic construct
  source 1..21: mol_type = other RNA
  modified_base 1: mod_base = OTHER; note = 2'-O-methylcytidine-3'-phosphorothioate
  modified_base 2: mod_base = OTHER; note = 2'-O-methyladenosine-3'-phosphorothioate
  modified_base 3: mod_base = OTHER; note = 2'-O-methyluridine-3'-phosphate
  modified_base 4: mod_base = OTHER; note = 2'-O-methyluridine-3'-phosphate
  modified_base 5: mod_base = OTHER; note = 2'-O-methyladenosine-3'-phosphate
  modified_base 6: mod_base = OTHER; note = 2'-O-docosanyl-adenosine-3'-phosphate
  modified_base 7: mod_base = OTHER; note = 2'-deoxy-2'-fluorouridine-3'-phosphate
  modified_base 8: mod_base = OTHER; note = 2'-O-methylguanosine-3'-phosphate
  modified_base 9: mod_base = OTHER; note = 2'-deoxy-2'-fluorouridine-3'-phosphate
  modified_base 10: mod_base = OTHER; note = 2'-deoxy-2'-fluorouridine-3'-phosphate
  modified_base 11: mod_base = OTHER; note = 2'-deoxy-2'-fluorouridine-3'-phosphate
  modified_base 12: mod_base = OTHER; note = 2'-O-methyluridine-3'-phosphate
  modified_base 13: mod_base = OTHER; note = 2'-O-methylcytidine-3'-phosphate
  modified_base 14: mod_base = OTHER; note = 2'-O-methyluridine-3'-phosphate
  modified_base 15: mod_base = OTHER; note = 2'-O-methylguanosine-3'-phosphate
  modified_base 16: mod_base = OTHER; note = 2'-O-methyladenosine-3'-phosphate
  modified_base 17: mod_base = OTHER; note = 2'-O-methyladenosine-3'-phosphate
  modified_base 18: mod_base = OTHER; note = 2'-O-methylcytidine-3'-phosphate
  modified_base 19: mod_base = OTHER; note = 2'-O-methyladenosine-3'-phosphorothioate
  modified_base 20: mod_base = OTHER; note = 2'-O-methylcytidine-3'-phosphorothioate
  modified_base 21: mod_base = OTHER; note = 2'-O-methyladenosine
cattaatgttttctgaacaca

SEQ ID NO: 11040 - RNA, 21 nt, synthetic construct
  source 1..21: mol_type = other RNA
  modified_base 1: mod_base = OTHER; note = 2'-O-methyladenosine-3'-phosphorothioate
  modified_base 2: mod_base = OTHER; note = 2'-O-methyluridine-3'-phosphorothioate
  modified_base 3: mod_base = OTHER; note = 2'-O-methyluridine-3'-phosphate
  modified_base 4: mod_base = OTHER; note = 2'-O-methyladenosine-3'-phosphate
  modified_base 5: mod_base = OTHER; note = 2'-O-methyladenosine-3'-phosphate
  modified_base 6: mod_base = OTHER; note = 2'-O-docosanyl-uridine-3'-phosphate
  modified_base 7: mod_base = OTHER; note = 2'-deoxy-2'-fluoroguanosine-3'-phosphate
  modified_base 8: mod_base = OTHER; note = 2'-O-methyluridine-3'-phosphate
  modified_base 9: mod_base = OTHER; note = 2'-deoxy-2'-fluorouridine-3'-phosphate
  modified_base 10: mod_base = OTHER; note = 2'-deoxy-2'-fluorouridine-3'-phosphate
  modified_base 11: mod_base = OTHER; note = 2'-deoxy-2'-fluorouridine-3'-phosphate
  modified_base 12: mod_base = OTHER; note = 2'-O-methylcytidine-3'-phosphate
  modified_base 13: mod_base = OTHER; note = 2'-O-methyluridine-3'-phosphate
  modified_base 14: mod_base = OTHER; note = 2'-O-methylguanosine-3'-phosphate
  modified_base 15: mod_base = OTHER; note = 2'-O-methyladenosine-3'-phosphate
  modified_base 16: mod_base = OTHER; note = 2'-O-methyladenosine-3'-phosphate
  modified_base 17: mod_base = OTHER; note = 2'-O-methylcytidine-3'-phosphate
  modified_base 18: mod_base = OTHER; note = 2'-O-methyladenosine-3'-phosphate
  modified_base 19: mod_base = OTHER; note = 2'-O-methylcytidine-3'-phosphorothioate
  modified_base 20: mod_base = OTHER; note = 2'-O-methyluridine-3'-phosphorothioate
  modified_base 21: mod_base = OTHER; note = 2'-O-methyladenosine
attaatgttttctgaacacta

SEQ ID NO: 11041 - RNA, 21 nt, synthetic construct
  source 1..21: mol_type = other RNA
  modified_base 1: mod_base = OTHER; note = 2'-O-methyluridine-3'-phosphorothioate
  modified_base 2: mod_base = OTHER; note = 2'-O-methyluridine-3'-phosphorothioate
  modified_base 3: mod_base = OTHER; note = 2'-O-methyladenosine-3'-phosphate
  modified_base 4: mod_base = OTHER; note = 2'-O-methyladenosine-3'-phosphate
  modified_base 5: mod_base = OTHER; note = 2'-O-methyluridine-3'-phosphate
  modified_base 6: mod_base = OTHER; note = 2'-O-docosanyl-guanosine-3'-phosphate
  modified_base 7: mod_base = OTHER; note = 2'-deoxy-2'-fluorouridine-3'-phosphate
  modified_base 8: mod_base = OTHER; note = 2'-O-methyluridine-3'-phosphate
  modified_base 9: mod_base = OTHER; note = 2'-deoxy-2'-fluorouridine-3'-phosphate
  modified_base 10: mod_base = OTHER; note = 2'-deoxy-2'-fluorouridine-3'-phosphate
  modified_base 11: mod_base = OTHER; note = 2'-deoxy-2'-fluorocytidine-3'-phosphate
  modified_base 12: mod_base = OTHER; note = 2'-O-methyluridine-3'-phosphate
  modified_base 13: mod_base = OTHER; note = 2'-O-methylguanosine-3'-phosphate
  modified_base 14: mod_base = OTHER; note = 2'-O-methyladenosine-3'-phosphate
  modified_base 15: mod_base = OTHER; note = 2'-O-methyladenosine-3'-phosphate
  modified_base 16: mod_base = OTHER; note = 2'-O-methylcytidine-3'-phosphate
  modified_base 17: mod_base = OTHER; note = 2'-O-methyladenosine-3'-phosphate
  modified_base 18: mod_base = OTHER; note = 2'-O-methylcytidine-3'-phosphate
  modified_base 19: mod_base = OTHER; note = 2'-O-methyluridine-3'-phosphorothioate
  modified_base 20: mod_base = OTHER; note = 2'-O-methyluridine-3'-phosphorothioate
  modified_base 21: mod_base = OTHER; note = 2'-O-methyladenosine
ttaatgttttctgaacactta

SEQ ID NO: 11042 - RNA, 21 nt, synthetic construct
  source 1..21: mol_type = other RNA
  modified_base 1: mod_base = OTHER; note = 2'-O-methyluridine-3'-phosphorothioate
  modified_base 2: mod_base = OTHER; note = 2'-O-methylcytidine-3'-phosphorothioate
  modified_base 3: mod_base = OTHER; note = 2'-O-methyluridine-3'-phosphate
  modified_base 4: mod_base = OTHER; note = 2'-O-methylguanosine-3'-phosphate
  modified_base 5: mod_base = OTHER; note = 2'-O-methyladenosine-3'-phosphate
  modified_base 6: mod_base = OTHER; note = 2'-O-docosanyl-adenosine-3'-phosphate
  modified_base 7: mod_base = OTHER; note = 2'-deoxy-2'-fluorocytidine-3'-phosphate
  modified_base 8: mod_base = OTHER; note = 2'-O-methyladenosine-3'-phosphate
  modified_base 9: mod_base = OTHER; note = 2'-deoxy-2'-fluorocytidine-3'-phosphate
  modified_base 10: mod_base = OTHER; note = 2'-deoxy-2'-fluorouridine-3'-phosphate
  modified_base 11: mod_base = OTHER; note = 2'-deoxy-2'-fluorouridine-3'-phosphate
  modified_base 12: mod_base = OTHER; note = 2'-O-methylcytidine-3'-phosphate
  modified_base 13: mod_base = OTHER; note = 2'-O-methylcytidine-3'-phosphate
  modified_base 14: mod_base = OTHER; note = 2'-O-methyladenosine-3'-phosphate
  modified_base 15: mod_base = OTHER; note = 2'-O-methyladenosine-3'-phosphate
  modified_base 16: mod_base = OTHER; note = 2'-O-methyladenosine-3'-phosphate
  modified_base 17: mod_base = OTHER; note = 2'-O-methylguanosine-3'-phosphate
  modified_base 18: mod_base = OTHER; note = 2'-O-methyladenosine-3'-phosphate
  modified_base 19: mod_base = OTHER; note = 2'-O-methyluridine-3'-phosphorothioate
  modified_base 20: mod_base = OTHER; note = 2'-O-methyluridine-3'-phosphorothioate
  modified_base 21: mod_base = OTHER; note = 2'-O-methyladenosine
tctgaacacttccaaagatta

SEQ ID NO: 11043 - RNA, 21 nt, synthetic construct
  source 1..21: mol_type = other RNA
  modified_base 1: mod_base = OTHER; note = 2'-O-methylcytidine-3'-phosphorothioate
  modified_base 2: mod_base = OTHER; note = 2'-O-methyluridine-3'-phosphorothioate
  modified_base 3: mod_base = OTHER; note = 2'-O-methylguanosine-3'-phosphate
  modified_base 4: mod_base = OTHER; note = 2'-O-methyladenosine-3'-phosphate
  modified_base 5: mod_base = OTHER; note = 2'-O-methyladenosine-3'-phosphate
  modified_base 6: mod_base = OTHER; note = 2'-O-docosanyl-cytidine-3'-phosphate
  modified_base 7: mod_base = OTHER; note = 2'-deoxy-2'-fluoroadenosine-3'-phosphate
  modified_base 8: mod_base = OTHER; note = 2'-O-methylcytidine-3'-phosphate
  modified_base 9: mod_base = OTHER; note = 2'-deoxy-2'-fluorouridine-3'-phosphate
  modified_base 10: mod_base = OTHER; note = 2'-deoxy-2'-fluorouridine-3'-phosphate
  modified_base 11: mod_base = OTHER; note = 2'-deoxy-2'-fluorocytidine-3'-phosphate
  modified_base 12: mod_base = OTHER; note = 2'-O-methylcytidine-3'-phosphate
  modified_base 13: mod_base = OTHER; note = 2'-O-methyladenosine-3'-phosphate
  modified_base 14: mod_base = OTHER; note = 2'-O-methyladenosine-3'-phosphate
  modified_base 15: mod_base = OTHER; note = 2'-O-methyladenosine-3'-phosphate
  modified_base 16: mod_base = OTHER; note = 2'-O-methylguanosine-3'-phosphate
  modified_base 17: mod_base = OTHER; note = 2'-O-methyladenosine-3'-phosphate
  modified_base 18: mod_base = OTHER; note = 2'-O-methyluridine-3'-phosphate
  modified_base 19: mod_base = OTHER; note = 2'-O-methyluridine-3'-phosphorothioate
  modified_base 20: mod_base = OTHER; note = 2'-O-methyladenosine-3'-phosphorothioate
  modified_base 21: mod_base = OTHER; note = 2'-O-methyladenosine
ctgaacacttccaaagattaa

SEQ ID NO: 11044 - RNA, 21 nt, synthetic construct
  source 1..21: mol_type = other RNA
  modified_base 1: mod_base = OTHER; note = 2'-O-methyluridine-3'-phosphorothioate
  modified_base 2: mod_base = OTHER; note = 2'-O-methylguanosine-3'-phosphorothioate
  modified_base 3: mod_base = OTHER; note = 2'-O-methyladenosine-3'-phosphate
  modified_base 4: mod_base = OTHER; note = 2'-O-methyladenosine-3'-phosphate
  modified_base 5: mod_base = OTHER; note = 2'-O-methylcytidine-3'-phosphate
  modified_base 6: mod_base = OTHER; note = 2'-O-docosanyl-adenosine-3'-phosphate
  modified_base 7: mod_base = OTHER; note = 2'-deoxy-2'-fluorocytidine-3'-phosphate
  modified_base 8: mod_base = OTHER; note = 2'-O-methyluridine-3'-phosphate
  modified_base 9: mod_base = OTHER; note = 2'-deoxy-2'-fluorouridine-3'-phosphate
  modified_base 10: mod_base = OTHER; note = 2'-deoxy-2'-fluorocytidine-3'-phosphate
  modified_base 11: mod_base = OTHER; note = 2'-deoxy-2'-fluorocytidine-3'-phosphate
  modified_base 12: mod_base = OTHER; note = 2'-O-methyladenosine-3'-phosphate
  modified_base 13: mod_base = OTHER; note = 2'-O-methyladenosine-3'-phosphate
  modified_base 14: mod_base = OTHER; note = 2'-O-methyladenosine-3'-phosphate
  modified_base 15: mod_base = OTHER; note = 2'-O-methylguanosine-3'-phosphate
  modified_base 16: mod_base = OTHER; note = 2'-O-methyladenosine-3'-phosphate
  modified_base 17: mod_base = OTHER; note = 2'-O-methyluridine-3'-phosphate
  modified_base 18: mod_base = OTHER; note = 2'-O-methyluridine-3'-phosphate
  modified_base 19: mod_base = OTHER; note = 2'-O-methyladenosine-3'-phosphorothioate
  modified_base 20: mod_base = OTHER; note = 2'-O-methyladenosine-3'-phosphorothioate
  modified_base 21: mod_base = OTHER; note = 2'-O-methyladenosine
tgaacacttccaaagattaaa

SEQ ID NO: 11045 - RNA, 21 nt, synthetic construct
  source 1..21: mol_type = other RNA
  modified_base 1: mod_base = OTHER; note = 2'-O-methyladenosine-3'-phosphorothioate
  modified_base 2: mod_base = OTHER; note = 2'-O-methyladenosine-3'-phosphorothioate
  modified_base 3: mod_base = OTHER; note = 2'-O-methylcytidine-3'-phosphate
  modified_base 4: mod_base = OTHER; note = 2'-O-methyladenosine-3'-phosphate
  modified_base 5: mod_base = OTHER; note = 2'-O-methylcytidine-3'-phosphate
  modified_base 6: mod_base = OTHER; note = 2'-O-docosanyl-uridine-3'-phosphate
  modified_base 7: mod_base = OTHER; note = 2'-deoxy-2'-fluorouridine-3'-phosphate
  modified_base 8: mod_base = OTHER; note = 2'-O-methylcytidine-3'-phosphate
  modified_base 9: mod_base = OTHER; note = 2'-deoxy-2'-fluorocytidine-3'-phosphate
  modified_base 10: mod_base = OTHER; note = 2'-deoxy-2'-fluoroadenosine-3'-phosphate
  modified_base 11: mod_base = OTHER; note = 2'-deoxy-2'-fluoroadenosine-3'-phosphate
  modified_base 12: mod_base = OTHER; note = 2'-O-methyladenosine-3'-phosphate
  modified_base 13: mod_base = OTHER; note = 2'-O-methylguanosine-3'-phosphate
  modified_base 14: mod_base = OTHER; note = 2'-O-methyladenosine-3'-phosphate
  modified_base 15: mod_base = OTHER; note = 2'-O-methyluridine-3'-phosphate
  modified_base 16: mod_base = OTHER; note = 2'-O-methyluridine-3'-phosphate
  modified_base 17: mod_base = OTHER; note = 2'-O-methyladenosine-3'-phosphate
  modified_base 18: mod_base = OTHER; note = 2'-O-methyladenosine-3'-phosphate
  modified_base 19: mod_base = OTHER; note = 2'-O-methyluridine-3'-phosphorothioate
  modified_base 20: mod_base = OTHER; note = 2'-O-methylcytidine-3'-phosphorothioate
  modified_base 21: mod_base = OTHER; note = 2'-O-methyladenosine
aacacttccaaagattaatca

SEQ ID NO: 11046 - RNA, 21 nt, synthetic construct
  source 1..21: mol_type = other RNA
  modified_base 1: mod_base = OTHER; note = 2'-O-methyladenosine-3'-phosphorothioate
  modified_base 2: mod_base = OTHER; note = 2'-O-methylcytidine-3'-phosphorothioate
  modified_base 3: mod_base = OTHER; note = 2'-O-methyladenosine-3'-phosphate
  modified_base 4: mod_base = OTHER; note = 2'-O-methylcytidine-3'-phosphate
  modified_base 5: mod_base = OTHER; note = 2'-O-methyluridine-3'-phosphate
  modified_base 6: mod_base = OTHER; note = 2'-O-docosanyl-uridine-3'-phosphate
  modified_base 7: mod_base = OTHER; note = 2'-deoxy-2'-fluorocytidine-3'-phosphate
  modified_base 8: mod_base = OTHER; note = 2'-O-methylcytidine-3'-phosphate
  modified_base 9: mod_base = OTHER; note = 2'-deoxy-2'-fluoroadenosine-3'-phosphate
  modified_base 10: mod_base = OTHER; note = 2'-deoxy-2'-fluoroadenosine-3'-phosphate
  modified_base 11: mod_base = OTHER; note = 2'-deoxy-2'-fluoroadenosine-3'-phosphate
  modified_base 12: mod_base = OTHER; note = 2'-O-methylguanosine-3'-phosphate
  modified_base 13: mod_base = OTHER; note = 2'-O-methyladenosine-3'-phosphate
  modified_base 14: mod_base = OTHER; note = 2'-O-methyluridine-3'-phosphate
  modified_base 15: mod_base = OTHER; note = 2'-O-methyluridine-3'-phosphate
  modified_base 16: mod_base = OTHER; note = 2'-O-methyladenosine-3'-phosphate
  modified_base 17: mod_base = OTHER; note = 2'-O-methyladenosine-3'-phosphate
  modified_base 18: mod_base = OTHER; note = 2'-O-methyluridine-3'-phosphate
  modified_base 19: mod_base = OTHER; note = 2'-O-methylcytidine-3'-phosphorothioate
  modified_base 20: mod_base = OTHER; note = 2'-O-methyladenosine-3'-phosphorothioate
  modified_base 21: mod_base = OTHER; note = 2'-O-methyladenosine
acacttccaaagattaatcaa

SEQ ID NO: 11047 - RNA, 21 nt, synthetic construct
  source 1..21: mol_type = other RNA
  modified_base 1: mod_base = OTHER; note = 2'-O-methylcytidine-3'-phosphorothioate
  modified_base 2: mod_base = OTHER; note = 2'-O-methyladenosine-3'-phosphorothioate
  modified_base 3: mod_base = OTHER; note = 2'-O-methylcytidine-3'-phosphate
  modified_base 4: mod_base = OTHER; note = 2'-O-methyluridine-3'-phosphate
  modified_base 5: mod_base = OTHER; note = 2'-O-methyluridine-3'-phosphate
  modified_base 6: mod_base = OTHER; note = 2'-O-docosanyl-cytidine-3'-phosphate
  modified_base 7: mod_base = OTHER; note = 2'-deoxy-2'-fluorocytidine-3'-phosphate
  modified_base 8: mod_base = OTHER; note = 2'-O-methyladenosine-3'-phosphate
  modified_base 9: mod_base = OTHER; note = 2'-deoxy-2'-fluoroadenosine-3'-phosphate
  modified_base 10: mod_base = OTHER; note = 2'-deoxy-2'-fluoroadenosine-3'-phosphate
  modified_base 11: mod_base = OTHER; note = 2'-deoxy-2'-fluoroguanosine-3'-phosphate
  modified_base 12: mod_base = OTHER; note = 2'-O-methyladenosine-3'-phosphate
  modified_base 13: mod_base = OTHER; note = 2'-O-methyluridine-3'-phosphate
  modified_base 14: mod_base = OTHER; note = 2'-O-methyluridine-3'-phosphate
  modified_base 15: mod_base = OTHER; note = 2'-O-methyladenosine-3'-phosphate
  modified_base 16: mod_base = OTHER; note = 2'-O-methyladenosine-3'-phosphate
  modified_base 17: mod_base = OTHER; note = 2'-O-methyluridine-3'-phosphate
  modified_base 18: mod_base = OTHER; note = 2'-O-methylcytidine-3'-phosphate
  modified_base 19: mod_base = OTHER; note = 2'-O-methyladenosine-3'-phosphorothioate
  modified_base 20: mod_base = OTHER; note = 2'-O-methyladenosine-3'-phosphorothioate
  modified_base 21: mod_base = OTHER; note = 2'-O-methyladenosine
cacttccaaagattaatcaaa

SEQ ID NO: 11048 - RNA, 21 nt, synthetic construct
  source 1..21: mol_type = other RNA
  modified_base 1: mod_base = OTHER; note = 2'-O-methyladenosine-3'-phosphorothioate
  modified_base 2: mod_base = OTHER; note = 2'-O-methylcytidine-3'-phosphorothioate
  modified_base 3: mod_base = OTHER; note = 2'-O-methyluridine-3'-phosphate
  modified_base 4: mod_base = OTHER; note = 2'-O-methyluridine-3'-phosphate
  modified_base 5: mod_base = OTHER; note = 2'-O-methylcytidine-3'-phosphate
  modified_base 6: mod_base = OTHER; note = 2'-O-docosanyl-cytidine-3'-phosphate
  modified_base 7: mod_base = OTHER; note = 2'-deoxy-2'-fluoroadenosine-3'-phosphate
  modified_base 8: mod_base = OTHER; note = 2'-O-methyladenosine-3'-phosphate
  modified_base 9: mod_base = OTHER; note = 2'-deoxy-2'-fluoroadenosine-3'-phosphate
  modified_base 10: mod_base = OTHER; note = 2'-deoxy-2'-fluoroguanosine-3'-phosphate
  modified_base 11: mod_base = OTHER; note = 2'-deoxy-2'-fluoroadenosine-3'-phosphate
  modified_base 12: mod_base = OTHER; note = 2'-O-methyluridine-3'-phosphate
  modified_base 13: mod_base = OTHER; note = 2'-O-methyluridine-3'-phosphate
  modified_base 14: mod_base = OTHER; note = 2'-O-methyladenosine-3'-phosphate
  modified_base 15: mod_base = OTHER; note = 2'-O-methyladenosine-3'-phosphate
  modified_base 16: mod_base = OTHER; note = 2'-O-methyluridine-3'-phosphate
  modified_base 17: mod_base = OTHER; note = 2'-O-methylcytidine-3'-phosphate
  modified_base 18: mod_base = OTHER; note = 2'-O-methyladenosine-3'-phosphate
  modified_base 19: mod_base = OTHER; note = 2'-O-methyladenosine-3'-phosphorothioate
  modified_base 20: mod_base = OTHER; note = 2'-O-methyladenosine-3'-phosphorothioate
  modified_base 21: mod_base = OTHER; note = 2'-O-methyladenosine
acttccaaagattaatcaaaa

SEQ ID NO: 11049 - RNA, 21 nt, synthetic construct
  source 1..21: mol_type = other RNA
  modified_base 1: mod_base = OTHER; note = 2'-O-methylcytidine-3'-phosphorothioate
  modified_base 2: mod_base = OTHER; note = 2'-O-methyluridine-3'-phosphorothioate
  modified_base 3: mod_base = OTHER; note = 2'-O-methyluridine-3'-phosphate
  modified_base 4: mod_base = OTHER; note = 2'-O-methylcytidine-3'-phosphate
  modified_base 5: mod_base = OTHER; note = 2'-O-methylcytidine-3'-phosphate
  modified_base 6: mod_base = OTHER; note = 2'-O-docosanyl-adenosine-3'-phosphate
  modified_base 7: mod_base = OTHER; note = 2'-deoxy-2'-fluoroadenosine-3'-phosphate
  modified_base 8: mod_base = OTHER; note = 2'-O-methyladenosine-3'-phosphate
  modified_base 9: mod_base = OTHER; note = 2'-deoxy-2'-fluoroguanosine-3'-phosphate
  modified_base 10: mod_base = OTHER; note = 2'-deoxy-2'-fluoroadenosine-3'-phosphate
  modified_base 11: mod_base = OTHER; note = 2'-deoxy-2'-fluorouridine-3'-phosphate
  modified_base 12: mod_base = OTHER; note = 2'-O-methyluridine-3'-phosphate
  modified_base 13: mod_base = OTHER; note = 2'-O-methyladenosine-3'-phosphate
  modified_base 14: mod_base = OTHER; note = 2'-O-methyladenosine-3'-phosphate
  modified_base 15: mod_base = OTHER; note = 2'-O-methyluridine-3'-phosphate
  modified_base 16: mod_base = OTHER; note = 2'-O-methylcytidine-3'-phosphate
  modified_base 17: mod_base = OTHER; note = 2'-O-methyladenosine-3'-phosphate
  modified_base 18: mod_base = OTHER; note = 2'-O-methyladenosine-3'-phosphate
  modified_base 19: mod_base = OTHER; note = 2'-O-methyladenosine-3'-phosphorothioate
  modified_base 20: mod_base = OTHER; note = 2'-O-methylcytidine-3'-phosphorothioate
  modified_base 21: mod_base = OTHER; note = 2'-O-methyladenosine
cttccaaagattaatcaaaca

SEQ ID NO: 11050 - RNA, 21 nt, synthetic construct
  source 1..21: mol_type = other RNA
  modified_base 1: mod_base = OTHER; note = 2'-O-methyluridine-3'-phosphorothioate
  modified_base 2: mod_base = OTHER; note = 2'-O-methyluridine-3'-phosphorothioate
  modified_base 3: mod_base = OTHER; note = 2'-O-methylcytidine-3'-phosphate
  modified_base 4: mod_base = OTHER; note = 2'-O-methylcytidine-3'-phosphate
  modified_base 5: mod_base = OTHER; note = 2'-O-methyladenosine-3'-phosphate
  modified_base 6: mod_base = OTHER; note = 2'-O-docosanyl-adenosine-3'-phosphate
  modified_base 7: mod_base = OTHER; note = 2'-deoxy-2'-fluoroadenosine-3'-phosphate
  modified_base 8: mod_base = OTHER; note = 2'-O-methylguanosine-3'-phosphate
  modified_base 9: mod_base = OTHER; note = 2'-deoxy-2'-fluoroadenosine-3'-phosphate
  modified_base 10: mod_base = OTHER; note = 2'-deoxy-2'-fluorouridine-3'-phosphate
  modified_base 11: mod_base = OTHER; note = 2'-deoxy-2'-fluorouridine-3'-phosphate
  modified_base 12: mod_base = OTHER; note = 2'-O-methyladenosine-3'-phosphate
  modified_base 13: mod_base = OTHER; note = 2'-O-methyladenosine-3'-phosphate
  modified_base 14: mod_base = OTHER; note = 2'-O-methyluridine-3'-phosphate
  modified_base 15: mod_base = OTHER; note = 2'-O-methylcytidine-3'-phosphate
  modified_base 16: mod_base = OTHER; note = 2'-O-methyladenosine-3'-phosphate
  modified_base 17: mod_base = OTHER; note = 2'-O-methyladenosine-3'-phosphate
  modified_base 18: mod_base = OTHER; note = 2'-O-methyladenosine-3'-phosphate
  modified_base 19: mod_base = OTHER; note = 2'-O-methylcytidine-3'-phosphorothioate
  modified_base 20: mod_base = OTHER; note = 2'-O-methyladenosine-3'-phosphorothioate
  modified_base 21: mod_base = OTHER; note = 2'-O-methyladenosine
ttccaaagattaatcaaacaa

SEQ ID NO: 11051 - RNA, 21 nt, synthetic construct
  source 1..21: mol_type = other RNA
  modified_base 1: mod_base = OTHER; note = 2'-O-methyluridine-3'-phosphorothioate
  modified_base 2: mod_base = OTHER; note = 2'-O-methylcytidine-3'-phosphorothioate
  modified_base 3: mod_base = OTHER; note = 2'-O-methylcytidine-3'-phosphate
  modified_base 4: mod_base = OTHER; note = 2'-O-methyladenosine-3'-phosphate
  modified_base 5: mod_base = OTHER; note = 2'-O-methyladenosine-3'-phosphate
  modified_base 6: mod_base = OTHER; note = 2'-O-docosanyl-adenosine-3'-phosphate
  modified_base 7: mod_base = OTHER; note = 2'-deoxy-2'-fluoroguanosine-3'-phosphate
  modified_base 8: mod_base = OTHER; note = 2'-O-methyladenosine-3'-phosphate
  modified_base 9: mod_base = OTHER; note = 2'-deoxy-2'-fluorouridine-3'-phosphate
  modified_base 10: mod_base = OTHER; note = 2'-deoxy-2'-fluorouridine-3'-phosphate
  modified_base 11: mod_base = OTHER; note = 2'-deoxy-2'-fluoroadenosine-3'-phosphate
  modified_base 12: mod_base = OTHER; note = 2'-O-methyladenosine-3'-phosphate
  modified_base 13: mod_base = OTHER; note = 2'-O-methyluridine-3'-phosphate
  modified_base 14: mod_base = OTHER; note = 2'-O-methylcytidine-3'-phosphate
  modified_base 15: mod_base = OTHER; note = 2'-O-methyladenosine-3'-phosphate
  modified_base 16: mod_base = OTHER; note = 2'-O-methyladenosine-3'-phosphate
  modified_base 17: mod_base = OTHER; note = 2'-O-methyladenosine-3'-phosphate
  modified_base 18: mod_base = OTHER; note = 2'-O-methylcytidine-3'-phosphate
  modified_base 19: mod_base = OTHER; note = 2'-O-methyladenosine-3'-phosphorothioate
  modified_base 20: mod_base = OTHER; note = 2'-O-methyluridine-3'-phosphorothioate
  modified_base 21: mod_base = OTHER; note = 2'-O-methyladenosine
tccaaagattaatcaaacata

SEQ ID NO: 11052 - RNA, 21 nt, synthetic construct
  source 1..21: mol_type = other RNA
  modified_base 1: mod_base = OTHER; note = 2'-O-methyluridine-3'-phosphorothioate
  modified_base 2: mod_base = OTHER; note = 2'-O-methyluridine-3'-phosphorothioate
  modified_base 3: mod_base = OTHER; note = 2'-O-methylguanosine-3'-phosphate
  modified_base 4: mod_base = OTHER; note = 2'-O-methyluridine-3'-phosphate
  modified_base 5: mod_base = OTHER; note = 2'-O-methylcytidine-3'-phosphate
  modified_base 6: mod_base = OTHER; note = 2'-O-docosanyl-uridine-3'-phosphate
  modified_base 7: mod_base = OTHER; note = 2'-deoxy-2'-fluoroguanosine-3'-phosphate
  modified_base 8: mod_base = OTHER; note = 2'-O-methyladenosine-3'-phosphate
  modified_base 9: mod_base = OTHER; note = 2'-deoxy-2'-fluoroadenosine-3'-phosphate
  modified_base 10: mod_base = OTHER; note = 2'-deoxy-2'-fluoroadenosine-3'-phosphate
  modified_base 11: mod_base = OTHER; note = 2'-deoxy-2'-fluoroadenosine-3'-phosphate
  modified_base 12: mod_base = OTHER; note = 2'-O-methyluridine-3'-phosphate
  modified_base 13: mod_base = OTHER; note = 2'-O-methylguanosine-3'-phosphate
  modified_base 14: mod_base = OTHER; note = 2'-O-methyluridine-3'-phosphate
  modified_base 15: mod_base = OTHER; note = 2'-O-methylcytidine-3'-phosphate
  modified_base 16: mod_base = OTHER; note = 2'-O-methyluridine-3'-phosphate
  modified_base 17: mod_base = OTHER; note = 2'-O-methyluridine-3'-phosphate
  modified_base 18: mod_base = OTHER; note = 2'-O-methyluridine-3'-phosphate
  modified_base 19: mod_base = OTHER; note = 2'-O-methyladenosine-3'-phosphorothioate
  modified_base 20: mod_base = OTHER; note = 2'-O-methyladenosine-3'-phosphorothioate
  modified_base 21: mod_base = OTHER; note = 2'-O-methyladenosine
ttgtctgaaaatgtctttaaa

SEQ ID NO: 11053 - RNA, 21 nt, synthetic construct
  source 1..21: mol_type = other RNA
  modified_base 1: mod_base = OTHER; note = 2'-O-methyladenosine-3'-phosphorothioate
  modified_base 2: mod_base = OTHER; note = 2'-O-methyluridine-3'-phosphorothioate
  modified_base 3: mod_base = OTHER; note = 2'-O-methyluridine-3'-phosphate
  modified_base 4: mod_base = OTHER; note = 2'-O-methylcytidine-3'-phosphate
  modified_base 5: mod_base = OTHER; note = 2'-O-methyladenosine-3'-phosphate
  modified_base 6: mod_base = OTHER; note = 2'-O-docosanyl-uridine-3'-phosphate
  modified_base 7: mod_base = OTHER; note = 2'-deoxy-2'-fluorouridine-3'-phosphate
  modified_base 8: mod_base = OTHER; note = 2'-O-methylguanosine-3'-phosphate
  modified_base 9: mod_base = OTHER; note = 2'-deoxy-2'-fluorouridine-3'-phosphate
  modified_base 10: mod_base = OTHER; note = 2'-deoxy-2'-fluorocytidine-3'-phosphate
  modified_base 11: mod_base = OTHER; note = 2'-deoxy-2'-fluorouridine-3'-phosphate
  modified_base 12: mod_base = OTHER; note = 2'-O-methylguanosine-3'-phosphate
  modified_base 13: mod_base = OTHER; note = 2'-O-methyladenosine-3'-phosphate
  modified_base 14: mod_base = OTHER; note = 2'-O-methyladenosine-3'-phosphate
  modified_base 15: mod_base = OTHER; note = 2'-O-methyladenosine-3'-phosphate
  modified_base 16: mod_base = OTHER; note = 2'-O-methyladenosine-3'-phosphate
  modified_base 17: mod_base = OTHER; note = 2'-O-methyluridine-3'-phosphate
  modified_base 18: mod_base = OTHER; note = 2'-O-methylguanosine-3'-phosphate
  modified_base 19: mod_base = OTHER; note = 2'-O-methyluridine-3'-phosphorothioate
  modified_base 20: mod_base = OTHER; note = 2'-O-methylcytidine-3'-phosphorothioate
  modified_base 21: mod_base = OTHER; note = 2'-O-methyladenosine
attcattgtctgaaaatgtca

SEQ ID NO: 11054 - RNA, 21 nt, synthetic construct
  source 1..21: mol_type = other RNA
  modified_base 1: mod_base = OTHER; note = 2'-O-methylcytidine-3'-phosphorothioate
  modified_base 2: mod_base = OTHER; note = 2'-O-methyladenosine-3'-phosphorothioate
  modified_base 3: mod_base = OTHER; note = 2'-O-methyluridine-3'-phosphate
  modified_base 4: mod_base = OTHER; note = 2'-O-methyluridine-3'-phosphate
  modified_base 5: mod_base = OTHER; note = 2'-O-methylguanosine-3'-phosphate
  modified_base 6: mod_base = OTHER; note = 2'-O-docosanyl-uridine-3'-phosphate
  modified_base 7: mod_base = OTHER; note = 2'-deoxy-2'-fluorocytidine-3'-phosphate
  modified_base 8: mod_base = OTHER; note = 2'-O-methyluridine-3'-phosphate
  modified_base 9: mod_base = OTHER; note = 2'-deoxy-2'-fluoroguanosine-3'-phosphate
  modified_base 10: mod_base = OTHER; note = 2'-deoxy-2'-fluoroadenosine-3'-phosphate
  modified_base 11: mod_base = OTHER; note = 2'-deoxy-2'-fluoroadenosine-3'-phosphate
  modified_base 12: mod_base = OTHER; note = 2'-O-methyladenosine-3'-phosphate
  modified_base 13: mod_base = OTHER; note = 2'-O-methyladenosine-3'-phosphate
  modified_base 14: mod_base = OTHER; note = 2'-O-methyluridine-3'-phosphate
  modified_base 15: mod_base = OTHER; note = 2'-O-methylguanosine-3'-phosphate
  modified_base 16: mod_base = OTHER; note = 2'-O-methyluridine-3'-phosphate
  modified_base 17: mod_base = OTHER; note = 2'-O-methylcytidine-3'-phosphate
  modified_base 18: mod_base = OTHER; note = 2'-O-methyluridine-3'-phosphate
  modified_base 19: mod_base = OTHER; note = 2'-O-methyluridine-3'-phosphorothioate
  modified_base 20: mod_base = OTHER; note = 2'-O-methyluridine-3'-phosphorothioate
  modified_base 21: mod_base = OTHER; note = 2'-O-methyladenosine
cattgtctgaaaatgtcttta

SEQ ID NO: 11055 - RNA, 21 nt, synthetic construct
  source 1..21: mol_type = other RNA
  modified_base 1: mod_base = OTHER; note = 2'-O-methyladenosine-3'-phosphorothioate
  modified_base 2: mod_base = OTHER; note = 2'-O-methyluridine-3'-phosphorothioate
  modified_base 3: mod_base = OTHER; note = 2'-O-methyluridine-3'-phosphate
  modified_base 4: mod_base = OTHER; note = 2'-O-methylguanosine-3'-phosphate
  modified_base 5: mod_base = OTHER; note = 2'-O-methyluridine-3'-phosphate
  modified_base 6: mod_base = OTHER; note = 2'-O-docosanyl-cytidine-3'-phosphate
  modified_base 7: mod_base = OTHER; note = 2'-deoxy-2'-fluorouridine-3'-phosphate
  modified_base 8: mod_base = OTHER; note = 2'-O-methylguanosine-3'-phosphate
  modified_base 9: mod_base = OTHER; note = 2'-deoxy-2'-fluoroadenosine-3'-phosphate
  modified_base 10: mod_base = OTHER; note = 2'-deoxy-2'-fluoroadenosine-3'-phosphate
  modified_base 11: mod_base = OTHER; note = 2'-deoxy-2'-fluoroadenosine-3'-phosphate
  modified_base 12: mod_base = OTHER; note = 2'-O-methyladenosine-3'-phosphate
  modified_base 13: mod_base = OTHER; note = 2'-O-methyluridine-3'-phosphate
  modified_base 14: mod_base = OTHER; note = 2'-O-methylguanosine-3'-phosphate
  modified_base 15: mod_base = OTHER; note = 2'-O-methyluridine-3'-phosphate
  modified_base 16: mod_base = OTHER; note = 2'-O-methylcytidine-3'-phosphate
  modified_base 17: mod_base = OTHER; note = 2'-O-methyluridine-3'-phosphate
  modified_base 18: mod_base = OTHER; note = 2'-O-methyluridine-3'-phosphate
  modified_base 19: mod_base = OTHER; note = 2'-O-methyluridine-3'-phosphorothioate
  modified_base 20: mod_base = OTHER; note = 2'-O-methyladenosine-3'-phosphorothioate
  modified_base 21: mod_base = OTHER; note = 2'-O-methyladenosine
attgtctgaaaatgtctttaa

SEQ ID NO: 11056 - RNA, 21 nt, synthetic construct
  source 1..21: mol_type = other RNA
  modified_base 1: mod_base = OTHER; note = 2'-O-methylguanosine-3'-phosphorothioate
  modified_base 2: mod_base = OTHER; note = 2'-O-methyluridine-3'-phosphorothioate
  modified_base 3: mod_base = OTHER; note = 2'-O-methylcytidine-3'-phosphate
  modified_base 4: mod_base = OTHER; note = 2'-O-methyluridine-3'-phosphate
  modified_base 5: mod_base = OTHER; note = 2'-O-methylguanosine-3'-phosphate
  modified_base 6: mod_base = OTHER; note = 2'-O-docosanyl-adenosine-3'-phosphate
  modified_base 7: mod_base = OTHER; note = 2'-deoxy-2'-fluoroadenosine-3'-phosphate
  modified_base 8: mod_base = OTHER; note = 2'-O-methyladenosine-3'-phosphate
  modified_base 9: mod_base = OTHER; note = 2'-deoxy-2'-fluoroadenosine-3'-phosphate
  modified_base 10: mod_base = OTHER; note = 2'-deoxy-2'-fluorouridine-3'-phosphate
  modified_base 11: mod_base = OTHER; note = 2'-deoxy-2'-fluoroguanosine-3'-phosphate
  modified_base 12: mod_base = OTHER; note = 2'-O-methyluridine-3'-phosphate
  modified_base 13: mod_base = OTHER; note = 2'-O-methylcytidine-3'-phosphate
  modified_base 14: mod_base = OTHER; note = 2'-O-methyluridine-3'-phosphate
  modified_base 15: mod_base = OTHER; note = 2'-O-methyluridine-3'-phosphate
  modified_base 16: mod_base = OTHER; note = 2'-O-methyluridine-3'-phosphate
  modified_base 17: mod_base = OTHER; note = 2'-O-methyladenosine-3'-phosphate
  modified_base 18: mod_base = OTHER; note = 2'-O-methyladenosine-3'-phosphate
  modified_base 19: mod_base = OTHER; note = 2'-O-methylguanosine-3'-phosphorothioate
  modified_base 20: mod_base = OTHER; note = 2'-O-methyladenosine-3'-phosphorothioate
  modified_base 21: mod_base = OTHER; note = 2'-O-methyladenosine
gtctgaaaatgtctttaagaa

SEQ ID NO: 11057 - RNA, 21 nt, synthetic construct
  source 1..21: mol_type = other RNA
  modified_base 1: mod_base = OTHER; note = 2'-O-methylcytidine-3'-phosphorothioate
  modified_base 2: mod_base = OTHER; note = 2'-O-methyluridine-3'-phosphorothioate
  modified_base 3: mod_base = OTHER; note = 2'-O-methylguanosine-3'-phosphate
  modified_base 4: mod_base = OTHER; note = 2'-O-methyladenosine-3'-phosphate
  modified_base 5: mod_base = OTHER; note = 2'-O-methyladenosine-3'-phosphate
  modified_base 6: mod_base = OTHER; note = 2'-O-docosanyl-adenosine-3'-phosphate
  modified_base 7: mod_base = OTHER; note = 2'-deoxy-2'-fluoroadenosine-3'-phosphate
  modified_base 8: mod_base = OTHER; note = 2'-O-methyluridine-3'-phosphate
  modified_base 9: mod_base = OTHER; note = 2'-deoxy-2'-fluoroguanosine-3'-phosphate
  modified_base 10: mod_base = OTHER; note = 2'-deoxy-2'-fluorouridine-3'-phosphate
  modified_base 11: mod_base = OTHER; note = 2'-deoxy-2'-fluorocytidine-3'-phosphate
  modified_base 12: mod_base = OTHER; note = 2'-O-methyluridine-3'-phosphate
  modified_base 13: mod_base = OTHER; note = 2'-O-methyluridine-3'-phosphate
  modified_base 14: mod_base = OTHER; note = 2'-O-methyluridine-3'-phosphate
  modified_base 15: mod_base = OTHER; note = 2'-O-methyladenosine-3'-phosphate
  modified_base 16: mod_base = OTHER; note = 2'-O-methyladenosine-3'-phosphate
  modified_base 17: mod_base = OTHER; note = 2'-O-methylguanosine-3'-phosphate
  modified_base 18: mod_base = OTHER; note = 2'-O-methyladenosine-3'-phosphate
  modified_base 19: mod_base = OTHER; note = 2'-O-methyluridine-3'-phosphorothioate
  modified_base 20: mod_base = OTHER; note = 2'-O-methyladenosine-3'-phosphorothioate
  modified_base 21: mod_base = OTHER; note = 2'-O-methyladenosine
ctgaaaatgtctttaagataa

SEQ ID NO: 11058 - RNA, 21 nt, synthetic construct
  source 1..21: mol_type = other RNA
  modified_base 1: mod_base = OTHER; note = 2'-O-methyladenosine-3'-phosphorothioate
  modified_base 2: mod_base = OTHER; note = 2'-O-methylguanosine-3'-phosphorothioate
  modified_base 3: mod_base = OTHER; note = 2'-O-methylguanosine-3'-phosphate
  modified_base 4: mod_base = OTHER; note = 2'-O-methyluridine-3'-phosphate
  modified_base 5: mod_base = OTHER; note = 2'-O-methylcytidine-3'-phosphate
  modified_base 6: mod_base = OTHER; note = 2'-O-docosanyl-cytidine-3'-phosphate
  modified_base 7: mod_base = OTHER; note = 2'-deoxy-2'-fluorocytidine-3'-phosphate
  modified_base 8: mod_base = OTHER; note = 2'-O-methyluridine-3'-phosphate
  modified_base 9: mod_base = OTHER; note = 2'-deoxy-2'-fluoroadenosine-3'-phosphate
  modified_base 10: mod_base = OTHER; note = 2'-deoxy-2'-fluorouridine-3'-phosphate
  modified_base 11: mod_base = OTHER; note = 2'-deoxy-2'-fluorouridine-3'-phosphate
  modified_base 12: mod_base = OTHER; note = 2'-O-methyluridine-3'-phosphate
  modified_base 13: mod_base = OTHER; note = 2'-O-methylcytidine-3'-phosphate
  modified_base 14: mod_base = OTHER; note = 2'-O-methylcytidine-3'-phosphate
  modified_base 15: mod_base = OTHER; note = 2'-O-methyluridine-3'-phosphate
  modified_base 16: mod_base = OTHER; note = 2'-O-methyluridine-3'-phosphate
  modified_base 17: mod_base = OTHER; note = 2'-O-methyluridine-3'-phosphate
  modified_base 18: mod_base = OTHER; note = 2'-O-methylguanosine-3'-phosphate
  modified_base 19: mod_base = OTHER; note = 2'-O-methyluridine-3'-phosphorothioate
  modified_base 20: mod_base = OTHER; note = 2'-O-methyladenosine-3'-phosphorothioate
  modified_base 21: mod_base = OTHER; note = 2'-O-methyladenosine
aggtccctatttcctttgtaa

SEQ ID NO: 11059 - RNA, 21 nt, synthetic construct
  source 1..21: mol_type = other RNA
  modified_base 1: mod_base = OTHER; note = 2'-O-methylguanosine-3'-phosphorothioate
  modified_base 2: mod_base = OTHER; note = 2'-O-methylguanosine-3'-phosphorothioate
  modified_base 3: mod_base = OTHER; note = 2'-O-methyluridine-3'-phosphate
  modified_base 4: mod_base = OTHER; note = 2'-O-methylcytidine-3'-phosphate
  modified_base 5: mod_base = OTHER; note = 2'-O-methylcytidine-3'-phosphate
  modified_base 6: mod_base = OTHER; note = 2'-O-docosanyl-cytidine-3'-phosphate
  modified_base 7: mod_base = OTHER; note = 2'-deoxy-2'-fluorouridine-3'-phosphate
  modified_base 8: mod_base = OTHER; note = 2'-O-methyladenosine-3'-phosphate
  modified_base 9: mod_base = OTHER; note = 2'-deoxy-2'-fluorouridine-3'-phosphate
  modified_base 10: mod_base = OTHER; note = 2'-deoxy-2'-fluorouridine-3'-phosphate
  modified_base 11: mod_base = OTHER; note = 2'-deoxy-2'-fluorouridine-3'-phosphate
  modified_base 12: mod_base = OTHER; note = 2'-O-methylcytidine-3'-phosphate
  modified_base 13: mod_base = OTHER; note = 2'-O-methylcytidine-3'-phosphate
  modified_base 14: mod_base = OTHER; note = 2'-O-methyluridine-3'-phosphate
  modified_base 15: mod_base = OTHER; note = 2'-O-methyluridine-3'-phosphate
  modified_base 16: mod_base = OTHER; note = 2'-O-methyluridine-3'-phosphate
  modified_base 17: mod_base = OTHER; note = 2'-O-methylguanosine-3'-phosphate
  modified_base 18: mod_base = OTHER; note = 2'-O-methyluridine-3'-phosphate
  modified_base 19: mod_base = OTHER; note = 2'-O-methyladenosine-3'-phosphorothioate
  modified_base 20: mod_base = OTHER; note = 2'-O-methylcytidine-3'-phosphorothioate
  modified_base 21: mod_base = OTHER; note = 2'-O-methyladenosine
ggtccctatttcctttgtaca

SEQ ID NO: 11060 - RNA, 21 nt, synthetic construct
  source 1..21: mol_type = other RNA
  modified_base 1: mod_base = OTHER; note = 2'-O-methylguanosine-3'-phosphorothioate
  modified_base 2: mod_base = OTHER; note = 2'-O-methyluridine-3'-phosphorothioate
  modified_base 3: mod_base = OTHER; note = 2'-O-methylcytidine-3'-phosphate
  modified_base 4: mod_base = OTHER; note = 2'-O-methylcytidine-3'-phosphate
  modified_base 5: mod_base = OTHER; note = 2'-O-methylcytidine-3'-phosphate
  modified_base 6: mod_base = OTHER; note = 2'-O-docosanyl-uridine-3'-phosphate
  modified_base 7: mod_base = OTHER; note = 2'-deoxy-2'-fluoroadenosine-3'-phosphate
  modified_base 8: mod_base = OTHER; note = 2'-O-methyluridine-3'-phosphate
  modified_base 9: mod_base = OTHER; note = 2'-deoxy-2'-fluorouridine-3'-phosphate
  modified_base 10: mod_base = OTHER; note = 2'-deoxy-2'-fluorouridine-3'-phosphate
  modified_base 11: mod_base = OTHER; note = 2'-deoxy-2'-fluorocytidine-3'-phosphate
  modified_base 12: mod_base = OTHER; note = 2'-O-methylcytidine-3'-phosphate
  modified_base 13: mod_base = OTHER; note = 2'-O-methyluridine-3'-phosphate
  modified_base 14: mod_base = OTHER; note = 2'-O-methyluridine-3'-phosphate
  modified_base 15: mod_base = OTHER; note = 2'-O-methyluridine-3'-phosphate
  modified_base 16: mod_base = OTHER; note = 2'-O-methylguanosine-3'-phosphate
  modified_base 17: mod_base = OTHER; note = 2'-O-methyluridine-3'-phosphate
  modified_base 18: mod_base = OTHER; note = 2'-O-methyladenosine-3'-phosphate
  modified_base 19: mod_base = OTHER; note = 2'-O-methylcytidine-3'-phosphorothioate
  modified_base 20: mod_base = OTHER; note = 2'-O-methyladenosine-3'-phosphorothioate
  modified_base 21: mod_base = OTHER; note = 2'-O-methyladenosine
gtccctatttcctttgtacaa

SEQ ID NO: 11061 - RNA, 21 nt, synthetic construct
  source 1..21: mol_type = other RNA
  modified_base 1: mod_base = OTHER; note = 2'-O-methyluridine-3'-phosphorothioate
  modified_base 2: mod_base = OTHER; note = 2'-O-methylcytidine-3'-phosphorothioate
  modified_base 3: mod_base = OTHER; note = 2'-O-methylcytidine-3'-phosphate
  modified_base 4: mod_base = OTHER; note = 2'-O-methylcytidine-3'-phosphate
  modified_base 5: mod_base = OTHER; note = 2'-O-methyluridine-3'-phosphate
  modified_base 6: mod_base = OTHER; note = 2'-O-docosanyl-adenosine-3'-phosphate
  modified_base 7: mod_base = OTHER; note = 2'-deoxy-2'-fluorouridine-3'-phosphate
  modified_base 8: mod_base = OTHER; note = 2'-O-methyluridine-3'-phosphate
  modified_base 9: mod_base = OTHER; note = 2'-deoxy-2'-fluorouridine-3'-phosphate
  modified_base 10: mod_base = OTHER; note = 2'-deoxy-2'-fluorocytidine-3'-phosphate
  modified_base 11: mod_base = OTHER; note = 2'-deoxy-2'-fluorocytidine-3'-phosphate
  modified_base 12: mod_base = OTHER; note = 2'-O-methyluridine-3'-phosphate
  modified_base 13: mod_base = OTHER; note = 2'-O-methyluridine-3'-phosphate
  modified_base 14: mod_base = OTHER; note = 2'-O-methyluridine-3'-phosphate
  modified_base 15: mod_base = OTHER; note = 2'-O-methylguanosine-3'-phosphate
  modified_base 16: mod_base = OTHER; note = 2'-O-methyluridine-3'-phosphate
  modified_base 17: mod_base = OTHER; note = 2'-O-methyladenosine-3'-phosphate
  modified_base 18: mod_base = OTHER; note = 2'-O-methylcytidine-3'-phosphate
  modified_base 19: mod_base = OTHER; note = 2'-O-methyladenosine-3'-phosphorothioate
  modified_base 20: mod_base = OTHER; note = 2'-O-methyluridine-3'-phosphorothioate
  modified_base 21: mod_base = OTHER; note = 2'-O-methyladenosine
tccctatttcctttgtacata

SEQ ID NO: 11062 - RNA, 21 nt, synthetic construct
  source 1..21: mol_type = other RNA
  modified_base 1: mod_base = OTHER; note = 2'-O-methylcytidine-3'-phosphorothioate
  modified_base 2: mod_base = OTHER; note = 2'-O-methylcytidine-3'-phosphorothioate
  modified_base 3: mod_base = OTHER; note = 2'-O-methylcytidine-3'-phosphate
  modified_base 4: mod_base = OTHER; note = 2'-O-methyluridine-3'-phosphate
  modified_base 5: mod_base = OTHER; note = 2'-O-methyladenosine-3'-phosphate
  modified_base 6: mod_base = OTHER; note = 2'-O-docosanyl-uridine-3'-phosphate
  modified_base 7: mod_base = OTHER; note = 2'-deoxy-2'-fluorouridine-3'-phosphate
  modified_base 8: mod_base = OTHER; note = 2'-O-methyluridine-3'-phosphate
  modified_base 9: mod_base = OTHER; note = 2'-deoxy-2'-fluorocytidine-3'-phosphate
  modified_base 10: mod_base = OTHER; note = 2'-deoxy-2'-fluorocytidine-3'-phosphate
  modified_base 11: mod_base = OTHER; note = 2'-deoxy-2'-fluorouridine-3'-phosphate
  modified_base 12: mod_base = OTHER; note = 2'-O-methyluridine-3'-phosphate
  modified_base 13: mod_base = OTHER; note = 2'-O-methyluridine-3'-phosphate
  modified_base 14: mod_base = OTHER; note = 2'-O-methylguanosine-3'-phosphate
  modified_base 15: mod_base = OTHER; note = 2'-O-methyluridine-3'-phosphate
  modified_base 16: mod_base = OTHER; note = 2'-O-methyladenosine-3'-phosphate
  modified_base 17: mod_base = OTHER; note = 2'-O-methylcytidine-3'-phosphate
  modified_base 18: mod_base = OTHER; note = 2'-O-methyladenosine-3'-phosphate
  modified_base 19: mod_base = OTHER; note = 2'-O-methyluridine-3'-phosphorothioate
  modified_base 20: mod_base = OTHER; note = 2'-O-methyladenosine-3'-phosphorothioate
  modified_base 21: mod_base = OTHER; note = 2'-O-methyladenosine
ccctatttcctttgtacataa

SEQ ID NO: 11063 - RNA, 21 nt, synthetic construct
  source 1..21: mol_type = other RNA
  modified_base 1: mod_base = OTHER; note = 2'-O-methylcytidine-3'-phosphorothioate
  modified_base 2: mod_base = OTHER; note = 2'-O-methylcytidine-3'-phosphorothioate
  modified_base 3: mod_base = OTHER; note = 2'-O-methyluridine-3'-phosphate
  modified_base 4: mod_base = OTHER; note = 2'-O-methyladenosine-3'-phosphate
  modified_base 5: mod_base = OTHER; note = 2'-O-methyluridine-3'-phosphate
  modified_base 6: mod_base = OTHER; note = 2'-O-docosanyl-uridine-3'-phosphate
  modified_base 7: mod_base = OTHER; note = 2'-deoxy-2'-fluorouridine-3'-phosphate
  modified_base 8: mod_base = OTHER; note = 2'-O-methylcytidine-3'-phosphate
  modified_base 9: mod_base = OTHER; note = 2'-deoxy-2'-fluorocytidine-3'-phosphate
  modified_base 10: mod_base = OTHER; note = 2'-deoxy-2'-fluorouridine-3'-phosphate
  modified_base 11: mod_base = OTHER; note = 2'-deoxy-2'-fluorouridine-3'-phosphate
  modified_base 12: mod_base = OTHER; note = 2'-O-methyluridine-3'-phosphate
  modified_base 13: mod_base = OTHER; note = 2'-O-methylguanosine-3'-phosphate
  modified_base 14: mod_base = OTHER; note = 2'-O-methyluridine-3'-phosphate
  modified_base 15: mod_base = OTHER; note = 2'-O-methyladenosine-3'-phosphate
  modified_base 16: mod_base = OTHER; note = 2'-O-methylcytidine-3'-phosphate
  modified_base 17: mod_base = OTHER; note = 2'-O-methyladenosine-3'-phosphate
  modified_base 18: mod_base = OTHER; note = 2'-O-methyluridine-3'-phosphate
  modified_base 19: mod_base = OTHER; note = 2'-O-methyladenosine-3'-phosphorothioate
  modified_base 20: mod_base = OTHER; note = 2'-O-methylcytidine-3'-phosphorothioate
  modified_base 21: mod_base = OTHER; note = 2'-O-methyladenosine
cctatttcctttgtacataca

SEQ ID NO: 11064 - RNA, 21 nt, synthetic construct
  source 1..21: mol_type = other RNA
  modified_base 1: mod_base = OTHER; note = 2'-O-methylcytidine-3'-phosphorothioate
  modified_base 2: mod_base = OTHER; note = 2'-O-methyluridine-3'-phosphorothioate
  modified_base 3: mod_base = OTHER; note = 2'-O-methyladenosine-3'-phosphate
  modified_base 4: mod_base = OTHER; note = 2'-O-methyluridine-3'-phosphate
  modified_base 5: mod_base = OTHER; note = 2'-O-methyluridine-3'-phosphate
  modified_base 6: mod_base = OTHER; note = 2'-O-docosanyl-uridine-3'-phosphate
  modified_base 7: mod_base = OTHER; note = 2'-deoxy-2'-fluorocytidine-3'-phosphate
  modified_base 8: mod_base = OTHER; note = 2'-O-methylcytidine-3'-phosphate
  modified_base 9: mod_base = OTHER; note = 2'-deoxy-2'-fluorouridine-3'-phosphate
  modified_base 10: mod_base = OTHER; note = 2'-deoxy-2'-fluorouridine-3'-phosphate
  modified_base 11: mod_base = OTHER; note = 2'-deoxy-2'-fluorouridine-3'-phosphate
  modified_base 12: mod_base = OTHER; note = 2'-O-methylguanosine-3'-phosphate
  modified_base 13: mod_base = OTHER; note = 2'-O-methyluridine-3'-phosphate
  modified_base 14: mod_base = OTHER; note = 2'-O-methyladenosine-3'-phosphate
  modified_base 15: mod_base = OTHER; note = 2'-O-methylcytidine-3'-phosphate
  modified_base 16: mod_base = OTHER; note = 2'-O-methyladenosine-3'-phosphate
  modified_base 17: mod_base = OTHER; note = 2'-O-methyluridine-3'-phosphate
  modified_base 18: mod_base = OTHER; note = 2'-O-methyladenosine-3'-phosphate
  modified_base 19: mod_base = OTHER; note = 2'-O-methylcytidine-3'-phosphorothioate
  modified_base 20: mod_base = OTHER; note = 2'-O-methyladenosine-3'-phosphorothioate
  modified_base 21: mod_base = OTHER; note = 2'-O-methyladenosine
ctatttcctttgtacatacaa

SEQ ID NO: 11065 - RNA, 21 nt, synthetic construct
  source 1..21: mol_type = other RNA
  modified_base 1: mod_base = OTHER; note = 2'-O-methyluridine-3'-phosphorothioate
  modified_base 2: mod_base = OTHER; note = 2'-O-methyladenosine-3'-phosphorothioate
  modified_base 3: mod_base = OTHER; note = 2'-O-methyluridine-3'-phosphate
  modified_base 4: mod_base = OTHER; note = 2'-O-methyluridine-3'-phosphate
  modified_base 5: mod_base = OTHER; note = 2'-O-methyluridine-3'-phosphate
  modified_base 6: mod_base = OTHER; note = 2'-O-docosanyl-cytidine-3'-phosphate
  modified_base 7: mod_base = OTHER; note = 2'-deoxy-2'-fluorocytidine-3'-phosphate
  modified_base 8: mod_base = OTHER; note = 2'-O-methyluridine-3'-phosphate
  modified_base 9: mod_base = OTHER; note = 2'-deoxy-2'-fluorouridine-3'-phosphate
  modified_base 10: mod_base = OTHER; note = 2'-deoxy-2'-fluorouridine-3'-phosphate
  modified_base 11: mod_base = OTHER; note = 2'-deoxy-2'-fluoroguanosine-3'-phosphate
  modified_base 12: mod_base = OTHER; note = 2'-O-methyluridine-3'-phosphate
  modified_base 13: mod_base = OTHER; note = 2'-O-methyladenosine-3'-phosphate
  modified_base 14: mod_base = OTHER; note = 2'-O-methylcytidine-3'-phosphate
  modified_base 15: mod_base = OTHER; note = 2'-O-methyladenosine-3'-phosphate
  modified_base 16: mod_base = OTHER; note = 2'-O-methyluridine-3'-phosphate
  modified_base 17: mod_base = OTHER; note = 2'-O-methyladenosine-3'-phosphate
  modified_base 18: mod_base = OTHER; note = 2'-O-methylcytidine-3'-phosphate
  modified_base 19: mod_base = OTHER; note = 2'-O-methyladenosine-3'-phosphorothioate
  modified_base 20: mod_base = OTHER; note = 2'-O-methylcytidine-3'-phosphorothioate
  modified_base 21: mod_base = OTHER; note = 2'-O-methyladenosine
tatttcctttgtacatacaca

SEQ ID NO: 11066 - RNA, 21 nt, synthetic construct
  source 1..21: mol_type = other RNA
  modified_base 1: mod_base = OTHER; note = 2'-O-methylcytidine-3'-phosphorothioate
  modified_base 2: mod_base = OTHER; note = 2'-O-methyladenosine-3'-phosphorothioate
  modified_base 3: mod_base = OTHER; note = 2'-O-methylcytidine-3'-phosphate
  modified_base 4: mod_base = OTHER; note = 2'-O-methyluridine-3'-phosphate
  modified_base 5: mod_base = OTHER; note = 2'-O-methyluridine-3'-phosphate
  modified_base 6: mod_base = OTHER; note = 2'-O-docosanyl-adenosine-3'-phosphate
  modified_base 7: mod_base = OTHER; note = 2'-deoxy-2'-fluoroguanosine-3'-phosphate
  modified_base 8: mod_base = OTHER; note = 2'-O-methyladenosine-3'-phosphate
  modified_base 9: mod_base = OTHER; note = 2'-deoxy-2'-fluoroadenosine-3'-phosphate
  modified_base 10: mod_base = OTHER; note = 2'-deoxy-2'-fluoroadenosine-3'-phosphate
  modified_base 11: mod_base = OTHER; note = 2'-deoxy-2'-fluoroguanosine-3'-phosphate
  modified_base 12: mod_base = OTHER; note = 2'-O-methyladenosine-3'-phosphate
  modified_base 13: mod_base = OTHER; note = 2'-O-methyladenosine-3'-phosphate
  modified_base 14: mod_base = OTHER; note = 2'-O-methyladenosine-3'-phosphate
  modified_base 15: mod_base = OTHER; note = 2'-O-methyladenosine-3'-phosphate
  modified_base 16: mod_base = OTHER; note = 2'-O-methylguanosine-3'-phosphate
  modified_base 17: mod_base = OTHER; note = 2'-O-methyladenosine-3'-phosphate
  modified_base 18: mod_base = OTHER; note = 2'-O-methylcytidine-3'-phosphate
  modified_base 19: mod_base = OTHER; note = 2'-O-methyladenosine-3'-phosphorothioate
  modified_base 20: mod_base = OTHER; note = 2'-O-methylguanosine-3'-phosphorothioate
  modified_base 21: mod_base = OTHER; note = 2'-O-methyladenosine
cacttagaaagaaaagacaga

SEQ ID NO: 11067 - RNA, 21 nt, synthetic construct
  source 1..21: mol_type = other RNA
  modified_base 1: mod_base = OTHER; note = 2'-O-methyladenosine-3'-phosphorothioate
  modified_base 2: mod_base = OTHER; note = 2'-O-methylcytidine-3'-phosphorothioate
  modified_base 3: mod_base = OTHER; note = 2'-O-methyluridine-3'-phosphate
  modified_base 4: mod_base = OTHER; note = 2'-O-methyluridine-3'-phosphate
  modified_base 5: mod_base = OTHER; note = 2'-O-methyladenosine-3'-phosphate
  modified_base 6: mod_base = OTHER; note = 2'-O-docosanyl-guanosine-3'-phosphate
  modified_base 7: mod_base = OTHER; note = 2'-deoxy-2'-fluoroadenosine-3'-phosphate
  modified_base 8: mod_base = OTHER; note = 2'-O-methyladenosine-3'-phosphate
  modified_base 9: mod_base = OTHER; note = 2'-deoxy-2'-fluoroadenosine-3'-phosphate
  modified_base 10: mod_base = OTHER; note = 2'-deoxy-2'-fluoroguanosine-3'-phosphate
  modified_base 11: mod_base = OTHER; note = 2'-deoxy-2'-fluoroadenosine-3'-phosphate
  modified_base 12: mod_base = OTHER; note = 2'-O-methyladenosine-3'-phosphate
  modified_base 13: mod_base = OTHER; note = 2'-O-methyladenosine-3'-phosphate
  modified_base 14: mod_base = OTHER; note = 2'-O-methyladenosine-3'-phosphate
  modified_base 15: mod_base = OTHER; note = 2'-O-methylguanosine-3'-phosphate
  modified_base 16: mod_base = OTHER; note = 2'-O-methyladenosine-3'-phosphate
  modified_base 17: mod_base = OTHER; note = 2'-O-methylcytidine-3'-phosphate
  modified_base 18: mod_base = OTHER; note = 2'-O-methyladenosine-3'-phosphate
  modified_base 19: mod_base = OTHER; note = 2'-O-methylguanosine-3'-phosphorothioate
  modified_base 20: mod_base = OTHER; note = 2'-O-methyladenosine-3'-phosphorothioate
  modified_base 21: mod_base = OTHER; note = 2'-O-methyladenosine
acttagaaagaaaagacagaa

SEQ ID NO: 11068 - RNA, 21 nt, synthetic construct
  source 1..21: mol_type = other RNA
  modified_base 1: mod_base = OTHER; note = 2'-O-methylcytidine-3'-phosphorothioate
  modified_base 2: mod_base = OTHER; note = 2'-O-methyluridine-3'-phosphorothioate
  modified_base 3: mod_base = OTHER; note = 2'-O-methyluridine-3'-phosphate
  modified_base 4: mod_base = OTHER; note = 2'-O-methyladenosine-3'-phosphate
  modified_base 5: mod_base = OTHER; note = 2'-O-methylguanosine-3'-phosphate
  modified_base 6: mod_base = OTHER; note = 2'-O-docosanyl-adenosine-3'-phosphate
  modified_base 7: mod_base = OTHER; note = 2'-deoxy-2'-fluoroadenosine-3'-phosphate
  modified_base 8: mod_base = OTHER; note = 2'-O-methyladenosine-3'-phosphate
  modified_base 9: mod_base = OTHER; note = 2'-deoxy-2'-fluoroguanosine-3'-phosphate
  modified_base 10: mod_base = OTHER; note = 2'-deoxy-2'-fluoroadenosine-3'-phosphate
  modified_base 11: mod_base = OTHER; note = 2'-deoxy-2'-fluoroadenosine-3'-phosphate
  modified_base 12: mod_base = OTHER; note = 2'-O-methyladenosine-3'-phosphate
  modified_base 13: mod_base = OTHER; note = 2'-O-methyladenosine-3'-phosphate
  modified_base 14: mod_base = OTHER; note = 2'-O-methylguanosine-3'-phosphate
  modified_base 15: mod_base = OTHER; note = 2'-O-methyladenosine-3'-phosphate
  modified_base 16: mod_base = OTHER; note = 2'-O-methylcytidine-3'-phosphate
  modified_base 17: mod_base = OTHER; note = 2'-O-methyladenosine-3'-phosphate
  modified_base 18: mod_base = OTHER; note = 2'-O-methylguanosine-3'-phosphate
  modified_base 19: mod_base = OTHER; note = 2'-O-methyladenosine-3'-phosphorothioate
  modified_base 20: mod_base = OTHER; note = 2'-O-methyladenosine-3'-phosphorothioate
  modified_base 21: mod_base = OTHER; note = 2'-O-methyladenosine
cttagaaagaaaagacagaaa

SEQ ID NO: 11069 - RNA, 21 nt, synthetic construct
  source 1..21: mol_type = other RNA
  modified_base 1: mod_base = OTHER; note = 2'-O-methyluridine-3'-phosphorothioate
  modified_base 2: mod_base = OTHER; note = 2'-O-methyluridine-3'-phosphorothioate
  modified_base 3: mod_base = OTHER; note = 2'-O-methyladenosine-3'-phosphate
  modified_base 4: mod_base = OTHER; note = 2'-O-methylguanosine-3'-phosphate
  modified_base 5: mod_base = OTHER; note = 2'-O-methyladenosine-3'-phosphate
  modified_base 6: mod_base = OTHER; note = 2'-O-docosanyl-adenosine-3'-phosphate
  modified_base 7: mod_base = OTHER; note = 2'-deoxy-2'-fluoroadenosine-3'-phosphate
  modified_base 8: mod_base = OTHER; note = 2'-O-methylguanosine-3'-phosphate
  modified_base 9: mod_base = OTHER; note = 2'-deoxy-2'-fluoroadenosine-3'-phosphate
  modified_base 10: mod_base = OTHER; note = 2'-deoxy-2'-fluoroadenosine-3'-phosphate
  modified_base 11: mod_base = OTHER; note = 2'-deoxy-2'-fluoroadenosine-3'-phosphate
  modified_base 12: mod_base = OTHER; note = 2'-O-methyladenosine-3'-phosphate
  modified_base 13: mod_base = OTHER; note = 2'-O-methylguanosine-3'-phosphate
  modified_base 14: mod_base = OTHER; note = 2'-O-methyladenosine-3'-phosphate
  modified_base 15: mod_base = OTHER; note = 2'-O-methylcytidine-3'-phosphate
  modified_base 16: mod_base = OTHER; note = 2'-O-methyladenosine-3'-phosphate
  modified_base 17: mod_base = OTHER; note = 2'-O-methylguanosine-3'-phosphate
  modified_base 18: mod_base = OTHER; note = 2'-O-methyladenosine-3'-phosphate
  modified_base 19: mod_base = OTHER; note = 2'-O-methyladenosine-3'-phosphorothioate
  modified_base 20: mod_base = OTHER; note = 2'-O-methyladenosine-3'-phosphorothioate
  modified_base 21: mod_base = OTHER; note = 2'-O-methyladenosine
ttagaaagaaaagacagaaaa

SEQ ID NO: 11070 - RNA, 21 nt, synthetic construct
  source 1..21: mol_type = other RNA
  modified_base 1: mod_base = OTHER; note = 2'-O-methyluridine-3'-phosphorothioate
  modified_base 2: mod_base = OTHER; note = 2'-O-methyladenosine-3'-phosphorothioate
  modified_base 3: mod_base = OTHER; note = 2'-O-methylguanosine-3'-phosphate
  modified_base 4: mod_base = OTHER; note = 2'-O-methyladenosine-3'-phosphate
  modified_base 5: mod_base = OTHER; note = 2'-O-methyladenosine-3'-phosphate
  modified_base 6: mod_base = OTHER; note = 2'-O-docosanyl-adenosine-3'-phosphate
  modified_base 7: mod_base = OTHER; note = 2'-deoxy-2'-fluoroguanosine-3'-phosphate
  modified_base 8: mod_base = OTHER; note = 2'-O-methyladenosine-3'-phosphate
  modified_base 9: mod_base = OTHER; note = 2'-deoxy-2'-fluoroadenosine-3'-phosphate
  modified_base 10: mod_base = OTHER; note = 2'-deoxy-2'-fluoroadenosine-3'-phosphate
  modified_base 11: mod_base = OTHER; note = 2'-deoxy-2'-fluoroadenosine-3'-phosphate
  modified_base 12: mod_base = OTHER; note = 2'-O-methylguanosine-3'-phosphate
  modified_base 13: mod_base = OTHER; note = 2'-O-methyladenosine-3'-phosphate
  modified_base 14: mod_base = OTHER; note = 2'-O-methylcytidine-3'-phosphate
  modified_base 15: mod_base = OTHER; note = 2'-O-methyladenosine-3'-phosphate
  modified_base 16: mod_base = OTHER; note = 2'-O-methylguanosine-3'-phosphate
  modified_base 17: mod_base = OTHER; note = 2'-O-methyladenosine-3'-phosphate
  modified_base 18: mod_base = OTHER; note = 2'-O-methyladenosine-3'-phosphate
  modified_base 19: mod_base = OTHER; note = 2'-O-methyladenosine-3'-phosphorothioate
  modified_base 20: mod_base = OTHER; note = 2'-O-methyladenosine-3'-phosphorothioate
  modified_base 21: mod_base = OTHER; note = 2'-O-methyladenosine
tagaaagaaaagacagaaaaa

SEQ ID NO: 11071 - RNA, 21 nt, synthetic construct
  source 1..21: mol_type = other RNA
  modified_base 1: mod_base = OTHER; note = 2'-O-methylguanosine-3'-phosphorothioate
  modified_base 2: mod_base = OTHER; note = 2'-O-methyladenosine-3'-phosphorothioate
  modified_base 3: mod_base = OTHER; note = 2'-O-methylguanosine-3'-phosphate
  modified_base 4: mod_base = OTHER; note = 2'-O-methylguanosine-3'-phosphate
  modified_base 5: mod_base = OTHER; note = 2'-O-methyladenosine-3'-phosphate
  modified_base 6: mod_base = OTHER; note = 2'-O-docosanyl-adenosine-3'-phosphate
  modified_base 7: mod_base = OTHER; note = 2'-deoxy-2'-fluoroguanosine-3'-phosphate
  modified_base 8: mod_base = OTHER; note = 2'-O-methylguanosine-3'-phosphate
  modified_base 9: mod_base = OTHER; note = 2'-deoxy-2'-fluoroadenosine-3'-phosphate
  modified_base 10: mod_base = OTHER; note = 2'-deoxy-2'-fluoroadenosine-3'-phosphate
  modified_base 11: mod_base = OTHER; note = 2'-deoxy-2'-fluoroguanosine-3'-phosphate
  modified_base 12: mod_base = OTHER; note = 2'-O-methylguanosine-3'-phosphate
  modified_base 13: mod_base = OTHER; note = 2'-O-methyladenosine-3'-phosphate
  modified_base 14: mod_base = OTHER; note = 2'-O-methyladenosine-3'-phosphate
  modified_base 15: mod_base = OTHER; note = 2'-O-methyladenosine-3'-phosphate
  modified_base 16: mod_base = OTHER; note = 2'-O-methyluridine-3'-phosphate
  modified_base 17: mod_base = OTHER; note = 2'-O-methyladenosine-3'-phosphate
  modified_base 18: mod_base = OTHER; note = 2'-O-methyluridine-3'-phosphate
  modified_base 19: mod_base = OTHER; note = 2'-O-methyluridine-3'-phosphorothioate
  modified_base 20: mod_base = OTHER; note = 2'-O-methyluridine-3'-phosphorothioate
  modified_base 21: mod_base = OTHER; note = 2'-O-methyladenosine
gaggaaggaaggaaatattta

SEQ ID NO: 11072 - RNA, 21 nt, synthetic construct
  source 1..21: mol_type = other RNA
  modified_base 1: mod_base = OTHER; note = 2'-O-methyladenosine-3'-phosphorothioate
  modified_base 2: mod_base = OTHER; note = 2'-O-methylguanosine-3'-phosphorothioate
  modified_base 3: mod_base = OTHER; note = 2'-O-methylguanosine-3'-phosphate
  modified_base 4: mod_base = OTHER; note = 2'-O-methyladenosine-3'-phosphate
  modified_base 5: mod_base = OTHER; note = 2'-O-methyladenosine-3'-phosphate
  modified_base 6: mod_base = OTHER; note = 2'-O-docosanyl-guanosine-3'-phosphate
  modified_base 7: mod_base = OTHER; note = 2'-deoxy-2'-fluoroguanosine-3'-phosphate
  modified_base 8: mod_base = OTHER; note = 2'-O-methyladenosine-3'-phosphate
  modified_base 9: mod_base = OTHER; note = 2'-deoxy-2'-fluoroadenosine-3'-phosphate
  modified_base 10: mod_base = OTHER; note = 2'-deoxy-2'-fluoroguanosine-3'-phosphate
  modified_base 11: mod_base = OTHER; note = 2'-deoxy-2'-fluoroguanosine-3'-phosphate
  modified_base 12: mod_base = OTHER; note = 2'-O-methyladenosine-3'-phosphate
  modified_base 13: mod_base = OTHER; note = 2'-O-methyladenosine-3'-phosphate
  modified_base 14: mod_base = OTHER; note = 2'-O-methyladenosine-3'-phosphate
  modified_base 15: mod_base = OTHER; note = 2'-O-methyluridine-3'-phosphate
  modified_base 16: mod_base = OTHER; note = 2'-O-methyladenosine-3'-phosphate
  modified_base 17: mod_base = OTHER; note = 2'-O-methyluridine-3'-phosphate
  modified_base 18: mod_base = OTHER; note = 2'-O-methyluridine-3'-phosphate
  modified_base 19: mod_base = OTHER; note = 2'-O-methyluridine-3'-phosphorothioate
  modified_base 20: mod_base = OTHER; note = 2'-O-methyluridine-3'-phosphorothioate
  modified_base 21: mod_base = OTHER; note = 2'-O-methyladenosine
aggaaggaaggaaatatttta

SEQ ID NO: 11073 - RNA, 21 nt, synthetic construct
  source 1..21: mol_type = other RNA
  modified_base 1: mod_base = OTHER; note = 2'-O-methylguanosine-3'-phosphorothioate
  modified_base 2: mod_base = OTHER; note = 2'-O-methylguanosine-3'-phosphorothioate
  modified_base 3: mod_base = OTHER; note = 2'-O-methyladenosine-3'-phosphate
  modified_base 4: mod_base = OTHER; note = 2'-O-methyladenosine-3'-phosphate
  modified_base 5: mod_base = OTHER; note = 2'-O-methylguanosine-3'-phosphate
  modified_base 6: mod_base = OTHER; note = 2'-O-docosanyl-guanosine-3'-phosphate
  modified_base 7: mod_base = OTHER; note = 2'-deoxy-2'-fluoroadenosine-3'-phosphate
  modified_base 8: mod_base = OTHER; note = 2'-O-methyladenosine-3'-phosphate
  modified_base 9: mod_base = OTHER; note = 2'-deoxy-2'-fluoroadenosine-3'-phosphate
  modified_base 10: mod_base = OTHER; note = 2'-deoxy-2'-fluorouridine-3'-phosphate
  modified_base 11: mod_base = OTHER; note = 2'-deoxy-2'-fluoroadenosine-3'-phosphate
  modified_base 12: mod_base = OTHER; note = 2'-O-methyluridine-3'-phosphate
  modified_base 13: mod_base = OTHER; note = 2'-O-methyluridine-3'-phosphate
  modified_base 14: mod_base = OTHER; note = 2'-O-methyluridine-3'-phosphate
  modified_base 15: mod_base = OTHER; note = 2'-O-methyluridine-3'-phosphate
  modified_base 16: mod_base = OTHER; note = 2'-O-methylguanosine-3'-phosphate
  modified_base 17: mod_base = OTHER; note = 2'-O-methyladenosine-3'-phosphate
  modified_base 18: mod_base = OTHER; note = 2'-O-methylguanosine-3'-phosphate
  modified_base 19: mod_base = OTHER; note = 2'-O-methyladenosine-3'-phosphorothioate
  modified_base 20: mod_base = OTHER; note = 2'-O-methyladenosine-3'-phosphorothioate
  modified_base 21: mod_base = OTHER; note = 2'-O-methyladenosine
ggaaggaaatattttgagaaa

SEQ ID NO: 11074 - RNA, 21 nt, synthetic construct
  source 1..21: mol_type = other RNA
  modified_base 1: mod_base = OTHER; note = 2'-O-methylcytidine-3'-phosphorothioate
  modified_base 2: mod_base = OTHER; note = 2'-O-methyluridine-3'-phosphorothioate
  modified_base 3: mod_base = OTHER; note = 2'-O-methyluridine-3'-phosphate
  modified_base 4: mod_base = OTHER; note = 2'-O-methylcytidine-3'-phosphate
  modified_base 5: mod_base = OTHER; note = 2'-O-methyladenosine-3'-phosphate
  modified_base 6: mod_base = OTHER; note = 2'-O-docosanyl-adenosine-3'-phosphate
  modified_base 7: mod_base = OTHER; note = 2'-deoxy-2'-fluorouridine-3'-phosphate
  modified_base 8: mod_base = OTHER; note = 2'-O-methylguanosine-3'-phosphate
  modified_base 9: mod_base = OTHER; note = 2'-deoxy-2'-fluoroadenosine-3'-phosphate
  modified_base 10: mod_base = OTHER; note = 2'-deoxy-2'-fluoroadenosine-3'-phosphate
  modified_base 11: mod_base = OTHER; note = 2'-deoxy-2'-fluoroguanosine-3'-phosphate
  modified_base 12: mod_base = OTHER; note = 2'-O-methyluridine-3'-phosphate
  modified_base 13: mod_base = OTHER; note = 2'-O-methylguanosine-3'-phosphate
  modified_base 14: mod_base = OTHER; note = 2'-O-methyluridine-3'-phosphate
  modified_base 15: mod_base = OTHER; note = 2'-O-methyluridine-3'-phosphate
  modified_base 16: mod_base = OTHER; note = 2'-O-methyladenosine-3'-phosphate
  modified_base 17: mod_base = OTHER; note = 2'-O-methyladenosine-3'-phosphate
  modified_base 18: mod_base = OTHER; note = 2'-O-methylcytidine-3'-phosphate
  modified_base 19: mod_base = OTHER; note = 2'-O-methyladenosine-3'-phosphorothioate
  modified_base 20: mod_base = OTHER; note = 2'-O-methyladenosine-3'-phosphorothioate
  modified_base 21: mod_base = OTHER; note = 2'-O-methyladenosine
cttcaatgaagtgttaacaaa

SEQ ID NO: 11075 - RNA, 21 nt, synthetic construct
  source 1..21: mol_type = other RNA
  modified_base 1: mod_base = OTHER; note = 2'-O-methylguanosine-3'-phosphorothioate
  modified_base 2: mod_base = OTHER; note = 2'-O-methyladenosine-3'-phosphorothioate
  modified_base 3: mod_base = OTHER; note = 2'-O-methyladenosine-3'-phosphate
  modified_base 4: mod_base = OTHER; note = 2'-O-methylguanosine-3'-phosphate
  modified_base 5: mod_base = OTHER; note = 2'-O-methyladenosine-3'-phosphate
  modified_base 6: mod_base = OTHER; note = 2'-O-docosanyl-adenosine-3'-phosphate
  modified_base 7: mod_base = OTHER; note = 2'-deoxy-2'-fluorouridine-3'-phosphate
  modified_base 8: mod_base = OTHER; note = 2'-O-methyluridine-3'-phosphate
  modified_base 9: mod_base = OTHER; note = 2'-deoxy-2'-fluoroadenosine-3'-phosphate
  modified_base 10: mod_base = OTHER; note = 2'-deoxy-2'-fluoroadenosine-3'-phosphate
  modified_base 11: mod_base = OTHER; note = 2'-deoxy-2'-fluoroguanosine-3'-phosphate
  modified_base 12: mod_base = OTHER; note = 2'-O-methyladenosine-3'-phosphate
  modified_base 13: mod_base = OTHER; note = 2'-O-methyladenosine-3'-phosphate
  modified_base 14: mod_base = OTHER; note = 2'-O-methyladenosine-3'-phosphate
  modified_base 15: mod_base = OTHER; note = 2'-O-methyladenosine-3'-phosphate
  modified_base 16: mod_base = OTHER; note = 2'-O-methylcytidine-3'-phosphate
  modified_base 17: mod_base = OTHER; note = 2'-O-methyluridine-3'-phosphate
  modified_base 18: mod_base = OTHER; note = 2'-O-methylcytidine-3'-phosphate
  modified_base 19: mod_base = OTHER; note = 2'-O-methyluridine-3'-phosphorothioate
  modified_base 20: mod_base = OTHER; note = 2'-O-methyluridine-3'-phosphorothioate
  modified_base 21: mod_base = OTHER; note = 2'-O-methyladenosine
gaagaattaagaaaactctta

SEQ ID NO: 11076 - RNA, 21 nt, synthetic construct
  source 1..21: mol_type = other RNA
  modified_base 1: mod_base = OTHER; note = 2'-O-methyladenosine-3'-phosphorothioate
  modified_base 2: mod_base = OTHER; note = 2'-O-methyladenosine-3'-phosphorothioate
  modified_base 3: mod_base = OTHER; note = 2'-O-methyladenosine-3'-phosphate
  modified_base 4: mod_base = OTHER; note = 2'-O-methylcytidine-3'-phosphate
  modified_base 5: mod_base = OTHER; note = 2'-O-methyluridine-3'-phosphate
  modified_base 6: mod_base = OTHER; note = 2'-O-docosanyl-cytidine-3'-phosphate
  modified_base 7: mod_base = OTHER; note = 2'-deoxy-2'-fluorouridine-3'-phosphate
  modified_base 8: mod_base = OTHER; note = 2'-O-methyluridine-3'-phosphate
  modified_base 9: mod_base = OTHER; note = 2'-deoxy-2'-fluorocytidine-3'-phosphate
  modified_base 10: mod_base = OTHER; note = 2'-deoxy-2'-fluoroadenosine-3'-phosphate
  modified_base 11: mod_base = OTHER; note = 2'-deoxy-2'-fluoroadenosine-3'-phosphate
  modified_base 12: mod_base = OTHER; note = 2'-O-methyluridine-3'-phosphate
  modified_base 13: mod_base = OTHER; note = 2'-O-methylguanosine-3'-phosphate
  modified_base 14: mod_base = OTHER; note = 2'-O-methyladenosine-3'-phosphate
  modified_base 15: mod_base = OTHER; note = 2'-O-methyladenosine-3'-phosphate
  modified_base 16: mod_base = OTHER; note = 2'-O-methylguanosine-3'-phosphate
  modified_base 17: mod_base = OTHER; note = 2'-O-methyluridine-3'-phosphate
  modified_base 18: mod_base = OTHER; note = 2'-O-methylguanosine-3'-phosphate
  modified_base 19: mod_base = OTHER; note = 2'-O-methyluridine-3'-phosphorothioate
  modified_base 20: mod_base = OTHER; note = 2'-O-methyluridine-3'-phosphorothioate
  modified_base 21: mod_base = OTHER; note = 2'-O-methyladenosine
aaactcttcaatgaagtgtta

SEQ ID NO: 11077 - RNA, 21 nt, synthetic construct
  source 1..21: mol_type = other RNA
  modified_base 1: mod_base = OTHER; note = 2'-O-methyladenosine-3'-phosphorothioate
  modified_base 2: mod_base = OTHER; note = 2'-O-methyladenosine-3'-phosphorothioate
  modified_base 3: mod_base = OTHER; note = 2'-O-methyluridine-3'-phosphate
  modified_base 4: mod_base = OTHER; note = 2'-O-methylguanosine-3'-phosphate
  modified_base 5: mod_base = OTHER; note = 2'-O-methyladenosine-3'-phosphate
  modified_base 6: mod_base = OTHER; note = 2'-O-docosanyl-adenosine-3'-phosphate
  modified_base 7: mod_base = OTHER; note = 2'-deoxy-2'-fluoroguanosine-3'-phosphate
  modified_base 8: mod_base = OTHER; note = 2'-O-methyluridine-3'-phosphate
  modified_base 9: mod_base = OTHER; note = 2'-deoxy-2'-fluoroguanosine-3'-phosphate
  modified_base 10: mod_base = OTHER; note = 2'-deoxy-2'-fluorouridine-3'-phosphate
  modified_base 11: mod_base = OTHER; note = 2'-deoxy-2'-fluorouridine-3'-phosphate
  modified_base 12: mod_base = OTHER; note = 2'-O-methyladenosine-3'-phosphate
  modified_base 13: mod_base = OTHER; note = 2'-O-methyladenosine-3'-phosphate
  modified_base 14: mod_base = OTHER; note = 2'-O-methylcytidine-3'-phosphate
  modified_base 15: mod_base = OTHER; note = 2'-O-methyladenosine-3'-phosphate
  modified_base 16: mod_base = OTHER; note = 2'-O-methyladenosine-3'-phosphate
  modified_base 17: mod_base = OTHER; note = 2'-O-methylcytidine-3'-phosphate
  modified_base 18: mod_base = OTHER; note = 2'-O-methylcytidine-3'-phosphate
  modified_base 19: mod_base = OTHER; note = 2'-O-methyladenosine-3'-phosphorothioate
  modified_base 20: mod_base = OTHER; note = 2'-O-methyladenosine-3'-phosphorothioate
  modified_base 21: mod_base = OTHER; note = 2'-O-methyladenosine
aatgaagtgttaacaaccaaa

SEQ ID NO: 11078 - RNA, 21 nt, synthetic construct
  source 1..21: mol_type = other RNA
  modified_base 1: mod_base = OTHER; note = 2'-O-methyladenosine-3'-phosphorothioate
  modified_base 2: mod_base = OTHER; note = 2'-O-methyluridine-3'-phosphorothioate
  modified_base 3: mod_base = OTHER; note = 2'-O-methylguanosine-3'-phosphate
  modified_base 4: mod_base = OTHER; note = 2'-O-methyladenosine-3'-phosphate
  modified_base 5: mod_base = OTHER; note = 2'-O-methyladenosine-3'-phosphate
  modified_base 6: mod_base = OTHER; note = 2'-O-docosanyl-guanosine-3'-phosphate
  modified_base 7: mod_base = OTHER; note = 2'-deoxy-2'-fluorouridine-3'-phosphate
  modified_base 8: mod_base = OTHER; note = 2'-O-methylguanosine-3'-phosphate
  modified_base 9: mod_base = OTHER; note = 2'-deoxy-2'-fluorouridine-3'-phosphate
  modified_base 10: mod_base = OTHER; note = 2'-deoxy-2'-fluorouridine-3'-phosphate
  modified_base 11: mod_base = OTHER; note = 2'-deoxy-2'-fluoroadenosine-3'-phosphate
  modified_base 12: mod_base = OTHER; note = 2'-O-methyladenosine-3'-phosphate
  modified_base 13: mod_base = OTHER; note = 2'-O-methylcytidine-3'-phosphate
  modified_base 14: mod_base = OTHER; note = 2'-O-methyladenosine-3'-phosphate
  modified_base 15: mod_base = OTHER; note = 2'-O-methyladenosine-3'-phosphate
  modified_base 16: mod_base = OTHER; note = 2'-O-methylcytidine-3'-phosphate
  modified_base 17: mod_base = OTHER; note = 2'-O-methylcytidine-3'-phosphate
  modified_base 18: mod_base = OTHER; note = 2'-O-methyladenosine-3'-phosphate
  modified_base 19: mod_base = OTHER; note = 2'-O-methyladenosine-3'-phosphorothioate
  modified_base 20: mod_base = OTHER; note = 2'-O-methyladenosine-3'-phosphorothioate
  modified_base 21: mod_base = OTHER; note = 2'-O-methyladenosine
atgaagtgttaacaaccaaaa

SEQ ID NO: 11079 - RNA, 21 nt, synthetic construct
  source 1..21: mol_type = other RNA
  modified_base 1: mod_base = OTHER; note = 2'-O-methylcytidine-3'-phosphorothioate
  modified_base 2: mod_base = OTHER; note = 2'-O-methylguanosine-3'-phosphorothioate
  modified_base 3: mod_base = OTHER; note = 2'-O-methylguanosine-3'-phosphate
  modified_base 4: mod_base = OTHER; note = 2'-O-methyluridine-3'-phosphate
  modified_base 5: mod_base = OTHER; note = 2'-O-methyladenosine-3'-phosphate
  modified_base 6: mod_base = OTHER; note = 2'-O-docosanyl-uridine-3'-phosphate
  modified_base 7: mod_base = OTHER; note = 2'-deoxy-2'-fluorocytidine-3'-phosphate
  modified_base 8: mod_base = OTHER; note = 2'-O-methyladenosine-3'-phosphate
  modified_base 9: mod_base = OTHER; note = 2'-deoxy-2'-fluoroguanosine-3'-phosphate
  modified_base 10: mod_base = OTHER; note = 2'-deoxy-2'-fluoroadenosine-3'-phosphate
  modified_base 11: mod_base = OTHER; note = 2'-deoxy-2'-fluoroadenosine-3'-phosphate
  modified_base 12: mod_base = OTHER; note = 2'-O-methyladenosine-3'-phosphate
  modified_base 13: mod_base = OTHER; note = 2'-O-methylcytidine-3'-phosphate
  modified_base 14: mod_base = OTHER; note = 2'-O-methyladenosine-3'-phosphate
  modified_base 15: mod_base = OTHER; note = 2'-O-methylguanosine-3'-phosphate
  modified_base 16: mod_base = OTHER; note = 2'-O-methylcytidine-3'-phosphate
  modified_base 17: mod_base = OTHER; note = 2'-O-methyladenosine-3'-phosphate
  modified_base 18: mod_base = OTHER; note = 2'-O-methyladenosine-3'-phosphate
  modified_base 19: mod_base = OTHER; note = 2'-O-methyladenosine-3'-phosphorothioate
  modified_base 20: mod_base = OTHER; note = 2'-O-methyluridine-3'-phosphorothioate
  modified_base 21: mod_base = OTHER; note = 2'-O-methyladenosine
cggtatcagaaacagcaaata

SEQ ID NO: 11080 - RNA, 21 nt, synthetic construct
  source 1..21: mol_type = other RNA
  modified_base 1: mod_base = OTHER; note = 2'-O-methyluridine-3'-phosphorothioate
  modified_base 2: mod_base = OTHER; note = 2'-O-methyladenosine-3'-phosphorothioate
  modified_base 3: mod_base = OTHER; note = 2'-O-methylcytidine-3'-phosphate
  modified_base 4: mod_base = OTHER; note = 2'-O-methyladenosine-3'-phosphate
  modified_base 5: mod_base = OTHER; note = 2'-O-methylguanosine-3'-phosphate
  modified_base 6: mod_base = OTHER; note = 2'-O-docosanyl-adenosine-3'-phosphate
  modified_base 7: mod_base = OTHER; note = 2'-deoxy-2'-fluorocytidine-3'-phosphate
  modified_base 8: mod_base = OTHER; note = 2'-O-methylguanosine-3'-phosphate
  modified_base 9: mod_base = OTHER; note = 2'-deoxy-2'-fluoroguanosine-3'-phosphate
  modified_base 10: mod_base = OTHER; note = 2'-deoxy-2'-fluorouridine-3'-phosphate
  modified_base 11: mod_base = OTHER; note = 2'-deoxy-2'-fluoroadenosine-3'-phosphate
  modified_base 12: mod_base = OTHER; note = 2'-O-methyluridine-3'-phosphate
  modified_base 13: mod_base = OTHER; note = 2'-O-methylcytidine-3'-phosphate
  modified_base 14: mod_base = OTHER; note = 2'-O-methyladenosine-3'-phosphate
  modified_base 15: mod_base = OTHER; note = 2'-O-methylguanosine-3'-phosphate
  modified_base 16: mod_base = OTHER; note = 2'-O-methyladenosine-3'-phosphate
  modified_base 17: mod_base = OTHER; note = 2'-O-methyladenosine-3'-phosphate
  modified_base 18: mod_base = OTHER; note = 2'-O-methyladenosine-3'-phosphate
  modified_base 19: mod_base = OTHER; note = 2'-O-methylcytidine-3'-phosphorothioate
  modified_base 20: mod_base = OTHER; note = 2'-O-methyladenosine-3'-phosphorothioate
  modified_base 21: mod_base = OTHER; note = 2'-O-methyladenosine
tacagacggtatcagaaacaa

SEQ ID NO: 11081 - RNA, 21 nt, synthetic construct
  source 1..21: mol_type = other RNA
  modified_base 1: mod_base = OTHER; note = 2'-O-methyladenosine-3'-phosphorothioate
  modified_base 2: mod_base = OTHER; note = 2'-O-methyluridine-3'-phosphorothioate
  modified_base 3: mod_base = OTHER; note = 2'-O-methylcytidine-3'-phosphate
  modified_base 4: mod_base = OTHER; note = 2'-O-methyladenosine-3'-phosphate
  modified_base 5: mod_base = OTHER; note = 2'-O-methylguanosine-3'-phosphate
  modified_base 6: mod_base = OTHER; note = 2'-O-docosanyl-adenosine-3'-phosphate
  modified_base 7: mod_base = OTHER; note = 2'-deoxy-2'-fluoroadenosine-3'-phosphate
  modified_base 8: mod_base = OTHER; note = 2'-O-methyladenosine-3'-phosphate
  modified_base 9: mod_base = OTHER; note = 2'-deoxy-2'-fluorocytidine-3'-phosphate
  modified_base 10: mod_base = OTHER; note = 2'-deoxy-2'-fluoroadenosine-3'-phosphate
  modified_base 11: mod_base = OTHER; note = 2'-deoxy-2'-fluoroguanosine-3'-phosphate
  modified_base 12: mod_base = OTHER; note = 2'-O-methylcytidine-3'-phosphate
  modified_base 13: mod_base = OTHER; note = 2'-O-methyladenosine-3'-phosphate
  modified_base 14: mod_base = OTHER; note = 2'-O-methyladenosine-3'-phosphate
  modified_base 15: mod_base = OTHER; note = 2'-O-methyladenosine-3'-phosphate
  modified_base 16: mod_base = OTHER; note = 2'-O-methyluridine-3'-phosphate
  modified_base 17: mod_base = OTHER; note = 2'-O-methyladenosine-3'-phosphate
  modified_base 18: mod_base = OTHER; note = 2'-O-methylguanosine-3'-phosphate
  modified_base 19: mod_base = OTHER; note = 2'-O-methyladenosine-3'-phosphorothioate
  modified_base 20: mod_base = OTHER; note = 2'-O-methyluridine-3'-phosphorothioate
  modified_base 21: mod_base = OTHER; note = 2'-O-methyladenosine
atcagaaacagcaaatagata

SEQ ID NO: 11082 - RNA, 21 nt, synthetic construct
  source 1..21: mol_type = other RNA
  modified_base 1: mod_base = OTHER; note = 2'-O-methylcytidine-3'-phosphorothioate
  modified_base 2: mod_base = OTHER; note = 2'-O-methyladenosine-3'-phosphorothioate
  modified_base 3: mod_base = OTHER; note = 2'-O-methylguanosine-3'-phosphate
  modified_base 4: mod_base = OTHER; note = 2'-O-methyladenosine-3'-phosphate
  modified_base 5: mod_base = OTHER; note = 2'-O-methyladenosine-3'-phosphate
  modified_base 6: mod_base = OTHER; note = 2'-O-docosanyl-adenosine-3'-phosphate
  modified_base 7: mod_base = OTHER; note = 2'-deoxy-2'-fluorocytidine-3'-phosphate
  modified_base 8: mod_base = OTHER; note = 2'-O-methyladenosine-3'-phosphate
  modified_base 9: mod_base = OTHER; note = 2'-deoxy-2'-fluoroguanosine-3'-phosphate
  modified_base 10: mod_base = OTHER; note = 2'-deoxy-2'-fluorocytidine-3'-phosphate
  modified_base 11: mod_base = OTHER; note = 2'-deoxy-2'-fluoroadenosine-3'-phosphate
  modified_base 12: mod_base = OTHER; note = 2'-O-methyladenosine-3'-phosphate
  modified_base 13: mod_base = OTHER; note = 2'-O-methyladenosine-3'-phosphate
  modified_base 14: mod_base = OTHER; note = 2'-O-methyluridine-3'-phosphate
  modified_base 15: mod_base = OTHER; note = 2'-O-methyladenosine-3'-phosphate
  modified_base 16: mod_base = OTHER; note = 2'-O-methylguanosine-3'-phosphate
  modified_base 17: mod_base = OTHER; note = 2'-O-methyladenosine-3'-phosphate
  modified_base 18: mod_base = OTHER; note = 2'-O-methyluridine-3'-phosphate
  modified_base 19: mod_base = OTHER; note = 2'-O-methyladenosine-3'-phosphorothioate
  modified_base 20: mod_base = OTHER; note = 2'-O-methyluridine-3'-phosphorothioate
  modified_base 21: mod_base = OTHER; note = 2'-O-methyladenosine
cagaaacagcaaatagatata

SEQ ID NO: 11083 - RNA, 21 nt, synthetic construct
  source 1..21: mol_type = other RNA
  modified_base 1: mod_base = OTHER; note = 2'-O-methyladenosine-3'-phosphorothioate
  modified_base 2: mod_base = OTHER; note = 2'-O-methylguanosine-3'-phosphorothioate
  modified_base 3: mod_base = OTHER; note = 2'-O-methyladenosine-3'-phosphate
  modified_base 4: mod_base = OTHER; note = 2'-O-methyladenosine-3'-phosphate
  modified_base 5: mod_base = OTHER; note = 2'-O-methyladenosine-3'-phosphate
  modified_base 6: mod_base = OTHER; note = 2'-O-docosanyl-cytidine-3'-phosphate
  modified_base 7: mod_base = OTHER; note = 2'-deoxy-2'-fluoroadenosine-3'-phosphate
  modified_base 8: mod_base = OTHER; note = 2'-O-methylguanosine-3'-phosphate
  modified_base 9: mod_base = OTHER; note = 2'-deoxy-2'-fluorocytidine-3'-phosphate
  modified_base 10: mod_base = OTHER; note = 2'-deoxy-2'-fluoroadenosine-3'-phosphate
  modified_base 11: mod_base = OTHER; note = 2'-deoxy-2'-fluoroadenosine-3'-phosphate
  modified_base 12: mod_base = OTHER; note = 2'-O-methyladenosine-3'-phosphate
  modified_base 13: mod_base = OTHER; note = 2'-O-methyluridine-3'-phosphate
  modified_base 14: mod_base = OTHER; note = 2'-O-methyladenosine-3'-phosphate
  modified_base 15: mod_base = OTHER; note = 2'-O-methylguanosine-3'-phosphate
  modified_base 16: mod_base = OTHER; note = 2'-O-methyladenosine-3'-phosphate
  modified_base 17: mod_base = OTHER; note = 2'-O-methyluridine-3'-phosphate
  modified_base 18: mod_base = OTHER; note = 2'-O-methyladenosine-3'-phosphate
  modified_base 19: mod_base = OTHER; note = 2'-O-methyluridine-3'-phosphorothioate
  modified_base 20: mod_base = OTHER; note = 2'-O-methyluridine-3'-phosphorothioate
  modified_base 21: mod_base = OTHER; note = 2'-O-methyladenosine
agaaacagcaaatagatatta

SEQ ID NO: 11084 - RNA, 21 nt, synthetic construct
  source 1..21: mol_type = other RNA
  modified_base 1: mod_base = OTHER; note = 2'-O-methylguanosine-3'-phosphorothioate
  modified_base 2: mod_base = OTHER; note = 2'-O-methyladenosine-3'-phosphorothioate
  modified_base 3: mod_base = OTHER; note = 2'-O-methyladenosine-3'-phosphate
  modified_base 4: mod_base = OTHER; note = 2'-O-methyladenosine-3'-phosphate
  modified_base 5: mod_base = OTHER; note = 2'-O-methylcytidine-3'-phosphate
  modified_base 6: mod_base = OTHER; note = 2'-O-docosanyl-adenosine-3'-phosphate
  modified_base 7: mod_base = OTHER; note = 2'-deoxy-2'-fluoroguanosine-3'-phosphate
  modified_base 8: mod_base = OTHER; note = 2'-O-methylcytidine-3'-phosphate
  modified_base 9: mod_base = OTHER; note = 2'-deoxy-2'-fluoroadenosine-3'-phosphate
  modified_base 10: mod_base = OTHER; note = 2'-deoxy-2'-fluoroadenosine-3'-phosphate
  modified_base 11: mod_base = OTHER; note = 2'-deoxy-2'-fluoroadenosine-3'-phosphate
  modified_base 12: mod_base = OTHER; note = 2'-O-methyluridine-3'-phosphate
  modified_base 13: mod_base = OTHER; note = 2'-O-methyladenosine-3'-phosphate
  modified_base 14: mod_base = OTHER; note = 2'-O-methylguanosine-3'-phosphate
  modified_base 15: mod_base = OTHER; note = 2'-O-methyladenosine-3'-phosphate
  modified_base 16: mod_base = OTHER; note = 2'-O-methyluridine-3'-phosphate
  modified_base 17: mod_base = OTHER; note = 2'-O-methyladenosine-3'-phosphate
  modified_base 18: mod_base = OTHER; note = 2'-O-methyluridine-3'-phosphate
  modified_base 19: mod_base = OTHER; note = 2'-O-methyluridine-3'-phosphorothioate
  modified_base 20: mod_base = OTHER; note = 2'-O-methylcytidine-3'-phosphorothioate
  modified_base 21: mod_base = OTHER; note = 2'-O-methyladenosine
gaaacagcaaatagatattca

SEQ ID NO: 11085 - RNA, 21 nt, synthetic construct
  source 1..21: mol_type = other RNA
  modified_base 1: mod_base = OTHER; note = 2'-O-methyladenosine-3'-phosphorothioate
  modified_base 2: mod_base = OTHER; note = 2'-O-methyladenosine-3'-phosphorothioate
  modified_base 3: mod_base = OTHER; note = 2'-O-methylcytidine-3'-phosphate
  modified_base 4: mod_base = OTHER; note = 2'-O-methyladenosine-3'-phosphate
  modified_base 5: mod_base = OTHER; note = 2'-O-methylguanosine-3'-phosphate
  modified_base 6: mod_base = OTHER; note = 2'-O-docosanyl-cytidine-3'-phosphate
  modified_base 7: mod_base = OTHER; note = 2'-deoxy-2'-fluoroadenosine-3'-phosphate
  modified_base 8: mod_base = OTHER; note = 2'-O-methyladenosine-3'-phosphate
  modified_base 9: mod_base = OTHER; note = 2'-deoxy-2'-fluoroadenosine-3'-phosphate
  modified_base 10: mod_base = OTHER; note = 2'-deoxy-2'-fluorouridine-3'-phosphate
  modified_base 11: mod_base = OTHER; note = 2'-deoxy-2'-fluoroadenosine-3'-phosphate
  modified_base 12: mod_base = OTHER; note = 2'-O-methylguanosine-3'-phosphate
  modified_base 13: mod_base = OTHER; note = 2'-O-methyladenosine-3'-phosphate
  modified_base 14: mod_base = OTHER; note = 2'-O-methyluridine-3'-phosphate
  modified_base 15: mod_base = OTHER; note = 2'-O-methyladenosine-3'-phosphate
  modified_base 16: mod_base = OTHER; note = 2'-O-methyluridine-3'-phosphate
  modified_base 17: mod_base = OTHER; note = 2'-O-methyluridine-3'-phosphate
  modified_base 18: mod_base = OTHER; note = 2'-O-methylcytidine-3'-phosphate
  modified_base 19: mod_base = OTHER; note = 2'-O-methylcytidine-3'-phosphorothioate
  modified_base 20: mod_base = OTHER; note = 2'-O-methyluridine-3'-phosphorothioate
  modified_base 21: mod_base = OTHER; note = 2'-O-methyladenosine
aacagcaaatagatattccta

SEQ ID NO: 11086 - RNA, 21 nt, synthetic construct
  source 1..21: mol_type = other RNA
  modified_base 1: mod_base = OTHER; note = 2'-O-methylcytidine-3'-phosphorothioate
  modified_base 2: mod_base = OTHER; note = 2'-O-methyladenosine-3'-phosphorothioate
  modified_base 3: mod_base = OTHER; note = 2'-O-methylguanosine-3'-phosphate
  modified_base 4: mod_base = OTHER; note = 2'-O-methylcytidine-3'-phosphate
  modified_base 5: mod_base = OTHER; note = 2'-O-methyladenosine-3'-phosphate
  modified_base 6: mod_base = OTHER; note = 2'-O-docosanyl-adenosine-3'-phosphate
  modified_base 7: mod_base = OTHER; note = 2'-deoxy-2'-fluoroadenosine-3'-phosphate
  modified_base 8: mod_base = OTHER; note = 2'-O-methyluridine-3'-phosphate
  modified_base 9: mod_base = OTHER; note = 2'-deoxy-2'-fluoroadenosine-3'-phosphate
  modified_base 10: mod_base = OTHER; note = 2'-deoxy-2'-fluoroguanosine-3'-phosphate
  modified_base 11: mod_base = OTHER; note = 2'-deoxy-2'-fluoroadenosine-3'-phosphate
  modified_base 12: mod_base = OTHER; note = 2'-O-methyluridine-3'-phosphate
  modified_base 13: mod_base = OTHER; note = 2'-O-methyladenosine-3'-phosphate
  modified_base 14: mod_base = OTHER; note = 2'-O-methyluridine-3'-phosphate
  modified_base 15: mod_base = OTHER; note = 2'-O-methyluridine-3'-phosphate
  modified_base 16: mod_base = OTHER; note = 2'-O-methylcytidine-3'-phosphate
  modified_base 17: mod_base = OTHER; note = 2'-O-methylcytidine-3'-phosphate
  modified_base 18: mod_base = OTHER; note = 2'-O-methyluridine-3'-phosphate
  modified_base 19: mod_base = OTHER; note = 2'-O-methylcytidine-3'-phosphorothioate
  modified_base 20: mod_base = OTHER; note = 2'-O-methyluridine-3'-phosphorothioate
  modified_base 21: mod_base = OTHER; note = 2'-O-methyladenosine
cagcaaatagatattcctcta

SEQ ID NO: 11087 - RNA, 21 nt, synthetic construct
  source 1..21: mol_type = other RNA
  modified_base 1: mod_base = OTHER; note = 2'-O-methyladenosine-3'-phosphorothioate
  modified_base 2: mod_base = OTHER; note = 2'-O-methylguanosine-3'-phosphorothioate
  modified_base 3: mod_base = OTHER; note = 2'-O-methylcytidine-3'-phosphate
  modified_base 4: mod_base = OTHER; note = 2'-O-methyladenosine-3'-phosphate
  modified_base 5: mod_base = OTHER; note = 2'-O-methyladenosine-3'-phosphate
  modified_base 6: mod_base = OTHER; note = 2'-O-docosanyl-adenosine-3'-phosphate
  modified_base 7: mod_base = OTHER; note = 2'-deoxy-2'-fluorouridine-3'-phosphate
  modified_base 8: mod_base = OTHER; note = 2'-O-methyladenosine-3'-phosphate
  modified_base 9: mod_base = OTHER; note = 2'-deoxy-2'-fluoroguanosine-3'-phosphate
  modified_base 10: mod_base = OTHER; note = 2'-deoxy-2'-fluoroadenosine-3'-phosphate
  modified_base 11: mod_base = OTHER; note = 2'-deoxy-2'-fluorouridine-3'-phosphate
  modified_base 12: mod_base = OTHER; note = 2'-O-methyladenosine-3'-phosphate
  modified_base 13: mod_base = OTHER; note = 2'-O-methyluridine-3'-phosphate
  modified_base 14: mod_base = OTHER; note = 2'-O-methyluridine-3'-phosphate
  modified_base 15: mod_base = OTHER; note = 2'-O-methylcytidine-3'-phosphate
  modified_base 16: mod_base = OTHER; note = 2'-O-methylcytidine-3'-phosphate
  modified_base 17: mod_base = OTHER; note = 2'-O-methyluridine-3'-phosphate
  modified_base 18: mod_base = OTHER; note = 2'-O-methylcytidine-3'-phosphate
  modified_base 19: mod_base = OTHER; note = 2'-O-methyluridine-3'-phosphorothioate
  modified_base 20: mod_base = OTHER; note = 2'-O-methyladenosine-3'-phosphorothioate
  modified_base 21: mod_base = OTHER; note = 2'-O-methyladenosine
agcaaatagatattcctctaa

SEQ ID NO: 11088 - RNA, 21 nt, synthetic construct
  source 1..21: mol_type = other RNA
  modified_base 1: mod_base = OTHER; note = 2'-O-methylcytidine-3'-phosphorothioate
  modified_base 2: mod_base = OTHER; note = 2'-O-methyladenosine-3'-phosphorothioate
  modified_base 3: mod_base = OTHER; note = 2'-O-methyladenosine-3'-phosphate
  modified_base 4: mod_base = OTHER; note = 2'-O-methyladenosine-3'-phosphate
  modified_base 5: mod_base = OTHER; note = 2'-O-methyluridine-3'-phosphate
  modified_base 6: mod_base = OTHER; note = 2'-O-docosanyl-adenosine-3'-phosphate
  modified_base 7: mod_base = OTHER; note = 2'-deoxy-2'-fluoroguanosine-3'-phosphate
  modified_base 8: mod_base = OTHER; note = 2'-O-methyladenosine-3'-phosphate
  modified_base 9: mod_base = OTHER; note = 2'-deoxy-2'-fluorouridine-3'-phosphate
  modified_base 10: mod_base = OTHER; note = 2'-deoxy-2'-fluoroadenosine-3'-phosphate
  modified_base 11: mod_base = OTHER; note = 2'-deoxy-2'-fluorouridine-3'-phosphate
  modified_base 12: mod_base = OTHER; note = 2'-O-methyluridine-3'-phosphate
  modified_base 13: mod_base = OTHER; note = 2'-O-methylcytidine-3'-phosphate
  modified_base 14: mod_base = OTHER; note = 2'-O-methylcytidine-3'-phosphate
  modified_base 15: mod_base = OTHER; note = 2'-O-methyluridine-3'-phosphate
  modified_base 16: mod_base = OTHER; note = 2'-O-methylcytidine-3'-phosphate
  modified_base 17: mod_base = OTHER; note = 2'-O-methyluridine-3'-phosphate
  modified_base 18: mod_base = OTHER; note = 2'-O-methyladenosine-3'-phosphate
  modified_base 19: mod_base = OTHER; note = 2'-O-methylcytidine-3'-phosphorothioate
  modified_base 20: mod_base = OTHER; note = 2'-O-methylcytidine-3'-phosphorothioate
  modified_base 21: mod_base = OTHER; note = 2'-O-methyladenosine
caaatagatattcctctacca

SEQ ID NO: 11089 - RNA, 21 nt, synthetic construct
  source 1..21: mol_type = other RNA
  modified_base 1: mod_base = OTHER; note = 2'-O-methyluridine-3'-phosphorothioate
  modified_base 2: mod_base = OTHER; note = 2'-O-methylguanosine-3'-phosphorothioate
  modified_base 3: mod_base = OTHER; note = 2'-O-methyladenosine-3'-phosphate
  modified_base 4: mod_base = OTHER; note = 2'-O-methylguanosine-3'-phosphate
  modified_base 5: mod_base = OTHER; note = 2'-O-methyluridine-3'-phosphate
  modified_base 6: mod_base = OTHER; note = 2'-O-docosanyl-adenosine-3'-phosphate
  modified_base 7: mod_base = OTHER; note = 2'-deoxy-2'-fluorocytidine-3'-phosphate
  modified_base 8: mod_base = OTHER; note = 2'-O-methyladenosine-3'-phosphate
  modified_base 9: mod_base = OTHER; note = 2'-deoxy-2'-fluoroguanosine-3'-phosphate
  modified_base 10: mod_base = OTHER; note = 2'-deoxy-2'-fluoroadenosine-3'-phosphate
  modified_base 11: mod_base = OTHER; note = 2'-deoxy-2'-fluoroadenosine-3'-phosphate
  modified_base 12: mod_base = OTHER; note = 2'-O-methylguanosine-3'-phosphate
  modified_base 13: mod_base = OTHER; note = 2'-O-methyladenosine-3'-phosphate
  modified_base 14: mod_base = OTHER; note = 2'-O-methyladenosine-3'-phosphate
  modified_base 15: mod_base = OTHER; note = 2'-O-methyluridine-3'-phosphate
  modified_base 16: mod_base = OTHER; note = 2'-O-methylguanosine-3'-phosphate
  modified_base 17: mod_base = OTHER; note = 2'-O-methylcytidine-3'-phosphate
  modified_base 18: mod_base = OTHER; note = 2'-O-methyluridine-3'-phosphate
  modified_base 19: mod_base = OTHER; note = 2'-O-methylcytidine-3'-phosphorothioate
  modified_base 20: mod_base = OTHER; note = 2'-O-methyladenosine-3'-phosphorothioate
  modified_base 21: mod_base = OTHER; note = 2'-O-methyladenosine
tgagtacagaagaatgctcaa

SEQ ID NO: 11090 - RNA, 21 nt, synthetic construct
  source 1..21: mol_type = other RNA
  modified_base 1: mod_base = OTHER; note = 2'-O-methylguanosine-3'-phosphorothioate
  modified_base 2: mod_base = OTHER; note = 2'-O-methyluridine-3'-phosphorothioate
  modified_base 3: mod_base = OTHER; note = 2'-O-methyladenosine-3'-phosphate
  modified_base 4: mod_base = OTHER; note = 2'-O-methylcytidine-3'-phosphate
  modified_base 5: mod_base = OTHER; note = 2'-O-methyladenosine-3'-phosphate
  modified_base 6: mod_base = OTHER; note = 2'-O-docosanyl-guanosine-3'-phosphate
  modified_base 7: mod_base = OTHER; note = 2'-deoxy-2'-fluoroadenosine-3'-phosphate
  modified_base 8: mod_base = OTHER; note = 2'-O-methyladenosine-3'-phosphate
  modified_base 9: mod_base = OTHER; note = 2'-deoxy-2'-fluoroguanosine-3'-phosphate
  modified_base 10: mod_base = OTHER; note = 2'-deoxy-2'-fluoroadenosine-3'-phosphate
  modified_base 11: mod_base = OTHER; note = 2'-deoxy-2'-fluoroadenosine-3'-phosphate
  modified_base 12: mod_base = OTHER; note = 2'-O-methyluridine-3'-phosphate
  modified_base 13: mod_base = OTHER; note = 2'-O-methylguanosine-3'-phosphate
  modified_base 14: mod_base = OTHER; note = 2'-O-methylcytidine-3'-phosphate
  modified_base 15: mod_base = OTHER; note = 2'-O-methyluridine-3'-phosphate
  modified_base 16: mod_base = OTHER; note = 2'-O-methylcytidine-3'-phosphate
  modified_base 17: mod_base = OTHER; note = 2'-O-methyladenosine-3'-phosphate
  modified_base 18: mod_base = OTHER; note = 2'-O-methyluridine-3'-phosphate
  modified_base 19: mod_base = OTHER; note = 2'-O-methylguanosine-3'-phosphorothioate
  modified_base 20: mod_base = OTHER; note = 2'-O-methyladenosine-3'-phosphorothioate
  modified_base 21: mod_base = OTHER; note = 2'-O-methyladenosine
gtacagaagaatgctcatgaa

SEQ ID NO: 11091 - RNA, 21 nt, synthetic construct
  source 1..21: mol_type = other RNA
  modified_base 1: mod_base = OTHER; note = 2'-O-methyluridine-3'-phosphorothioate
  modified_base 2: mod_base = OTHER; note = 2'-O-methyladenosine-3'-phosphorothioate
  modified_base 3: mod_base = OTHER; note = 2'-O-methylcytidine-3'-phosphate
  modified_base 4: mod_base = OTHER; note = 2'-O-methyladenosine-3'-phosphate
  modified_base 5: mod_base = OTHER; note = 2'-O-methylguanosine-3'-phosphate
  modified_base 6: mod_base = OTHER; note = 2'-O-docosanyl-adenosine-3'-phosphate
  modified_base 7: mod_base = OTHER; note = 2'-deoxy-2'-fluoroadenosine-3'-phosphate
  modified_base 8: mod_base = OTHER; note = 2'-O-methylguanosine-3'-phosphate
  modified_base 9: mod_base = OTHER; note = 2'-deoxy-2'-fluoroadenosine-3'-phosphate
  modified_base 10: mod_base = OTHER; note = 2'-deoxy-2'-fluoroadenosine-3'-phosphate
  modified_base 11: mod_base = OTHER; note = 2'-deoxy-2'-fluorouridine-3'-phosphate
  modified_base 12: mod_base = OTHER; note = 2'-O-methylguanosine-3'-phosphate
  modified_base 13: mod_base = OTHER; note = 2'-O-methylcytidine-3'-phosphate
  modified_base 14: mod_base = OTHER; note = 2'-O-methyluridine-3'-phosphate
  modified_base 15: mod_base = OTHER; note = 2'-O-methylcytidine-3'-phosphate
  modified_base 16: mod_base = OTHER; note = 2'-O-methyladenosine-3'-phosphate
  modified_base 17: mod_base = OTHER; note = 2'-O-methyluridine-3'-phosphate
  modified_base 18: mod_base = OTHER; note = 2'-O-methylguanosine-3'-phosphate
  modified_base 19: mod_base = OTHER; note = 2'-O-methyladenosine-3'-phosphorothioate
  modified_base 20: mod_base = OTHER; note = 2'-O-methyluridine-3'-phosphorothioate
  modified_base 21: mod_base = OTHER; note = 2'-O-methyladenosine
tacagaagaatgctcatgata

SEQ ID NO: 11092 - RNA, 21 nt, synthetic construct
  source 1..21: mol_type = other RNA
  modified_base 1: mod_base = OTHER; note = 2'-O-methyladenosine-3'-phosphorothioate
  modified_base 2: mod_base = OTHER; note = 2'-O-methylcytidine-3'-phosphorothioate
  modified_base 3: mod_base = OTHER; note = 2'-O-methyladenosine-3'-phosphate
  modified_base 4: mod_base = OTHER; note = 2'-O-methylguanosine-3'-phosphate
  modified_base 5: mod_base = OTHER; note = 2'-O-methyladenosine-3'-phosphate
  modified_base 6: mod_base = OTHER; note = 2'-O-docosanyl-adenosine-3'-phosphate
  modified_base 7: mod_base = OTHER; note = 2'-deoxy-2'-fluoroguanosine-3'-phosphate
  modified_base 8: mod_base = OTHER; note = 2'-O-methyladenosine-3'-phosphate
  modified_base 9: mod_base = OTHER; note = 2'-deoxy-2'-fluoroadenosine-3'-phosphate
  modified_base 10: mod_base = OTHER; note = 2'-deoxy-2'-fluorouridine-3'-phosphate
  modified_base 11: mod_base = OTHER; note = 2'-deoxy-2'-fluoroguanosine-3'-phosphate
  modified_base 12: mod_base = OTHER; note = 2'-O-methylcytidine-3'-phosphate
  modified_base 13: mod_base = OTHER; note = 2'-O-methyluridine-3'-phosphate
  modified_base 14: mod_base = OTHER; note = 2'-O-methylcytidine-3'-phosphate
  modified_base 15: mod_base = OTHER; note = 2'-O-methyladenosine-3'-phosphate
  modified_base 16: mod_base = OTHER; note = 2'-O-methyluridine-3'-phosphate
  modified_base 17: mod_base = OTHER; note = 2'-O-methylguanosine-3'-phosphate
  modified_base 18: mod_base = OTHER; note = 2'-O-methyladenosine-3'-phosphate
  modified_base 19: mod_base = OTHER; note = 2'-O-methyluridine-3'-phosphorothioate
  modified_base 20: mod_base = OTHER; note = 2'-O-methyladenosine-3'-phosphorothioate
  modified_base 21: mod_base = OTHER; note = 2'-O-methyladenosine
acagaagaatgctcatgataa

SEQ ID NO: 11093 - RNA, 21 nt, synthetic construct
  source 1..21: mol_type = other RNA
  modified_base 1: mod_base = OTHER; note = 2'-O-methyladenosine-3'-phosphorothioate
  modified_base 2: mod_base = OTHER; note = 2'-O-methyladenosine-3'-phosphorothioate
  modified_base 3: mod_base = OTHER; note = 2'-O-methylguanosine-3'-phosphate
  modified_base 4: mod_base = OTHER; note = 2'-O-methyladenosine-3'-phosphate
  modified_base 5: mod_base = OTHER; note = 2'-O-methyladenosine-3'-phosphate
  modified_base 6: mod_base = OTHER; note = 2'-O-docosanyl-uridine-3'-phosphate
  modified_base 7: mod_base = OTHER; note = 2'-deoxy-2'-fluoroguanosine-3'-phosphate
  modified_base 8: mod_base = OTHER; note = 2'-O-methylcytidine-3'-phosphate
  modified_base 9: mod_base = OTHER; note = 2'-deoxy-2'-fluorouridine-3'-phosphate
  modified_base 10: mod_base = OTHER; note = 2'-deoxy-2'-fluorocytidine-3'-phosphate
  modified_base 11: mod_base = OTHER; note = 2'-deoxy-2'-fluoroadenosine-3'-phosphate
  modified_base 12: mod_base = OTHER; note = 2'-O-methyluridine-3'-phosphate
  modified_base 13: mod_base = OTHER; note = 2'-O-methylguanosine-3'-phosphate
  modified_base 14: mod_base = OTHER; note = 2'-O-methyladenosine-3'-phosphate
  modified_base 15: mod_base = OTHER; note = 2'-O-methyluridine-3'-phosphate
  modified_base 16: mod_base = OTHER; note = 2'-O-methyladenosine-3'-phosphate
  modified_base 17: mod_base = OTHER; note = 2'-O-methylguanosine-3'-phosphate
  modified_base 18: mod_base = OTHER; note = 2'-O-methyluridine-3'-phosphate
  modified_base 19: mod_base = OTHER; note = 2'-O-methyluridine-3'-phosphorothioate
  modified_base 20: mod_base = OTHER; note = 2'-O-methyluridine-3'-phosphorothioate
  modified_base 21: mod_base = OTHER; note = 2'-O-methyladenosine
aagaatgctcatgatagttta

SEQ ID NO: 11094 - RNA, 21 nt, synthetic construct
  source 1..21: mol_type = other RNA
  modified_base 1: mod_base = OTHER; note = 2'-O-methyladenosine-3'-phosphorothioate
  modified_base 2: mod_base = OTHER; note = 2'-O-methylguanosine-3'-phosphorothioate
  modified_base 3: mod_base = OTHER; note = 2'-O-methyladenosine-3'-phosphate
  modified_base 4: mod_base = OTHER; note = 2'-O-methyladenosine-3'-phosphate
  modified_base 5: mod_base = OTHER; note = 2'-O-methyluridine-3'-phosphate
  modified_base 6: mod_base = OTHER; note = 2'-O-docosanyl-guanosine-3'-phosphate
  modified_base 7: mod_base = OTHER; note = 2'-deoxy-2'-fluorocytidine-3'-phosphate
  modified_base 8: mod_base = OTHER; note = 2'-O-methyluridine-3'-phosphate
  modified_base 9: mod_base = OTHER; note = 2'-deoxy-2'-fluorocytidine-3'-phosphate
  modified_base 10: mod_base = OTHER; note = 2'-deoxy-2'-fluoroadenosine-3'-phosphate
  modified_base 11: mod_base = OTHER; note = 2'-deoxy-2'-fluorouridine-3'-phosphate
  modified_base 12: mod_base = OTHER; note = 2'-O-methylguanosine-3'-phosphate
  modified_base 13: mod_base = OTHER; note = 2'-O-methyladenosine-3'-phosphate
  modified_base 14: mod_base = OTHER; note = 2'-O-methyluridine-3'-phosphate
  modified_base 15: mod_base = OTHER; note = 2'-O-methyladenosine-3'-phosphate
  modified_base 16: mod_base = OTHER; note = 2'-O-methylguanosine-3'-phosphate
  modified_base 17: mod_base = OTHER; note = 2'-O-methyluridine-3'-phosphate
  modified_base 18: mod_base = OTHER; note = 2'-O-methyluridine-3'-phosphate
  modified_base 19: mod_base = OTHER; note = 2'-O-methyluridine-3'-phosphorothioate
  modified_base 20: mod_base = OTHER; note = 2'-O-methyluridine-3'-phosphorothioate
  modified_base 21: mod_base = OTHER; note = 2'-O-methyladenosine
agaatgctcatgatagtttta

SEQ ID NO: 11095 - RNA, 21 nt, synthetic construct
  source 1..21: mol_type = other RNA
  modified_base 1: mod_base = OTHER; note = 2'-O-methyladenosine-3'-phosphorothioate
  modified_base 2: mod_base = OTHER; note = 2'-O-methyladenosine-3'-phosphorothioate
  modified_base 3: mod_base = OTHER; note = 2'-O-methyluridine-3'-phosphate
  modified_base 4: mod_base = OTHER; note = 2'-O-methylguanosine-3'-phosphate
  modified_base 5: mod_base = OTHER; note = 2'-O-methylcytidine-3'-phosphate
  modified_base 6: mod_base = OTHER; note = 2'-O-docosanyl-uridine-3'-phosphate
  modified_base 7: mod_base = OTHER; note = 2'-deoxy-2'-fluorocytidine-3'-phosphate
  modified_base 8: mod_base = OTHER; note = 2'-O-methyladenosine-3'-phosphate
  modified_base 9: mod_base = OTHER; note = 2'-deoxy-2'-fluorouridine-3'-phosphate
  modified_base 10: mod_base = OTHER; note = 2'-deoxy-2'-fluoroguanosine-3'-phosphate
  modified_base 11: mod_base = OTHER; note = 2'-deoxy-2'-fluoroadenosine-3'-phosphate
  modified_base 12: mod_base = OTHER; note = 2'-O-methyluridine-3'-phosphate
  modified_base 13: mod_base = OTHER; note = 2'-O-methyladenosine-3'-phosphate
  modified_base 14: mod_base = OTHER; note = 2'-O-methylguanosine-3'-phosphate
  modified_base 15: mod_base = OTHER; note = 2'-O-methyluridine-3'-phosphate
  modified_base 16: mod_base = OTHER; note = 2'-O-methyluridine-3'-phosphate
  modified_base 17: mod_base = OTHER; note = 2'-O-methyluridine-3'-phosphate
  modified_base 18: mod_base = OTHER; note = 2'-O-methyluridine-3'-phosphate
  modified_base 19: mod_base = OTHER; note = 2'-O-methylguanosine-3'-phosphorothioate
  modified_base 20: mod_base = OTHER; note = 2'-O-methylcytidine-3'-phosphorothioate
  modified_base 21: mod_base = OTHER; note = 2'-O-methyladenosine
aatgctcatgatagttttgca

SEQ ID NO: 11096 - RNA, 21 nt, synthetic construct
  source 1..21: mol_type = other RNA
  modified_base 1: mod_base = OTHER; note = 2'-O-methylguanosine-3'-phosphorothioate
  modified_base 2: mod_base = OTHER; note = 2'-O-methylcytidine-3'-phosphorothioate
  modified_base 3: mod_base = OTHER; note = 2'-O-methyluridine-3'-phosphate
  modified_base 4: mod_base = OTHER; note = 2'-O-methylcytidine-3'-phosphate
  modified_base 5: mod_base = OTHER; note = 2'-O-methyladenosine-3'-phosphate
  modified_base 6: mod_base = OTHER; note = 2'-O-docosanyl-uridine-3'-phosphate
  modified_base 7: mod_base = OTHER; note = 2'-deoxy-2'-fluoroguanosine-3'-phosphate
  modified_base 8: mod_base = OTHER; note = 2'-O-methyladenosine-3'-phosphate
  modified_base 9: mod_base = OTHER; note = 2'-deoxy-2'-fluorouridine-3'-phosphate
  modified_base 10: mod_base = OTHER; note = 2'-deoxy-2'-fluoroadenosine-3'-phosphate
  modified_base 11: mod_base = OTHER; note = 2'-deoxy-2'-fluoroguanosine-3'-phosphate
  modified_base 12: mod_base = OTHER; note = 2'-O-methyluridine-3'-phosphate
  modified_base 13: mod_base = OTHER; note = 2'-O-methyluridine-3'-phosphate
  modified_base 14: mod_base = OTHER; note = 2'-O-methyluridine-3'-phosphate
  modified_base 15: mod_base = OTHER; note = 2'-O-methyluridine-3'-phosphate
  modified_base 16: mod_base = OTHER; note = 2'-O-methylguanosine-3'-phosphate
  modified_base 17: mod_base = OTHER; note = 2'-O-methylcytidine-3'-phosphate
  modified_base 18: mod_base = OTHER; note = 2'-O-methylcytidine-3'-phosphate
  modified_base 19: mod_base = OTHER; note = 2'-O-methyluridine-3'-phosphorothioate
  modified_base 20: mod_base = OTHER; note = 2'-O-methyluridine-3'-phosphorothioate
  modified_base 21: mod_base = OTHER; note = 2'-O-methyladenosine
gctcatgatagttttgcctta

SEQ ID NO: 11097 - RNA, 21 nt, synthetic construct
  source 1..21: mol_type = other RNA
  modified_base 1: mod_base = OTHER; note = 2'-O-methyluridine-3'-phosphorothioate
  modified_base 2: mod_base = OTHER; note = 2'-O-methylcytidine-3'-phosphorothioate
  modified_base 3: mod_base = OTHER; note = 2'-O-methyladenosine-3'-phosphate
  modified_base 4: mod_base = OTHER; note = 2'-O-methyluridine-3'-phosphate
  modified_base 5: mod_base = OTHER; note = 2'-O-methylguanosine-3'-phosphate
  modified_base 6: mod_base = OTHER; note = 2'-O-docosanyl-adenosine-3'-phosphate
  modified_base 7: mod_base = OTHER; note = 2'-deoxy-2'-fluorouridine-3'-phosphate
  modified_base 8: mod_base = OTHER; note = 2'-O-methyladenosine-3'-phosphate
  modified_base 9: mod_base = OTHER; note = 2'-deoxy-2'-fluoroguanosine-3'-phosphate
  modified_base 10: mod_base = OTHER; note = 2'-deoxy-2'-fluorouridine-3'-phosphate
  modified_base 11: mod_base = OTHER; note = 2'-deoxy-2'-fluorouridine-3'-phosphate
  modified_base 12: mod_base = OTHER; note = 2'-O-methyluridine-3'-phosphate
  modified_base 13: mod_base = OTHER; note = 2'-O-methyluridine-3'-phosphate
  modified_base 14: mod_base = OTHER; note = 2'-O-methylguanosine-3'-phosphate
  modified_base 15: mod_base = OTHER; note = 2'-O-methylcytidine-3'-phosphate
  modified_base 16: mod_base = OTHER; note = 2'-O-methylcytidine-3'-phosphate
  modified_base 17: mod_base = OTHER; note = 2'-O-methyluridine-3'-phosphate
  modified_base 18: mod_base = OTHER; note = 2'-O-methyluridine-3'-phosphate
  modified_base 19: mod_base = OTHER; note = 2'-O-methylcytidine-3'-phosphorothioate
  modified_base 20: mod_base = OTHER; note = 2'-O-methyladenosine-3'-phosphorothioate
  modified_base 21: mod_base = OTHER; note = 2'-O-methyladenosine
tcatgatagttttgccttcaa

SEQ ID NO: 11098 - RNA, 21 nt, synthetic construct
  source 1..21: mol_type = other RNA
  modified_base 1: mod_base = OTHER; note = 2'-O-methyladenosine-3'-phosphorothioate
  modified_base 2: mod_base = OTHER; note = 2'-O-methyluridine-3'-phosphorothioate
  modified_base 3: mod_base = OTHER; note = 2'-O-methylguanosine-3'-phosphate
  modified_base 4: mod_base = OTHER; note = 2'-O-methyladenosine-3'-phosphate
  modified_base 5: mod_base = OTHER; note = 2'-O-methyluridine-3'-phosphate
  modified_base 6: mod_base = OTHER; note = 2'-O-docosanyl-adenosine-3'-phosphate
  modified_base 7: mod_base = OTHER; note = 2'-deoxy-2'-fluoroguanosine-3'-phosphate
  modified_base 8: mod_base = OTHER; note = 2'-O-methyluridine-3'-phosphate
  modified_base 9: mod_base = OTHER; note = 2'-deoxy-2'-fluorouridine-3'-phosphate
  modified_base 10: mod_base = OTHER; note = 2'-deoxy-2'-fluorouridine-3'-phosphate
  modified_base 11: mod_base = OTHER; note = 2'-deoxy-2'-fluorouridine-3'-phosphate
  modified_base 12: mod_base = OTHER; note = 2'-O-methylguanosine-3'-phosphate
  modified_base 13: mod_base = OTHER; note = 2'-O-methylcytidine-3'-phosphate
  modified_base 14: mod_base = OTHER; note = 2'-O-methylcytidine-3'-phosphate
  modified_base 15: mod_base = OTHER; note = 2'-O-methyluridine-3'-phosphate
  modified_base 16: mod_base = OTHER; note = 2'-O-methyluridine-3'-phosphate
  modified_base 17: mod_base = OTHER; note = 2'-O-methylcytidine-3'-phosphate
  modified_base 18: mod_base = OTHER; note = 2'-O-methyladenosine-3'-phosphate
  modified_base 19: mod_base = OTHER; note = 2'-O-methyluridine-3'-phosphorothioate
  modified_base 20: mod_base = OTHER; note = 2'-O-methyluridine-3'-phosphorothioate
  modified_base 21: mod_base = OTHER; note = 2'-O-methyladenosine
atgatagttttgccttcatta

SEQ ID NO: 11099 - RNA, 21 nt, synthetic construct
  source 1..21: mol_type = other RNA
  modified_base 1: mod_base = OTHER; note = 2'-O-methyluridine-3'-phosphorothioate
  modified_base 2: mod_base = OTHER; note = 2'-O-methylguanosine-3'-phosphorothioate
  modified_base 3: mod_base = OTHER; note = 2'-O-methyladenosine-3'-phosphate
  modified_base 4: mod_base = OTHER; note = 2'-O-methyluridine-3'-phosphate
  modified_base 5: mod_base = OTHER; note = 2'-O-methyladenosine-3'-phosphate
  modified_base 6: mod_base = OTHER; note = 2'-O-docosanyl-guanosine-3'-phosphate
  modified_base 7: mod_base = OTHER; note = 2'-deoxy-2'-fluorouridine-3'-phosphate
  modified_base 8: mod_base = OTHER; note = 2'-O-methyluridine-3'-phosphate
  modified_base 9: mod_base = OTHER; note = 2'-deoxy-2'-fluorouridine-3'-phosphate
  modified_base 10: mod_base = OTHER; note = 2'-deoxy-2'-fluorouridine-3'-phosphate
  modified_base 11: mod_base = OTHER; note = 2'-deoxy-2'-fluoroguanosine-3'-phosphate
  modified_base 12: mod_base = OTHER; note = 2'-O-methylcytidine-3'-phosphate
  modified_base 13: mod_base = OTHER; note = 2'-O-methylcytidine-3'-phosphate
  modified_base 14: mod_base = OTHER; note = 2'-O-methyluridine-3'-phosphate
  modified_base 15: mod_base = OTHER; note = 2'-O-methyluridine-3'-phosphate
  modified_base 16: mod_base = OTHER; note = 2'-O-methylcytidine-3'-phosphate
  modified_base 17: mod_base = OTHER; note = 2'-O-methyladenosine-3'-phosphate
  modified_base 18: mod_base = OTHER; note = 2'-O-methyluridine-3'-phosphate
  modified_base 19: mod_base = OTHER; note = 2'-O-methyluridine-3'-phosphorothioate
  modified_base 20: mod_base = OTHER; note = 2'-O-methylcytidine-3'-phosphorothioate
  modified_base 21: mod_base = OTHER; note = 2'-O-methyladenosine
tgatagttttgccttcattca

SEQ ID NO: 11100 - RNA, 21 nt, synthetic construct
  source 1..21: mol_type = other RNA
  modified_base 1: mod_base = OTHER; note = 2'-O-methyladenosine-3'-phosphorothioate
  modified_base 2: mod_base = OTHER; note = 2'-O-methyluridine-3'-phosphorothioate
  modified_base 3: mod_base = OTHER; note = 2'-O-methyladenosine-3'-phosphate
  modified_base 4: mod_base = OTHER; note = 2'-O-methylguanosine-3'-phosphate
  modified_base 5: mod_base = OTHER; note = 2'-O-methyluridine-3'-phosphate
  modified_base 6: mod_base = OTHER; note = 2'-O-docosanyl-uridine-3'-phosphate
  modified_base 7: mod_base = OTHER; note = 2'-deoxy-2'-fluorouridine-3'-phosphate
  modified_base 8: mod_base = OTHER; note = 2'-O-methyluridine-3'-phosphate
  modified_base 9: mod_base = OTHER; note = 2'-deoxy-2'-fluoroguanosine-3'-phosphate
  modified_base 10: mod_base = OTHER; note = 2'-deoxy-2'-fluorocytidine-3'-phosphate
  modified_base 11: mod_base = OTHER; note = 2'-deoxy-2'-fluorocytidine-3'-phosphate
  modified_base 12: mod_base = OTHER; note = 2'-O-methyluridine-3'-phosphate
  modified_base 13: mod_base = OTHER; note = 2'-O-methyluridine-3'-phosphate
  modified_base 14: mod_base = OTHER; note = 2'-O-methylcytidine-3'-phosphate
  modified_base 15: mod_base = OTHER; note = 2'-O-methyladenosine-3'-phosphate
  modified_base 16: mod_base = OTHER; note = 2'-O-methyluridine-3'-phosphate
  modified_base 17: mod_base = OTHER; note = 2'-O-methyluridine-3'-phosphate
  modified_base 18: mod_base = OTHER; note = 2'-O-methylcytidine-3'-phosphate
  modified_base 19: mod_base = OTHER; note = 2'-O-methyluridine-3'-phosphorothioate
  modified_base 20: mod_base = OTHER; note = 2'-O-methyladenosine-3'-phosphorothioate
  modified_base 21: mod_base = OTHER; note = 2'-O-methyladenosine
atagttttgccttcattctaa

SEQ ID NO: 11101 - RNA, 21 nt, synthetic construct
  source 1..21: mol_type = other RNA
  modified_base 1: mod_base = OTHER; note = 2'-O-methyluridine-3'-phosphorothioate
  modified_base 2: mod_base = OTHER; note = 2'-O-methylguanosine-3'-phosphorothioate
  modified_base 3: mod_base = OTHER; note = 2'-O-methylguanosine-3'-phosphate
  modified_base 4: mod_base = OTHER; note = 2'-O-methyladenosine-3'-phosphate
  modified_base 5: mod_base = OTHER; note = 2'-O-methylcytidine-3'-phosphate
  modified_base 6: mod_base = OTHER; note = 2'-O-docosanyl-adenosine-3'-phosphate
  modified_base 7: mod_base = OTHER; note = 2'-deoxy-2'-fluorocytidine-3'-phosphate
  modified_base 8: mod_base = OTHER; note = 2'-O-methyladenosine-3'-phosphate
  modified_base 9: mod_base = OTHER; note = 2'-deoxy-2'-fluoroguanosine-3'-phosphate
  modified_base 10: mod_base = OTHER; note = 2'-deoxy-2'-fluoroadenosine-3'-phosphate
  modified_base 11: mod_base = OTHER; note = 2'-deoxy-2'-fluoroguanosine-3'-phosphate
  modified_base 12: mod_base = OTHER; note = 2'-O-methyluridine-3'-phosphate
  modified_base 13: mod_base = OTHER; note = 2'-O-methyladenosine-3'-phosphate
  modified_base 14: mod_base = OTHER; note = 2'-O-methyladenosine-3'-phosphate
  modified_base 15: mod_base = OTHER; note = 2'-O-methyluridine-3'-phosphate
  modified_base 16: mod_base = OTHER; note = 2'-O-methylguanosine-3'-phosphate
  modified_base 17: mod_base = OTHER; note = 2'-O-methyladenosine-3'-phosphate
  modified_base 18: mod_base = OTHER; note = 2'-O-methyladenosine-3'-phosphate
  modified_base 19: mod_base = OTHER; note = 2'-O-methyluridine-3'-phosphorothioate
  modified_base 20: mod_base = OTHER; note = 2'-O-methyladenosine-3'-phosphorothioate
  modified_base 21: mod_base = OTHER; note = 2'-O-methyladenosine
tggacacagagtaatgaataa

SEQ ID NO: 11102 - RNA, 21 nt, synthetic construct
  source 1..21: mol_type = other RNA
  modified_base 1: mod_base = OTHER; note = 2'-O-methyladenosine-3'-phosphorothioate
  modified_base 2: mod_base = OTHER; note = 2'-O-methylcytidine-3'-phosphorothioate
  modified_base 3: mod_base = OTHER; note = 2'-O-methyladenosine-3'-phosphate
  modified_base 4: mod_base = OTHER; note = 2'-O-methylcytidine-3'-phosphate
  modified_base 5: mod_base = OTHER; note = 2'-O-methyladenosine-3'-phosphate
  modified_base 6: mod_base = OTHER; note = 2'-O-docosanyl-guanosine-3'-phosphate
  modified_base 7: mod_base = OTHER; note = 2'-deoxy-2'-fluoroadenosine-3'-phosphate
  modified_base 8: mod_base = OTHER; note = 2'-O-methylguanosine-3'-phosphate
  modified_base 9: mod_base = OTHER; note = 2'-deoxy-2'-fluorouridine-3'-phosphate
  modified_base 10: mod_base = OTHER; note = 2'-deoxy-2'-fluoroadenosine-3'-phosphate
  modified_base 11: mod_base = OTHER; note = 2'-deoxy-2'-fluoroadenosine-3'-phosphate
  modified_base 12: mod_base = OTHER; note = 2'-O-methyluridine-3'-phosphate
  modified_base 13: mod_base = OTHER; note = 2'-O-methylguanosine-3'-phosphate
  modified_base 14: mod_base = OTHER; note = 2'-O-methyladenosine-3'-phosphate
  modified_base 15: mod_base = OTHER; note = 2'-O-methyladenosine-3'-phosphate
  modified_base 16: mod_base = OTHER; note = 2'-O-methyluridine-3'-phosphate
  modified_base 17: mod_base = OTHER; note = 2'-O-methyladenosine-3'-phosphate
  modified_base 18: mod_base = OTHER; note = 2'-O-methyluridine-3'-phosphate
  modified_base 19: mod_base = OTHER; note = 2'-O-methyluridine-3'-phosphorothioate
  modified_base 20: mod_base = OTHER; note = 2'-O-methyluridine-3'-phosphorothioate
  modified_base 21: mod_base = OTHER; note = 2'-O-methyladenosine
acacagagtaatgaatattta

SEQ ID NO: 11103 - RNA, 21 nt, synthetic construct
  source 1..21: mol_type = other RNA
  modified_base 1: mod_base = OTHER; note = 2'-O-methyladenosine-3'-phosphorothioate
  modified_base 2: mod_base = OTHER; note = 2'-O-methylguanosine-3'-phosphorothioate
  modified_base 3: mod_base = OTHER; note = 2'-O-methyluridine-3'-phosphate
  modified_base 4: mod_base = OTHER; note = 2'-O-methyladenosine-3'-phosphate
  modified_base 5: mod_base = OTHER; note = 2'-O-methyladenosine-3'-phosphate
  modified_base 6: mod_base = OTHER; note = 2'-O-docosanyl-uridine-3'-phosphate
  modified_base 7: mod_base = OTHER; note = 2'-deoxy-2'-fluoroguanosine-3'-phosphate
  modified_base 8: mod_base = OTHER; note = 2'-O-methyladenosine-3'-phosphate
  modified_base 9: mod_base = OTHER; note = 2'-deoxy-2'-fluoroadenosine-3'-phosphate
  modified_base 10: mod_base = OTHER; note = 2'-deoxy-2'-fluorouridine-3'-phosphate
  modified_base 11: mod_base = OTHER; note = 2'-deoxy-2'-fluoroadenosine-3'-phosphate
  modified_base 12: mod_base = OTHER; note = 2'-O-methyluridine-3'-phosphate
  modified_base 13: mod_base = OTHER; note = 2'-O-methyluridine-3'-phosphate
  modified_base 14: mod_base = OTHER; note = 2'-O-methyluridine-3'-phosphate
  modified_base 15: mod_base = OTHER; note = 2'-O-methyladenosine-3'-phosphate
  modified_base 16: mod_base = OTHER; note = 2'-O-methyladenosine-3'-phosphate
  modified_base 17: mod_base = OTHER; note = 2'-O-methyluridine-3'-phosphate
  modified_base 18: mod_base = OTHER; note = 2'-O-methylguanosine-3'-phosphate
  modified_base 19: mod_base = OTHER; note = 2'-O-methylguanosine-3'-phosphorothioate
  modified_base 20: mod_base = OTHER; note = 2'-O-methylguanosine-3'-phosphorothioate
  modified_base 21: mod_base = OTHER; note = 2'-O-methyladenosine
agtaatgaatatttaatggga

SEQ ID NO: 11104 - RNA, 21 nt, synthetic construct
  source 1..21: mol_type = other RNA
  modified_base 1: mod_base = OTHER; note = 2'-O-methyladenosine-3'-phosphorothioate
  modified_base 2: mod_base = OTHER; note = 2'-O-methyladenosine-3'-phosphorothioate
  modified_base 3: mod_base = OTHER; note = 2'-O-methyluridine-3'-phosphate
  modified_base 4: mod_base = OTHER; note = 2'-O-methylguanosine-3'-phosphate
  modified_base 5: mod_base = OTHER; note = 2'-O-methylguanosine-3'-phosphate
  modified_base 6: mod_base = OTHER; note = 2'-O-docosanyl-guanosine-3'-phosphate
  modified_base 7: mod_base = OTHER; note = 2'-deoxy-2'-fluoroadenosine-3'-phosphate
  modified_base 8: mod_base = OTHER; note = 2'-O-methylcytidine-3'-phosphate
  modified_base 9: mod_base = OTHER; note = 2'-deoxy-2'-fluoroadenosine-3'-phosphate
  modified_base 10: mod_base = OTHER; note = 2'-deoxy-2'-fluorouridine-3'-phosphate
  modified_base 11: mod_base = OTHER; note = 2'-deoxy-2'-fluorouridine-3'-phosphate
  modified_base 12: mod_base = OTHER; note = 2'-O-methyladenosine-3'-phosphate
  modified_base 13: mod_base = OTHER; note = 2'-O-methyladenosine-3'-phosphate
  modified_base 14: mod_base = OTHER; note = 2'-O-methyladenosine-3'-phosphate
  modified_base 15: mod_base = OTHER; note = 2'-O-methyluridine-3'-phosphate
  modified_base 16: mod_base = OTHER; note = 2'-O-methyladenosine-3'-phosphate
  modified_base 17: mod_base = OTHER; note = 2'-O-methyluridine-3'-phosphate
  modified_base 18: mod_base = OTHER; note = 2'-O-methylguanosine-3'-phosphate
  modified_base 19: mod_base = OTHER; note = 2'-O-methylcytidine-3'-phosphorothioate
  modified_base 20: mod_base = OTHER; note = 2'-O-methylcytidine-3'-phosphorothioate
  modified_base 21: mod_base = OTHER; note = 2'-O-methyladenosine
aatgggacattaaatatgcca

SEQ ID NO: 11105 - RNA, 21 nt, synthetic construct
  source 1..21: mol_type = other RNA
  modified_base 1: mod_base = OTHER; note = 2'-O-methyladenosine-3'-phosphorothioate
  modified_base 2: mod_base = OTHER; note = 2'-O-methyluridine-3'-phosphorothioate
  modified_base 3: mod_base = OTHER; note = 2'-O-methylguanosine-3'-phosphate
  modified_base 4: mod_base = OTHER; note = 2'-O-methylguanosine-3'-phosphate
  modified_base 5: mod_base = OTHER; note = 2'-O-methylguanosine-3'-phosphate
  modified_base 6: mod_base = OTHER; note = 2'-O-docosanyl-adenosine-3'-phosphate
  modified_base 7: mod_base = OTHER; note = 2'-deoxy-2'-fluorocytidine-3'-phosphate
  modified_base 8: mod_base = OTHER; note = 2'-O-methyladenosine-3'-phosphate
  modified_base 9: mod_base = OTHER; note = 2'-deoxy-2'-fluorouridine-3'-phosphate
  modified_base 10: mod_base = OTHER; note = 2'-deoxy-2'-fluorouridine-3'-phosphate
  modified_base 11: mod_base = OTHER; note = 2'-deoxy-2'-fluoroadenosine-3'-phosphate
  modified_base 12: mod_base = OTHER; note = 2'-O-methyladenosine-3'-phosphate
  modified_base 13: mod_base = OTHER; note = 2'-O-methyladenosine-3'-phosphate
  modified_base 14: mod_base = OTHER; note = 2'-O-methyluridine-3'-phosphate
  modified_base 15: mod_base = OTHER; note = 2'-O-methyladenosine-3'-phosphate
  modified_base 16: mod_base = OTHER; note = 2'-O-methyluridine-3'-phosphate
  modified_base 17: mod_base = OTHER; note = 2'-O-methylguanosine-3'-phosphate
  modified_base 18: mod_base = OTHER; note = 2'-O-methylcytidine-3'-phosphate
  modified_base 19: mod_base = OTHER; note = 2'-O-methylcytidine-3'-phosphorothioate
  modified_base 20: mod_base = OTHER; note = 2'-O-methylcytidine-3'-phosphorothioate
  modified_base 21: mod_base = OTHER; note = 2'-O-methyladenosine
atgggacattaaatatgccca

SEQ ID NO: 11106 - RNA, 21 nt, synthetic construct
  source 1..21: mol_type = other RNA
  modified_base 1: mod_base = OTHER; note = 2'-O-methyluridine-3'-phosphorothioate
  modified_base 2: mod_base = OTHER; note = 2'-O-methylguanosine-3'-phosphorothioate
  modified_base 3: mod_base = OTHER; note = 2'-O-methylguanosine-3'-phosphate
  modified_base 4: mod_base = OTHER; note = 2'-O-methylguanosine-3'-phosphate
  modified_base 5: mod_base = OTHER; note = 2'-O-methyladenosine-3'-phosphate
  modified_base 6: mod_base = OTHER; note = 2'-O-docosanyl-cytidine-3'-phosphate
  modified_base 7: mod_base = OTHER; note = 2'-deoxy-2'-fluoroadenosine-3'-phosphate
  modified_base 8: mod_base = OTHER; note = 2'-O-methyluridine-3'-phosphate
  modified_base 9: mod_base = OTHER; note = 2'-deoxy-2'-fluorouridine-3'-phosphate
  modified_base 10: mod_base = OTHER; note = 2'-deoxy-2'-fluoroadenosine-3'-phosphate
  modified_base 11: mod_base = OTHER; note = 2'-deoxy-2'-fluoroadenosine-3'-phosphate
  modified_base 12: mod_base = OTHER; note = 2'-O-methyladenosine-3'-phosphate
  modified_base 13: mod_base = OTHER; note = 2'-O-methyluridine-3'-phosphate
  modified_base 14: mod_base = OTHER; note = 2'-O-methyladenosine-3'-phosphate
  modified_base 15: mod_base = OTHER; note = 2'-O-methyluridine-3'-phosphate
  modified_base 16: mod_base = OTHER; note = 2'-O-methylguanosine-3'-phosphate
  modified_base 17: mod_base = OTHER; note = 2'-O-methylcytidine-3'-phosphate
  modified_base 18: mod_base = OTHER; note = 2'-O-methylcytidine-3'-phosphate
  modified_base 19: mod_base = OTHER; note = 2'-O-methylcytidine-3'-phosphorothioate
  modified_base 20: mod_base = OTHER; note = 2'-O-methyluridine-3'-phosphorothioate
  modified_base 21: mod_base = OTHER; note = 2'-O-methyladenosine
tgggacattaaatatgcccta

SEQ ID NO: 11107 - RNA, 21 nt, synthetic construct
  source 1..21: mol_type = other RNA
  modified_base 1: mod_base = OTHER; note = 2'-O-methylguanosine-3'-phosphorothioate
  modified_base 2: mod_base = OTHER; note = 2'-O-methylguanosine-3'-phosphorothioate
  modified_base 3: mod_base = OTHER; note = 2'-O-methylguanosine-3'-phosphate
  modified_base 4: mod_base = OTHER; note = 2'-O-methyladenosine-3'-phosphate
  modified_base 5: mod_base = OTHER; note = 2'-O-methylcytidine-3'-phosphate
  modified_base 6: mod_base = OTHER; note = 2'-O-docosanyl-adenosine-3'-phosphate
  modified_base 7: mod_base = OTHER; note = 2'-deoxy-2'-fluorouridine-3'-phosphate
  modified_base 8: mod_base = OTHER; note = 2'-O-methyluridine-3'-phosphate
  modified_base 9: mod_base = OTHER; note = 2'-deoxy-2'-fluoroadenosine-3'-phosphate
  modified_base 10: mod_base = OTHER; note = 2'-deoxy-2'-fluoroadenosine-3'-phosphate
  modified_base 11: mod_base = OTHER; note = 2'-deoxy-2'-fluoroadenosine-3'-phosphate
  modified_base 12: mod_base = OTHER; note = 2'-O-methyluridine-3'-phosphate
  modified_base 13: mod_base = OTHER; note = 2'-O-methyladenosine-3'-phosphate
  modified_base 14: mod_base = OTHER; note = 2'-O-methyluridine-3'-phosphate
  modified_base 15: mod_base = OTHER; note = 2'-O-methylguanosine-3'-phosphate
  modified_base 16: mod_base = OTHER; note = 2'-O-methylcytidine-3'-phosphate
  modified_base 17: mod_base = OTHER; note = 2'-O-methylcytidine-3'-phosphate
  modified_base 18: mod_base = OTHER; note = 2'-O-methylcytidine-3'-phosphate
  modified_base 19: mod_base = OTHER; note = 2'-O-methyluridine-3'-phosphorothioate
  modified_base 20: mod_base = OTHER; note = 2'-O-methyluridine-3'-phosphorothioate
  modified_base 21: mod_base = OTHER; note = 2'-O-methyladenosine
gggacattaaatatgccctta

SEQ ID NO: 11108 - RNA, 21 nt, synthetic construct
  source 1..21: mol_type = other RNA
  modified_base 1: mod_base = OTHER; note = 2'-O-methyluridine-3'-phosphorothioate
  modified_base 2: mod_base = OTHER; note = 2'-O-methyluridine-3'-phosphorothioate
  modified_base 3: mod_base = OTHER; note = 2'-O-methylguanosine-3'-phosphate
  modified_base 4: mod_base = OTHER; note = 2'-O-methylguanosine-3'-phosphate
  modified_base 5: mod_base = OTHER; note = 2'-O-methyluridine-3'-phosphate
  modified_base 6: mod_base = OTHER; note = 2'-O-docosanyl-adenosine-3'-phosphate
  modified_base 7: mod_base = OTHER; note = 2'-deoxy-2'-fluoroadenosine-3'-phosphate
  modified_base 8: mod_base = OTHER; note = 2'-O-methyladenosine-3'-phosphate
  modified_base 9: mod_base = OTHER; note = 2'-deoxy-2'-fluorocytidine-3'-phosphate
  modified_base 10: mod_base = OTHER; note = 2'-deoxy-2'-fluoroguanosine-3'-phosphate
  modified_base 11: mod_base = OTHER; note = 2'-deoxy-2'-fluoroadenosine-3'-phosphate
  modified_base 12: mod_base = OTHER; note = 2'-O-methylguanosine-3'-phosphate
  modified_base 13: mod_base = OTHER; note = 2'-O-methyladenosine-3'-phosphate
  modified_base 14: mod_base = OTHER; note = 2'-O-methyluridine-3'-phosphate
  modified_base 15: mod_base = OTHER; note = 2'-O-methyluridine-3'-phosphate
  modified_base 16: mod_base = OTHER; note = 2'-O-methyluridine-3'-phosphate
  modified_base 17: mod_base = OTHER; note = 2'-O-methyladenosine-3'-phosphate
  modified_base 18: mod_base = OTHER; note = 2'-O-methyladenosine-3'-phosphate
  modified_base 19: mod_base = OTHER; note = 2'-O-methylcytidine-3'-phosphorothioate
  modified_base 20: mod_base = OTHER; note = 2'-O-methyladenosine-3'-phosphorothioate
  modified_base 21: mod_base = OTHER; note = 2'-O-methyladenosine
ttggtaaacgagatttaacaa

SEQ ID NO: 11109 - RNA, 21 nt, synthetic construct
  source 1..21: mol_type = other RNA
  modified_base 1: mod_base = OTHER; note = 2'-O-methylguanosine-3'-phosphorothioate
  modified_base 2: mod_base = OTHER; note = 2'-O-methylguanosine-3'-phosphorothioate
  modified_base 3: mod_base = OTHER; note = 2'-O-methyladenosine-3'-phosphate
  modified_base 4: mod_base = OTHER; note = 2'-O-methylcytidine-3'-phosphate
  modified_base 5: mod_base = OTHER; note = 2'-O-methyladenosine-3'-phosphate
  modified_base 6: mod_base = OTHER; note = 2'-O-docosanyl-uridine-3'-phosphate
  modified_base 7: mod_base = OTHER; note = 2'-deoxy-2'-fluorouridine-3'-phosphate
  modified_base 8: mod_base = OTHER; note = 2'-O-methyladenosine-3'-phosphate
  modified_base 9: mod_base = OTHER; note = 2'-deoxy-2'-fluoroadenosine-3'-phosphate
  modified_base 10: mod_base = OTHER; note = 2'-deoxy-2'-fluoroadenosine-3'-phosphate
  modified_base 11: mod_base = OTHER; note = 2'-deoxy-2'-fluorouridine-3'-phosphate
  modified_base 12: mod_base = OTHER; note = 2'-O-methyladenosine-3'-phosphate
  modified_base 13: mod_base = OTHER; note = 2'-O-methyluridine-3'-phosphate
  modified_base 14: mod_base = OTHER; note = 2'-O-methylguanosine-3'-phosphate
  modified_base 15: mod_base = OTHER; note = 2'-O-methylcytidine-3'-phosphate
  modified_base 16: mod_base = OTHER; note = 2'-O-methylcytidine-3'-phosphate
  modified_base 17: mod_base = OTHER; note = 2'-O-methylcytidine-3'-phosphate
  modified_base 18: mod_base = OTHER; note = 2'-O-methyluridine-3'-phosphate
  modified_base 19: mod_base = OTHER; note = 2'-O-methyluridine-3'-phosphorothioate
  modified_base 20: mod_base = OTHER; note = 2'-O-methylcytidine-3'-phosphorothioate
  modified_base 21: mod_base = OTHER; note = 2'-O-methyladenosine
ggacattaaatatgcccttca

SEQ ID NO: 11110 - RNA, 21 nt, synthetic construct
  source 1..21: mol_type = other RNA
  modified_base 1: mod_base = OTHER; note = 2'-O-methylguanosine-3'-phosphorothioate
  modified_base 2: mod_base = OTHER; note = 2'-O-methyladenosine-3'-phosphorothioate
  modified_base 3: mod_base = OTHER; note = 2'-O-methylcytidine-3'-phosphate
  modified_base 4: mod_base = OTHER; note = 2'-O-methyladenosine-3'-phosphate
  modified_base 5: mod_base = OTHER; note = 2'-O-methyluridine-3'-phosphate
  modified_base 6: mod_base = OTHER; note = 2'-O-docosanyl-uridine-3'-phosphate
  modified_base 7: mod_base = OTHER; note = 2'-deoxy-2'-fluoroadenosine-3'-phosphate
  modified_base 8: mod_base = OTHER; note = 2'-O-methyladenosine-3'-phosphate
  modified_base 9: mod_base = OTHER; note = 2'-deoxy-2'-fluoroadenosine-3'-phosphate
  modified_base 10: mod_base = OTHER; note = 2'-deoxy-2'-fluorouridine-3'-phosphate
  modified_base 11: mod_base = OTHER; note = 2'-deoxy-2'-fluoroadenosine-3'-phosphate
  modified_base 12: mod_base = OTHER; note = 2'-O-methyluridine-3'-phosphate
  modified_base 13: mod_base = OTHER; note = 2'-O-methylguanosine-3'-phosphate
  modified_base 14: mod_base = OTHER; note = 2'-O-methylcytidine-3'-phosphate
  modified_base 15: mod_base = OTHER; note = 2'-O-methylcytidine-3'-phosphate
  modified_base 16: mod_base = OTHER; note = 2'-O-methylcytidine-3'-phosphate
  modified_base 17: mod_base = OTHER; note = 2'-O-methyluridine-3'-phosphate
  modified_base 18: mod_base = OTHER; note = 2'-O-methyluridine-3'-phosphate
  modified_base 19: mod_base = OTHER; note = 2'-O-methylcytidine-3'-phosphorothioate
  modified_base 20: mod_base = OTHER; note = 2'-O-methyladenosine-3'-phosphorothioate
  modified_base 21: mod_base = OTHER; note = 2'-O-methyladenosine
gacattaaatatgcccttcaa

SEQ ID NO: 11111 - RNA, 21 nt, synthetic construct
  source 1..21: mol_type = other RNA
  modified_base 1: mod_base = OTHER; note = 2'-O-methyladenosine-3'-phosphorothioate
  modified_base 2: mod_base = OTHER; note = 2'-O-methylcytidine-3'-phosphorothioate
  modified_base 3: mod_base = OTHER; note = 2'-O-methyladenosine-3'-phosphate
  modified_base 4: mod_base = OTHER; note = 2'-O-methyluridine-3'-phosphate
  modified_base 5: mod_base = OTHER; note = 2'-O-methyluridine-3'-phosphate
  modified_base 6: mod_base = OTHER; note = 2'-O-docosanyl-adenosine-3'-phosphate
  modified_base 7: mod_base = OTHER; note = 2'-deoxy-2'-fluoroadenosine-3'-phosphate
  modified_base 8: mod_base = OTHER; note = 2'-O-methyladenosine-3'-phosphate
  modified_base 9: mod_base = OTHER; note = 2'-deoxy-2'-fluorouridine-3'-phosphate
  modified_base 10: mod_base = OTHER; note = 2'-deoxy-2'-fluoroadenosine-3'-phosphate
  modified_base 11: mod_base = OTHER; note = 2'-deoxy-2'-fluorouridine-3'-phosphate
  modified_base 12: mod_base = OTHER; note = 2'-O-methylguanosine-3'-phosphate
  modified_base 13: mod_base = OTHER; note = 2'-O-methylcytidine-3'-phosphate
  modified_base 14: mod_base = OTHER; note = 2'-O-methylcytidine-3'-phosphate
  modified_base 15: mod_base = OTHER; note = 2'-O-methylcytidine-3'-phosphate
  modified_base 16: mod_base = OTHER; note = 2'-O-methyluridine-3'-phosphate
  modified_base 17: mod_base = OTHER; note = 2'-O-methyluridine-3'-phosphate
  modified_base 18: mod_base = OTHER; note = 2'-O-methylcytidine-3'-phosphate
  modified_base 19: mod_base = OTHER; note = 2'-O-methyladenosine-3'-phosphorothioate
  modified_base 20: mod_base = OTHER; note = 2'-O-methyladenosine-3'-phosphorothioate
  modified_base 21: mod_base = OTHER; note = 2'-O-methyladenosine
acattaaatatgcccttcaaa

SEQ ID NO: 11112 - RNA, 21 nt, synthetic construct
  source 1..21: mol_type = other RNA
  modified_base 1: mod_base = OTHER; note = 2'-O-methylcytidine-3'-phosphorothioate
  modified_base 2: mod_base = OTHER; note = 2'-O-methyladenosine-3'-phosphorothioate
  modified_base 3: mod_base = OTHER; note = 2'-O-methyluridine-3'-phosphate
  modified_base 4: mod_base = OTHER; note = 2'-O-methyluridine-3'-phosphate
  modified_base 5: mod_base = OTHER; note = 2'-O-methyladenosine-3'-phosphate
  modified_base 6: mod_base = OTHER; note = 2'-O-docosanyl-adenosine-3'-phosphate
  modified_base 7: mod_base = OTHER; note = 2'-deoxy-2'-fluoroadenosine-3'-phosphate
  modified_base 8: mod_base = OTHER; note = 2'-O-methyluridine-3'-phosphate
  modified_base 9: mod_base = OTHER; note = 2'-deoxy-2'-fluoroadenosine-3'-phosphate
  modified_base 10: mod_base = OTHER; note = 2'-deoxy-2'-fluorouridine-3'-phosphate
  modified_base 11: mod_base = OTHER; note = 2'-deoxy-2'-fluoroguanosine-3'-phosphate
  modified_base 12: mod_base = OTHER; note = 2'-O-methylcytidine-3'-phosphate
  modified_base 13: mod_base = OTHER; note = 2'-O-methylcytidine-3'-phosphate
  modified_base 14: mod_base = OTHER; note = 2'-O-methylcytidine-3'-phosphate
  modified_base 15: mod_base = OTHER; note = 2'-O-methyluridine-3'-phosphate
  modified_base 16: mod_base = OTHER; note = 2'-O-methyluridine-3'-phosphate
  modified_base 17: mod_base = OTHER; note = 2'-O-methylcytidine-3'-phosphate
  modified_base 18: mod_base = OTHER; note = 2'-O-methyladenosine-3'-phosphate
  modified_base 19: mod_base = OTHER; note = 2'-O-methyladenosine-3'-phosphorothioate
  modified_base 20: mod_base = OTHER; note = 2'-O-methyladenosine-3'-phosphorothioate
  modified_base 21: mod_base = OTHER; note = 2'-O-methyladenosine
cattaaatatgcccttcaaaa

SEQ ID NO: 11113 - RNA, 21 nt, synthetic construct
  source 1..21: mol_type = other RNA
  modified_base 1: mod_base = OTHER; note = 2'-O-methyladenosine-3'-phosphorothioate
  modified_base 2: mod_base = OTHER; note = 2'-O-methyluridine-3'-phosphorothioate
  modified_base 3: mod_base = OTHER; note = 2'-O-methyluridine-3'-phosphate
  modified_base 4: mod_base = OTHER; note = 2'-O-methyladenosine-3'-phosphate
  modified_base 5: mod_base = OTHER; note = 2'-O-methyladenosine-3'-phosphate
  modified_base 6: mod_base = OTHER; note = 2'-O-docosanyl-adenosine-3'-phosphate
  modified_base 7: mod_base = OTHER; note = 2'-deoxy-2'-fluorouridine-3'-phosphate
  modified_base 8: mod_base = OTHER; note = 2'-O-methyladenosine-3'-phosphate
  modified_base 9: mod_base = OTHER; note = 2'-deoxy-2'-fluorouridine-3'-phosphate
  modified_base 10: mod_base = OTHER; note = 2'-deoxy-2'-fluoroguanosine-3'-phosphate
  modified_base 11: mod_base = OTHER; note = 2'-deoxy-2'-fluorocytidine-3'-phosphate
  modified_base 12: mod_base = OTHER; note = 2'-O-methylcytidine-3'-phosphate
  modified_base 13: mod_base = OTHER; note = 2'-O-methylcytidine-3'-phosphate
  modified_base 14: mod_base = OTHER; note = 2'-O-methyluridine-3'-phosphate
  modified_base 15: mod_base = OTHER; note = 2'-O-methyluridine-3'-phosphate
  modified_base 16: mod_base = OTHER; note = 2'-O-methylcytidine-3'-phosphate
  modified_base 17: mod_base = OTHER; note = 2'-O-methyladenosine-3'-phosphate
  modified_base 18: mod_base = OTHER; note = 2'-O-methyladenosine-3'-phosphate
  modified_base 19: mod_base = OTHER; note = 2'-O-methyladenosine-3'-phosphorothioate
  modified_base 20: mod_base = OTHER; note = 2'-O-methyluridine-3'-phosphorothioate
  modified_base 21: mod_base = OTHER; note = 2'-O-methyladenosine
attaaatatgcccttcaaata

SEQ ID NO: 11114 - RNA, 21 nt, synthetic construct
  source 1..21: mol_type = other RNA
  modified_base 1: mod_base = OTHER; note = 2'-O-methyluridine-3'-phosphorothioate
  modified_base 2: mod_base = OTHER; note = 2'-O-methyluridine-3'-phosphorothioate
  modified_base 3: mod_base = OTHER; note = 2'-O-methyladenosine-3'-phosphate
  modified_base 4: mod_base = OTHER; note = 2'-O-methyladenosine-3'-phosphate
  modified_base 5: mod_base = OTHER; note = 2'-O-methyladenosine-3'-phosphate
  modified_base 6: mod_base = OTHER; note = 2'-O-docosanyl-uridine-3'-phosphate
  modified_base 7: mod_base = OTHER; note = 2'-deoxy-2'-fluoroadenosine-3'-phosphate
  modified_base 8: mod_base = OTHER; note = 2'-O-methyluridine-3'-phosphate
  modified_base 9: mod_base = OTHER; note = 2'-deoxy-2'-fluoroguanosine-3'-phosphate
  modified_base 10: mod_base = OTHER; note = 2'-deoxy-2'-fluorocytidine-3'-phosphate
  modified_base 11: mod_base = OTHER; note = 2'-deoxy-2'-fluorocytidine-3'-phosphate
  modified_base 12: mod_base = OTHER; note = 2'-O-methylcytidine-3'-phosphate
  modified_base 13: mod_base = OTHER; note = 2'-O-methyluridine-3'-phosphate
  modified_base 14: mod_base = OTHER; note = 2'-O-methyluridine-3'-phosphate
  modified_base 15: mod_base = OTHER; note = 2'-O-methylcytidine-3'-phosphate
  modified_base 16: mod_base = OTHER; note = 2'-O-methyladenosine-3'-phosphate
  modified_base 17: mod_base = OTHER; note = 2'-O-methyladenosine-3'-phosphate
  modified_base 18: mod_base = OTHER; note = 2'-O-methyladenosine-3'-phosphate
  modified_base 19: mod_base = OTHER; note = 2'-O-methyluridine-3'-phosphorothioate
  modified_base 20: mod_base = OTHER; note = 2'-O-methylcytidine-3'-phosphorothioate
  modified_base 21: mod_base = OTHER; note = 2'-O-methyladenosine
ttaaatatgcccttcaaatca

SEQ ID NO: 11115 - RNA, 21 nt, synthetic construct
  source 1..21: mol_type = other RNA
  modified_base 1: mod_base = OTHER; note = 2'-O-methyluridine-3'-phosphorothioate
  modified_base 2: mod_base = OTHER; note = 2'-O-methyladenosine-3'-phosphorothioate
  modified_base 3: mod_base = OTHER; note = 2'-O-methyladenosine-3'-phosphate
  modified_base 4: mod_base = OTHER; note = 2'-O-methyladenosine-3'-phosphate
  modified_base 5: mod_base = OTHER; note = 2'-O-methyluridine-3'-phosphate
  modified_base 6: mod_base = OTHER; note = 2'-O-docosanyl-adenosine-3'-phosphate
  modified_base 7: mod_base = OTHER; note = 2'-deoxy-2'-fluorouridine-3'-phosphate
  modified_base 8: mod_base = OTHER; note = 2'-O-methylguanosine-3'-phosphate
  modified_base 9: mod_base = OTHER; note = 2'-deoxy-2'-fluorocytidine-3'-phosphate
  modified_base 10: mod_base = OTHER; note = 2'-deoxy-2'-fluorocytidine-3'-phosphate
  modified_base 11: mod_base = OTHER; note = 2'-deoxy-2'-fluorocytidine-3'-phosphate
  modified_base 12: mod_base = OTHER; note = 2'-O-methyluridine-3'-phosphate
  modified_base 13: mod_base = OTHER; note = 2'-O-methyluridine-3'-phosphate
  modified_base 14: mod_base = OTHER; note = 2'-O-methylcytidine-3'-phosphate
  modified_base 15: mod_base = OTHER; note = 2'-O-methyladenosine-3'-phosphate
  modified_base 16: mod_base = OTHER; note = 2'-O-methyladenosine-3'-phosphate
  modified_base 17: mod_base = OTHER; note = 2'-O-methyladenosine-3'-phosphate
  modified_base 18: mod_base = OTHER; note = 2'-O-methyluridine-3'-phosphate
  modified_base 19: mod_base = OTHER; note = 2'-O-methylcytidine-3'-phosphorothioate
  modified_base 20: mod_base = OTHER; note = 2'-O-methyluridine-3'-phosphorothioate
  modified_base 21: mod_base = OTHER; note = 2'-O-methyladenosine
taaatatgcccttcaaatcta

SEQ ID NO: 11116 - RNA, 21 nt, synthetic construct
  source 1..21: mol_type = other RNA
  modified_base 1: mod_base = OTHER; note = 2'-O-methylguanosine-3'-phosphorothioate
  modified_base 2: mod_base = OTHER; note = 2'-O-methylcytidine-3'-phosphorothioate
  modified_base 3: mod_base = OTHER; note = 2'-O-methylcytidine-3'-phosphate
  modified_base 4: mod_base = OTHER; note = 2'-O-methylcytidine-3'-phosphate
  modified_base 5: mod_base = OTHER; note = 2'-O-methyluridine-3'-phosphate
  modified_base 6: mod_base = OTHER; note = 2'-O-docosanyl-uridine-3'-phosphate
  modified_base 7: mod_base = OTHER; note = 2'-deoxy-2'-fluorocytidine-3'-phosphate
  modified_base 8: mod_base = OTHER; note = 2'-O-methyladenosine-3'-phosphate
  modified_base 9: mod_base = OTHER; note = 2'-deoxy-2'-fluoroadenosine-3'-phosphate
  modified_base 10: mod_base = OTHER; note = 2'-deoxy-2'-fluoroadenosine-3'-phosphate
  modified_base 11: mod_base = OTHER; note = 2'-deoxy-2'-fluorouridine-3'-phosphate
  modified_base 12: mod_base = OTHER; note = 2'-O-methylcytidine-3'-phosphate
  modified_base 13: mod_base = OTHER; note = 2'-O-methyluridine-3'-phosphate
  modified_base 14: mod_base = OTHER; note = 2'-O-methyladenosine-3'-phosphate
  modified_base 15: mod_base = OTHER; note = 2'-O-methyluridine-3'-phosphate
  modified_base 16: mod_base = OTHER; note = 2'-O-methyladenosine-3'-phosphate
  modified_base 17: mod_base = OTHER; note = 2'-O-methyladenosine-3'-phosphate
  modified_base 18: mod_base = OTHER; note = 2'-O-methyluridine-3'-phosphate
  modified_base 19: mod_base = OTHER; note = 2'-O-methyluridine-3'-phosphorothioate
  modified_base 20: mod_base = OTHER; note = 2'-O-methyluridine-3'-phosphorothioate
  modified_base 21: mod_base = OTHER; note = 2'-O-methyladenosine
gcccttcaaatctataattta

SEQ ID NO: 11117 - RNA, 21 nt, synthetic construct
  source 1..21: mol_type = other RNA
  modified_base 1: mod_base = OTHER; note = 2'-O-methylcytidine-3'-phosphorothioate
  modified_base 2: mod_base = OTHER; note = 2'-O-methylcytidine-3'-phosphorothioate
  modified_base 3: mod_base = OTHER; note = 2'-O-methylcytidine-3'-phosphate
  modified_base 4: mod_base = OTHER; note = 2'-O-methyluridine-3'-phosphate
  modified_base 5: mod_base = OTHER; note = 2'-O-methyluridine-3'-phosphate
  modified_base 6: mod_base = OTHER; note = 2'-O-docosanyl-cytidine-3'-phosphate
  modified_base 7: mod_base = OTHER; note = 2'-deoxy-2'-fluoroadenosine-3'-phosphate
  modified_base 8: mod_base = OTHER; note = 2'-O-methyladenosine-3'-phosphate
  modified_base 9: mod_base = OTHER; note = 2'-deoxy-2'-fluoroadenosine-3'-phosphate
  modified_base 10: mod_base = OTHER; note = 2'-deoxy-2'-fluorouridine-3'-phosphate
  modified_base 11: mod_base = OTHER; note = 2'-deoxy-2'-fluorocytidine-3'-phosphate
  modified_base 12: mod_base = OTHER; note = 2'-O-methyluridine-3'-phosphate
  modified_base 13: mod_base = OTHER; note = 2'-O-methyladenosine-3'-phosphate
  modified_base 14: mod_base = OTHER; note = 2'-O-methyluridine-3'-phosphate
  modified_base 15: mod_base = OTHER; note = 2'-O-methyladenosine-3'-phosphate
  modified_base 16: mod_base = OTHER; note = 2'-O-methyladenosine-3'-phosphate
  modified_base 17: mod_base = OTHER; note = 2'-O-methyluridine-3'-phosphate
  modified_base 18: mod_base = OTHER; note = 2'-O-methyluridine-3'-phosphate
  modified_base 19: mod_base = OTHER; note = 2'-O-methyluridine-3'-phosphorothioate
  modified_base 20: mod_base = OTHER; note = 2'-O-methyluridine-3'-phosphorothioate
  modified_base 21: mod_base = OTHER; note = 2'-O-methyladenosine
cccttcaaatctataatttta

SEQ ID NO: 11118 - RNA, 21 nt, synthetic construct
  source 1..21: mol_type = other RNA
  modified_base 1: mod_base = OTHER; note = 2'-O-methyladenosine-3'-phosphorothioate
  modified_base 2: mod_base = OTHER; note = 2'-O-methyluridine-3'-phosphorothioate
  modified_base 3: mod_base = OTHER; note = 2'-O-methyluridine-3'-phosphate
  modified_base 4: mod_base = OTHER; note = 2'-O-methyluridine-3'-phosphate
  modified_base 5: mod_base = OTHER; note = 2'-O-methyluridine-3'-phosphate
  modified_base 6: mod_base = OTHER; note = 2'-O-docosanyl-adenosine-3'-phosphate
  modified_base 7: mod_base = OTHER; note = 2'-deoxy-2'-fluorocytidine-3'-phosphate
  modified_base 8: mod_base = OTHER; note = 2'-O-methyluridine-3'-phosphate
  modified_base 9: mod_base = OTHER; note = 2'-deoxy-2'-fluorouridine-3'-phosphate
  modified_base 10: mod_base = OTHER; note = 2'-deoxy-2'-fluorouridine-3'-phosphate
  modified_base 11: mod_base = OTHER; note = 2'-deoxy-2'-fluoroguanosine-3'-phosphate
  modified_base 12: mod_base = OTHER; note = 2'-O-methylguanosine-3'-phosphate
  modified_base 13: mod_base = OTHER; note = 2'-O-methyluridine-3'-phosphate
  modified_base 14: mod_base = OTHER; note = 2'-O-methyladenosine-3'-phosphate
  modified_base 15: mod_base = OTHER; note = 2'-O-methyladenosine-3'-phosphate
  modified_base 16: mod_base = OTHER; note = 2'-O-methyladenosine-3'-phosphate
  modified_base 17: mod_base = OTHER; note = 2'-O-methylcytidine-3'-phosphate
  modified_base 18: mod_base = OTHER; note = 2'-O-methylguanosine-3'-phosphate
  modified_base 19: mod_base = OTHER; note = 2'-O-methyladenosine-3'-phosphorothioate
  modified_base 20: mod_base = OTHER; note = 2'-O-methylguanosine-3'-phosphorothioate
  modified_base 21: mod_base = OTHER; note = 2'-O-methyladenosine
attttactttggtaaacgaga

SEQ ID NO: 11119 - RNA, 21 nt, synthetic construct
  source 1..21: mol_type = other RNA
  modified_base 1: mod_base = OTHER; note = 2'-O-methyluridine-3'-phosphorothioate
  modified_base 2: mod_base = OTHER; note = 2'-O-methyluridine-3'-phosphorothioate
  modified_base 3: mod_base = OTHER; note = 2'-O-methyluridine-3'-phosphate
  modified_base 4: mod_base = OTHER; note = 2'-O-methyluridine-3'-phosphate
  modified_base 5: mod_base = OTHER; note = 2'-O-methyladenosine-3'-phosphate
  modified_base 6: mod_base = OTHER; note = 2'-O-docosanyl-cytidine-3'-phosphate
  modified_base 7: mod_base = OTHER; note = 2'-deoxy-2'-fluorouridine-3'-phosphate
  modified_base 8: mod_base = OTHER; note = 2'-O-methyluridine-3'-phosphate
  modified_base 9: mod_base = OTHER; note = 2'-deoxy-2'-fluorouridine-3'-phosphate
  modified_base 10: mod_base = OTHER; note = 2'-deoxy-2'-fluoroguanosine-3'-phosphate
  modified_base 11: mod_base = OTHER; note = 2'-deoxy-2'-fluoroguanosine-3'-phosphate
  modified_base 12: mod_base = OTHER; note = 2'-O-methyluridine-3'-phosphate
  modified_base 13: mod_base = OTHER; note = 2'-O-methyladenosine-3'-phosphate
  modified_base 14: mod_base = OTHER; note = 2'-O-methyladenosine-3'-phosphate
  modified_base 15: mod_base = OTHER; note = 2'-O-methyladenosine-3'-phosphate
  modified_base 16: mod_base = OTHER; note = 2'-O-methylcytidine-3'-phosphate
  modified_base 17: mod_base = OTHER; note = 2'-O-methylguanosine-3'-phosphate
  modified_base 18: mod_base = OTHER; note = 2'-O-methyladenosine-3'-phosphate
  modified_base 19: mod_base = OTHER; note = 2'-O-methylguanosine-3'-phosphorothioate
  modified_base 20: mod_base = OTHER; note = 2'-O-methyladenosine-3'-phosphorothioate
  modified_base 21: mod_base = OTHER; note = 2'-O-methyladenosine
ttttactttggtaaacgagaa

SEQ ID NO: 11120 - RNA, 21 nt, synthetic construct
  source 1..21: mol_type = other RNA
  modified_base 1: mod_base = OTHER; note = 2'-O-methyluridine-3'-phosphorothioate
  modified_base 2: mod_base = OTHER; note = 2'-O-methyluridine-3'-phosphorothioate
  modified_base 3: mod_base = OTHER; note = 2'-O-methyluridine-3'-phosphate
  modified_base 4: mod_base = OTHER; note = 2'-O-methyladenosine-3'-phosphate
  modified_base 5: mod_base = OTHER; note = 2'-O-methylcytidine-3'-phosphate
  modified_base 6: mod_base = OTHER; note = 2'-O-docosanyl-uridine-3'-phosphate
  modified_base 7: mod_base = OTHER; note = 2'-deoxy-2'-fluorouridine-3'-phosphate
  modified_base 8: mod_base = OTHER; note = 2'-O-methyluridine-3'-phosphate
  modified_base 9: mod_base = OTHER; note = 2'-deoxy-2'-fluoroguanosine-3'-phosphate
  modified_base 10: mod_base = OTHER; note = 2'-deoxy-2'-fluoroguanosine-3'-phosphate
  modified_base 11: mod_base = OTHER; note = 2'-deoxy-2'-fluorouridine-3'-phosphate
  modified_base 12: mod_base = OTHER; note = 2'-O-methyladenosine-3'-phosphate
  modified_base 13: mod_base = OTHER; note = 2'-O-methyladenosine-3'-phosphate
  modified_base 14: mod_base = OTHER; note = 2'-O-methyladenosine-3'-phosphate
  modified_base 15: mod_base = OTHER; note = 2'-O-methylcytidine-3'-phosphate
  modified_base 16: mod_base = OTHER; note = 2'-O-methylguanosine-3'-phosphate
  modified_base 17: mod_base = OTHER; note = 2'-O-methyladenosine-3'-phosphate
  modified_base 18: mod_base = OTHER; note = 2'-O-methylguanosine-3'-phosphate
  modified_base 19: mod_base = OTHER; note = 2'-O-methyladenosine-3'-phosphorothioate
  modified_base 20: mod_base = OTHER; note = 2'-O-methyluridine-3'-phosphorothioate
  modified_base 21: mod_base = OTHER; note = 2'-O-methyladenosine
tttactttggtaaacgagata

SEQ ID NO: 11121 - RNA, 21 nt, synthetic construct
  source 1..21: mol_type = other RNA
  modified_base 1: mod_base = OTHER; note = 2'-O-methyluridine-3'-phosphorothioate
  modified_base 2: mod_base = OTHER; note = 2'-O-methyluridine-3'-phosphorothioate
  modified_base 3: mod_base = OTHER; note = 2'-O-methyladenosine-3'-phosphate
  modified_base 4: mod_base = OTHER; note = 2'-O-methylcytidine-3'-phosphate
  modified_base 5: mod_base = OTHER; note = 2'-O-methyluridine-3'-phosphate
  modified_base 6: mod_base = OTHER; note = 2'-O-docosanyl-uridine-3'-phosphate
  modified_base 7: mod_base = OTHER; note = 2'-deoxy-2'-fluorouridine-3'-phosphate
  modified_base 8: mod_base = OTHER; note = 2'-O-methylguanosine-3'-phosphate
  modified_base 9: mod_base = OTHER; note = 2'-deoxy-2'-fluoroguanosine-3'-phosphate
  modified_base 10: mod_base = OTHER; note = 2'-deoxy-2'-fluorouridine-3'-phosphate
  modified_base 11: mod_base = OTHER; note = 2'-deoxy-2'-fluoroadenosine-3'-phosphate
  modified_base 12: mod_base = OTHER; note = 2'-O-methyladenosine-3'-phosphate
  modified_base 13: mod_base = OTHER; note = 2'-O-methyladenosine-3'-phosphate
  modified_base 14: mod_base = OTHER; note = 2'-O-methylcytidine-3'-phosphate
  modified_base 15: mod_base = OTHER; note = 2'-O-methylguanosine-3'-phosphate
  modified_base 16: mod_base = OTHER; note = 2'-O-methyladenosine-3'-phosphate
  modified_base 17: mod_base = OTHER; note = 2'-O-methylguanosine-3'-phosphate
  modified_base 18: mod_base = OTHER; note = 2'-O-methyladenosine-3'-phosphate
  modified_base 19: mod_base = OTHER; note = 2'-O-methyluridine-3'-phosphorothioate
  modified_base 20: mod_base = OTHER; note = 2'-O-methyluridine-3'-phosphorothioate
  modified_base 21: mod_base = OTHER; note = 2'-O-methyladenosine
ttactttggtaaacgagatta

SEQ ID NO: 11122 - RNA, 21 nt, synthetic construct
  source 1..21: mol_type = other RNA
  modified_base 1: mod_base = OTHER; note = 2'-O-methyluridine-3'-phosphorothioate
  modified_base 2: mod_base = OTHER; note = 2'-O-methyladenosine-3'-phosphorothioate
  modified_base 3: mod_base = OTHER; note = 2'-O-methylcytidine-3'-phosphate
  modified_base 4: mod_base = OTHER; note = 2'-O-methyluridine-3'-phosphate
  modified_base 5: mod_base = OTHER; note = 2'-O-methyluridine-3'-phosphate
  modified_base 6: mod_base = OTHER; note = 2'-O-docosanyl-uridine-3'-phosphate
  modified_base 7: mod_base = OTHER; note = 2'-deoxy-2'-fluoroguanosine-3'-phosphate
  modified_base 8: mod_base = OTHER; note = 2'-O-methylguanosine-3'-phosphate
  modified_base 9: mod_base = OTHER; note = 2'-deoxy-2'-fluorouridine-3'-phosphate
  modified_base 10: mod_base = OTHER; note = 2'-deoxy-2'-fluoroadenosine-3'-phosphate
  modified_base 11: mod_base = OTHER; note = 2'-deoxy-2'-fluoroadenosine-3'-phosphate
  modified_base 12: mod_base = OTHER; note = 2'-O-methyladenosine-3'-phosphate
  modified_base 13: mod_base = OTHER; note = 2'-O-methylcytidine-3'-phosphate
  modified_base 14: mod_base = OTHER; note = 2'-O-methylguanosine-3'-phosphate
  modified_base 15: mod_base = OTHER; note = 2'-O-methyladenosine-3'-phosphate
  modified_base 16: mod_base = OTHER; note = 2'-O-methylguanosine-3'-phosphate
  modified_base 17: mod_base = OTHER; note = 2'-O-methyladenosine-3'-phosphate
  modified_base 18: mod_base = OTHER; note = 2'-O-methyluridine-3'-phosphate
  modified_base 19: mod_base = OTHER; note = 2'-O-methyluridine-3'-phosphorothioate
  modified_base 20: mod_base = OTHER; note = 2'-O-methyluridine-3'-phosphorothioate
  modified_base 21: mod_base = OTHER; note = 2'-O-methyladenosine
tactttggtaaacgagattta

SEQ ID NO: 11123 - RNA, 21 nt, synthetic construct
  source 1..21: mol_type = other RNA
  modified_base 1: mod_base = OTHER; note = 2'-O-methylcytidine-3'-phosphorothioate
  modified_base 2: mod_base = OTHER; note = 2'-O-methyluridine-3'-phosphorothioate
  modified_base 3: mod_base = OTHER; note = 2'-O-methyluridine-3'-phosphate
  modified_base 4: mod_base = OTHER; note = 2'-O-methyluridine-3'-phosphate
  modified_base 5: mod_base = OTHER; note = 2'-O-methylguanosine-3'-phosphate
  modified_base 6: mod_base = OTHER; note = 2'-O-docosanyl-guanosine-3'-phosphate
  modified_base 7: mod_base = OTHER; note = 2'-deoxy-2'-fluorouridine-3'-phosphate
  modified_base 8: mod_base = OTHER; note = 2'-O-methyladenosine-3'-phosphate
  modified_base 9: mod_base = OTHER; note = 2'-deoxy-2'-fluoroadenosine-3'-phosphate
  modified_base 10: mod_base = OTHER; note = 2'-deoxy-2'-fluoroadenosine-3'-phosphate
  modified_base 11: mod_base = OTHER; note = 2'-deoxy-2'-fluorocytidine-3'-phosphate
  modified_base 12: mod_base = OTHER; note = 2'-O-methylguanosine-3'-phosphate
  modified_base 13: mod_base = OTHER; note = 2'-O-methyladenosine-3'-phosphate
  modified_base 14: mod_base = OTHER; note = 2'-O-methylguanosine-3'-phosphate
  modified_base 15: mod_base = OTHER; note = 2'-O-methyladenosine-3'-phosphate
  modified_base 16: mod_base = OTHER; note = 2'-O-methyluridine-3'-phosphate
  modified_base 17: mod_base = OTHER; note = 2'-O-methyluridine-3'-phosphate
  modified_base 18: mod_base = OTHER; note = 2'-O-methyluridine-3'-phosphate
  modified_base 19: mod_base = OTHER; note = 2'-O-methyladenosine-3'-phosphorothioate
  modified_base 20: mod_base = OTHER; note = 2'-O-methyladenosine-3'-phosphorothioate
  modified_base 21: mod_base = OTHER; note = 2'-O-methyladenosine
ctttggtaaacgagatttaaa

SEQ ID NO: 11124 - RNA, 21 nt, synthetic construct
  source 1..21: mol_type = other RNA
  modified_base 1: mod_base = OTHER; note = 2'-O-methylguanosine-3'-phosphorothioate
  modified_base 2: mod_base = OTHER; note = 2'-O-methylguanosine-3'-phosphorothioate
  modified_base 3: mod_base = OTHER; note = 2'-O-methyluridine-3'-phosphate
  modified_base 4: mod_base = OTHER; note = 2'-O-methyladenosine-3'-phosphate
  modified_base 5: mod_base = OTHER; note = 2'-O-methyladenosine-3'-phosphate
  modified_base 6: mod_base = OTHER; note = 2'-O-docosanyl-adenosine-3'-phosphate
  modified_base 7: mod_base = OTHER; note = 2'-deoxy-2'-fluorocytidine-3'-phosphate
  modified_base 8: mod_base = OTHER; note = 2'-O-methylguanosine-3'-phosphate
  modified_base 9: mod_base = OTHER; note = 2'-deoxy-2'-fluoroadenosine-3'-phosphate
  modified_base 10: mod_base = OTHER; note = 2'-deoxy-2'-fluoroguanosine-3'-phosphate
  modified_base 11: mod_base = OTHER; note = 2'-deoxy-2'-fluoroadenosine-3'-phosphate
  modified_base 12: mod_base = OTHER; note = 2'-O-methyluridine-3'-phosphate
  modified_base 13: mod_base = OTHER; note = 2'-O-methyluridine-3'-phosphate
  modified_base 14: mod_base = OTHER; note = 2'-O-methyluridine-3'-phosphate
  modified_base 15: mod_base = OTHER; note = 2'-O-methyladenosine-3'-phosphate
  modified_base 16: mod_base = OTHER; note = 2'-O-methyladenosine-3'-phosphate
  modified_base 17: mod_base = OTHER; note = 2'-O-methylcytidine-3'-phosphate
  modified_base 18: mod_base = OTHER; note = 2'-O-methyladenosine-3'-phosphate
  modified_base 19: mod_base = OTHER; note = 2'-O-methyluridine-3'-phosphorothioate
  modified_base 20: mod_base = OTHER; note = 2'-O-methylguanosine-3'-phosphorothioate
  modified_base 21: mod_base = OTHER; note = 2'-O-methyladenosine
ggtaaacgagatttaacatga

SEQ ID NO: 11125 - RNA, 21 nt, synthetic construct
  source 1..21: mol_type = other RNA
  modified_base 1: mod_base = OTHER; note = 2'-O-methylguanosine-3'-phosphorothioate
  modified_base 2: mod_base = OTHER; note = 2'-O-methyladenosine-3'-phosphorothioate
  modified_base 3: mod_base = OTHER; note = 2'-O-methylguanosine-3'-phosphate
  modified_base 4: mod_base = OTHER; note = 2'-O-methyladenosine-3'-phosphate
  modified_base 5: mod_base = OTHER; note = 2'-O-methyluridine-3'-phosphate
  modified_base 6: mod_base = OTHER; note = 2'-O-docosanyl-uridine-3'-phosphate
  modified_base 7: mod_base = OTHER; note = 2'-deoxy-2'-fluorouridine-3'-phosphate
  modified_base 8: mod_base = OTHER; note = 2'-O-methyladenosine-3'-phosphate
  modified_base 9: mod_base = OTHER; note = 2'-deoxy-2'-fluoroadenosine-3'-phosphate
  modified_base 10: mod_base = OTHER; note = 2'-deoxy-2'-fluorocytidine-3'-phosphate
  modified_base 11: mod_base = OTHER; note = 2'-deoxy-2'-fluoroadenosine-3'-phosphate
  modified_base 12: mod_base = OTHER; note = 2'-O-methyluridine-3'-phosphate
  modified_base 13: mod_base = OTHER; note = 2'-O-methylguanosine-3'-phosphate
  modified_base 14: mod_base = OTHER; note = 2'-O-methyladenosine-3'-phosphate
  modified_base 15: mod_base = OTHER; note = 2'-O-methyluridine-3'-phosphate
  modified_base 16: mod_base = OTHER; note = 2'-O-methylguanosine-3'-phosphate
  modified_base 17: mod_base = OTHER; note = 2'-O-methyluridine-3'-phosphate
  modified_base 18: mod_base = OTHER; note = 2'-O-methylcytidine-3'-phosphate
  modified_base 19: mod_base = OTHER; note = 2'-O-methyluridine-3'-phosphorothioate
  modified_base 20: mod_base = OTHER; note = 2'-O-methyluridine-3'-phosphorothioate
  modified_base 21: mod_base = OTHER; note = 2'-O-methyladenosine
gagatttaacatgatgtctta

SEQ ID NO: 11126 - RNA, 21 nt, synthetic construct
  source 1..21: mol_type = other RNA
  modified_base 1: mod_base = OTHER; note = 2'-O-methyluridine-3'-phosphorothioate
  modified_base 2: mod_base = OTHER; note = 2'-O-methyluridine-3'-phosphorothioate
  modified_base 3: mod_base = OTHER; note = 2'-O-methyluridine-3'-phosphate
  modified_base 4: mod_base = OTHER; note = 2'-O-methyluridine-3'-phosphate
  modified_base 5: mod_base = OTHER; note = 2'-O-methyluridine-3'-phosphate
  modified_base 6: mod_base = OTHER; note = 2'-O-docosanyl-uridine-3'-phosphate
  modified_base 7: mod_base = OTHER; note = 2'-deoxy-2'-fluorocytidine-3'-phosphate
  modified_base 8: mod_base = OTHER; note = 2'-O-methyladenosine-3'-phosphate
  modified_base 9: mod_base = OTHER; note = 2'-deoxy-2'-fluoroadenosine-3'-phosphate
  modified_base 10: mod_base = OTHER; note = 2'-deoxy-2'-fluoroadenosine-3'-phosphate
  modified_base 11: mod_base = OTHER; note = 2'-deoxy-2'-fluorocytidine-3'-phosphate
  modified_base 12: mod_base = OTHER; note = 2'-O-methyluridine-3'-phosphate
  modified_base 13: mod_base = OTHER; note = 2'-O-methylcytidine-3'-phosphate
  modified_base 14: mod_base = OTHER; note = 2'-O-methylcytidine-3'-phosphate
  modified_base 15: mod_base = OTHER; note = 2'-O-methyladenosine-3'-phosphate
  modified_base 16: mod_base = OTHER; note = 2'-O-methyluridine-3'-phosphate
  modified_base 17: mod_base = OTHER; note = 2'-O-methyluridine-3'-phosphate
  modified_base 18: mod_base = OTHER; note = 2'-O-methylcytidine-3'-phosphate
  modified_base 19: mod_base = OTHER; note = 2'-O-methylcytidine-3'-phosphorothioate
  modified_base 20: mod_base = OTHER; note = 2'-O-methyluridine-3'-phosphorothioate
  modified_base 21: mod_base = OTHER; note = 2'-O-methyladenosine
ttttttcaaactccattccta

SEQ ID NO: 11127 - RNA, 21 nt, synthetic construct
  source 1..21: mol_type = other RNA
  modified_base 1: mod_base = OTHER; note = 2'-O-methylguanosine-3'-phosphorothioate
  modified_base 2: mod_base = OTHER; note = 2'-O-methyluridine-3'-phosphorothioate
  modified_base 3: mod_base = OTHER; note = 2'-O-methylcytidine-3'-phosphate
  modified_base 4: mod_base = OTHER; note = 2'-O-methyluridine-3'-phosphate
  modified_base 5: mod_base = OTHER; note = 2'-O-methyluridine-3'-phosphate
  modified_base 6: mod_base = OTHER; note = 2'-O-docosanyl-uridine-3'-phosphate
  modified_base 7: mod_base = OTHER; note = 2'-deoxy-2'-fluorouridine-3'-phosphate
  modified_base 8: mod_base = OTHER; note = 2'-O-methyladenosine-3'-phosphate
  modified_base 9: mod_base = OTHER; note = 2'-deoxy-2'-fluorouridine-3'-phosphate
  modified_base 10: mod_base = OTHER; note = 2'-deoxy-2'-fluoroguanosine-3'-phosphate
  modified_base 11: mod_base = OTHER; note = 2'-deoxy-2'-fluorocytidine-3'-phosphate
  modified_base 12: mod_base = OTHER; note = 2'-O-methyluridine-3'-phosphate
  modified_base 13: mod_base = OTHER; note = 2'-O-methylcytidine-3'-phosphate
  modified_base 14: mod_base = OTHER; note = 2'-O-methylcytidine-3'-phosphate
  modified_base 15: mod_base = OTHER; note = 2'-O-methyluridine-3'-phosphate
  modified_base 16: mod_base = OTHER; note = 2'-O-methyladenosine-3'-phosphate
  modified_base 17: mod_base = OTHER; note = 2'-O-methyladenosine-3'-phosphate
  modified_base 18: mod_base = OTHER; note = 2'-O-methyladenosine-3'-phosphate
  modified_base 19: mod_base = OTHER; note = 2'-O-methyladenosine-3'-phosphorothioate
  modified_base 20: mod_base = OTHER; note = 2'-O-methylcytidine-3'-phosphorothioate
  modified_base 21: mod_base = OTHER; note = 2'-O-methyladenosine
gtcttttatgctcctaaaaca

SEQ ID NO: 11128 - RNA, 21 nt, synthetic construct
  source 1..21: mol_type = other RNA
  modified_base 1: mod_base = OTHER; note = 2'-O-methyluridine-3'-phosphorothioate
  modified_base 2: mod_base = OTHER; note = 2'-O-methylcytidine-3'-phosphorothioate
  modified_base 3: mod_base = OTHER; note = 2'-O-methyluridine-3'-phosphate
  modified_base 4: mod_base = OTHER; note = 2'-O-methyluridine-3'-phosphate
  modified_base 5: mod_base = OTHER; note = 2'-O-methyluridine-3'-phosphate
  modified_base 6: mod_base = OTHER; note = 2'-O-docosanyl-uridine-3'-phosphate
  modified_base 7: mod_base = OTHER; note = 2'-deoxy-2'-fluorouridine-3'-phosphate
  modified_base 8: mod_base = OTHER; note = 2'-O-methyluridine-3'-phosphate
  modified_base 9: mod_base = OTHER; note = 2'-deoxy-2'-fluorocytidine-3'-phosphate
  modified_base 10: mod_base = OTHER; note = 2'-deoxy-2'-fluoroadenosine-3'-phosphate
  modified_base 11: mod_base = OTHER; note = 2'-deoxy-2'-fluoroadenosine-3'-phosphate
  modified_base 12: mod_base = OTHER; note = 2'-O-methyladenosine-3'-phosphate
  modified_base 13: mod_base = OTHER; note = 2'-O-methylcytidine-3'-phosphate
  modified_base 14: mod_base = OTHER; note = 2'-O-methyluridine-3'-phosphate
  modified_base 15: mod_base = OTHER; note = 2'-O-methylcytidine-3'-phosphate
  modified_base 16: mod_base = OTHER; note = 2'-O-methylcytidine-3'-phosphate
  modified_base 17: mod_base = OTHER; note = 2'-O-methyladenosine-3'-phosphate
  modified_base 18: mod_base = OTHER; note = 2'-O-methyluridine-3'-phosphate
  modified_base 19: mod_base = OTHER; note = 2'-O-methyluridine-3'-phosphorothioate
  modified_base 20: mod_base = OTHER; note = 2'-O-methylcytidine-3'-phosphorothioate
  modified_base 21: mod_base = OTHER; note = 2'-O-methyladenosine
tcttttttcaaactccattca

SEQ ID NO: 11129 - RNA, 21 nt, synthetic construct
  source 1..21: mol_type = other RNA
  modified_base 1: mod_base = OTHER; note = 2'-O-methylcytidine-3'-phosphorothioate
  modified_base 2: mod_base = OTHER; note = 2'-O-methyluridine-3'-phosphorothioate
  modified_base 3: mod_base = OTHER; note = 2'-O-methyluridine-3'-phosphate
  modified_base 4: mod_base = OTHER; note = 2'-O-methyluridine-3'-phosphate
  modified_base 5: mod_base = OTHER; note = 2'-O-methyluridine-3'-phosphate
  modified_base 6: mod_base = OTHER; note = 2'-O-docosanyl-uridine-3'-phosphate
  modified_base 7: mod_base = OTHER; note = 2'-deoxy-2'-fluorouridine-3'-phosphate
  modified_base 8: mod_base = OTHER; note = 2'-O-methylcytidine-3'-phosphate
  modified_base 9: mod_base = OTHER; note = 2'-deoxy-2'-fluoroadenosine-3'-phosphate
  modified_base 10: mod_base = OTHER; note = 2'-deoxy-2'-fluoroadenosine-3'-phosphate
  modified_base 11: mod_base = OTHER; note = 2'-deoxy-2'-fluoroadenosine-3'-phosphate
  modified_base 12: mod_base = OTHER; note = 2'-O-methylcytidine-3'-phosphate
  modified_base 13: mod_base = OTHER; note = 2'-O-methyluridine-3'-phosphate
  modified_base 14: mod_base = OTHER; note = 2'-O-methylcytidine-3'-phosphate
  modified_base 15: mod_base = OTHER; note = 2'-O-methylcytidine-3'-phosphate
  modified_base 16: mod_base = OTHER; note = 2'-O-methyladenosine-3'-phosphate
  modified_base 17: mod_base = OTHER; note = 2'-O-methyluridine-3'-phosphate
  modified_base 18: mod_base = OTHER; note = 2'-O-methyluridine-3'-phosphate
  modified_base 19: mod_base = OTHER; note = 2'-O-methylcytidine-3'-phosphorothioate
  modified_base 20: mod_base = OTHER; note = 2'-O-methylcytidine-3'-phosphorothioate
  modified_base 21: mod_base = OTHER; note = 2'-O-methyladenosine
cttttttcaaactccattcca

SEQ ID NO: 11130 - RNA, 21 nt, synthetic construct
  source 1..21: mol_type = other RNA
  modified_base 1: mod_base = OTHER; note = 2'-O-methyluridine-3'-phosphorothioate
  modified_base 2: mod_base = OTHER; note = 2'-O-methyluridine-3'-phosphorothioate
  modified_base 3: mod_base = OTHER; note = 2'-O-methyluridine-3'-phosphate
  modified_base 4: mod_base = OTHER; note = 2'-O-methyluridine-3'-phosphate
  modified_base 5: mod_base = OTHER; note = 2'-O-methyluridine-3'-phosphate
  modified_base 6: mod_base = OTHER; note = 2'-O-docosanyl-cytidine-3'-phosphate
  modified_base 7: mod_base = OTHER; note = 2'-deoxy-2'-fluoroadenosine-3'-phosphate
  modified_base 8: mod_base = OTHER; note = 2'-O-methyladenosine-3'-phosphate
  modified_base 9: mod_base = OTHER; note = 2'-deoxy-2'-fluoroadenosine-3'-phosphate
  modified_base 10: mod_base = OTHER; note = 2'-deoxy-2'-fluorocytidine-3'-phosphate
  modified_base 11: mod_base = OTHER; note = 2'-deoxy-2'-fluorouridine-3'-phosphate
  modified_base 12: mod_base = OTHER; note = 2'-O-methylcytidine-3'-phosphate
  modified_base 13: mod_base = OTHER; note = 2'-O-methylcytidine-3'-phosphate
  modified_base 14: mod_base = OTHER; note = 2'-O-methyladenosine-3'-phosphate
  modified_base 15: mod_base = OTHER; note = 2'-O-methyluridine-3'-phosphate
  modified_base 16: mod_base = OTHER; note = 2'-O-methyluridine-3'-phosphate
  modified_base 17: mod_base = OTHER; note = 2'-O-methylcytidine-3'-phosphate
  modified_base 18: mod_base = OTHER; note = 2'-O-methylcytidine-3'-phosphate
  modified_base 19: mod_base = OTHER; note = 2'-O-methyluridine-3'-phosphorothioate
  modified_base 20: mod_base = OTHER; note = 2'-O-methyluridine-3'-phosphorothioate
  modified_base 21: mod_base = OTHER; note = 2'-O-methyladenosine
tttttcaaactccattcctta

SEQ ID NO: 11131 - RNA, 21 nt, synthetic construct
  source 1..21: mol_type = other RNA
  modified_base 1: mod_base = OTHER; note = 2'-O-methyluridine-3'-phosphorothioate
  modified_base 2: mod_base = OTHER; note = 2'-O-methyluridine-3'-phosphorothioate
  modified_base 3: mod_base = OTHER; note = 2'-O-methyluridine-3'-phosphate
  modified_base 4: mod_base = OTHER; note = 2'-O-methyluridine-3'-phosphate
  modified_base 5: mod_base = OTHER; note = 2'-O-methylcytidine-3'-phosphate
  modified_base 6: mod_base = OTHER; note = 2'-O-docosanyl-adenosine-3'-phosphate
  modified_base 7: mod_base = OTHER; note = 2'-deoxy-2'-fluoroadenosine-3'-phosphate
  modified_base 8: mod_base = OTHER; note = 2'-O-methyladenosine-3'-phosphate
  modified_base 9: mod_base = OTHER; note = 2'-deoxy-2'-fluorocytidine-3'-phosphate
  modified_base 10: mod_base = OTHER; note = 2'-deoxy-2'-fluorouridine-3'-phosphate
  modified_base 11: mod_base = OTHER; note = 2'-deoxy-2'-fluorocytidine-3'-phosphate
  modified_base 12: mod_base = OTHER; note = 2'-O-methylcytidine-3'-phosphate
  modified_base 13: mod_base = OTHER; note = 2'-O-methyladenosine-3'-phosphate
  modified_base 14: mod_base = OTHER; note = 2'-O-methyluridine-3'-phosphate
  modified_base 15: mod_base = OTHER; note = 2'-O-methyluridine-3'-phosphate
  modified_base 16: mod_base = OTHER; note = 2'-O-methylcytidine-3'-phosphate
  modified_base 17: mod_base = OTHER; note = 2'-O-methylcytidine-3'-phosphate
  modified_base 18: mod_base = OTHER; note = 2'-O-methyluridine-3'-phosphate
  modified_base 19: mod_base = OTHER; note = 2'-O-methyluridine-3'-phosphorothioate
  modified_base 20: mod_base = OTHER; note = 2'-O-methyladenosine-3'-phosphorothioate
  modified_base 21: mod_base = OTHER; note = 2'-O-methyladenosine
ttttcaaactccattccttaa

SEQ ID NO: 11132 - RNA, 21 nt, synthetic construct
  source 1..21: mol_type = other RNA
  modified_base 1: mod_base = OTHER; note = 2'-O-methyluridine-3'-phosphorothioate
  modified_base 2: mod_base = OTHER; note = 2'-O-methyluridine-3'-phosphorothioate
  modified_base 3: mod_base = OTHER; note = 2'-O-methyluridine-3'-phosphate
  modified_base 4: mod_base = OTHER; note = 2'-O-methylcytidine-3'-phosphate
  modified_base 5: mod_base = OTHER; note = 2'-O-methyladenosine-3'-phosphate
  modified_base 6: mod_base = OTHER; note = 2'-O-docosanyl-adenosine-3'-phosphate
  modified_base 7: mod_base = OTHER; note = 2'-deoxy-2'-fluoroadenosine-3'-phosphate
  modified_base 8: mod_base = OTHER; note = 2'-O-methylcytidine-3'-phosphate
  modified_base 9: mod_base = OTHER; note = 2'-deoxy-2'-fluorouridine-3'-phosphate
  modified_base 10: mod_base = OTHER; note = 2'-deoxy-2'-fluorocytidine-3'-phosphate
  modified_base 11: mod_base = OTHER; note = 2'-deoxy-2'-fluorocytidine-3'-phosphate
  modified_base 12: mod_base = OTHER; note = 2'-O-methyladenosine-3'-phosphate
  modified_base 13: mod_base = OTHER; note = 2'-O-methyluridine-3'-phosphate
  modified_base 14: mod_base = OTHER; note = 2'-O-methyluridine-3'-phosphate
  modified_base 15: mod_base = OTHER; note = 2'-O-methylcytidine-3'-phosphate
  modified_base 16: mod_base = OTHER; note = 2'-O-methylcytidine-3'-phosphate
  modified_base 17: mod_base = OTHER; note = 2'-O-methyluridine-3'-phosphate
  modified_base 18: mod_base = OTHER; note = 2'-O-methyluridine-3'-phosphate
  modified_base 19: mod_base = OTHER; note = 2'-O-methyladenosine-3'-phosphorothioate
  modified_base 20: mod_base = OTHER; note = 2'-O-methylguanosine-3'-phosphorothioate
  modified_base 21: mod_base = OTHER; note = 2'-O-methyladenosine
tttcaaactccattccttaga

SEQ ID NO: 11133 - RNA, 21 nt, synthetic construct
  source 1..21: mol_type = other RNA
  modified_base 1: mod_base = OTHER; note = 2'-O-methyluridine-3'-phosphorothioate
  modified_base 2: mod_base = OTHER; note = 2'-O-methyluridine-3'-phosphorothioate
  modified_base 3: mod_base = OTHER; note = 2'-O-methylcytidine-3'-phosphate
  modified_base 4: mod_base = OTHER; note = 2'-O-methyladenosine-3'-phosphate
  modified_base 5: mod_base = OTHER; note = 2'-O-methyladenosine-3'-phosphate
  modified_base 6: mod_base = OTHER; note = 2'-O-docosanyl-adenosine-3'-phosphate
  modified_base 7: mod_base = OTHER; note = 2'-deoxy-2'-fluorocytidine-3'-phosphate
  modified_base 8: mod_base = OTHER; note = 2'-O-methyluridine-3'-phosphate
  modified_base 9: mod_base = OTHER; note = 2'-deoxy-2'-fluorocytidine-3'-phosphate
  modified_base 10: mod_base = OTHER; note = 2'-deoxy-2'-fluorocytidine-3'-phosphate
  modified_base 11: mod_base = OTHER; note = 2'-deoxy-2'-fluoroadenosine-3'-phosphate
  modified_base 12: mod_base = OTHER; note = 2'-O-methyluridine-3'-phosphate
  modified_base 13: mod_base = OTHER; note = 2'-O-methyluridine-3'-phosphate
  modified_base 14: mod_base = OTHER; note = 2'-O-methylcytidine-3'-phosphate
  modified_base 15: mod_base = OTHER; note = 2'-O-methylcytidine-3'-phosphate
  modified_base 16: mod_base = OTHER; note = 2'-O-methyluridine-3'-phosphate
  modified_base 17: mod_base = OTHER; note = 2'-O-methyluridine-3'-phosphate
  modified_base 18: mod_base = OTHER; note = 2'-O-methyladenosine-3'-phosphate
  modified_base 19: mod_base = OTHER; note = 2'-O-methylguanosine-3'-phosphorothioate
  modified_base 20: mod_base = OTHER; note = 2'-O-methyladenosine-3'-phosphorothioate
  modified_base 21: mod_base = OTHER; note = 2'-O-methyladenosine
ttcaaactccattccttagaa

SEQ ID NO: 11134 - RNA, 21 nt, synthetic construct
  source 1..21: mol_type = other RNA
  modified_base 1: mod_base = OTHER; note = 2'-O-methyluridine-3'-phosphorothioate
  modified_base 2: mod_base = OTHER; note = 2'-O-methylcytidine-3'-phosphorothioate
  modified_base 3: mod_base = OTHER; note = 2'-O-methyladenosine-3'-phosphate
  modified_base 4: mod_base = OTHER; note = 2'-O-methyladenosine-3'-phosphate
  modified_base 5: mod_base = OTHER; note = 2'-O-methyladenosine-3'-phosphate
  modified_base 6: mod_base = OTHER; note = 2'-O-docosanyl-cytidine-3'-phosphate
  modified_base 7: mod_base = OTHER; note = 2'-deoxy-2'-fluorouridine-3'-phosphate
  modified_base 8: mod_base = OTHER; note = 2'-O-methylcytidine-3'-phosphate
  modified_base 9: mod_base = OTHER; note = 2'-deoxy-2'-fluorocytidine-3'-phosphate
  modified_base 10: mod_base = OTHER; note = 2'-deoxy-2'-fluoroadenosine-3'-phosphate
  modified_base 11: mod_base = OTHER; note = 2'-deoxy-2'-fluorouridine-3'-phosphate
  modified_base 12: mod_base = OTHER; note = 2'-O-methyluridine-3'-phosphate
  modified_base 13: mod_base = OTHER; note = 2'-O-methylcytidine-3'-phosphate
  modified_base 14: mod_base = OTHER; note = 2'-O-methylcytidine-3'-phosphate
  modified_base 15: mod_base = OTHER; note = 2'-O-methyluridine-3'-phosphate
  modified_base 16: mod_base = OTHER; note = 2'-O-methyluridine-3'-phosphate
  modified_base 17: mod_base = OTHER; note = 2'-O-methyladenosine-3'-phosphate
  modified_base 18: mod_base = OTHER; note = 2'-O-methylguanosine-3'-phosphate
  modified_base 19: mod_base = OTHER; note = 2'-O-methyladenosine-3'-phosphorothioate
  modified_base 20: mod_base = OTHER; note = 2'-O-methyladenosine-3'-phosphorothioate
  modified_base 21: mod_base = OTHER; note = 2'-O-methyladenosine
tcaaactccattccttagaaa

SEQ ID NO: 11135 - RNA, 21 nt, synthetic construct
  source 1..21: mol_type = other RNA
  modified_base 1: mod_base = OTHER; note = 2'-O-methylcytidine-3'-phosphorothioate
  modified_base 2: mod_base = OTHER; note = 2'-O-methyladenosine-3'-phosphorothioate
  modified_base 3: mod_base = OTHER; note = 2'-O-methyladenosine-3'-phosphate
  modified_base 4: mod_base = OTHER; note = 2'-O-methyladenosine-3'-phosphate
  modified_base 5: mod_base = OTHER; note = 2'-O-methylcytidine-3'-phosphate
  modified_base 6: mod_base = OTHER; note = 2'-O-docosanyl-uridine-3'-phosphate
  modified_base 7: mod_base = OTHER; note = 2'-deoxy-2'-fluorocytidine-3'-phosphate
  modified_base 8: mod_base = OTHER; note = 2'-O-methylcytidine-3'-phosphate
  modified_base 9: mod_base = OTHER; note = 2'-deoxy-2'-fluoroadenosine-3'-phosphate
  modified_base 10: mod_base = OTHER; note = 2'-deoxy-2'-fluorouridine-3'-phosphate
  modified_base 11: mod_base = OTHER; note = 2'-deoxy-2'-fluorouridine-3'-phosphate
  modified_base 12: mod_base = OTHER; note = 2'-O-methylcytidine-3'-phosphate
  modified_base 13: mod_base = OTHER; note = 2'-O-methylcytidine-3'-phosphate
  modified_base 14: mod_base = OTHER; note = 2'-O-methyluridine-3'-phosphate
  modified_base 15: mod_base = OTHER; note = 2'-O-methyluridine-3'-phosphate
  modified_base 16: mod_base = OTHER; note = 2'-O-methyladenosine-3'-phosphate
  modified_base 17: mod_base = OTHER; note = 2'-O-methylguanosine-3'-phosphate
  modified_base 18: mod_base = OTHER; note = 2'-O-methyladenosine-3'-phosphate
  modified_base 19: mod_base = OTHER; note = 2'-O-methyladenosine-3'-phosphorothioate
  modified_base 20: mod_base = OTHER; note = 2'-O-methylcytidine-3'-phosphorothioate
  modified_base 21: mod_base = OTHER; note = 2'-O-methyladenosine
caaactccattccttagaaca

SEQ ID NO: 11136 - RNA, 21 nt, synthetic construct
  source 1..21: mol_type = other RNA
  modified_base 1: mod_base = OTHER; note = 2'-O-methyladenosine-3'-phosphorothioate
  modified_base 2: mod_base = OTHER; note = 2'-O-methyladenosine-3'-phosphorothioate
  modified_base 3: mod_base = OTHER; note = 2'-O-methyladenosine-3'-phosphate
  modified_base 4: mod_base = OTHER; note = 2'-O-methylcytidine-3'-phosphate
  modified_base 5: mod_base = OTHER; note = 2'-O-methyluridine-3'-phosphate
  modified_base 6: mod_base = OTHER; note = 2'-O-docosanyl-cytidine-3'-phosphate
  modified_base 7: mod_base = OTHER; note = 2'-deoxy-2'-fluorocytidine-3'-phosphate
  modified_base 8: mod_base = OTHER; note = 2'-O-methyladenosine-3'-phosphate
  modified_base 9: mod_base = OTHER; note = 2'-deoxy-2'-fluorouridine-3'-phosphate
  modified_base 10: mod_base = OTHER; note = 2'-deoxy-2'-fluorouridine-3'-phosphate
  modified_base 11: mod_base = OTHER; note = 2'-deoxy-2'-fluorocytidine-3'-phosphate
  modified_base 12: mod_base = OTHER; note = 2'-O-methylcytidine-3'-phosphate
  modified_base 13: mod_base = OTHER; note = 2'-O-methyluridine-3'-phosphate
  modified_base 14: mod_base = OTHER; note = 2'-O-methyluridine-3'-phosphate
  modified_base 15: mod_base = OTHER; note = 2'-O-methyladenosine-3'-phosphate
  modified_base 16: mod_base = OTHER; note = 2'-O-methylguanosine-3'-phosphate
  modified_base 17: mod_base = OTHER; note = 2'-O-methyladenosine-3'-phosphate
  modified_base 18: mod_base = OTHER; note = 2'-O-methyladenosine-3'-phosphate
  modified_base 19: mod_base = OTHER; note = 2'-O-methylcytidine-3'-phosphorothioate
  modified_base 20: mod_base = OTHER; note = 2'-O-methyladenosine-3'-phosphorothioate
  modified_base 21: mod_base = OTHER; note = 2'-O-methyladenosine
aaactccattccttagaacaa

SEQ ID NO: 11137 - RNA, 21 nt, synthetic construct
  source 1..21: mol_type = other RNA
  modified_base 1: mod_base = OTHER; note = 2'-O-methyladenosine-3'-phosphorothioate
  modified_base 2: mod_base = OTHER; note = 2'-O-methyladenosine-3'-phosphorothioate
  modified_base 3: mod_base = OTHER; note = 2'-O-methylcytidine-3'-phosphate
  modified_base 4: mod_base = OTHER; note = 2'-O-methyluridine-3'-phosphate
  modified_base 5: mod_base = OTHER; note = 2'-O-methylcytidine-3'-phosphate
  modified_base 6: mod_base = OTHER; note = 2'-O-docosanyl-cytidine-3'-phosphate
  modified_base 7: mod_base = OTHER; note = 2'-deoxy-2'-fluoroadenosine-3'-phosphate
  modified_base 8: mod_base = OTHER; note = 2'-O-methyluridine-3'-phosphate
  modified_base 9: mod_base = OTHER; note = 2'-deoxy-2'-fluorouridine-3'-phosphate
  modified_base 10: mod_base = OTHER; note = 2'-deoxy-2'-fluorocytidine-3'-phosphate
  modified_base 11: mod_base = OTHER; note = 2'-deoxy-2'-fluorocytidine-3'-phosphate
  modified_base 12: mod_base = OTHER; note = 2'-O-methyluridine-3'-phosphate
  modified_base 13: mod_base = OTHER; note = 2'-O-methyluridine-3'-phosphate
  modified_base 14: mod_base = OTHER; note = 2'-O-methyladenosine-3'-phosphate
  modified_base 15: mod_base = OTHER; note = 2'-O-methylguanosine-3'-phosphate
  modified_base 16: mod_base = OTHER; note = 2'-O-methyladenosine-3'-phosphate
  modified_base 17: mod_base = OTHER; note = 2'-O-methyladenosine-3'-phosphate
  modified_base 18: mod_base = OTHER; note = 2'-O-methylcytidine-3'-phosphate
  modified_base 19: mod_base = OTHER; note = 2'-O-methyladenosine-3'-phosphorothioate
  modified_base 20: mod_base = OTHER; note = 2'-O-methyluridine-3'-phosphorothioate
  modified_base 21: mod_base = OTHER; note = 2'-O-methyladenosine
aactccattccttagaacata

SEQ ID NO: 11138 - RNA, 21 nt, synthetic construct
  source 1..21: mol_type = other RNA
  modified_base 1: mod_base = OTHER; note = 2'-O-methyladenosine-3'-phosphorothioate
  modified_base 2: mod_base = OTHER; note = 2'-O-methylcytidine-3'-phosphorothioate
  modified_base 3: mod_base = OTHER; note = 2'-O-methyluridine-3'-phosphate
  modified_base 4: mod_base = OTHER; note = 2'-O-methylcytidine-3'-phosphate
  modified_base 5: mod_base = OTHER; note = 2'-O-methylcytidine-3'-phosphate
  modified_base 6: mod_base = OTHER; note = 2'-O-docosanyl-adenosine-3'-phosphate
  modified_base 7: mod_base = OTHER; note = 2'-deoxy-2'-fluorouridine-3'-phosphate
  modified_base 8: mod_base = OTHER; note = 2'-O-methyluridine-3'-phosphate
  modified_base 9: mod_base = OTHER; note = 2'-deoxy-2'-fluorocytidine-3'-phosphate
  modified_base 10: mod_base = OTHER; note = 2'-deoxy-2'-fluorocytidine-3'-phosphate
  modified_base 11: mod_base = OTHER; note = 2'-deoxy-2'-fluorouridine-3'-phosphate
  modified_base 12: mod_base = OTHER; note = 2'-O-methyluridine-3'-phosphate
  modified_base 13: mod_base = OTHER; note = 2'-O-methyladenosine-3'-phosphate
  modified_base 14: mod_base = OTHER; note = 2'-O-methylguanosine-3'-phosphate
  modified_base 15: mod_base = OTHER; note = 2'-O-methyladenosine-3'-phosphate
  modified_base 16: mod_base = OTHER; note = 2'-O-methyladenosine-3'-phosphate
  modified_base 17: mod_base = OTHER; note = 2'-O-methylcytidine-3'-phosphate
  modified_base 18: mod_base = OTHER; note = 2'-O-methyladenosine-3'-phosphate
  modified_base 19: mod_base = OTHER; note = 2'-O-methyluridine-3'-phosphorothioate
  modified_base 20: mod_base = OTHER; note = 2'-O-methyluridine-3'-phosphorothioate
  modified_base 21: mod_base = OTHER; note = 2'-O-methyladenosine
actccattccttagaacatta

SEQ ID NO: 11139 - RNA, 21 nt, synthetic construct
  source 1..21: mol_type = other RNA
  modified_base 1: mod_base = OTHER; note = 2'-O-methylcytidine-3'-phosphorothioate
  modified_base 2: mod_base = OTHER; note = 2'-O-methyluridine-3'-phosphorothioate
  modified_base 3: mod_base = OTHER; note = 2'-O-methylcytidine-3'-phosphate
  modified_base 4: mod_base = OTHER; note = 2'-O-methylcytidine-3'-phosphate
  modified_base 5: mod_base = OTHER; note = 2'-O-methyladenosine-3'-phosphate
  modified_base 6: mod_base = OTHER; note = 2'-O-docosanyl-uridine-3'-phosphate
  modified_base 7: mod_base = OTHER; note = 2'-deoxy-2'-fluorouridine-3'-phosphate
  modified_base 8: mod_base = OTHER; note = 2'-O-methylcytidine-3'-phosphate
  modified_base 9: mod_base = OTHER; note = 2'-deoxy-2'-fluorocytidine-3'-phosphate
  modified_base 10: mod_base = OTHER; note = 2'-deoxy-2'-fluorouridine-3'-phosphate
  modified_base 11: mod_base = OTHER; note = 2'-deoxy-2'-fluorouridine-3'-phosphate
  modified_base 12: mod_base = OTHER; note = 2'-O-methyladenosine-3'-phosphate
  modified_base 13: mod_base = OTHER; note = 2'-O-methylguanosine-3'-phosphate
  modified_base 14: mod_base = OTHER; note = 2'-O-methyladenosine-3'-phosphate
  modified_base 15: mod_base = OTHER; note = 2'-O-methyladenosine-3'-phosphate
  modified_base 16: mod_base = OTHER; note = 2'-O-methylcytidine-3'-phosphate
  modified_base 17: mod_base = OTHER; note = 2'-O-methyladenosine-3'-phosphate
  modified_base 18: mod_base = OTHER; note = 2'-O-methyluridine-3'-phosphate
  modified_base 19: mod_base = OTHER; note = 2'-O-methyluridine-3'-phosphorothioate
  modified_base 20: mod_base = OTHER; note = 2'-O-methylcytidine-3'-phosphorothioate
  modified_base 21: mod_base = OTHER; note = 2'-O-methyladenosine
ctccattccttagaacattca

SEQ ID NO: 11140 - RNA, 21 nt, synthetic construct
  source 1..21: mol_type = other RNA
  modified_base 1: mod_base = OTHER; note = 2'-O-methyluridine-3'-phosphorothioate
  modified_base 2: mod_base = OTHER; note = 2'-O-methylcytidine-3'-phosphorothioate
  modified_base 3: mod_base = OTHER; note = 2'-O-methylcytidine-3'-phosphate
  modified_base 4: mod_base = OTHER; note = 2'-O-methyladenosine-3'-phosphate
  modified_base 5: mod_base = OTHER; note = 2'-O-methyluridine-3'-phosphate
  modified_base 6: mod_base = OTHER; note = 2'-O-docosanyl-uridine-3'-phosphate
  modified_base 7: mod_base = OTHER; note = 2'-deoxy-2'-fluorocytidine-3'-phosphate
  modified_base 8: mod_base = OTHER; note = 2'-O-methylcytidine-3'-phosphate
  modified_base 9: mod_base = OTHER; note = 2'-deoxy-2'-fluorouridine-3'-phosphate
  modified_base 10: mod_base = OTHER; note = 2'-deoxy-2'-fluorouridine-3'-phosphate
  modified_base 11: mod_base = OTHER; note = 2'-deoxy-2'-fluoroadenosine-3'-phosphate
  modified_base 12: mod_base = OTHER; note = 2'-O-methylguanosine-3'-phosphate
  modified_base 13: mod_base = OTHER; note = 2'-O-methyladenosine-3'-phosphate
  modified_base 14: mod_base = OTHER; note = 2'-O-methyladenosine-3'-phosphate
  modified_base 15: mod_base = OTHER; note = 2'-O-methylcytidine-3'-phosphate
  modified_base 16: mod_base = OTHER; note = 2'-O-methyladenosine-3'-phosphate
  modified_base 17: mod_base = OTHER; note = 2'-O-methyluridine-3'-phosphate
  modified_base 18: mod_base = OTHER; note = 2'-O-methyluridine-3'-phosphate
  modified_base 19: mod_base = OTHER; note = 2'-O-methylcytidine-3'-phosphorothioate
  modified_base 20: mod_base = OTHER; note = 2'-O-methyluridine-3'-phosphorothioate
  modified_base 21: mod_base = OTHER; note = 2'-O-methyladenosine
tccattccttagaacattcta

SEQ ID NO: 11141 - RNA, 21 nt, synthetic construct
  source 1..21: mol_type = other RNA
  modified_base 1: mod_base = OTHER; note = 2'-O-methylcytidine-3'-phosphorothioate
  modified_base 2: mod_base = OTHER; note = 2'-O-methylcytidine-3'-phosphorothioate
  modified_base 3: mod_base = OTHER; note = 2'-O-methyladenosine-3'-phosphate
  modified_base 4: mod_base = OTHER; note = 2'-O-methyluridine-3'-phosphate
  modified_base 5: mod_base = OTHER; note = 2'-O-methyluridine-3'-phosphate
  modified_base 6: mod_base = OTHER; note = 2'-O-docosanyl-cytidine-3'-phosphate
  modified_base 7: mod_base = OTHER; note = 2'-deoxy-2'-fluorocytidine-3'-phosphate
  modified_base 8: mod_base = OTHER; note = 2'-O-methyluridine-3'-phosphate
  modified_base 9: mod_base = OTHER; note = 2'-deoxy-2'-fluorouridine-3'-phosphate
  modified_base 10: mod_base = OTHER; note = 2'-deoxy-2'-fluoroadenosine-3'-phosphate
  modified_base 11: mod_base = OTHER; note = 2'-deoxy-2'-fluoroguanosine-3'-phosphate
  modified_base 12: mod_base = OTHER; note = 2'-O-methyladenosine-3'-phosphate
  modified_base 13: mod_base = OTHER; note = 2'-O-methyladenosine-3'-phosphate
  modified_base 14: mod_base = OTHER; note = 2'-O-methylcytidine-3'-phosphate
  modified_base 15: mod_base = OTHER; note = 2'-O-methyladenosine-3'-phosphate
  modified_base 16: mod_base = OTHER; note = 2'-O-methyluridine-3'-phosphate
  modified_base 17: mod_base = OTHER; note = 2'-O-methyluridine-3'-phosphate
  modified_base 18: mod_base = OTHER; note = 2'-O-methylcytidine-3'-phosphate
  modified_base 19: mod_base = OTHER; note = 2'-O-methyluridine-3'-phosphorothioate
  modified_base 20: mod_base = OTHER; note = 2'-O-methyluridine-3'-phosphorothioate
  modified_base 21: mod_base = OTHER; note = 2'-O-methyladenosine
ccattccttagaacattctta

SEQ ID NO: 11142 - RNA, 21 nt, synthetic construct
  source 1..21: mol_type = other RNA
  modified_base 1: mod_base = OTHER; note = 2'-O-methylcytidine-3'-phosphorothioate
  modified_base 2: mod_base = OTHER; note = 2'-O-methyladenosine-3'-phosphorothioate
  modified_base 3: mod_base = OTHER; note = 2'-O-methyluridine-3'-phosphate
  modified_base 4: mod_base = OTHER; note = 2'-O-methyluridine-3'-phosphate
  modified_base 5: mod_base = OTHER; note = 2'-O-methylcytidine-3'-phosphate
  modified_base 6: mod_base = OTHER; note = 2'-O-docosanyl-cytidine-3'-phosphate
  modified_base 7: mod_base = OTHER; note = 2'-deoxy-2'-fluorouridine-3'-phosphate
  modified_base 8: mod_base = OTHER; note = 2'-O-methyluridine-3'-phosphate
  modified_base 9: mod_base = OTHER; note = 2'-deoxy-2'-fluoroadenosine-3'-phosphate
  modified_base 10: mod_base = OTHER; note = 2'-deoxy-2'-fluoroguanosine-3'-phosphate
  modified_base 11: mod_base = OTHER; note = 2'-deoxy-2'-fluoroadenosine-3'-phosphate
  modified_base 12: mod_base = OTHER; note = 2'-O-methyladenosine-3'-phosphate
  modified_base 13: mod_base = OTHER; note = 2'-O-methylcytidine-3'-phosphate
  modified_base 14: mod_base = OTHER; note = 2'-O-methyladenosine-3'-phosphate
  modified_base 15: mod_base = OTHER; note = 2'-O-methyluridine-3'-phosphate
  modified_base 16: mod_base = OTHER; note = 2'-O-methyluridine-3'-phosphate
  modified_base 17: mod_base = OTHER; note = 2'-O-methylcytidine-3'-phosphate
  modified_base 18: mod_base = OTHER; note = 2'-O-methyluridine-3'-phosphate
  modified_base 19: mod_base = OTHER; note = 2'-O-methyluridine-3'-phosphorothioate
  modified_base 20: mod_base = OTHER; note = 2'-O-methylcytidine-3'-phosphorothioate
  modified_base 21: mod_base = OTHER; note = 2'-O-methyladenosine
cattccttagaacattcttca

SEQ ID NO: 11143 - RNA, 21 nt, synthetic construct
  source 1..21: mol_type = other RNA
  modified_base 1: mod_base = OTHER; note = 2'-O-methyladenosine-3'-phosphorothioate
  modified_base 2: mod_base = OTHER; note = 2'-O-methyluridine-3'-phosphorothioate
  modified_base 3: mod_base = OTHER; note = 2'-O-methyluridine-3'-phosphate
  modified_base 4: mod_base = OTHER; note = 2'-O-methylcytidine-3'-phosphate
  modified_base 5: mod_base = OTHER; note = 2'-O-methylcytidine-3'-phosphate
  modified_base 6: mod_base = OTHER; note = 2'-O-docosanyl-uridine-3'-phosphate
  modified_base 7: mod_base = OTHER; note = 2'-deoxy-2'-fluorouridine-3'-phosphate
  modified_base 8: mod_base = OTHER; note = 2'-O-methyladenosine-3'-phosphate
  modified_base 9: mod_base = OTHER; note = 2'-deoxy-2'-fluoroguanosine-3'-phosphate
  modified_base 10: mod_base = OTHER; note = 2'-deoxy-2'-fluoroadenosine-3'-phosphate
  modified_base 11: mod_base = OTHER; note = 2'-deoxy-2'-fluoroadenosine-3'-phosphate
  modified_base 12: mod_base = OTHER; note = 2'-O-methylcytidine-3'-phosphate
  modified_base 13: mod_base = OTHER; note = 2'-O-methyladenosine-3'-phosphate
  modified_base 14: mod_base = OTHER; note = 2'-O-methyluridine-3'-phosphate
  modified_base 15: mod_base = OTHER; note = 2'-O-methyluridine-3'-phosphate
  modified_base 16: mod_base = OTHER; note = 2'-O-methylcytidine-3'-phosphate
  modified_base 17: mod_base = OTHER; note = 2'-O-methyluridine-3'-phosphate
  modified_base 18: mod_base = OTHER; note = 2'-O-methyluridine-3'-phosphate
  modified_base 19: mod_base = OTHER; note = 2'-O-methylcytidine-3'-phosphorothioate
  modified_base 20: mod_base = OTHER; note = 2'-O-methyluridine-3'-phosphorothioate
  modified_base 21: mod_base = OTHER; note = 2'-O-methyladenosine
attccttagaacattcttcta

SEQ ID NO: 11144 - RNA, 21 nt, synthetic construct
  source 1..21: mol_type = other RNA
  modified_base 1: mod_base = OTHER; note = 2'-O-methyluridine-3'-phosphorothioate
  modified_base 2: mod_base = OTHER; note = 2'-O-methyluridine-3'-phosphorothioate
  modified_base 3: mod_base = OTHER; note = 2'-O-methylcytidine-3'-phosphate
  modified_base 4: mod_base = OTHER; note = 2'-O-methylcytidine-3'-phosphate
  modified_base 5: mod_base = OTHER; note = 2'-O-methyluridine-3'-phosphate
  modified_base 6: mod_base = OTHER; note = 2'-O-docosanyl-uridine-3'-phosphate
  modified_base 7: mod_base = OTHER; note = 2'-deoxy-2'-fluoroadenosine-3'-phosphate
  modified_base 8: mod_base = OTHER; note = 2'-O-methylguanosine-3'-phosphate
  modified_base 9: mod_base = OTHER; note = 2'-deoxy-2'-fluoroadenosine-3'-phosphate
  modified_base 10: mod_base = OTHER; note = 2'-deoxy-2'-fluoroadenosine-3'-phosphate
  modified_base 11: mod_base = OTHER; note = 2'-deoxy-2'-fluorocytidine-3'-phosphate
  modified_base 12: mod_base = OTHER; note = 2'-O-methyladenosine-3'-phosphate
  modified_base 13: mod_base = OTHER; note = 2'-O-methyluridine-3'-phosphate
  modified_base 14: mod_base = OTHER; note = 2'-O-methyluridine-3'-phosphate
  modified_base 15: mod_base = OTHER; note = 2'-O-methylcytidine-3'-phosphate
  modified_base 16: mod_base = OTHER; note = 2'-O-methyluridine-3'-phosphate
  modified_base 17: mod_base = OTHER; note = 2'-O-methyluridine-3'-phosphate
  modified_base 18: mod_base = OTHER; note = 2'-O-methylcytidine-3'-phosphate
  modified_base 19: mod_base = OTHER; note = 2'-O-methyluridine-3'-phosphorothioate
  modified_base 20: mod_base = OTHER; note = 2'-O-methyladenosine-3'-phosphorothioate
  modified_base 21: mod_base = OTHER; note = 2'-O-methyladenosine
ttccttagaacattcttctaa

SEQ ID NO: 11145 - RNA, 21 nt, synthetic construct
  source 1..21: mol_type = other RNA
  modified_base 1: mod_base = OTHER; note = 2'-O-methyluridine-3'-phosphorothioate
  modified_base 2: mod_base = OTHER; note = 2'-O-methylcytidine-3'-phosphorothioate
  modified_base 3: mod_base = OTHER; note = 2'-O-methylcytidine-3'-phosphate
  modified_base 4: mod_base = OTHER; note = 2'-O-methyluridine-3'-phosphate
  modified_base 5: mod_base = OTHER; note = 2'-O-methyluridine-3'-phosphate
  modified_base 6: mod_base = OTHER; note = 2'-O-docosanyl-adenosine-3'-phosphate
  modified_base 7: mod_base = OTHER; note = 2'-deoxy-2'-fluoroguanosine-3'-phosphate
  modified_base 8: mod_base = OTHER; note = 2'-O-methyladenosine-3'-phosphate
  modified_base 9: mod_base = OTHER; note = 2'-deoxy-2'-fluoroadenosine-3'-phosphate
  modified_base 10: mod_base = OTHER; note = 2'-deoxy-2'-fluorocytidine-3'-phosphate
  modified_base 11: mod_base = OTHER; note = 2'-deoxy-2'-fluoroadenosine-3'-phosphate
  modified_base 12: mod_base = OTHER; note = 2'-O-methyluridine-3'-phosphate
  modified_base 13: mod_base = OTHER; note = 2'-O-methyluridine-3'-phosphate
  modified_base 14: mod_base = OTHER; note = 2'-O-methylcytidine-3'-phosphate
  modified_base 15: mod_base = OTHER; note = 2'-O-methyluridine-3'-phosphate
  modified_base 16: mod_base = OTHER; note = 2'-O-methyluridine-3'-phosphate
  modified_base 17: mod_base = OTHER; note = 2'-O-methylcytidine-3'-phosphate
  modified_base 18: mod_base = OTHER; note = 2'-O-methyluridine-3'-phosphate
  modified_base 19: mod_base = OTHER; note = 2'-O-methyladenosine-3'-phosphorothioate
  modified_base 20: mod_base = OTHER; note = 2'-O-methylcytidine-3'-phosphorothioate
  modified_base 21: mod_base = OTHER; note = 2'-O-methyladenosine
tccttagaacattcttctaca

SEQ ID NO: 11146 - RNA, 21 nt, synthetic construct
  source 1..21: mol_type = other RNA
  modified_base 1: mod_base = OTHER; note = 2'-O-methylcytidine-3'-phosphorothioate
  modified_base 2: mod_base = OTHER; note = 2'-O-methylcytidine-3'-phosphorothioate
  modified_base 3: mod_base = OTHER; note = 2'-O-methyluridine-3'-phosphate
  modified_base 4: mod_base = OTHER; note = 2'-O-methyluridine-3'-phosphate
  modified_base 5: mod_base = OTHER; note = 2'-O-methyladenosine-3'-phosphate
  modified_base 6: mod_base = OTHER; note = 2'-O-docosanyl-guanosine-3'-phosphate
  modified_base 7: mod_base = OTHER; note = 2'-deoxy-2'-fluoroadenosine-3'-phosphate
  modified_base 8: mod_base = OTHER; note = 2'-O-methyladenosine-3'-phosphate
  modified_base 9: mod_base = OTHER; note = 2'-deoxy-2'-fluorocytidine-3'-phosphate
  modified_base 10: mod_base = OTHER; note = 2'-deoxy-2'-fluoroadenosine-3'-phosphate
  modified_base 11: mod_base = OTHER; note = 2'-deoxy-2'-fluorouridine-3'-phosphate
  modified_base 12: mod_base = OTHER; note = 2'-O-methyluridine-3'-phosphate
  modified_base 13: mod_base = OTHER; note = 2'-O-methylcytidine-3'-phosphate
  modified_base 14: mod_base = OTHER; note = 2'-O-methyluridine-3'-phosphate
  modified_base 15: mod_base = OTHER; note = 2'-O-methyluridine-3'-phosphate
  modified_base 16: mod_base = OTHER; note = 2'-O-methylcytidine-3'-phosphate
  modified_base 17: mod_base = OTHER; note = 2'-O-methyluridine-3'-phosphate
  modified_base 18: mod_base = OTHER; note = 2'-O-methyladenosine-3'-phosphate
  modified_base 19: mod_base = OTHER; note = 2'-O-methylcytidine-3'-phosphorothioate
  modified_base 20: mod_base = OTHER; note = 2'-O-methyluridine-3'-phosphorothioate
  modified_base 21: mod_base = OTHER; note = 2'-O-methyladenosine
ccttagaacattcttctacta

SEQ ID NO: 11147 - RNA, 21 nt, synthetic construct
  source 1..21: mol_type = other RNA
  modified_base 1: mod_base = OTHER; note = 2'-O-methylcytidine-3'-phosphorothioate
  modified_base 2: mod_base = OTHER; note = 2'-O-methyluridine-3'-phosphorothioate
  modified_base 3: mod_base = OTHER; note = 2'-O-methyluridine-3'-phosphate
  modified_base 4: mod_base = OTHER; note = 2'-O-methyladenosine-3'-phosphate
  modified_base 5: mod_base = OTHER; note = 2'-O-methylguanosine-3'-phosphate
  modified_base 6: mod_base = OTHER; note = 2'-O-docosanyl-adenosine-3'-phosphate
  modified_base 7: mod_base = OTHER; note = 2'-deoxy-2'-fluoroadenosine-3'-phosphate
  modified_base 8: mod_base = OTHER; note = 2'-O-methylcytidine-3'-phosphate
  modified_base 9: mod_base = OTHER; note = 2'-deoxy-2'-fluoroadenosine-3'-phosphate
  modified_base 10: mod_base = OTHER; note = 2'-deoxy-2'-fluorouridine-3'-phosphate
  modified_base 11: mod_base = OTHER; note = 2'-deoxy-2'-fluorouridine-3'-phosphate
  modified_base 12: mod_base = OTHER; note = 2'-O-methylcytidine-3'-phosphate
  modified_base 13: mod_base = OTHER; note = 2'-O-methyluridine-3'-phosphate
  modified_base 14: mod_base = OTHER; note = 2'-O-methyluridine-3'-phosphate
  modified_base 15: mod_base = OTHER; note = 2'-O-methylcytidine-3'-phosphate
  modified_base 16: mod_base = OTHER; note = 2'-O-methyluridine-3'-phosphate
  modified_base 17: mod_base = OTHER; note = 2'-O-methyladenosine-3'-phosphate
  modified_base 18: mod_base = OTHER; note = 2'-O-methylcytidine-3'-phosphate
  modified_base 19: mod_base = OTHER; note = 2'-O-methyluridine-3'-phosphorothioate
  modified_base 20: mod_base = OTHER; note = 2'-O-methylguanosine-3'-phosphorothioate
  modified_base 21: mod_base = OTHER; note = 2'-O-methyladenosine
cttagaacattcttctactga

SEQ ID NO: 11148 - RNA, 21 nt, synthetic construct
  source 1..21: mol_type = other RNA
  modified_base 1: mod_base = OTHER; note = 2'-O-methyluridine-3'-phosphorothioate
  modified_base 2: mod_base = OTHER; note = 2'-O-methyluridine-3'-phosphorothioate
  modified_base 3: mod_base = OTHER; note = 2'-O-methyladenosine-3'-phosphate
  modified_base 4: mod_base = OTHER; note = 2'-O-methylguanosine-3'-phosphate
  modified_base 5: mod_base = OTHER; note = 2'-O-methyladenosine-3'-phosphate
  modified_base 6: mod_base = OTHER; note = 2'-O-docosanyl-adenosine-3'-phosphate
  modified_base 7: mod_base = OTHER; note = 2'-deoxy-2'-fluorocytidine-3'-phosphate
  modified_base 8: mod_base = OTHER; note = 2'-O-methyladenosine-3'-phosphate
  modified_base 9: mod_base = OTHER; note = 2'-deoxy-2'-fluorouridine-3'-phosphate
  modified_base 10: mod_base = OTHER; note = 2'-deoxy-2'-fluorouridine-3'-phosphate
  modified_base 11: mod_base = OTHER; note = 2'-deoxy-2'-fluorocytidine-3'-phosphate
  modified_base 12: mod_base = OTHER; note = 2'-O-methyluridine-3'-phosphate
  modified_base 13: mod_base = OTHER; note = 2'-O-methyluridine-3'-phosphate
  modified_base 14: mod_base = OTHER; note = 2'-O-methylcytidine-3'-phosphate
  modified_base 15: mod_base = OTHER; note = 2'-O-methyluridine-3'-phosphate
  modified_base 16: mod_base = OTHER; note = 2'-O-methyladenosine-3'-phosphate
  modified_base 17: mod_base = OTHER; note = 2'-O-methylcytidine-3'-phosphate
  modified_base 18: mod_base = OTHER; note = 2'-O-methyluridine-3'-phosphate
  modified_base 19: mod_base = OTHER; note = 2'-O-methylguanosine-3'-phosphorothioate
  modified_base 20: mod_base = OTHER; note = 2'-O-methyladenosine-3'-phosphorothioate
  modified_base 21: mod_base = OTHER; note = 2'-O-methyladenosine
ttagaacattcttctactgaa

SEQ ID NO: 11149 - RNA, 21 nt, synthetic construct
  source 1..21: mol_type = other RNA
  modified_base 1: mod_base = OTHER; note = 2'-O-methylcytidine-3'-phosphorothioate
  modified_base 2: mod_base = OTHER; note = 2'-O-methyluridine-3'-phosphorothioate
  modified_base 3: mod_base = OTHER; note = 2'-O-methyluridine-3'-phosphate
  modified_base 4: mod_base = OTHER; note = 2'-O-methylcytidine-3'-phosphate
  modified_base 5: mod_base = OTHER; note = 2'-O-methyluridine-3'-phosphate
  modified_base 6: mod_base = OTHER; note = 2'-O-docosanyl-adenosine-3'-phosphate
  modified_base 7: mod_base = OTHER; note = 2'-deoxy-2'-fluorocytidine-3'-phosphate
  modified_base 8: mod_base = OTHER; note = 2'-O-methyluridine-3'-phosphate
  modified_base 9: mod_base = OTHER; note = 2'-deoxy-2'-fluoroguanosine-3'-phosphate
  modified_base 10: mod_base = OTHER; note = 2'-deoxy-2'-fluoroadenosine-3'-phosphate
  modified_base 11: mod_base = OTHER; note = 2'-deoxy-2'-fluoroguanosine-3'-phosphate
  modified_base 12: mod_base = OTHER; note = 2'-O-methyladenosine-3'-phosphate
  modified_base 13: mod_base = OTHER; note = 2'-O-methyluridine-3'-phosphate
  modified_base 14: mod_base = OTHER; note = 2'-O-methylguanosine-3'-phosphate
  modified_base 15: mod_base = OTHER; note = 2'-O-methyladenosine-3'-phosphate
  modified_base 16: mod_base = OTHER; note = 2'-O-methyluridine-3'-phosphate
  modified_base 17: mod_base = OTHER; note = 2'-O-methylcytidine-3'-phosphate
  modified_base 18: mod_base = OTHER; note = 2'-O-methylcytidine-3'-phosphate
  modified_base 19: mod_base = OTHER; note = 2'-O-methyladenosine-3'-phosphorothioate
  modified_base 20: mod_base = OTHER; note = 2'-O-methyladenosine-3'-phosphorothioate
  modified_base 21: mod_base = OTHER; note = 2'-O-methyladenosine
cttctactgagatgatccaaa

SEQ ID NO: 11150 - RNA, 21 nt, synthetic construct
  source 1..21: mol_type = other RNA
  modified_base 1: mod_base = OTHER; note = 2'-O-methyluridine-3'-phosphorothioate
  modified_base 2: mod_base = OTHER; note = 2'-O-methyladenosine-3'-phosphorothioate
  modified_base 3: mod_base = OTHER; note = 2'-O-methylcytidine-3'-phosphate
  modified_base 4: mod_base = OTHER; note = 2'-O-methyluridine-3'-phosphate
  modified_base 5: mod_base = OTHER; note = 2'-O-methyluridine-3'-phosphate
  modified_base 6: mod_base = OTHER; note = 2'-O-docosanyl-guanosine-3'-phosphate
  modified_base 7: mod_base = OTHER; note = 2'-deoxy-2'-fluorocytidine-3'-phosphate
  modified_base 8: mod_base = OTHER; note = 2'-O-methyluridine-3'-phosphate
  modified_base 9: mod_base = OTHER; note = 2'-deoxy-2'-fluorouridine-3'-phosphate
  modified_base 10: mod_base = OTHER; note = 2'-deoxy-2'-fluoroadenosine-3'-phosphate
  modified_base 11: mod_base = OTHER; note = 2'-deoxy-2'-fluorouridine-3'-phosphate
  modified_base 12: mod_base = OTHER; note = 2'-O-methyladenosine-3'-phosphate
  modified_base 13: mod_base = OTHER; note = 2'-O-methyladenosine-3'-phosphate
  modified_base 14: mod_base = OTHER; note = 2'-O-methyladenosine-3'-phosphate
  modified_base 15: mod_base = OTHER; note = 2'-O-methylguanosine-3'-phosphate
  modified_base 16: mod_base = OTHER; note = 2'-O-methyluridine-3'-phosphate
  modified_base 17: mod_base = OTHER; note = 2'-O-methylguanosine-3'-phosphate
  modified_base 18: mod_base = OTHER; note = 2'-O-methyladenosine-3'-phosphate
  modified_base 19: mod_base = OTHER; note = 2'-O-methyluridine-3'-phosphorothioate
  modified_base 20: mod_base = OTHER; note = 2'-O-methyladenosine-3'-phosphorothioate
  modified_base 21: mod_base = OTHER; note = 2'-O-methyladenosine
tacttgcttataaagtgataa

SEQ ID NO: 11151 - RNA, 21 nt, synthetic construct
  source 1..21: mol_type = other RNA
  modified_base 1: mod_base = OTHER; note = 2'-O-methyluridine-3'-phosphorothioate
  modified_base 2: mod_base = OTHER; note = 2'-O-methyladenosine-3'-phosphorothioate
  modified_base 3: mod_base = OTHER; note = 2'-O-methylguanosine-3'-phosphate
  modified_base 4: mod_base = OTHER; note = 2'-O-methyladenosine-3'-phosphate
  modified_base 5: mod_base = OTHER; note = 2'-O-methyladenosine-3'-phosphate
  modified_base 6: mod_base = OTHER; note = 2'-O-docosanyl-cytidine-3'-phosphate
  modified_base 7: mod_base = OTHER; note = 2'-deoxy-2'-fluoroadenosine-3'-phosphate
  modified_base 8: mod_base = OTHER; note = 2'-O-methyluridine-3'-phosphate
  modified_base 9: mod_base = OTHER; note = 2'-deoxy-2'-fluorouridine-3'-phosphate
  modified_base 10: mod_base = OTHER; note = 2'-deoxy-2'-fluorocytidine-3'-phosphate
  modified_base 11: mod_base = OTHER; note = 2'-deoxy-2'-fluorouridine-3'-phosphate
  modified_base 12: mod_base = OTHER; note = 2'-O-methyluridine-3'-phosphate
  modified_base 13: mod_base = OTHER; note = 2'-O-methylcytidine-3'-phosphate
  modified_base 14: mod_base = OTHER; note = 2'-O-methyluridine-3'-phosphate
  modified_base 15: mod_base = OTHER; note = 2'-O-methyladenosine-3'-phosphate
  modified_base 16: mod_base = OTHER; note = 2'-O-methylcytidine-3'-phosphate
  modified_base 17: mod_base = OTHER; note = 2'-O-methyluridine-3'-phosphate
  modified_base 18: mod_base = OTHER; note = 2'-O-methylguanosine-3'-phosphate
  modified_base 19: mod_base = OTHER; note = 2'-O-methyladenosine-3'-phosphorothioate
  modified_base 20: mod_base = OTHER; note = 2'-O-methylguanosine-3'-phosphorothioate
  modified_base 21: mod_base = OTHER; note = 2'-O-methyladenosine
tagaacattcttctactgaga

SEQ ID NO: 11152 - RNA, 21 nt, synthetic construct
  source 1..21: mol_type = other RNA
  modified_base 1: mod_base = OTHER; note = 2'-O-methyladenosine-3'-phosphorothioate
  modified_base 2: mod_base = OTHER; note = 2'-O-methylguanosine-3'-phosphorothioate
  modified_base 3: mod_base = OTHER; note = 2'-O-methyladenosine-3'-phosphate
  modified_base 4: mod_base = OTHER; note = 2'-O-methyladenosine-3'-phosphate
  modified_base 5: mod_base = OTHER; note = 2'-O-methylcytidine-3'-phosphate
  modified_base 6: mod_base = OTHER; note = 2'-O-docosanyl-adenosine-3'-phosphate
  modified_base 7: mod_base = OTHER; note = 2'-deoxy-2'-fluorouridine-3'-phosphate
  modified_base 8: mod_base = OTHER; note = 2'-O-methyluridine-3'-phosphate
  modified_base 9: mod_base = OTHER; note = 2'-deoxy-2'-fluorocytidine-3'-phosphate
  modified_base 10: mod_base = OTHER; note = 2'-deoxy-2'-fluorouridine-3'-phosphate
  modified_base 11: mod_base = OTHER; note = 2'-deoxy-2'-fluorouridine-3'-phosphate
  modified_base 12: mod_base = OTHER; note = 2'-O-methylcytidine-3'-phosphate
  modified_base 13: mod_base = OTHER; note = 2'-O-methyluridine-3'-phosphate
  modified_base 14: mod_base = OTHER; note = 2'-O-methyladenosine-3'-phosphate
  modified_base 15: mod_base = OTHER; note = 2'-O-methylcytidine-3'-phosphate
  modified_base 16: mod_base = OTHER; note = 2'-O-methyluridine-3'-phosphate
  modified_base 17: mod_base = OTHER; note = 2'-O-methylguanosine-3'-phosphate
  modified_base 18: mod_base = OTHER; note = 2'-O-methyladenosine-3'-phosphate
  modified_base 19: mod_base = OTHER; note = 2'-O-methylguanosine-3'-phosphorothioate
  modified_base 20: mod_base = OTHER; note = 2'-O-methyladenosine-3'-phosphorothioate
  modified_base 21: mod_base = OTHER; note = 2'-O-methyladenosine
agaacattcttctactgagaa

SEQ ID NO: 11153 - RNA, 21 nt, synthetic construct
  source 1..21: mol_type = other RNA
  modified_base 1: mod_base = OTHER; note = 2'-O-methylguanosine-3'-phosphorothioate
  modified_base 2: mod_base = OTHER; note = 2'-O-methyladenosine-3'-phosphorothioate
  modified_base 3: mod_base = OTHER; note = 2'-O-methyladenosine-3'-phosphate
  modified_base 4: mod_base = OTHER; note = 2'-O-methylcytidine-3'-phosphate
  modified_base 5: mod_base = OTHER; note = 2'-O-methyladenosine-3'-phosphate
  modified_base 6: mod_base = OTHER; note = 2'-O-docosanyl-uridine-3'-phosphate
  modified_base 7: mod_base = OTHER; note = 2'-deoxy-2'-fluorouridine-3'-phosphate
  modified_base 8: mod_base = OTHER; note = 2'-O-methylcytidine-3'-phosphate
  modified_base 9: mod_base = OTHER; note = 2'-deoxy-2'-fluorouridine-3'-phosphate
  modified_base 10: mod_base = OTHER; note = 2'-deoxy-2'-fluorouridine-3'-phosphate
  modified_base 11: mod_base = OTHER; note = 2'-deoxy-2'-fluorocytidine-3'-phosphate
  modified_base 12: mod_base = OTHER; note = 2'-O-methyluridine-3'-phosphate
  modified_base 13: mod_base = OTHER; note = 2'-O-methyladenosine-3'-phosphate
  modified_base 14: mod_base = OTHER; note = 2'-O-methylcytidine-3'-phosphate
  modified_base 15: mod_base = OTHER; note = 2'-O-methyluridine-3'-phosphate
  modified_base 16: mod_base = OTHER; note = 2'-O-methylguanosine-3'-phosphate
  modified_base 17: mod_base = OTHER; note = 2'-O-methyladenosine-3'-phosphate
  modified_base 18: mod_base = OTHER; note = 2'-O-methylguanosine-3'-phosphate
  modified_base 19: mod_base = OTHER; note = 2'-O-methyladenosine-3'-phosphorothioate
  modified_base 20: mod_base = OTHER; note = 2'-O-methyluridine-3'-phosphorothioate
  modified_base 21: mod_base = OTHER; note = 2'-O-methyladenosine
gaacattcttctactgagata

SEQ ID NO: 11154 - RNA, 21 nt, synthetic construct
  source 1..21: mol_type = other RNA
  modified_base 1: mod_base = OTHER; note = 2'-O-methylcytidine-3'-phosphorothioate
  modified_base 2: mod_base = OTHER; note = 2'-O-methyladenosine-3'-phosphorothioate
  modified_base 3: mod_base = OTHER; note = 2'-O-methyluridine-3'-phosphate
  modified_base 4: mod_base = OTHER; note = 2'-O-methyluridine-3'-phosphate
  modified_base 5: mod_base = OTHER; note = 2'-O-methylcytidine-3'-phosphate
  modified_base 6: mod_base = OTHER; note = 2'-O-docosanyl-uridine-3'-phosphate
  modified_base 7: mod_base = OTHER; note = 2'-deoxy-2'-fluorouridine-3'-phosphate
  modified_base 8: mod_base = OTHER; note = 2'-O-methylcytidine-3'-phosphate
  modified_base 9: mod_base = OTHER; note = 2'-deoxy-2'-fluorouridine-3'-phosphate
  modified_base 10: mod_base = OTHER; note = 2'-deoxy-2'-fluoroadenosine-3'-phosphate
  modified_base 11: mod_base = OTHER; note = 2'-deoxy-2'-fluorocytidine-3'-phosphate
  modified_base 12: mod_base = OTHER; note = 2'-O-methyluridine-3'-phosphate
  modified_base 13: mod_base = OTHER; note = 2'-O-methylguanosine-3'-phosphate
  modified_base 14: mod_base = OTHER; note = 2'-O-methyladenosine-3'-phosphate
  modified_base 15: mod_base = OTHER; note = 2'-O-methylguanosine-3'-phosphate
  modified_base 16: mod_base = OTHER; note = 2'-O-methyladenosine-3'-phosphate
  modified_base 17: mod_base = OTHER; note = 2'-O-methyluridine-3'-phosphate
  modified_base 18: mod_base = OTHER; note = 2'-O-methylguanosine-3'-phosphate
  modified_base 19: mod_base = OTHER; note = 2'-O-methyladenosine-3'-phosphorothioate
  modified_base 20: mod_base = OTHER; note = 2'-O-methyluridine-3'-phosphorothioate
  modified_base 21: mod_base = OTHER; note = 2'-O-methyladenosine
cattcttctactgagatgata

SEQ ID NO: 11155 - RNA, 21 nt, synthetic construct
  source 1..21: mol_type = other RNA
  modified_base 1: mod_base = OTHER; note = 2'-O-methyladenosine-3'-phosphorothioate
  modified_base 2: mod_base = OTHER; note = 2'-O-methyluridine-3'-phosphorothioate
  modified_base 3: mod_base = OTHER; note = 2'-O-methyluridine-3'-phosphate
  modified_base 4: mod_base = OTHER; note = 2'-O-methylcytidine-3'-phosphate
  modified_base 5: mod_base = OTHER; note = 2'-O-methyluridine-3'-phosphate
  modified_base 6: mod_base = OTHER; note = 2'-O-docosanyl-uridine-3'-phosphate
  modified_base 7: mod_base = OTHER; note = 2'-deoxy-2'-fluorocytidine-3'-phosphate
  modified_base 8: mod_base = OTHER; note = 2'-O-methyluridine-3'-phosphate
  modified_base 9: mod_base = OTHER; note = 2'-deoxy-2'-fluoroadenosine-3'-phosphate
  modified_base 10: mod_base = OTHER; note = 2'-deoxy-2'-fluorocytidine-3'-phosphate
  modified_base 11: mod_base = OTHER; note = 2'-deoxy-2'-fluorouridine-3'-phosphate
  modified_base 12: mod_base = OTHER; note = 2'-O-methylguanosine-3'-phosphate
  modified_base 13: mod_base = OTHER; note = 2'-O-methyladenosine-3'-phosphate
  modified_base 14: mod_base = OTHER; note = 2'-O-methylguanosine-3'-phosphate
  modified_base 15: mod_base = OTHER; note = 2'-O-methyladenosine-3'-phosphate
  modified_base 16: mod_base = OTHER; note = 2'-O-methyluridine-3'-phosphate
  modified_base 17: mod_base = OTHER; note = 2'-O-methylguanosine-3'-phosphate
  modified_base 18: mod_base = OTHER; note = 2'-O-methyladenosine-3'-phosphate
  modified_base 19: mod_base = OTHER; note = 2'-O-methyluridine-3'-phosphorothioate
  modified_base 20: mod_base = OTHER; note = 2'-O-methylcytidine-3'-phosphorothioate
  modified_base 21: mod_base = OTHER; note = 2'-O-methyladenosine
attcttctactgagatgatca

SEQ ID NO: 11156 - RNA, 21 nt, synthetic construct
  source 1..21: mol_type = other RNA
  modified_base 1: mod_base = OTHER; note = 2'-O-methyluridine-3'-phosphorothioate
  modified_base 2: mod_base = OTHER; note = 2'-O-methyluridine-3'-phosphorothioate
  modified_base 3: mod_base = OTHER; note = 2'-O-methylcytidine-3'-phosphate
  modified_base 4: mod_base = OTHER; note = 2'-O-methyluridine-3'-phosphate
  modified_base 5: mod_base = OTHER; note = 2'-O-methyluridine-3'-phosphate
  modified_base 6: mod_base = OTHER; note = 2'-O-docosanyl-cytidine-3'-phosphate
  modified_base 7: mod_base = OTHER; note = 2'-deoxy-2'-fluorouridine-3'-phosphate
  modified_base 8: mod_base = OTHER; note = 2'-O-methyladenosine-3'-phosphate
  modified_base 9: mod_base = OTHER; note = 2'-deoxy-2'-fluorocytidine-3'-phosphate
  modified_base 10: mod_base = OTHER; note = 2'-deoxy-2'-fluorouridine-3'-phosphate
  modified_base 11: mod_base = OTHER; note = 2'-deoxy-2'-fluoroguanosine-3'-phosphate
  modified_base 12: mod_base = OTHER; note = 2'-O-methyladenosine-3'-phosphate
  modified_base 13: mod_base = OTHER; note = 2'-O-methylguanosine-3'-phosphate
  modified_base 14: mod_base = OTHER; note = 2'-O-methyladenosine-3'-phosphate
  modified_base 15: mod_base = OTHER; note = 2'-O-methyluridine-3'-phosphate
  modified_base 16: mod_base = OTHER; note = 2'-O-methylguanosine-3'-phosphate
  modified_base 17: mod_base = OTHER; note = 2'-O-methyladenosine-3'-phosphate
  modified_base 18: mod_base = OTHER; note = 2'-O-methyluridine-3'-phosphate
  modified_base 19: mod_base = OTHER; note = 2'-O-methylcytidine-3'-phosphorothioate
  modified_base 20: mod_base = OTHER; note = 2'-O-methylcytidine-3'-phosphorothioate
  modified_base 21: mod_base = OTHER; note = 2'-O-methyladenosine
ttcttctactgagatgatcca

SEQ ID NO: 11157 - RNA, 21 nt, synthetic construct
  source 1..21: mol_type = other RNA
  modified_base 1: mod_base = OTHER; note = 2'-O-methyluridine-3'-phosphorothioate
  modified_base 2: mod_base = OTHER; note = 2'-O-methylcytidine-3'-phosphorothioate
  modified_base 3: mod_base = OTHER; note = 2'-O-methyluridine-3'-phosphate
  modified_base 4: mod_base = OTHER; note = 2'-O-methyluridine-3'-phosphate
  modified_base 5: mod_base = OTHER; note = 2'-O-methylcytidine-3'-phosphate
  modified_base 6: mod_base = OTHER; note = 2'-O-docosanyl-uridine-3'-phosphate
  modified_base 7: mod_base = OTHER; note = 2'-deoxy-2'-fluoroadenosine-3'-phosphate
  modified_base 8: mod_base = OTHER; note = 2'-O-methylcytidine-3'-phosphate
  modified_base 9: mod_base = OTHER; note = 2'-deoxy-2'-fluorouridine-3'-phosphate
  modified_base 10: mod_base = OTHER; note = 2'-deoxy-2'-fluoroguanosine-3'-phosphate
  modified_base 11: mod_base = OTHER; note = 2'-deoxy-2'-fluoroadenosine-3'-phosphate
  modified_base 12: mod_base = OTHER; note = 2'-O-methylguanosine-3'-phosphate
  modified_base 13: mod_base = OTHER; note = 2'-O-methyladenosine-3'-phosphate
  modified_base 14: mod_base = OTHER; note = 2'-O-methyluridine-3'-phosphate
  modified_base 15: mod_base = OTHER; note = 2'-O-methylguanosine-3'-phosphate
  modified_base 16: mod_base = OTHER; note = 2'-O-methyladenosine-3'-phosphate
  modified_base 17: mod_base = OTHER; note = 2'-O-methyluridine-3'-phosphate
  modified_base 18: mod_base = OTHER; note = 2'-O-methylcytidine-3'-phosphate
  modified_base 19: mod_base = OTHER; note = 2'-O-methylcytidine-3'-phosphorothioate
  modified_base 20: mod_base = OTHER; note = 2'-O-methyladenosine-3'-phosphorothioate
  modified_base 21: mod_base = OTHER; note = 2'-O-methyladenosine
tcttctactgagatgatccaa

SEQ ID NO: 11158 - RNA, 21 nt, synthetic construct
  source 1..21: mol_type = other RNA
  modified_base 1: mod_base = OTHER; note = 2'-O-methyluridine-3'-phosphorothioate
  modified_base 2: mod_base = OTHER; note = 2'-O-methyluridine-3'-phosphorothioate
  modified_base 3: mod_base = OTHER; note = 2'-O-methylcytidine-3'-phosphate
  modified_base 4: mod_base = OTHER; note = 2'-O-methyluridine-3'-phosphate
  modified_base 5: mod_base = OTHER; note = 2'-O-methyladenosine-3'-phosphate
  modified_base 6: mod_base = OTHER; note = 2'-O-docosanyl-cytidine-3'-phosphate
  modified_base 7: mod_base = OTHER; note = 2'-deoxy-2'-fluorouridine-3'-phosphate
  modified_base 8: mod_base = OTHER; note = 2'-O-methylguanosine-3'-phosphate
  modified_base 9: mod_base = OTHER; note = 2'-deoxy-2'-fluoroadenosine-3'-phosphate
  modified_base 10: mod_base = OTHER; note = 2'-deoxy-2'-fluoroguanosine-3'-phosphate
  modified_base 11: mod_base = OTHER; note = 2'-deoxy-2'-fluoroadenosine-3'-phosphate
  modified_base 12: mod_base = OTHER; note = 2'-O-methyluridine-3'-phosphate
  modified_base 13: mod_base = OTHER; note = 2'-O-methylguanosine-3'-phosphate
  modified_base 14: mod_base = OTHER; note = 2'-O-methyladenosine-3'-phosphate
  modified_base 15: mod_base = OTHER; note = 2'-O-methyluridine-3'-phosphate
  modified_base 16: mod_base = OTHER; note = 2'-O-methylcytidine-3'-phosphate
  modified_base 17: mod_base = OTHER; note = 2'-O-methylcytidine-3'-phosphate
  modified_base 18: mod_base = OTHER; note = 2'-O-methyladenosine-3'-phosphate
  modified_base 19: mod_base = OTHER; note = 2'-O-methyladenosine-3'-phosphorothioate
  modified_base 20: mod_base = OTHER; note = 2'-O-methylguanosine-3'-phosphorothioate
  modified_base 21: mod_base = OTHER; note = 2'-O-methyladenosine
ttctactgagatgatccaaga

SEQ ID NO: 11159 - RNA, 21 nt, synthetic construct
  source 1..21: mol_type = other RNA
  modified_base 1: mod_base = OTHER; note = 2'-O-methyluridine-3'-phosphorothioate
  modified_base 2: mod_base = OTHER; note = 2'-O-methylcytidine-3'-phosphorothioate
  modified_base 3: mod_base = OTHER; note = 2'-O-methyluridine-3'-phosphate
  modified_base 4: mod_base = OTHER; note = 2'-O-methyladenosine-3'-phosphate
  modified_base 5: mod_base = OTHER; note = 2'-O-methylcytidine-3'-phosphate
  modified_base 6: mod_base = OTHER; note = 2'-O-docosanyl-uridine-3'-phosphate
  modified_base 7: mod_base = OTHER; note = 2'-deoxy-2'-fluoroguanosine-3'-phosphate
  modified_base 8: mod_base = OTHER; note = 2'-O-methyladenosine-3'-phosphate
  modified_base 9: mod_base = OTHER; note = 2'-deoxy-2'-fluoroguanosine-3'-phosphate
  modified_base 10: mod_base = OTHER; note = 2'-deoxy-2'-fluoroadenosine-3'-phosphate
  modified_base 11: mod_base = OTHER; note = 2'-deoxy-2'-fluorouridine-3'-phosphate
  modified_base 12: mod_base = OTHER; note = 2'-O-methylguanosine-3'-phosphate
  modified_base 13: mod_base = OTHER; note = 2'-O-methyladenosine-3'-phosphate
  modified_base 14: mod_base = OTHER; note = 2'-O-methyluridine-3'-phosphate
  modified_base 15: mod_base = OTHER; note = 2'-O-methylcytidine-3'-phosphate
  modified_base 16: mod_base = OTHER; note = 2'-O-methylcytidine-3'-phosphate
  modified_base 17: mod_base = OTHER; note = 2'-O-methyladenosine-3'-phosphate
  modified_base 18: mod_base = OTHER; note = 2'-O-methyladenosine-3'-phosphate
  modified_base 19: mod_base = OTHER; note = 2'-O-methylguanosine-3'-phosphorothioate
  modified_base 20: mod_base = OTHER; note = 2'-O-methyladenosine-3'-phosphorothioate
  modified_base 21: mod_base = OTHER; note = 2'-O-methyladenosine
tctactgagatgatccaagaa

SEQ ID NO: 11160 - RNA, 21 nt, synthetic construct
  source 1..21: mol_type = other RNA
  modified_base 1: mod_base = OTHER; note = 2'-O-methylcytidine-3'-phosphorothioate
  modified_base 2: mod_base = OTHER; note = 2'-O-methyluridine-3'-phosphorothioate
  modified_base 3: mod_base = OTHER; note = 2'-O-methyladenosine-3'-phosphate
  modified_base 4: mod_base = OTHER; note = 2'-O-methylcytidine-3'-phosphate
  modified_base 5: mod_base = OTHER; note = 2'-O-methyluridine-3'-phosphate
  modified_base 6: mod_base = OTHER; note = 2'-O-docosanyl-guanosine-3'-phosphate
  modified_base 7: mod_base = OTHER; note = 2'-deoxy-2'-fluoroadenosine-3'-phosphate
  modified_base 8: mod_base = OTHER; note = 2'-O-methylguanosine-3'-phosphate
  modified_base 9: mod_base = OTHER; note = 2'-deoxy-2'-fluoroadenosine-3'-phosphate
  modified_base 10: mod_base = OTHER; note = 2'-deoxy-2'-fluorouridine-3'-phosphate
  modified_base 11: mod_base = OTHER; note = 2'-deoxy-2'-fluoroguanosine-3'-phosphate
  modified_base 12: mod_base = OTHER; note = 2'-O-methyladenosine-3'-phosphate
  modified_base 13: mod_base = OTHER; note = 2'-O-methyluridine-3'-phosphate
  modified_base 14: mod_base = OTHER; note = 2'-O-methylcytidine-3'-phosphate
  modified_base 15: mod_base = OTHER; note = 2'-O-methylcytidine-3'-phosphate
  modified_base 16: mod_base = OTHER; note = 2'-O-methyladenosine-3'-phosphate
  modified_base 17: mod_base = OTHER; note = 2'-O-methyladenosine-3'-phosphate
  modified_base 18: mod_base = OTHER; note = 2'-O-methylguanosine-3'-phosphate
  modified_base 19: mod_base = OTHER; note = 2'-O-methyladenosine-3'-phosphorothioate
  modified_base 20: mod_base = OTHER; note = 2'-O-methylcytidine-3'-phosphorothioate
  modified_base 21: mod_base = OTHER; note = 2'-O-methyladenosine
ctactgagatgatccaagaca

SEQ ID NO: 11161 - RNA, 21 nt, synthetic construct
  source 1..21: mol_type = other RNA
  modified_base 1: mod_base = OTHER; note = 2'-O-methyluridine-3'-phosphorothioate
  modified_base 2: mod_base = OTHER; note = 2'-O-methyladenosine-3'-phosphorothioate
  modified_base 3: mod_base = OTHER; note = 2'-O-methylcytidine-3'-phosphate
  modified_base 4: mod_base = OTHER; note = 2'-O-methyluridine-3'-phosphate
  modified_base 5: mod_base = OTHER; note = 2'-O-methylguanosine-3'-phosphate
  modified_base 6: mod_base = OTHER; note = 2'-O-docosanyl-adenosine-3'-phosphate
  modified_base 7: mod_base = OTHER; note = 2'-deoxy-2'-fluoroguanosine-3'-phosphate
  modified_base 8: mod_base = OTHER; note = 2'-O-methyladenosine-3'-phosphate
  modified_base 9: mod_base = OTHER; note = 2'-deoxy-2'-fluorouridine-3'-phosphate
  modified_base 10: mod_base = OTHER; note = 2'-deoxy-2'-fluoroguanosine-3'-phosphate
  modified_base 11: mod_base = OTHER; note = 2'-deoxy-2'-fluoroadenosine-3'-phosphate
  modified_base 12: mod_base = OTHER; note = 2'-O-methyluridine-3'-phosphate
  modified_base 13: mod_base = OTHER; note = 2'-O-methylcytidine-3'-phosphate
  modified_base 14: mod_base = OTHER; note = 2'-O-methylcytidine-3'-phosphate
  modified_base 15: mod_base = OTHER; note = 2'-O-methyladenosine-3'-phosphate
  modified_base 16: mod_base = OTHER; note = 2'-O-methyladenosine-3'-phosphate
  modified_base 17: mod_base = OTHER; note = 2'-O-methylguanosine-3'-phosphate
  modified_base 18: mod_base = OTHER; note = 2'-O-methyladenosine-3'-phosphate
  modified_base 19: mod_base = OTHER; note = 2'-O-methylcytidine-3'-phosphorothioate
  modified_base 20: mod_base = OTHER; note = 2'-O-methylcytidine-3'-phosphorothioate
  modified_base 21: mod_base = OTHER; note = 2'-O-methyladenosine
tactgagatgatccaagacca

SEQ ID NO: 11162 - RNA, 21 nt, synthetic construct
  source 1..21: mol_type = other RNA
  modified_base 1: mod_base = OTHER; note = 2'-O-methyladenosine-3'-phosphorothioate
  modified_base 2: mod_base = OTHER; note = 2'-O-methylcytidine-3'-phosphorothioate
  modified_base 3: mod_base = OTHER; note = 2'-O-methyluridine-3'-phosphate
  modified_base 4: mod_base = OTHER; note = 2'-O-methylguanosine-3'-phosphate
  modified_base 5: mod_base = OTHER; note = 2'-O-methyladenosine-3'-phosphate
  modified_base 6: mod_base = OTHER; note = 2'-O-docosanyl-guanosine-3'-phosphate
  modified_base 7: mod_base = OTHER; note = 2'-deoxy-2'-fluoroadenosine-3'-phosphate
  modified_base 8: mod_base = OTHER; note = 2'-O-methyluridine-3'-phosphate
  modified_base 9: mod_base = OTHER; note = 2'-deoxy-2'-fluoroguanosine-3'-phosphate
  modified_base 10: mod_base = OTHER; note = 2'-deoxy-2'-fluoroadenosine-3'-phosphate
  modified_base 11: mod_base = OTHER; note = 2'-deoxy-2'-fluorouridine-3'-phosphate
  modified_base 12: mod_base = OTHER; note = 2'-O-methylcytidine-3'-phosphate
  modified_base 13: mod_base = OTHER; note = 2'-O-methylcytidine-3'-phosphate
  modified_base 14: mod_base = OTHER; note = 2'-O-methyladenosine-3'-phosphate
  modified_base 15: mod_base = OTHER; note = 2'-O-methyladenosine-3'-phosphate
  modified_base 16: mod_base = OTHER; note = 2'-O-methylguanosine-3'-phosphate
  modified_base 17: mod_base = OTHER; note = 2'-O-methyladenosine-3'-phosphate
  modified_base 18: mod_base = OTHER; note = 2'-O-methylcytidine-3'-phosphate
  modified_base 19: mod_base = OTHER; note = 2'-O-methylcytidine-3'-phosphorothioate
  modified_base 20: mod_base = OTHER; note = 2'-O-methyladenosine-3'-phosphorothioate
  modified_base 21: mod_base = OTHER; note = 2'-O-methyladenosine
actgagatgatccaagaccaa

SEQ ID NO: 11163 - RNA, 21 nt, synthetic construct
  source 1..21: mol_type = other RNA
  modified_base 1: mod_base = OTHER; note = 2'-O-methylcytidine-3'-phosphorothioate
  modified_base 2: mod_base = OTHER; note = 2'-O-methyluridine-3'-phosphorothioate
  modified_base 3: mod_base = OTHER; note = 2'-O-methylguanosine-3'-phosphate
  modified_base 4: mod_base = OTHER; note = 2'-O-methyladenosine-3'-phosphate
  modified_base 5: mod_base = OTHER; note = 2'-O-methylguanosine-3'-phosphate
  modified_base 6: mod_base = OTHER; note = 2'-O-docosanyl-adenosine-3'-phosphate
  modified_base 7: mod_base = OTHER; note = 2'-deoxy-2'-fluorouridine-3'-phosphate
  modified_base 8: mod_base = OTHER; note = 2'-O-methylguanosine-3'-phosphate
  modified_base 9: mod_base = OTHER; note = 2'-deoxy-2'-fluoroadenosine-3'-phosphate
  modified_base 10: mod_base = OTHER; note = 2'-deoxy-2'-fluorouridine-3'-phosphate
  modified_base 11: mod_base = OTHER; note = 2'-deoxy-2'-fluorocytidine-3'-phosphate
  modified_base 12: mod_base = OTHER; note = 2'-O-methylcytidine-3'-phosphate
  modified_base 13: mod_base = OTHER; note = 2'-O-methyladenosine-3'-phosphate
  modified_base 14: mod_base = OTHER; note = 2'-O-methyladenosine-3'-phosphate
  modified_base 15: mod_base = OTHER; note = 2'-O-methylguanosine-3'-phosphate
  modified_base 16: mod_base = OTHER; note = 2'-O-methyladenosine-3'-phosphate
  modified_base 17: mod_base = OTHER; note = 2'-O-methylcytidine-3'-phosphate
  modified_base 18: mod_base = OTHER; note = 2'-O-methylcytidine-3'-phosphate
  modified_base 19: mod_base = OTHER; note = 2'-O-methyladenosine-3'-phosphorothioate
  modified_base 20: mod_base = OTHER; note = 2'-O-methyladenosine-3'-phosphorothioate
  modified_base 21: mod_base = OTHER; note = 2'-O-methyladenosine
ctgagatgatccaagaccaaa

SEQ ID NO: 11164 - RNA, 21 nt, synthetic construct
  source 1..21: mol_type = other RNA
  modified_base 1: mod_base = OTHER; note = 2'-O-methylcytidine-3'-phosphorothioate
  modified_base 2: mod_base = OTHER; note = 2'-O-methylcytidine-3'-phosphorothioate
  modified_base 3: mod_base = OTHER; note = 2'-O-methyladenosine-3'-phosphate
  modified_base 4: mod_base = OTHER; note = 2'-O-methyladenosine-3'-phosphate
  modified_base 5: mod_base = OTHER; note = 2'-O-methylguanosine-3'-phosphate
  modified_base 6: mod_base = OTHER; note = 2'-O-docosanyl-adenosine-3'-phosphate
  modified_base 7: mod_base = OTHER; note = 2'-deoxy-2'-fluorocytidine-3'-phosphate
  modified_base 8: mod_base = OTHER; note = 2'-O-methylcytidine-3'-phosphate
  modified_base 9: mod_base = OTHER; note = 2'-deoxy-2'-fluoroadenosine-3'-phosphate
  modified_base 10: mod_base = OTHER; note = 2'-deoxy-2'-fluoroadenosine-3'-phosphate
  modified_base 11: mod_base = OTHER; note = 2'-deoxy-2'-fluoroadenosine-3'-phosphate
  modified_base 12: mod_base = OTHER; note = 2'-O-methyladenosine-3'-phosphate
  modified_base 13: mod_base = OTHER; note = 2'-O-methylguanosine-3'-phosphate
  modified_base 14: mod_base = OTHER; note = 2'-O-methyluridine-3'-phosphate
  modified_base 15: mod_base = OTHER; note = 2'-O-methylguanosine-3'-phosphate
  modified_base 16: mod_base = OTHER; note = 2'-O-methyluridine-3'-phosphate
  modified_base 17: mod_base = OTHER; note = 2'-O-methyluridine-3'-phosphate
  modified_base 18: mod_base = OTHER; note = 2'-O-methylcytidine-3'-phosphate
  modified_base 19: mod_base = OTHER; note = 2'-O-methyluridine-3'-phosphorothioate
  modified_base 20: mod_base = OTHER; note = 2'-O-methyluridine-3'-phosphorothioate
  modified_base 21: mod_base = OTHER; note = 2'-O-methyladenosine
ccaagaccaaaagtgttctta

SEQ ID NO: 11165 - RNA, 21 nt, synthetic construct
  source 1..21: mol_type = other RNA
  modified_base 1: mod_base = OTHER; note = 2'-O-methylcytidine-3'-phosphorothioate
  modified_base 2: mod_base = OTHER; note = 2'-O-methyladenosine-3'-phosphorothioate
  modified_base 3: mod_base = OTHER; note = 2'-O-methyladenosine-3'-phosphate
  modified_base 4: mod_base = OTHER; note = 2'-O-methylguanosine-3'-phosphate
  modified_base 5: mod_base = OTHER; note = 2'-O-methyladenosine-3'-phosphate
  modified_base 6: mod_base = OTHER; note = 2'-O-docosanyl-cytidine-3'-phosphate
  modified_base 7: mod_base = OTHER; note = 2'-deoxy-2'-fluorocytidine-3'-phosphate
  modified_base 8: mod_base = OTHER; note = 2'-O-methyladenosine-3'-phosphate
  modified_base 9: mod_base = OTHER; note = 2'-deoxy-2'-fluoroadenosine-3'-phosphate
  modified_base 10: mod_base = OTHER; note = 2'-deoxy-2'-fluoroadenosine-3'-phosphate
  modified_base 11: mod_base = OTHER; note = 2'-deoxy-2'-fluoroadenosine-3'-phosphate
  modified_base 12: mod_base = OTHER; note = 2'-O-methylguanosine-3'-phosphate
  modified_base 13: mod_base = OTHER; note = 2'-O-methyluridine-3'-phosphate
  modified_base 14: mod_base = OTHER; note = 2'-O-methylguanosine-3'-phosphate
  modified_base 15: mod_base = OTHER; note = 2'-O-methyluridine-3'-phosphate
  modified_base 16: mod_base = OTHER; note = 2'-O-methyluridine-3'-phosphate
  modified_base 17: mod_base = OTHER; note = 2'-O-methylcytidine-3'-phosphate
  modified_base 18: mod_base = OTHER; note = 2'-O-methyluridine-3'-phosphate
  modified_base 19: mod_base = OTHER; note = 2'-O-methyluridine-3'-phosphorothioate
  modified_base 20: mod_base = OTHER; note = 2'-O-methyluridine-3'-phosphorothioate
  modified_base 21: mod_base = OTHER; note = 2'-O-methyladenosine
caagaccaaaagtgttcttta

SEQ ID NO: 11166 - RNA, 21 nt, synthetic construct
  source 1..21: mol_type = other RNA
  modified_base 1: mod_base = OTHER; note = 2'-O-methyladenosine-3'-phosphorothioate
  modified_base 2: mod_base = OTHER; note = 2'-O-methyladenosine-3'-phosphorothioate
  modified_base 3: mod_base = OTHER; note = 2'-O-methylguanosine-3'-phosphate
  modified_base 4: mod_base = OTHER; note = 2'-O-methyladenosine-3'-phosphate
  modified_base 5: mod_base = OTHER; note = 2'-O-methylcytidine-3'-phosphate
  modified_base 6: mod_base = OTHER; note = 2'-O-docosanyl-cytidine-3'-phosphate
  modified_base 7: mod_base = OTHER; note = 2'-deoxy-2'-fluoroadenosine-3'-phosphate
  modified_base 8: mod_base = OTHER; note = 2'-O-methyladenosine-3'-phosphate
  modified_base 9: mod_base = OTHER; note = 2'-deoxy-2'-fluoroadenosine-3'-phosphate
  modified_base 10: mod_base = OTHER; note = 2'-deoxy-2'-fluoroadenosine-3'-phosphate
  modified_base 11: mod_base = OTHER; note = 2'-deoxy-2'-fluoroguanosine-3'-phosphate
  modified_base 12: mod_base = OTHER; note = 2'-O-methyluridine-3'-phosphate
  modified_base 13: mod_base = OTHER; note = 2'-O-methylguanosine-3'-phosphate
  modified_base 14: mod_base = OTHER; note = 2'-O-methyluridine-3'-phosphate
  modified_base 15: mod_base = OTHER; note = 2'-O-methyluridine-3'-phosphate
  modified_base 16: mod_base = OTHER; note = 2'-O-methylcytidine-3'-phosphate
  modified_base 17: mod_base = OTHER; note = 2'-O-methyluridine-3'-phosphate
  modified_base 18: mod_base = OTHER; note = 2'-O-methyluridine-3'-phosphate
  modified_base 19: mod_base = OTHER; note = 2'-O-methyluridine-3'-phosphorothioate
  modified_base 20: mod_base = OTHER; note = 2'-O-methylguanosine-3'-phosphorothioate
  modified_base 21: mod_base = OTHER; note = 2'-O-methyladenosine
aagaccaaaagtgttctttga

SEQ ID NO: 11167 - RNA, 21 nt, synthetic construct
  source 1..21: mol_type = other RNA
  modified_base 1: mod_base = OTHER; note = 2'-O-methyladenosine-3'-phosphorothioate
  modified_base 2: mod_base = OTHER; note = 2'-O-methylguanosine-3'-phosphorothioate
  modified_base 3: mod_base = OTHER; note = 2'-O-methyladenosine-3'-phosphate
  modified_base 4: mod_base = OTHER; note = 2'-O-methylcytidine-3'-phosphate
  modified_base 5: mod_base = OTHER; note = 2'-O-methylcytidine-3'-phosphate
  modified_base 6: mod_base = OTHER; note = 2'-O-docosanyl-adenosine-3'-phosphate
  modified_base 7: mod_base = OTHER; note = 2'-deoxy-2'-fluoroadenosine-3'-phosphate
  modified_base 8: mod_base = OTHER; note = 2'-O-methyladenosine-3'-phosphate
  modified_base 9: mod_base = OTHER; note = 2'-deoxy-2'-fluoroadenosine-3'-phosphate
  modified_base 10: mod_base = OTHER; note = 2'-deoxy-2'-fluoroguanosine-3'-phosphate
  modified_base 11: mod_base = OTHER; note = 2'-deoxy-2'-fluorouridine-3'-phosphate
  modified_base 12: mod_base = OTHER; note = 2'-O-methylguanosine-3'-phosphate
  modified_base 13: mod_base = OTHER; note = 2'-O-methyluridine-3'-phosphate
  modified_base 14: mod_base = OTHER; note = 2'-O-methyluridine-3'-phosphate
  modified_base 15: mod_base = OTHER; note = 2'-O-methylcytidine-3'-phosphate
  modified_base 16: mod_base = OTHER; note = 2'-O-methyluridine-3'-phosphate
  modified_base 17: mod_base = OTHER; note = 2'-O-methyluridine-3'-phosphate
  modified_base 18: mod_base = OTHER; note = 2'-O-methyluridine-3'-phosphate
  modified_base 19: mod_base = OTHER; note = 2'-O-methylguanosine-3'-phosphorothioate
  modified_base 20: mod_base = OTHER; note = 2'-O-methylguanosine-3'-phosphorothioate
  modified_base 21: mod_base = OTHER; note = 2'-O-methyladenosine
agaccaaaagtgttctttgga

SEQ ID NO: 11168 - RNA, 21 nt, synthetic construct
  source 1..21: mol_type = other RNA
  modified_base 1: mod_base = OTHER; note = 2'-O-methylguanosine-3'-phosphorothioate
  modified_base 2: mod_base = OTHER; note = 2'-O-methyladenosine-3'-phosphorothioate
  modified_base 3: mod_base = OTHER; note = 2'-O-methylcytidine-3'-phosphate
  modified_base 4: mod_base = OTHER; note = 2'-O-methylcytidine-3'-phosphate
  modified_base 5: mod_base = OTHER; note = 2'-O-methyladenosine-3'-phosphate
  modified_base 6: mod_base = OTHER; note = 2'-O-docosanyl-adenosine-3'-phosphate
  modified_base 7: mod_base = OTHER; note = 2'-deoxy-2'-fluoroadenosine-3'-phosphate
  modified_base 8: mod_base = OTHER; note = 2'-O-methyladenosine-3'-phosphate
  modified_base 9: mod_base = OTHER; note = 2'-deoxy-2'-fluoroguanosine-3'-phosphate
  modified_base 10: mod_base = OTHER; note = 2'-deoxy-2'-fluorouridine-3'-phosphate
  modified_base 11: mod_base = OTHER; note = 2'-deoxy-2'-fluoroguanosine-3'-phosphate
  modified_base 12: mod_base = OTHER; note = 2'-O-methyluridine-3'-phosphate
  modified_base 13: mod_base = OTHER; note = 2'-O-methyluridine-3'-phosphate
  modified_base 14: mod_base = OTHER; note = 2'-O-methylcytidine-3'-phosphate
  modified_base 15: mod_base = OTHER; note = 2'-O-methyluridine-3'-phosphate
  modified_base 16: mod_base = OTHER; note = 2'-O-methyluridine-3'-phosphate
  modified_base 17: mod_base = OTHER; note = 2'-O-methyluridine-3'-phosphate
  modified_base 18: mod_base = OTHER; note = 2'-O-methylguanosine-3'-phosphate
  modified_base 19: mod_base = OTHER; note = 2'-O-methylguanosine-3'-phosphorothioate
  modified_base 20: mod_base = OTHER; note = 2'-O-methyluridine-3'-phosphorothioate
  modified_base 21: mod_base = OTHER; note = 2'-O-methyladenosine
gaccaaaagtgttctttggta

SEQ ID NO: 11169 - RNA, 21 nt, synthetic construct
  source 1..21: mol_type = other RNA
  modified_base 1: mod_base = OTHER; note = 2'-O-methyladenosine-3'-phosphorothioate
  modified_base 2: mod_base = OTHER; note = 2'-O-methylcytidine-3'-phosphorothioate
  modified_base 3: mod_base = OTHER; note = 2'-O-methylcytidine-3'-phosphate
  modified_base 4: mod_base = OTHER; note = 2'-O-methyladenosine-3'-phosphate
  modified_base 5: mod_base = OTHER; note = 2'-O-methyladenosine-3'-phosphate
  modified_base 6: mod_base = OTHER; note = 2'-O-docosanyl-adenosine-3'-phosphate
  modified_base 7: mod_base = OTHER; note = 2'-deoxy-2'-fluoroadenosine-3'-phosphate
  modified_base 8: mod_base = OTHER; note = 2'-O-methylguanosine-3'-phosphate
  modified_base 9: mod_base = OTHER; note = 2'-deoxy-2'-fluorouridine-3'-phosphate
  modified_base 10: mod_base = OTHER; note = 2'-deoxy-2'-fluoroguanosine-3'-phosphate
  modified_base 11: mod_base = OTHER; note = 2'-deoxy-2'-fluorouridine-3'-phosphate
  modified_base 12: mod_base = OTHER; note = 2'-O-methyluridine-3'-phosphate
  modified_base 13: mod_base = OTHER; note = 2'-O-methylcytidine-3'-phosphate
  modified_base 14: mod_base = OTHER; note = 2'-O-methyluridine-3'-phosphate
  modified_base 15: mod_base = OTHER; note = 2'-O-methyluridine-3'-phosphate
  modified_base 16: mod_base = OTHER; note = 2'-O-methyluridine-3'-phosphate
  modified_base 17: mod_base = OTHER; note = 2'-O-methylguanosine-3'-phosphate
  modified_base 18: mod_base = OTHER; note = 2'-O-methylguanosine-3'-phosphate
  modified_base 19: mod_base = OTHER; note = 2'-O-methyluridine-3'-phosphorothioate
  modified_base 20: mod_base = OTHER; note = 2'-O-methyladenosine-3'-phosphorothioate
  modified_base 21: mod_base = OTHER; note = 2'-O-methyladenosine
accaaaagtgttctttggtaa

SEQ ID NO: 11170 - RNA, 21 nt, synthetic construct
  source 1..21: mol_type = other RNA
  modified_base 1: mod_base = OTHER; note = 2'-O-methylcytidine-3'-phosphorothioate
  modified_base 2: mod_base = OTHER; note = 2'-O-methylcytidine-3'-phosphorothioate
  modified_base 3: mod_base = OTHER; note = 2'-O-methyladenosine-3'-phosphate
  modified_base 4: mod_base = OTHER; note = 2'-O-methyladenosine-3'-phosphate
  modified_base 5: mod_base = OTHER; note = 2'-O-methyladenosine-3'-phosphate
  modified_base 6: mod_base = OTHER; note = 2'-O-docosanyl-adenosine-3'-phosphate
  modified_base 7: mod_base = OTHER; note = 2'-deoxy-2'-fluoroguanosine-3'-phosphate
  modified_base 8: mod_base = OTHER; note = 2'-O-methyluridine-3'-phosphate
  modified_base 9: mod_base = OTHER; note = 2'-deoxy-2'-fluoroguanosine-3'-phosphate
  modified_base 10: mod_base = OTHER; note = 2'-deoxy-2'-fluorouridine-3'-phosphate
  modified_base 11: mod_base = OTHER; note = 2'-deoxy-2'-fluorouridine-3'-phosphate
  modified_base 12: mod_base = OTHER; note = 2'-O-methylcytidine-3'-phosphate
  modified_base 13: mod_base = OTHER; note = 2'-O-methyluridine-3'-phosphate
  modified_base 14: mod_base = OTHER; note = 2'-O-methyluridine-3'-phosphate
  modified_base 15: mod_base = OTHER; note = 2'-O-methyluridine-3'-phosphate
  modified_base 16: mod_base = OTHER; note = 2'-O-methylguanosine-3'-phosphate
  modified_base 17: mod_base = OTHER; note = 2'-O-methylguanosine-3'-phosphate
  modified_base 18: mod_base = OTHER; note = 2'-O-methyluridine-3'-phosphate
  modified_base 19: mod_base = OTHER; note = 2'-O-methyladenosine-3'-phosphorothioate
  modified_base 20: mod_base = OTHER; note = 2'-O-methylcytidine-3'-phosphorothioate
  modified_base 21: mod_base = OTHER; note = 2'-O-methyladenosine
ccaaaagtgttctttggtaca

SEQ ID NO: 11171 - RNA, 21 nt, synthetic construct
  source 1..21: mol_type = other RNA
  modified_base 1: mod_base = OTHER; note = 2'-O-methylcytidine-3'-phosphorothioate
  modified_base 2: mod_base = OTHER; note = 2'-O-methyladenosine-3'-phosphorothioate
  modified_base 3: mod_base = OTHER; note = 2'-O-methyladenosine-3'-phosphate
  modified_base 4: mod_base = OTHER; note = 2'-O-methyladenosine-3'-phosphate
  modified_base 5: mod_base = OTHER; note = 2'-O-methyladenosine-3'-phosphate
  modified_base 6: mod_base = OTHER; note = 2'-O-docosanyl-guanosine-3'-phosphate
  modified_base 7: mod_base = OTHER; note = 2'-deoxy-2'-fluorouridine-3'-phosphate
  modified_base 8: mod_base = OTHER; note = 2'-O-methylguanosine-3'-phosphate
  modified_base 9: mod_base = OTHER; note = 2'-deoxy-2'-fluorouridine-3'-phosphate
  modified_base 10: mod_base = OTHER; note = 2'-deoxy-2'-fluorouridine-3'-phosphate
  modified_base 11: mod_base = OTHER; note = 2'-deoxy-2'-fluorocytidine-3'-phosphate
  modified_base 12: mod_base = OTHER; note = 2'-O-methyluridine-3'-phosphate
  modified_base 13: mod_base = OTHER; note = 2'-O-methyluridine-3'-phosphate
  modified_base 14: mod_base = OTHER; note = 2'-O-methyluridine-3'-phosphate
  modified_base 15: mod_base = OTHER; note = 2'-O-methylguanosine-3'-phosphate
  modified_base 16: mod_base = OTHER; note = 2'-O-methylguanosine-3'-phosphate
  modified_base 17: mod_base = OTHER; note = 2'-O-methyluridine-3'-phosphate
  modified_base 18: mod_base = OTHER; note = 2'-O-methyladenosine-3'-phosphate
  modified_base 19: mod_base = OTHER; note = 2'-O-methylcytidine-3'-phosphorothioate
  modified_base 20: mod_base = OTHER; note = 2'-O-methyluridine-3'-phosphorothioate
  modified_base 21: mod_base = OTHER; note = 2'-O-methyladenosine
caaaagtgttctttggtacta

SEQ ID NO: 11172 - RNA, 21 nt, synthetic construct
  source 1..21: mol_type = other RNA
  modified_base 1: mod_base = OTHER; note = 2'-O-methyladenosine-3'-phosphorothioate
  modified_base 2: mod_base = OTHER; note = 2'-O-methyladenosine-3'-phosphorothioate
  modified_base 3: mod_base = OTHER; note = 2'-O-methyladenosine-3'-phosphate
  modified_base 4: mod_base = OTHER; note = 2'-O-methyladenosine-3'-phosphate
  modified_base 5: mod_base = OTHER; note = 2'-O-methylguanosine-3'-phosphate
  modified_base 6: mod_base = OTHER; note = 2'-O-docosanyl-uridine-3'-phosphate
  modified_base 7: mod_base = OTHER; note = 2'-deoxy-2'-fluoroguanosine-3'-phosphate
  modified_base 8: mod_base = OTHER; note = 2'-O-methyluridine-3'-phosphate
  modified_base 9: mod_base = OTHER; note = 2'-deoxy-2'-fluorouridine-3'-phosphate
  modified_base 10: mod_base = OTHER; note = 2'-deoxy-2'-fluorocytidine-3'-phosphate
  modified_base 11: mod_base = OTHER; note = 2'-deoxy-2'-fluorouridine-3'-phosphate
  modified_base 12: mod_base = OTHER; note = 2'-O-methyluridine-3'-phosphate
  modified_base 13: mod_base = OTHER; note = 2'-O-methyluridine-3'-phosphate
  modified_base 14: mod_base = OTHER; note = 2'-O-methylguanosine-3'-phosphate
  modified_base 15: mod_base = OTHER; note = 2'-O-methylguanosine-3'-phosphate
  modified_base 16: mod_base = OTHER; note = 2'-O-methyluridine-3'-phosphate
  modified_base 17: mod_base = OTHER; note = 2'-O-methyladenosine-3'-phosphate
  modified_base 18: mod_base = OTHER; note = 2'-O-methylcytidine-3'-phosphate
  modified_base 19: mod_base = OTHER; note = 2'-O-methyluridine-3'-phosphorothioate
  modified_base 20: mod_base = OTHER; note = 2'-O-methyluridine-3'-phosphorothioate
  modified_base 21: mod_base = OTHER; note = 2'-O-methyladenosine
aaaagtgttctttggtactta

SEQ ID NO: 11173 - RNA, 21 nt, synthetic construct
  source 1..21: mol_type = other RNA
  modified_base 1: mod_base = OTHER; note = 2'-O-methyladenosine-3'-phosphorothioate
  modified_base 2: mod_base = OTHER; note = 2'-O-methyladenosine-3'-phosphorothioate
  modified_base 3: mod_base = OTHER; note = 2'-O-methyladenosine-3'-phosphate
  modified_base 4: mod_base = OTHER; note = 2'-O-methylguanosine-3'-phosphate
  modified_base 5: mod_base = OTHER; note = 2'-O-methyluridine-3'-phosphate
  modified_base 6: mod_base = OTHER; note = 2'-O-docosanyl-guanosine-3'-phosphate
  modified_base 7: mod_base = OTHER; note = 2'-deoxy-2'-fluorouridine-3'-phosphate
  modified_base 8: mod_base = OTHER; note = 2'-O-methyluridine-3'-phosphate
  modified_base 9: mod_base = OTHER; note = 2'-deoxy-2'-fluorocytidine-3'-phosphate
  modified_base 10: mod_base = OTHER; note = 2'-deoxy-2'-fluorouridine-3'-phosphate
  modified_base 11: mod_base = OTHER; note = 2'-deoxy-2'-fluorouridine-3'-phosphate
  modified_base 12: mod_base = OTHER; note = 2'-O-methyluridine-3'-phosphate
  modified_base 13: mod_base = OTHER; note = 2'-O-methylguanosine-3'-phosphate
  modified_base 14: mod_base = OTHER; note = 2'-O-methylguanosine-3'-phosphate
  modified_base 15: mod_base = OTHER; note = 2'-O-methyluridine-3'-phosphate
  modified_base 16: mod_base = OTHER; note = 2'-O-methyladenosine-3'-phosphate
  modified_base 17: mod_base = OTHER; note = 2'-O-methylcytidine-3'-phosphate
  modified_base 18: mod_base = OTHER; note = 2'-O-methyluridine-3'-phosphate
  modified_base 19: mod_base = OTHER; note = 2'-O-methyluridine-3'-phosphorothioate
  modified_base 20: mod_base = OTHER; note = 2'-O-methylguanosine-3'-phosphorothioate
  modified_base 21: mod_base = OTHER; note = 2'-O-methyladenosine
aaagtgttctttggtacttga

SEQ ID NO: 11174 - RNA, 21 nt, synthetic construct
  source 1..21: mol_type = other RNA
  modified_base 1: mod_base = OTHER; note = 2'-O-methyladenosine-3'-phosphorothioate
  modified_base 2: mod_base = OTHER; note = 2'-O-methyladenosine-3'-phosphorothioate
  modified_base 3: mod_base = OTHER; note = 2'-O-methylguanosine-3'-phosphate
  modified_base 4: mod_base = OTHER; note = 2'-O-methyluridine-3'-phosphate
  modified_base 5: mod_base = OTHER; note = 2'-O-methylguanosine-3'-phosphate
  modified_base 6: mod_base = OTHER; note = 2'-O-docosanyl-uridine-3'-phosphate
  modified_base 7: mod_base = OTHER; note = 2'-deoxy-2'-fluorouridine-3'-phosphate
  modified_base 8: mod_base = OTHER; note = 2'-O-methylcytidine-3'-phosphate
  modified_base 9: mod_base = OTHER; note = 2'-deoxy-2'-fluorouridine-3'-phosphate
  modified_base 10: mod_base = OTHER; note = 2'-deoxy-2'-fluorouridine-3'-phosphate
  modified_base 11: mod_base = OTHER; note = 2'-deoxy-2'-fluorouridine-3'-phosphate
  modified_base 12: mod_base = OTHER; note = 2'-O-methylguanosine-3'-phosphate
  modified_base 13: mod_base = OTHER; note = 2'-O-methylguanosine-3'-phosphate
  modified_base 14: mod_base = OTHER; note = 2'-O-methyluridine-3'-phosphate
  modified_base 15: mod_base = OTHER; note = 2'-O-methyladenosine-3'-phosphate
  modified_base 16: mod_base = OTHER; note = 2'-O-methylcytidine-3'-phosphate
  modified_base 17: mod_base = OTHER; note = 2'-O-methyluridine-3'-phosphate
  modified_base 18: mod_base = OTHER; note = 2'-O-methyluridine-3'-phosphate
  modified_base 19: mod_base = OTHER; note = 2'-O-methylguanosine-3'-phosphorothioate
  modified_base 20: mod_base = OTHER; note = 2'-O-methylcytidine-3'-phosphorothioate
  modified_base 21: mod_base = OTHER; note = 2'-O-methyladenosine
aagtgttctttggtacttgca

SEQ ID NO: 11175 - RNA, 21 nt, synthetic construct
  source 1..21: mol_type = other RNA
  modified_base 1: mod_base = OTHER; note = 2'-O-methyluridine-3'-phosphorothioate
  modified_base 2: mod_base = OTHER; note = 2'-O-methylcytidine-3'-phosphorothioate
  modified_base 3: mod_base = OTHER; note = 2'-O-methyluridine-3'-phosphate
  modified_base 4: mod_base = OTHER; note = 2'-O-methyluridine-3'-phosphate
  modified_base 5: mod_base = OTHER; note = 2'-O-methyluridine-3'-phosphate
  modified_base 6: mod_base = OTHER; note = 2'-O-docosanyl-guanosine-3'-phosphate
  modified_base 7: mod_base = OTHER; note = 2'-deoxy-2'-fluoroguanosine-3'-phosphate
  modified_base 8: mod_base = OTHER; note = 2'-O-methyluridine-3'-phosphate
  modified_base 9: mod_base = OTHER; note = 2'-deoxy-2'-fluoroadenosine-3'-phosphate
  modified_base 10: mod_base = OTHER; note = 2'-deoxy-2'-fluorocytidine-3'-phosphate
  modified_base 11: mod_base = OTHER; note = 2'-deoxy-2'-fluorouridine-3'-phosphate
  modified_base 12: mod_base = OTHER; note = 2'-O-methyluridine-3'-phosphate
  modified_base 13: mod_base = OTHER; note = 2'-O-methylguanosine-3'-phosphate
  modified_base 14: mod_base = OTHER; note = 2'-O-methylcytidine-3'-phosphate
  modified_base 15: mod_base = OTHER; note = 2'-O-methyluridine-3'-phosphate
  modified_base 16: mod_base = OTHER; note = 2'-O-methyluridine-3'-phosphate
  modified_base 17: mod_base = OTHER; note = 2'-O-methyladenosine-3'-phosphate
  modified_base 18: mod_base = OTHER; note = 2'-O-methyluridine-3'-phosphate
  modified_base 19: mod_base = OTHER; note = 2'-O-methyladenosine-3'-phosphorothioate
  modified_base 20: mod_base = OTHER; note = 2'-O-methyladenosine-3'-phosphorothioate
  modified_base 21: mod_base = OTHER; note = 2'-O-methyladenosine
tctttggtacttgcttataaa

SEQ ID NO: 11176 - RNA, 21 nt, synthetic construct
  source 1..21: mol_type = other RNA
  modified_base 1: mod_base = OTHER; note = 2'-O-methylcytidine-3'-phosphorothioate
  modified_base 2: mod_base = OTHER; note = 2'-O-methyluridine-3'-phosphorothioate
  modified_base 3: mod_base = OTHER; note = 2'-O-methyluridine-3'-phosphate
  modified_base 4: mod_base = OTHER; note = 2'-O-methyluridine-3'-phosphate
  modified_base 5: mod_base = OTHER; note = 2'-O-methylguanosine-3'-phosphate
  modified_base 6: mod_base = OTHER; note = 2'-O-docosanyl-guanosine-3'-phosphate
  modified_base 7: mod_base = OTHER; note = 2'-deoxy-2'-fluorouridine-3'-phosphate
  modified_base 8: mod_base = OTHER; note = 2'-O-methyladenosine-3'-phosphate
  modified_base 9: mod_base = OTHER; note = 2'-deoxy-2'-fluorocytidine-3'-phosphate
  modified_base 10: mod_base = OTHER; note = 2'-deoxy-2'-fluorouridine-3'-phosphate
  modified_base 11: mod_base = OTHER; note = 2'-deoxy-2'-fluorouridine-3'-phosphate
  modified_base 12: mod_base = OTHER; note = 2'-O-methylguanosine-3'-phosphate
  modified_base 13: mod_base = OTHER; note = 2'-O-methylcytidine-3'-phosphate
  modified_base 14: mod_base = OTHER; note = 2'-O-methyluridine-3'-phosphate
  modified_base 15: mod_base = OTHER; note = 2'-O-methyluridine-3'-phosphate
  modified_base 16: mod_base = OTHER; note = 2'-O-methyladenosine-3'-phosphate
  modified_base 17: mod_base = OTHER; note = 2'-O-methyluridine-3'-phosphate
  modified_base 18: mod_base = OTHER; note = 2'-O-methyladenosine-3'-phosphate
  modified_base 19: mod_base = OTHER; note = 2'-O-methyladenosine-3'-phosphorothioate
  modified_base 20: mod_base = OTHER; note = 2'-O-methyladenosine-3'-phosphorothioate
  modified_base 21: mod_base = OTHER; note = 2'-O-methyladenosine
ctttggtacttgcttataaaa

SEQ ID NO: 11177 - RNA, 21 nt, synthetic construct
  source 1..21: mol_type = other RNA
  modified_base 1: mod_base = OTHER; note = 2'-O-methyluridine-3'-phosphorothioate
  modified_base 2: mod_base = OTHER; note = 2'-O-methyluridine-3'-phosphorothioate
  modified_base 3: mod_base = OTHER; note = 2'-O-methylguanosine-3'-phosphate
  modified_base 4: mod_base = OTHER; note = 2'-O-methylguanosine-3'-phosphate
  modified_base 5: mod_base = OTHER; note = 2'-O-methyluridine-3'-phosphate
  modified_base 6: mod_base = OTHER; note = 2'-O-docosanyl-adenosine-3'-phosphate
  modified_base 7: mod_base = OTHER; note = 2'-deoxy-2'-fluorocytidine-3'-phosphate
  modified_base 8: mod_base = OTHER; note = 2'-O-methyluridine-3'-phosphate
  modified_base 9: mod_base = OTHER; note = 2'-deoxy-2'-fluorouridine-3'-phosphate
  modified_base 10: mod_base = OTHER; note = 2'-deoxy-2'-fluoroguanosine-3'-phosphate
  modified_base 11: mod_base = OTHER; note = 2'-deoxy-2'-fluorocytidine-3'-phosphate
  modified_base 12: mod_base = OTHER; note = 2'-O-methyluridine-3'-phosphate
  modified_base 13: mod_base = OTHER; note = 2'-O-methyluridine-3'-phosphate
  modified_base 14: mod_base = OTHER; note = 2'-O-methyladenosine-3'-phosphate
  modified_base 15: mod_base = OTHER; note = 2'-O-methyluridine-3'-phosphate
  modified_base 16: mod_base = OTHER; note = 2'-O-methyladenosine-3'-phosphate
  modified_base 17: mod_base = OTHER; note = 2'-O-methyladenosine-3'-phosphate
  modified_base 18: mod_base = OTHER; note = 2'-O-methyladenosine-3'-phosphate
  modified_base 19: mod_base = OTHER; note = 2'-O-methylguanosine-3'-phosphorothioate
  modified_base 20: mod_base = OTHER; note = 2'-O-methyluridine-3'-phosphorothioate
  modified_base 21: mod_base = OTHER; note = 2'-O-methyladenosine
ttggtacttgcttataaagta

SEQ ID NO: 11178 - RNA, 21 nt, synthetic construct
  source 1..21: mol_type = other RNA
  modified_base 1: mod_base = OTHER; note = 2'-O-methyluridine-3'-phosphorothioate
  modified_base 2: mod_base = OTHER; note = 2'-O-methylguanosine-3'-phosphorothioate
  modified_base 3: mod_base = OTHER; note = 2'-O-methylguanosine-3'-phosphate
  modified_base 4: mod_base = OTHER; note = 2'-O-methyluridine-3'-phosphate
  modified_base 5: mod_base = OTHER; note = 2'-O-methyladenosine-3'-phosphate
  modified_base 6: mod_base = OTHER; note = 2'-O-docosanyl-cytidine-3'-phosphate
  modified_base 7: mod_base = OTHER; note = 2'-deoxy-2'-fluorouridine-3'-phosphate
  modified_base 8: mod_base = OTHER; note = 2'-O-methyluridine-3'-phosphate
  modified_base 9: mod_base = OTHER; note = 2'-deoxy-2'-fluoroguanosine-3'-phosphate
  modified_base 10: mod_base = OTHER; note = 2'-deoxy-2'-fluorocytidine-3'-phosphate
  modified_base 11: mod_base = OTHER; note = 2'-deoxy-2'-fluorouridine-3'-phosphate
  modified_base 12: mod_base = OTHER; note = 2'-O-methyluridine-3'-phosphate
  modified_base 13: mod_base = OTHER; note = 2'-O-methyladenosine-3'-phosphate
  modified_base 14: mod_base = OTHER; note = 2'-O-methyluridine-3'-phosphate
  modified_base 15: mod_base = OTHER; note = 2'-O-methyladenosine-3'-phosphate
  modified_base 16: mod_base = OTHER; note = 2'-O-methyladenosine-3'-phosphate
  modified_base 17: mod_base = OTHER; note = 2'-O-methyladenosine-3'-phosphate
  modified_base 18: mod_base = OTHER; note = 2'-O-methylguanosine-3'-phosphate
  modified_base 19: mod_base = OTHER; note = 2'-O-methyluridine-3'-phosphorothioate
  modified_base 20: mod_base = OTHER; note = 2'-O-methylguanosine-3'-phosphorothioate
  modified_base 21: mod_base = OTHER; note = 2'-O-methyladenosine
tggtacttgcttataaagtga

SEQ ID NO: 11179 - RNA, 21 nt, synthetic construct
  source 1..21: mol_type = other RNA
  modified_base 1: mod_base = OTHER; note = 2'-O-methyluridine-3'-phosphorothioate
  modified_base 2: mod_base = OTHER; note = 2'-O-methyluridine-3'-phosphorothioate
  modified_base 3: mod_base = OTHER; note = 2'-O-methylguanosine-3'-phosphate
  modified_base 4: mod_base = OTHER; note = 2'-O-methylcytidine-3'-phosphate
  modified_base 5: mod_base = OTHER; note = 2'-O-methyluridine-3'-phosphate
  modified_base 6: mod_base = OTHER; note = 2'-O-docosanyl-uridine-3'-phosphate
  modified_base 7: mod_base = OTHER; note = 2'-deoxy-2'-fluoroadenosine-3'-phosphate
  modified_base 8: mod_base = OTHER; note = 2'-O-methyluridine-3'-phosphate
  modified_base 9: mod_base = OTHER; note = 2'-deoxy-2'-fluoroadenosine-3'-phosphate
  modified_base 10: mod_base = OTHER; note = 2'-deoxy-2'-fluoroadenosine-3'-phosphate
  modified_base 11: mod_base = OTHER; note = 2'-deoxy-2'-fluoroadenosine-3'-phosphate
  modified_base 12: mod_base = OTHER; note = 2'-O-methylguanosine-3'-phosphate
  modified_base 13: mod_base = OTHER; note = 2'-O-methyluridine-3'-phosphate
  modified_base 14: mod_base = OTHER; note = 2'-O-methylguanosine-3'-phosphate
  modified_base 15: mod_base = OTHER; note = 2'-O-methyladenosine-3'-phosphate
  modified_base 16: mod_base = OTHER; note = 2'-O-methyluridine-3'-phosphate
  modified_base 17: mod_base = OTHER; note = 2'-O-methyladenosine-3'-phosphate
  modified_base 18: mod_base = OTHER; note = 2'-O-methylguanosine-3'-phosphate
  modified_base 19: mod_base = OTHER; note = 2'-O-methyluridine-3'-phosphorothioate
  modified_base 20: mod_base = OTHER; note = 2'-O-methyladenosine-3'-phosphorothioate
  modified_base 21: mod_base = OTHER; note = 2'-O-methyladenosine
ttgcttataaagtgatagtaa

SEQ ID NO: 11180 - RNA, 21 nt, synthetic construct
  source 1..21: mol_type = other RNA
  modified_base 1: mod_base = OTHER; note = 2'-O-methyladenosine-3'-phosphorothioate
  modified_base 2: mod_base = OTHER; note = 2'-O-methylcytidine-3'-phosphorothioate
  modified_base 3: mod_base = OTHER; note = 2'-O-methyladenosine-3'-phosphate
  modified_base 4: mod_base = OTHER; note = 2'-O-methyluridine-3'-phosphate
  modified_base 5: mod_base = OTHER; note = 2'-O-methylguanosine-3'-phosphate
  modified_base 6: mod_base = OTHER; note = 2'-O-docosanyl-uridine-3'-phosphate
  modified_base 7: mod_base = OTHER; note = 2'-deoxy-2'-fluorouridine-3'-phosphate
  modified_base 8: mod_base = OTHER; note = 2'-O-methyladenosine-3'-phosphate
  modified_base 9: mod_base = OTHER; note = 2'-deoxy-2'-fluoroguanosine-3'-phosphate
  modified_base 10: mod_base = OTHER; note = 2'-deoxy-2'-fluorocytidine-3'-phosphate
  modified_base 11: mod_base = OTHER; note = 2'-deoxy-2'-fluoroadenosine-3'-phosphate
  modified_base 12: mod_base = OTHER; note = 2'-O-methyluridine-3'-phosphate
  modified_base 13: mod_base = OTHER; note = 2'-O-methyladenosine-3'-phosphate
  modified_base 14: mod_base = OTHER; note = 2'-O-methyluridine-3'-phosphate
  modified_base 15: mod_base = OTHER; note = 2'-O-methyladenosine-3'-phosphate
  modified_base 16: mod_base = OTHER; note = 2'-O-methyladenosine-3'-phosphate
  modified_base 17: mod_base = OTHER; note = 2'-O-methyluridine-3'-phosphate
  modified_base 18: mod_base = OTHER; note = 2'-O-methylguanosine-3'-phosphate
  modified_base 19: mod_base = OTHER; note = 2'-O-methyluridine-3'-phosphorothioate
  modified_base 20: mod_base = OTHER; note = 2'-O-methyladenosine-3'-phosphorothioate
  modified_base 21: mod_base = OTHER; note = 2'-O-methyladenosine
acatgttagcatataatgtaa

SEQ ID NO: 11181 - RNA, 21 nt, synthetic construct
  source 1..21: mol_type = other RNA
  modified_base 1: mod_base = OTHER; note = 2'-O-methylcytidine-3'-phosphorothioate
  modified_base 2: mod_base = OTHER; note = 2'-O-methyluridine-3'-phosphorothioate
  modified_base 3: mod_base = OTHER; note = 2'-O-methyluridine-3'-phosphate
  modified_base 4: mod_base = OTHER; note = 2'-O-methyladenosine-3'-phosphate
  modified_base 5: mod_base = OTHER; note = 2'-O-methyluridine-3'-phosphate
  modified_base 6: mod_base = OTHER; note = 2'-O-docosanyl-adenosine-3'-phosphate
  modified_base 7: mod_base = OTHER; note = 2'-deoxy-2'-fluoroadenosine-3'-phosphate
  modified_base 8: mod_base = OTHER; note = 2'-O-methyladenosine-3'-phosphate
  modified_base 9: mod_base = OTHER; note = 2'-deoxy-2'-fluoroguanosine-3'-phosphate
  modified_base 10: mod_base = OTHER; note = 2'-deoxy-2'-fluorouridine-3'-phosphate
  modified_base 11: mod_base = OTHER; note = 2'-deoxy-2'-fluoroguanosine-3'-phosphate
  modified_base 12: mod_base = OTHER; note = 2'-O-methyladenosine-3'-phosphate
  modified_base 13: mod_base = OTHER; note = 2'-O-methyluridine-3'-phosphate
  modified_base 14: mod_base = OTHER; note = 2'-O-methyladenosine-3'-phosphate
  modified_base 15: mod_base = OTHER; note = 2'-O-methylguanosine-3'-phosphate
  modified_base 16: mod_base = OTHER; note = 2'-O-methyluridine-3'-phosphate
  modified_base 17: mod_base = OTHER; note = 2'-O-methyladenosine-3'-phosphate
  modified_base 18: mod_base = OTHER; note = 2'-O-methylcytidine-3'-phosphate
  modified_base 19: mod_base = OTHER; note = 2'-O-methyladenosine-3'-phosphorothioate
  modified_base 20: mod_base = OTHER; note = 2'-O-methyluridine-3'-phosphorothioate
  modified_base 21: mod_base = OTHER; note = 2'-O-methyladenosine
cttataaagtgatagtacata

SEQ ID NO: 11182 - RNA, 21 nt, synthetic construct
  source 1..21: mol_type = other RNA
  modified_base 1: mod_base = OTHER; note = 2'-O-methyluridine-3'-phosphorothioate
  modified_base 2: mod_base = OTHER; note = 2'-O-methyluridine-3'-phosphorothioate
  modified_base 3: mod_base = OTHER; note = 2'-O-methyladenosine-3'-phosphate
  modified_base 4: mod_base = OTHER; note = 2'-O-methyluridine-3'-phosphate
  modified_base 5: mod_base = OTHER; note = 2'-O-methyladenosine-3'-phosphate
  modified_base 6: mod_base = OTHER; note = 2'-O-docosanyl-adenosine-3'-phosphate
  modified_base 7: mod_base = OTHER; note = 2'-deoxy-2'-fluoroadenosine-3'-phosphate
  modified_base 8: mod_base = OTHER; note = 2'-O-methylguanosine-3'-phosphate
  modified_base 9: mod_base = OTHER; note = 2'-deoxy-2'-fluorouridine-3'-phosphate
  modified_base 10: mod_base = OTHER; note = 2'-deoxy-2'-fluoroguanosine-3'-phosphate
  modified_base 11: mod_base = OTHER; note = 2'-deoxy-2'-fluoroadenosine-3'-phosphate
  modified_base 12: mod_base = OTHER; note = 2'-O-methyluridine-3'-phosphate
  modified_base 13: mod_base = OTHER; note = 2'-O-methyladenosine-3'-phosphate
  modified_base 14: mod_base = OTHER; note = 2'-O-methylguanosine-3'-phosphate
  modified_base 15: mod_base = OTHER; note = 2'-O-methyluridine-3'-phosphate
  modified_base 16: mod_base = OTHER; note = 2'-O-methyladenosine-3'-phosphate
  modified_base 17: mod_base = OTHER; note = 2'-O-methylcytidine-3'-phosphate
  modified_base 18: mod_base = OTHER; note = 2'-O-methyladenosine-3'-phosphate
  modified_base 19: mod_base = OTHER; note = 2'-O-methyluridine-3'-phosphorothioate
  modified_base 20: mod_base = OTHER; note = 2'-O-methylguanosine-3'-phosphorothioate
  modified_base 21: mod_base = OTHER; note = 2'-O-methyladenosine
ttataaagtgatagtacatga

SEQ ID NO: 11183 - RNA, 21 nt, synthetic construct
  source 1..21: mol_type = other RNA
  modified_base 1: mod_base = OTHER; note = 2'-O-methyluridine-3'-phosphorothioate
  modified_base 2: mod_base = OTHER; note = 2'-O-methyladenosine-3'-phosphorothioate
  modified_base 3: mod_base = OTHER; note = 2'-O-methyluridine-3'-phosphate
  modified_base 4: mod_base = OTHER; note = 2'-O-methyladenosine-3'-phosphate
  modified_base 5: mod_base = OTHER; note = 2'-O-methyladenosine-3'-phosphate
  modified_base 6: mod_base = OTHER; note = 2'-O-docosanyl-adenosine-3'-phosphate
  modified_base 7: mod_base = OTHER; note = 2'-deoxy-2'-fluoroguanosine-3'-phosphate
  modified_base 8: mod_base = OTHER; note = 2'-O-methyluridine-3'-phosphate
  modified_base 9: mod_base = OTHER; note = 2'-deoxy-2'-fluoroguanosine-3'-phosphate
  modified_base 10: mod_base = OTHER; note = 2'-deoxy-2'-fluoroadenosine-3'-phosphate
  modified_base 11: mod_base = OTHER; note = 2'-deoxy-2'-fluorouridine-3'-phosphate
  modified_base 12: mod_base = OTHER; note = 2'-O-methyladenosine-3'-phosphate
  modified_base 13: mod_base = OTHER; note = 2'-O-methylguanosine-3'-phosphate
  modified_base 14: mod_base = OTHER; note = 2'-O-methyluridine-3'-phosphate
  modified_base 15: mod_base = OTHER; note = 2'-O-methyladenosine-3'-phosphate
  modified_base 16: mod_base = OTHER; note = 2'-O-methylcytidine-3'-phosphate
  modified_base 17: mod_base = OTHER; note = 2'-O-methyladenosine-3'-phosphate
  modified_base 18: mod_base = OTHER; note = 2'-O-methyluridine-3'-phosphate
  modified_base 19: mod_base = OTHER; note = 2'-O-methylguanosine-3'-phosphorothioate
  modified_base 20: mod_base = OTHER; note = 2'-O-methyluridine-3'-phosphorothioate
  modified_base 21: mod_base = OTHER; note = 2'-O-methyladenosine
tataaagtgatagtacatgta

SEQ ID NO: 11184 - RNA, 21 nt, synthetic construct
  source 1..21: mol_type = other RNA
  modified_base 1: mod_base = OTHER; note = 2'-O-methyladenosine-3'-phosphorothioate
  modified_base 2: mod_base = OTHER; note = 2'-O-methyladenosine-3'-phosphorothioate
  modified_base 3: mod_base = OTHER; note = 2'-O-methyladenosine-3'-phosphate
  modified_base 4: mod_base = OTHER; note = 2'-O-methylguanosine-3'-phosphate
  modified_base 5: mod_base = OTHER; note = 2'-O-methyluridine-3'-phosphate
  modified_base 6: mod_base = OTHER; note = 2'-O-docosanyl-guanosine-3'-phosphate
  modified_base 7: mod_base = OTHER; note = 2'-deoxy-2'-fluoroadenosine-3'-phosphate
  modified_base 8: mod_base = OTHER; note = 2'-O-methyluridine-3'-phosphate
  modified_base 9: mod_base = OTHER; note = 2'-deoxy-2'-fluoroadenosine-3'-phosphate
  modified_base 10: mod_base = OTHER; note = 2'-deoxy-2'-fluoroguanosine-3'-phosphate
  modified_base 11: mod_base = OTHER; note = 2'-deoxy-2'-fluorouridine-3'-phosphate
  modified_base 12: mod_base = OTHER; note = 2'-O-methyladenosine-3'-phosphate
  modified_base 13: mod_base = OTHER; note = 2'-O-methylcytidine-3'-phosphate
  modified_base 14: mod_base = OTHER; note = 2'-O-methyladenosine-3'-phosphate
  modified_base 15: mod_base = OTHER; note = 2'-O-methyluridine-3'-phosphate
  modified_base 16: mod_base = OTHER; note = 2'-O-methylguanosine-3'-phosphate
  modified_base 17: mod_base = OTHER; note = 2'-O-methyluridine-3'-phosphate
  modified_base 18: mod_base = OTHER; note = 2'-O-methyluridine-3'-phosphate
  modified_base 19: mod_base = OTHER; note = 2'-O-methyladenosine-3'-phosphorothioate
  modified_base 20: mod_base = OTHER; note = 2'-O-methylguanosine-3'-phosphorothioate
  modified_base 21: mod_base = OTHER; note = 2'-O-methyladenosine
aaagtgatagtacatgttaga

SEQ ID NO: 11185 - RNA, 21 nt, synthetic construct
  source 1..21: mol_type = other RNA
  modified_base 1: mod_base = OTHER; note = 2'-O-methyladenosine-3'-phosphorothioate
  modified_base 2: mod_base = OTHER; note = 2'-O-methyladenosine-3'-phosphorothioate
  modified_base 3: mod_base = OTHER; note = 2'-O-methylguanosine-3'-phosphate
  modified_base 4: mod_base = OTHER; note = 2'-O-methyluridine-3'-phosphate
  modified_base 5: mod_base = OTHER; note = 2'-O-methylguanosine-3'-phosphate
  modified_base 6: mod_base = OTHER; note = 2'-O-docosanyl-adenosine-3'-phosphate
  modified_base 7: mod_base = OTHER; note = 2'-deoxy-2'-fluorouridine-3'-phosphate
  modified_base 8: mod_base = OTHER; note = 2'-O-methyladenosine-3'-phosphate
  modified_base 9: mod_base = OTHER; note = 2'-deoxy-2'-fluoroguanosine-3'-phosphate
  modified_base 10: mod_base = OTHER; note = 2'-deoxy-2'-fluorouridine-3'-phosphate
  modified_base 11: mod_base = OTHER; note = 2'-deoxy-2'-fluoroadenosine-3'-phosphate
  modified_base 12: mod_base = OTHER; note = 2'-O-methylcytidine-3'-phosphate
  modified_base 13: mod_base = OTHER; note = 2'-O-methyladenosine-3'-phosphate
  modified_base 14: mod_base = OTHER; note = 2'-O-methyluridine-3'-phosphate
  modified_base 15: mod_base = OTHER; note = 2'-O-methylguanosine-3'-phosphate
  modified_base 16: mod_base = OTHER; note = 2'-O-methyluridine-3'-phosphate
  modified_base 17: mod_base = OTHER; note = 2'-O-methyluridine-3'-phosphate
  modified_base 18: mod_base = OTHER; note = 2'-O-methyladenosine-3'-phosphate
  modified_base 19: mod_base = OTHER; note = 2'-O-methylguanosine-3'-phosphorothioate
  modified_base 20: mod_base = OTHER; note = 2'-O-methylcytidine-3'-phosphorothioate
  modified_base 21: mod_base = OTHER; note = 2'-O-methyladenosine
aagtgatagtacatgttagca

SEQ ID NO: 11186 - RNA, 21 nt, synthetic construct
  source 1..21: mol_type = other RNA
  modified_base 1: mod_base = OTHER; note = 2'-O-methyladenosine-3'-phosphorothioate
  modified_base 2: mod_base = OTHER; note = 2'-O-methylguanosine-3'-phosphorothioate
  modified_base 3: mod_base = OTHER; note = 2'-O-methyluridine-3'-phosphate
  modified_base 4: mod_base = OTHER; note = 2'-O-methylguanosine-3'-phosphate
  modified_base 5: mod_base = OTHER; note = 2'-O-methyladenosine-3'-phosphate
  modified_base 6: mod_base = OTHER; note = 2'-O-docosanyl-uridine-3'-phosphate
  modified_base 7: mod_base = OTHER; note = 2'-deoxy-2'-fluoroadenosine-3'-phosphate
  modified_base 8: mod_base = OTHER; note = 2'-O-methylguanosine-3'-phosphate
  modified_base 9: mod_base = OTHER; note = 2'-deoxy-2'-fluorouridine-3'-phosphate
  modified_base 10: mod_base = OTHER; note = 2'-deoxy-2'-fluoroadenosine-3'-phosphate
  modified_base 11: mod_base = OTHER; note = 2'-deoxy-2'-fluorocytidine-3'-phosphate
  modified_base 12: mod_base = OTHER; note = 2'-O-methyladenosine-3'-phosphate
  modified_base 13: mod_base = OTHER; note = 2'-O-methyluridine-3'-phosphate
  modified_base 14: mod_base = OTHER; note = 2'-O-methylguanosine-3'-phosphate
  modified_base 15: mod_base = OTHER; note = 2'-O-methyluridine-3'-phosphate
  modified_base 16: mod_base = OTHER; note = 2'-O-methyluridine-3'-phosphate
  modified_base 17: mod_base = OTHER; note = 2'-O-methyladenosine-3'-phosphate
  modified_base 18: mod_base = OTHER; note = 2'-O-methylguanosine-3'-phosphate
  modified_base 19: mod_base = OTHER; note = 2'-O-methylcytidine-3'-phosphorothioate
  modified_base 20: mod_base = OTHER; note = 2'-O-methyladenosine-3'-phosphorothioate
  modified_base 21: mod_base = OTHER; note = 2'-O-methyladenosine
agtgatagtacatgttagcaa

SEQ ID NO: 11187 - RNA, 21 nt, synthetic construct
  source 1..21: mol_type = other RNA
  modified_base 1: mod_base = OTHER; note = 2'-O-methylguanosine-3'-phosphorothioate
  modified_base 2: mod_base = OTHER; note = 2'-O-methyluridine-3'-phosphorothioate
  modified_base 3: mod_base = OTHER; note = 2'-O-methylguanosine-3'-phosphate
  modified_base 4: mod_base = OTHER; note = 2'-O-methyladenosine-3'-phosphate
  modified_base 5: mod_base = OTHER; note = 2'-O-methyluridine-3'-phosphate
  modified_base 6: mod_base = OTHER; note = 2'-O-docosanyl-adenosine-3'-phosphate
  modified_base 7: mod_base = OTHER; note = 2'-deoxy-2'-fluoroguanosine-3'-phosphate
  modified_base 8: mod_base = OTHER; note = 2'-O-methyluridine-3'-phosphate
  modified_base 9: mod_base = OTHER; note = 2'-deoxy-2'-fluoroadenosine-3'-phosphate
  modified_base 10: mod_base = OTHER; note = 2'-deoxy-2'-fluorocytidine-3'-phosphate
  modified_base 11: mod_base = OTHER; note = 2'-deoxy-2'-fluoroadenosine-3'-phosphate
  modified_base 12: mod_base = OTHER; note = 2'-O-methyluridine-3'-phosphate
  modified_base 13: mod_base = OTHER; note = 2'-O-methylguanosine-3'-phosphate
  modified_base 14: mod_base = OTHER; note = 2'-O-methyluridine-3'-phosphate
  modified_base 15: mod_base = OTHER; note = 2'-O-methyluridine-3'-phosphate
  modified_base 16: mod_base = OTHER; note = 2'-O-methyladenosine-3'-phosphate
  modified_base 17: mod_base = OTHER; note = 2'-O-methylguanosine-3'-phosphate
  modified_base 18: mod_base = OTHER; note = 2'-O-methylcytidine-3'-phosphate
  modified_base 19: mod_base = OTHER; note = 2'-O-methyladenosine-3'-phosphorothioate
  modified_base 20: mod_base = OTHER; note = 2'-O-methyluridine-3'-phosphorothioate
  modified_base 21: mod_base = OTHER; note = 2'-O-methyladenosine
gtgatagtacatgttagcata

SEQ ID NO: 11188 - RNA, 21 nt, synthetic construct
  source 1..21: mol_type = other RNA
  modified_base 1: mod_base = OTHER; note = 2'-O-methyluridine-3'-phosphorothioate
  modified_base 2: mod_base = OTHER; note = 2'-O-methylguanosine-3'-phosphorothioate
  modified_base 3: mod_base = OTHER; note = 2'-O-methyladenosine-3'-phosphate
  modified_base 4: mod_base = OTHER; note = 2'-O-methyluridine-3'-phosphate
  modified_base 5: mod_base = OTHER; note = 2'-O-methyladenosine-3'-phosphate
  modified_base 6: mod_base = OTHER; note = 2'-O-docosanyl-guanosine-3'-phosphate
  modified_base 7: mod_base = OTHER; note = 2'-deoxy-2'-fluorouridine-3'-phosphate
  modified_base 8: mod_base = OTHER; note = 2'-O-methyladenosine-3'-phosphate
  modified_base 9: mod_base = OTHER; note = 2'-deoxy-2'-fluorocytidine-3'-phosphate
  modified_base 10: mod_base = OTHER; note = 2'-deoxy-2'-fluoroadenosine-3'-phosphate
  modified_base 11: mod_base = OTHER; note = 2'-deoxy-2'-fluorouridine-3'-phosphate
  modified_base 12: mod_base = OTHER; note = 2'-O-methylguanosine-3'-phosphate
  modified_base 13: mod_base = OTHER; note = 2'-O-methyluridine-3'-phosphate
  modified_base 14: mod_base = OTHER; note = 2'-O-methyluridine-3'-phosphate
  modified_base 15: mod_base = OTHER; note = 2'-O-methyladenosine-3'-phosphate
  modified_base 16: mod_base = OTHER; note = 2'-O-methylguanosine-3'-phosphate
  modified_base 17: mod_base = OTHER; note = 2'-O-methylcytidine-3'-phosphate
  modified_base 18: mod_base = OTHER; note = 2'-O-methyladenosine-3'-phosphate
  modified_base 19: mod_base = OTHER; note = 2'-O-methyluridine-3'-phosphorothioate
  modified_base 20: mod_base = OTHER; note = 2'-O-methyladenosine-3'-phosphorothioate
  modified_base 21: mod_base = OTHER; note = 2'-O-methyladenosine
tgatagtacatgttagcataa

SEQ ID NO: 11189 - RNA, 21 nt, synthetic construct
  source 1..21: mol_type = other RNA
  modified_base 1: mod_base = OTHER; note = 2'-O-methylguanosine-3'-phosphorothioate
  modified_base 2: mod_base = OTHER; note = 2'-O-methyladenosine-3'-phosphorothioate
  modified_base 3: mod_base = OTHER; note = 2'-O-methyluridine-3'-phosphate
  modified_base 4: mod_base = OTHER; note = 2'-O-methyladenosine-3'-phosphate
  modified_base 5: mod_base = OTHER; note = 2'-O-methylguanosine-3'-phosphate
  modified_base 6: mod_base = OTHER; note = 2'-O-docosanyl-uridine-3'-phosphate
  modified_base 7: mod_base = OTHER; note = 2'-deoxy-2'-fluoroadenosine-3'-phosphate
  modified_base 8: mod_base = OTHER; note = 2'-O-methylcytidine-3'-phosphate
  modified_base 9: mod_base = OTHER; note = 2'-deoxy-2'-fluoroadenosine-3'-phosphate
  modified_base 10: mod_base = OTHER; note = 2'-deoxy-2'-fluorouridine-3'-phosphate
  modified_base 11: mod_base = OTHER; note = 2'-deoxy-2'-fluoroguanosine-3'-phosphate
  modified_base 12: mod_base = OTHER; note = 2'-O-methyluridine-3'-phosphate
  modified_base 13: mod_base = OTHER; note = 2'-O-methyluridine-3'-phosphate
  modified_base 14: mod_base = OTHER; note = 2'-O-methyladenosine-3'-phosphate
  modified_base 15: mod_base = OTHER; note = 2'-O-methylguanosine-3'-phosphate
  modified_base 16: mod_base = OTHER; note = 2'-O-methylcytidine-3'-phosphate
  modified_base 17: mod_base = OTHER; note = 2'-O-methyladenosine-3'-phosphate
  modified_base 18: mod_base = OTHER; note = 2'-O-methyluridine-3'-phosphate
  modified_base 19: mod_base = OTHER; note = 2'-O-methyladenosine-3'-phosphorothioate
  modified_base 20: mod_base = OTHER; note = 2'-O-methyluridine-3'-phosphorothioate
  modified_base 21: mod_base = OTHER; note = 2'-O-methyladenosine
gatagtacatgttagcatata

SEQ ID NO: 11190 - RNA, 21 nt, synthetic construct
  source 1..21: mol_type = other RNA
  modified_base 1: mod_base = OTHER; note = 2'-O-methyladenosine-3'-phosphorothioate
  modified_base 2: mod_base = OTHER; note = 2'-O-methyluridine-3'-phosphorothioate
  modified_base 3: mod_base = OTHER; note = 2'-O-methyladenosine-3'-phosphate
  modified_base 4: mod_base = OTHER; note = 2'-O-methylguanosine-3'-phosphate
  modified_base 5: mod_base = OTHER; note = 2'-O-methyluridine-3'-phosphate
  modified_base 6: mod_base = OTHER; note = 2'-O-docosanyl-adenosine-3'-phosphate
  modified_base 7: mod_base = OTHER; note = 2'-deoxy-2'-fluorocytidine-3'-phosphate
  modified_base 8: mod_base = OTHER; note = 2'-O-methyladenosine-3'-phosphate
  modified_base 9: mod_base = OTHER; note = 2'-deoxy-2'-fluorouridine-3'-phosphate
  modified_base 10: mod_base = OTHER; note = 2'-deoxy-2'-fluoroguanosine-3'-phosphate
  modified_base 11: mod_base = OTHER; note = 2'-deoxy-2'-fluorouridine-3'-phosphate
  modified_base 12: mod_base = OTHER; note = 2'-O-methyluridine-3'-phosphate
  modified_base 13: mod_base = OTHER; note = 2'-O-methyladenosine-3'-phosphate
  modified_base 14: mod_base = OTHER; note = 2'-O-methylguanosine-3'-phosphate
  modified_base 15: mod_base = OTHER; note = 2'-O-methylcytidine-3'-phosphate
  modified_base 16: mod_base = OTHER; note = 2'-O-methyladenosine-3'-phosphate
  modified_base 17: mod_base = OTHER; note = 2'-O-methyluridine-3'-phosphate
  modified_base 18: mod_base = OTHER; note = 2'-O-methyladenosine-3'-phosphate
  modified_base 19: mod_base = OTHER; note = 2'-O-methyluridine-3'-phosphorothioate
  modified_base 20: mod_base = OTHER; note = 2'-O-methyladenosine-3'-phosphorothioate
  modified_base 21: mod_base = OTHER; note = 2'-O-methyladenosine
atagtacatgttagcatataa

SEQ ID NO: 11191 - RNA, 21 nt, synthetic construct
  source 1..21: mol_type = other RNA
  modified_base 1: mod_base = OTHER; note = 2'-O-methyluridine-3'-phosphorothioate
  modified_base 2: mod_base = OTHER; note = 2'-O-methyladenosine-3'-phosphorothioate
  modified_base 3: mod_base = OTHER; note = 2'-O-methylguanosine-3'-phosphate
  modified_base 4: mod_base = OTHER; note = 2'-O-methyluridine-3'-phosphate
  modified_base 5: mod_base = OTHER; note = 2'-O-methyladenosine-3'-phosphate
  modified_base 6: mod_base = OTHER; note = 2'-O-docosanyl-cytidine-3'-phosphate
  modified_base 7: mod_base = OTHER; note = 2'-deoxy-2'-fluoroadenosine-3'-phosphate
  modified_base 8: mod_base = OTHER; note = 2'-O-methyluridine-3'-phosphate
  modified_base 9: mod_base = OTHER; note = 2'-deoxy-2'-fluoroguanosine-3'-phosphate
  modified_base 10: mod_base = OTHER; note = 2'-deoxy-2'-fluorouridine-3'-phosphate
  modified_base 11: mod_base = OTHER; note = 2'-deoxy-2'-fluorouridine-3'-phosphate
  modified_base 12: mod_base = OTHER; note = 2'-O-methyladenosine-3'-phosphate
  modified_base 13: mod_base = OTHER; note = 2'-O-methylguanosine-3'-phosphate
  modified_base 14: mod_base = OTHER; note = 2'-O-methylcytidine-3'-phosphate
  modified_base 15: mod_base = OTHER; note = 2'-O-methyladenosine-3'-phosphate
  modified_base 16: mod_base = OTHER; note = 2'-O-methyluridine-3'-phosphate
  modified_base 17: mod_base = OTHER; note = 2'-O-methyladenosine-3'-phosphate
  modified_base 18: mod_base = OTHER; note = 2'-O-methyluridine-3'-phosphate
  modified_base 19: mod_base = OTHER; note = 2'-O-methyladenosine-3'-phosphorothioate
  modified_base 20: mod_base = OTHER; note = 2'-O-methyladenosine-3'-phosphorothioate
  modified_base 21: mod_base = OTHER; note = 2'-O-methyladenosine
tagtacatgttagcatataaa

SEQ ID NO: 11192 - RNA, 21 nt, synthetic construct
  source 1..21: mol_type = other RNA
  modified_base 1: mod_base = OTHER; note = 2'-O-methylguanosine-3'-phosphorothioate
  modified_base 2: mod_base = OTHER; note = 2'-O-methyluridine-3'-phosphorothioate
  modified_base 3: mod_base = OTHER; note = 2'-O-methyladenosine-3'-phosphate
  modified_base 4: mod_base = OTHER; note = 2'-O-methylcytidine-3'-phosphate
  modified_base 5: mod_base = OTHER; note = 2'-O-methyladenosine-3'-phosphate
  modified_base 6: mod_base = OTHER; note = 2'-O-docosanyl-uridine-3'-phosphate
  modified_base 7: mod_base = OTHER; note = 2'-deoxy-2'-fluoroguanosine-3'-phosphate
  modified_base 8: mod_base = OTHER; note = 2'-O-methyluridine-3'-phosphate
  modified_base 9: mod_base = OTHER; note = 2'-deoxy-2'-fluorouridine-3'-phosphate
  modified_base 10: mod_base = OTHER; note = 2'-deoxy-2'-fluoroadenosine-3'-phosphate
  modified_base 11: mod_base = OTHER; note = 2'-deoxy-2'-fluoroguanosine-3'-phosphate
  modified_base 12: mod_base = OTHER; note = 2'-O-methylcytidine-3'-phosphate
  modified_base 13: mod_base = OTHER; note = 2'-O-methyladenosine-3'-phosphate
  modified_base 14: mod_base = OTHER; note = 2'-O-methyluridine-3'-phosphate
  modified_base 15: mod_base = OTHER; note = 2'-O-methyladenosine-3'-phosphate
  modified_base 16: mod_base = OTHER; note = 2'-O-methyluridine-3'-phosphate
  modified_base 17: mod_base = OTHER; note = 2'-O-methyladenosine-3'-phosphate
  modified_base 18: mod_base = OTHER; note = 2'-O-methyladenosine-3'-phosphate
  modified_base 19: mod_base = OTHER; note = 2'-O-methyluridine-3'-phosphorothioate
  modified_base 20: mod_base = OTHER; note = 2'-O-methylguanosine-3'-phosphorothioate
  modified_base 21: mod_base = OTHER; note = 2'-O-methyladenosine
gtacatgttagcatataatga

SEQ ID NO: 11193 - RNA, 21 nt, synthetic construct
  source 1..21: mol_type = other RNA
  modified_base 1: mod_base = OTHER; note = 2'-O-methyluridine-3'-phosphorothioate
  modified_base 2: mod_base = OTHER; note = 2'-O-methyladenosine-3'-phosphorothioate
  modified_base 3: mod_base = OTHER; note = 2'-O-methylcytidine-3'-phosphate
  modified_base 4: mod_base = OTHER; note = 2'-O-methyladenosine-3'-phosphate
  modified_base 5: mod_base = OTHER; note = 2'-O-methyluridine-3'-phosphate
  modified_base 6: mod_base = OTHER; note = 2'-O-docosanyl-guanosine-3'-phosphate
  modified_base 7: mod_base = OTHER; note = 2'-deoxy-2'-fluorouridine-3'-phosphate
  modified_base 8: mod_base = OTHER; note = 2'-O-methyluridine-3'-phosphate
  modified_base 9: mod_base = OTHER; note = 2'-deoxy-2'-fluoroadenosine-3'-phosphate
  modified_base 10: mod_base = OTHER; note = 2'-deoxy-2'-fluoroguanosine-3'-phosphate
  modified_base 11: mod_base = OTHER; note = 2'-deoxy-2'-fluorocytidine-3'-phosphate
  modified_base 12: mod_base = OTHER; note = 2'-O-methyladenosine-3'-phosphate
  modified_base 13: mod_base = OTHER; note = 2'-O-methyluridine-3'-phosphate
  modified_base 14: mod_base = OTHER; note = 2'-O-methyladenosine-3'-phosphate
  modified_base 15: mod_base = OTHER; note = 2'-O-methyluridine-3'-phosphate
  modified_base 16: mod_base = OTHER; note = 2'-O-methyladenosine-3'-phosphate
  modified_base 17: mod_base = OTHER; note = 2'-O-methyladenosine-3'-phosphate
  modified_base 18: mod_base = OTHER; note = 2'-O-methyluridine-3'-phosphate
  modified_base 19: mod_base = OTHER; note = 2'-O-methylguanosine-3'-phosphorothioate
  modified_base 20: mod_base = OTHER; note = 2'-O-methyluridine-3'-phosphorothioate
  modified_base 21: mod_base = OTHER; note = 2'-O-methyladenosine
tacatgttagcatataatgta

SEQ ID NO: 11194 - RNA, 21 nt, synthetic construct
  source 1..21: mol_type = other RNA
  modified_base 1: mod_base = OTHER; note = 2'-O-methyladenosine-3'-phosphorothioate
  modified_base 2: mod_base = OTHER; note = 2'-O-methyluridine-3'-phosphorothioate
  modified_base 3: mod_base = OTHER; note = 2'-O-methyladenosine-3'-phosphate
  modified_base 4: mod_base = OTHER; note = 2'-O-methyluridine-3'-phosphate
  modified_base 5: mod_base = OTHER; note = 2'-O-methyladenosine-3'-phosphate
  modified_base 6: mod_base = OTHER; note = 2'-O-docosanyl-adenosine-3'-phosphate
  modified_base 7: mod_base = OTHER; note = 2'-deoxy-2'-fluorouridine-3'-phosphate
  modified_base 8: mod_base = OTHER; note = 2'-O-methylguanosine-3'-phosphate
  modified_base 9: mod_base = OTHER; note = 2'-deoxy-2'-fluorouridine-3'-phosphate
  modified_base 10: mod_base = OTHER; note = 2'-deoxy-2'-fluoroadenosine-3'-phosphate
  modified_base 11: mod_base = OTHER; note = 2'-deoxy-2'-fluorouridine-3'-phosphate
  modified_base 12: mod_base = OTHER; note = 2'-O-methyluridine-3'-phosphate
  modified_base 13: mod_base = OTHER; note = 2'-O-methyluridine-3'-phosphate
  modified_base 14: mod_base = OTHER; note = 2'-O-methyluridine-3'-phosphate
  modified_base 15: mod_base = OTHER; note = 2'-O-methylguanosine-3'-phosphate
  modified_base 16: mod_base = OTHER; note = 2'-O-methyladenosine-3'-phosphate
  modified_base 17: mod_base = OTHER; note = 2'-O-methyladenosine-3'-phosphate
  modified_base 18: mod_base = OTHER; note = 2'-O-methylguanosine-3'-phosphate
  modified_base 19: mod_base = OTHER; note = 2'-O-methyladenosine-3'-phosphorothioate
  modified_base 20: mod_base = OTHER; note = 2'-O-methylguanosine-3'-phosphorothioate
  modified_base 21: mod_base = OTHER; note = 2'-O-methyladenosine
atataatgtattttgaagaga

SEQ ID NO: 11195 - RNA, 21 nt, synthetic construct
  source 1..21: mol_type = other RNA
  modified_base 1: mod_base = OTHER; note = 2'-O-methyladenosine-3'-phosphorothioate
  modified_base 2: mod_base = OTHER; note = 2'-O-methyluridine-3'-phosphorothioate
  modified_base 3: mod_base = OTHER; note = 2'-O-methyluridine-3'-phosphate
  modified_base 4: mod_base = OTHER; note = 2'-O-methyluridine-3'-phosphate
  modified_base 5: mod_base = OTHER; note = 2'-O-methyluridine-3'-phosphate
  modified_base 6: mod_base = OTHER; note = 2'-O-docosanyl-guanosine-3'-phosphate
  modified_base 7: mod_base = OTHER; note = 2'-deoxy-2'-fluoroadenosine-3'-phosphate
  modified_base 8: mod_base = OTHER; note = 2'-O-methyladenosine-3'-phosphate
  modified_base 9: mod_base = OTHER; note = 2'-deoxy-2'-fluoroguanosine-3'-phosphate
  modified_base 10: mod_base = OTHER; note = 2'-deoxy-2'-fluoroadenosine-3'-phosphate
  modified_base 11: mod_base = OTHER; note = 2'-deoxy-2'-fluoroguanosine-3'-phosphate
  modified_base 12: mod_base = OTHER; note = 2'-O-methyluridine-3'-phosphate
  modified_base 13: mod_base = OTHER; note = 2'-O-methylguanosine-3'-phosphate
  modified_base 14: mod_base = OTHER; note = 2'-O-methyladenosine-3'-phosphate
  modified_base 15: mod_base = OTHER; note = 2'-O-methyladenosine-3'-phosphate
  modified_base 16: mod_base = OTHER; note = 2'-O-methylguanosine-3'-phosphate
  modified_base 17: mod_base = OTHER; note = 2'-O-methyluridine-3'-phosphate
  modified_base 18: mod_base = OTHER; note = 2'-O-methyladenosine-3'-phosphate
  modified_base 19: mod_base = OTHER; note = 2'-O-methyladenosine-3'-phosphorothioate
  modified_base 20: mod_base = OTHER; note = 2'-O-methyladenosine-3'-phosphorothioate
  modified_base 21: mod_base = OTHER; note = 2'-O-methyladenosine
attttgaagagtgaagtaaaa

SEQ ID NO: 11196 - RNA, 21 nt, synthetic construct
  source 1..21: mol_type = other RNA
  modified_base 1: mod_base = OTHER; note = 2'-O-methyluridine-3'-phosphorothioate
  modified_base 2: mod_base = OTHER; note = 2'-O-methyluridine-3'-phosphorothioate
  modified_base 3: mod_base = OTHER; note = 2'-O-methyluridine-3'-phosphate
  modified_base 4: mod_base = OTHER; note = 2'-O-methylguanosine-3'-phosphate
  modified_base 5: mod_base = OTHER; note = 2'-O-methyladenosine-3'-phosphate
  modified_base 6: mod_base = OTHER; note = 2'-O-docosanyl-adenosine-3'-phosphate
  modified_base 7: mod_base = OTHER; note = 2'-deoxy-2'-fluoroguanosine-3'-phosphate
  modified_base 8: mod_base = OTHER; note = 2'-O-methyladenosine-3'-phosphate
  modified_base 9: mod_base = OTHER; note = 2'-deoxy-2'-fluoroguanosine-3'-phosphate
  modified_base 10: mod_base = OTHER; note = 2'-deoxy-2'-fluorouridine-3'-phosphate
  modified_base 11: mod_base = OTHER; note = 2'-deoxy-2'-fluoroguanosine-3'-phosphate
  modified_base 12: mod_base = OTHER; note = 2'-O-methyladenosine-3'-phosphate
  modified_base 13: mod_base = OTHER; note = 2'-O-methyladenosine-3'-phosphate
  modified_base 14: mod_base = OTHER; note = 2'-O-methylguanosine-3'-phosphate
  modified_base 15: mod_base = OTHER; note = 2'-O-methyluridine-3'-phosphate
  modified_base 16: mod_base = OTHER; note = 2'-O-methyladenosine-3'-phosphate
  modified_base 17: mod_base = OTHER; note = 2'-O-methyladenosine-3'-phosphate
  modified_base 18: mod_base = OTHER; note = 2'-O-methyladenosine-3'-phosphate
  modified_base 19: mod_base = OTHER; note = 2'-O-methyluridine-3'-phosphorothioate
  modified_base 20: mod_base = OTHER; note = 2'-O-methylguanosine-3'-phosphorothioate
  modified_base 21: mod_base = OTHER; note = 2'-O-methyladenosine
tttgaagagtgaagtaaatga

SEQ ID NO: 11197 - RNA, 21 nt, synthetic construct
  source 1..21: mol_type = other RNA
  modified_base 1: mod_base = OTHER; note = 2'-O-methyluridine-3'-phosphorothioate
  modified_base 2: mod_base = OTHER; note = 2'-O-methyluridine-3'-phosphorothioate
  modified_base 3: mod_base = OTHER; note = 2'-O-methylguanosine-3'-phosphate
  modified_base 4: mod_base = OTHER; note = 2'-O-methyladenosine-3'-phosphate
  modified_base 5: mod_base = OTHER; note = 2'-O-methyladenosine-3'-phosphate
  modified_base 6: mod_base = OTHER; note = 2'-O-docosanyl-guanosine-3'-phosphate
  modified_base 7: mod_base = OTHER; note = 2'-deoxy-2'-fluoroadenosine-3'-phosphate
  modified_base 8: mod_base = OTHER; note = 2'-O-methylguanosine-3'-phosphate
  modified_base 9: mod_base = OTHER; note = 2'-deoxy-2'-fluorouridine-3'-phosphate
  modified_base 10: mod_base = OTHER; note = 2'-deoxy-2'-fluoroguanosine-3'-phosphate
  modified_base 11: mod_base = OTHER; note = 2'-deoxy-2'-fluoroadenosine-3'-phosphate
  modified_base 12: mod_base = OTHER; note = 2'-O-methyladenosine-3'-phosphate
  modified_base 13: mod_base = OTHER; note = 2'-O-methylguanosine-3'-phosphate
  modified_base 14: mod_base = OTHER; note = 2'-O-methyluridine-3'-phosphate
  modified_base 15: mod_base = OTHER; note = 2'-O-methyladenosine-3'-phosphate
  modified_base 16: mod_base = OTHER; note = 2'-O-methyladenosine-3'-phosphate
  modified_base 17: mod_base = OTHER; note = 2'-O-methyladenosine-3'-phosphate
  modified_base 18: mod_base = OTHER; note = 2'-O-methyluridine-3'-phosphate
  modified_base 19: mod_base = OTHER; note = 2'-O-methylguanosine-3'-phosphorothioate
  modified_base 20: mod_base = OTHER; note = 2'-O-methylcytidine-3'-phosphorothioate
  modified_base 21: mod_base = OTHER; note = 2'-O-methyladenosine
ttgaagagtgaagtaaatgca

SEQ ID NO: 11198 - RNA, 21 nt, synthetic construct
  source 1..21: mol_type = other RNA
  modified_base 1: mod_base = OTHER; note = 2'-O-methyluridine-3'-phosphorothioate
  modified_base 2: mod_base = OTHER; note = 2'-O-methylguanosine-3'-phosphorothioate
  modified_base 3: mod_base = OTHER; note = 2'-O-methyladenosine-3'-phosphate
  modified_base 4: mod_base = OTHER; note = 2'-O-methyladenosine-3'-phosphate
  modified_base 5: mod_base = OTHER; note = 2'-O-methylguanosine-3'-phosphate
  modified_base 6: mod_base = OTHER; note = 2'-O-docosanyl-adenosine-3'-phosphate
  modified_base 7: mod_base = OTHER; note = 2'-deoxy-2'-fluoroguanosine-3'-phosphate
  modified_base 8: mod_base = OTHER; note = 2'-O-methyluridine-3'-phosphate
  modified_base 9: mod_base = OTHER; note = 2'-deoxy-2'-fluoroguanosine-3'-phosphate
  modified_base 10: mod_base = OTHER; note = 2'-deoxy-2'-fluoroadenosine-3'-phosphate
  modified_base 11: mod_base = OTHER; note = 2'-deoxy-2'-fluoroadenosine-3'-phosphate
  modified_base 12: mod_base = OTHER; note = 2'-O-methylguanosine-3'-phosphate
  modified_base 13: mod_base = OTHER; note = 2'-O-methyluridine-3'-phosphate
  modified_base 14: mod_base = OTHER; note = 2'-O-methyladenosine-3'-phosphate
  modified_base 15: mod_base = OTHER; note = 2'-O-methyladenosine-3'-phosphate
  modified_base 16: mod_base = OTHER; note = 2'-O-methyladenosine-3'-phosphate
  modified_base 17: mod_base = OTHER; note = 2'-O-methyluridine-3'-phosphate
  modified_base 18: mod_base = OTHER; note = 2'-O-methylguanosine-3'-phosphate
  modified_base 19: mod_base = OTHER; note = 2'-O-methylcytidine-3'-phosphorothioate
  modified_base 20: mod_base = OTHER; note = 2'-O-methyluridine-3'-phosphorothioate
  modified_base 21: mod_base = OTHER; note = 2'-O-methyladenosine
tgaagagtgaagtaaatgcta

SEQ ID NO: 11199 - RNA, 21 nt, synthetic construct
  source 1..21: mol_type = other RNA
  modified_base 1: mod_base = OTHER; note = 2'-O-methylguanosine-3'-phosphorothioate
  modified_base 2: mod_base = OTHER; note = 2'-O-methyladenosine-3'-phosphorothioate
  modified_base 3: mod_base = OTHER; note = 2'-O-methyladenosine-3'-phosphate
  modified_base 4: mod_base = OTHER; note = 2'-O-methylguanosine-3'-phosphate
  modified_base 5: mod_base = OTHER; note = 2'-O-methyladenosine-3'-phosphate
  modified_base 6: mod_base = OTHER; note = 2'-O-docosanyl-guanosine-3'-phosphate
  modified_base 7: mod_base = OTHER; note = 2'-deoxy-2'-fluorouridine-3'-phosphate
  modified_base 8: mod_base = OTHER; note = 2'-O-methylguanosine-3'-phosphate
  modified_base 9: mod_base = OTHER; note = 2'-deoxy-2'-fluoroadenosine-3'-phosphate
  modified_base 10: mod_base = OTHER; note = 2'-deoxy-2'-fluoroadenosine-3'-phosphate
  modified_base 11: mod_base = OTHER; note = 2'-deoxy-2'-fluoroguanosine-3'-phosphate
  modified_base 12: mod_base = OTHER; note = 2'-O-methyluridine-3'-phosphate
  modified_base 13: mod_base = OTHER; note = 2'-O-methyladenosine-3'-phosphate
  modified_base 14: mod_base = OTHER; note = 2'-O-methyladenosine-3'-phosphate
  modified_base 15: mod_base = OTHER; note = 2'-O-methyladenosine-3'-phosphate
  modified_base 16: mod_base = OTHER; note = 2'-O-methyluridine-3'-phosphate
  modified_base 17: mod_base = OTHER; note = 2'-O-methylguanosine-3'-phosphate
  modified_base 18: mod_base = OTHER; note = 2'-O-methylcytidine-3'-phosphate
  modified_base 19: mod_base = OTHER; note = 2'-O-methyluridine-3'-phosphorothioate
  modified_base 20: mod_base = OTHER; note = 2'-O-methyladenosine-3'-phosphorothioate
  modified_base 21: mod_base = OTHER; note = 2'-O-methyladenosine
gaagagtgaagtaaatgctaa

SEQ ID NO: 11200 - RNA, 21 nt, synthetic construct
  source 1..21: mol_type = other RNA
  modified_base 1: mod_base = OTHER; note = 2'-O-methyladenosine-3'-phosphorothioate
  modified_base 2: mod_base = OTHER; note = 2'-O-methyladenosine-3'-phosphorothioate
  modified_base 3: mod_base = OTHER; note = 2'-O-methylguanosine-3'-phosphate
  modified_base 4: mod_base = OTHER; note = 2'-O-methyladenosine-3'-phosphate
  modified_base 5: mod_base = OTHER; note = 2'-O-methylguanosine-3'-phosphate
  modified_base 6: mod_base = OTHER; note = 2'-O-docosanyl-uridine-3'-phosphate
  modified_base 7: mod_base = OTHER; note = 2'-deoxy-2'-fluoroguanosine-3'-phosphate
  modified_base 8: mod_base = OTHER; note = 2'-O-methyladenosine-3'-phosphate
  modified_base 9: mod_base = OTHER; note = 2'-deoxy-2'-fluoroadenosine-3'-phosphate
  modified_base 10: mod_base = OTHER; note = 2'-deoxy-2'-fluoroguanosine-3'-phosphate
  modified_base 11: mod_base = OTHER; note = 2'-deoxy-2'-fluorouridine-3'-phosphate
  modified_base 12: mod_base = OTHER; note = 2'-O-methyladenosine-3'-phosphate
  modified_base 13: mod_base = OTHER; note = 2'-O-methyladenosine-3'-phosphate
  modified_base 14: mod_base = OTHER; note = 2'-O-methyladenosine-3'-phosphate
  modified_base 15: mod_base = OTHER; note = 2'-O-methyluridine-3'-phosphate
  modified_base 16: mod_base = OTHER; note = 2'-O-methylguanosine-3'-phosphate
  modified_base 17: mod_base = OTHER; note = 2'-O-methylcytidine-3'-phosphate
  modified_base 18: mod_base = OTHER; note = 2'-O-methyluridine-3'-phosphate
  modified_base 19: mod_base = OTHER; note = 2'-O-methyladenosine-3'-phosphorothioate
  modified_base 20: mod_base = OTHER; note = 2'-O-methyluridine-3'-phosphorothioate
  modified_base 21: mod_base = OTHER; note = 2'-O-methyladenosine
aagagtgaagtaaatgctata

SEQ ID NO: 11201 - RNA, 21 nt, synthetic construct
  source 1..21: mol_type = other RNA
  modified_base 1: mod_base = OTHER; note = 2'-O-methyladenosine-3'-phosphorothioate
  modified_base 2: mod_base = OTHER; note = 2'-O-methylguanosine-3'-phosphorothioate
  modified_base 3: mod_base = OTHER; note = 2'-O-methyladenosine-3'-phosphate
  modified_base 4: mod_base = OTHER; note = 2'-O-methylguanosine-3'-phosphate
  modified_base 5: mod_base = OTHER; note = 2'-O-methyluridine-3'-phosphate
  modified_base 6: mod_base = OTHER; note = 2'-O-docosanyl-guanosine-3'-phosphate
  modified_base 7: mod_base = OTHER; note = 2'-deoxy-2'-fluoroadenosine-3'-phosphate
  modified_base 8: mod_base = OTHER; note = 2'-O-methyladenosine-3'-phosphate
  modified_base 9: mod_base = OTHER; note = 2'-deoxy-2'-fluoroguanosine-3'-phosphate
  modified_base 10: mod_base = OTHER; note = 2'-deoxy-2'-fluorouridine-3'-phosphate
  modified_base 11: mod_base = OTHER; note = 2'-deoxy-2'-fluoroadenosine-3'-phosphate
  modified_base 12: mod_base = OTHER; note = 2'-O-methyladenosine-3'-phosphate
  modified_base 13: mod_base = OTHER; note = 2'-O-methyladenosine-3'-phosphate
  modified_base 14: mod_base = OTHER; note = 2'-O-methyluridine-3'-phosphate
  modified_base 15: mod_base = OTHER; note = 2'-O-methylguanosine-3'-phosphate
  modified_base 16: mod_base = OTHER; note = 2'-O-methylcytidine-3'-phosphate
  modified_base 17: mod_base = OTHER; note = 2'-O-methyluridine-3'-phosphate
  modified_base 18: mod_base = OTHER; note = 2'-O-methyladenosine-3'-phosphate
  modified_base 19: mod_base = OTHER; note = 2'-O-methyluridine-3'-phosphorothioate
  modified_base 20: mod_base = OTHER; note = 2'-O-methyluridine-3'-phosphorothioate
  modified_base 21: mod_base = OTHER; note = 2'-O-methyladenosine
agagtgaagtaaatgctatta

SEQ ID NO: 11202 - RNA, 21 nt, synthetic construct
  source 1..21: mol_type = other RNA
  modified_base 1: mod_base = OTHER; note = 2'-O-methylguanosine-3'-phosphorothioate
  modified_base 2: mod_base = OTHER; note = 2'-O-methyladenosine-3'-phosphorothioate
  modified_base 3: mod_base = OTHER; note = 2'-O-methylguanosine-3'-phosphate
  modified_base 4: mod_base = OTHER; note = 2'-O-methyluridine-3'-phosphate
  modified_base 5: mod_base = OTHER; note = 2'-O-methylguanosine-3'-phosphate
  modified_base 6: mod_base = OTHER; note = 2'-O-docosanyl-adenosine-3'-phosphate
  modified_base 7: mod_base = OTHER; note = 2'-deoxy-2'-fluoroadenosine-3'-phosphate
  modified_base 8: mod_base = OTHER; note = 2'-O-methylguanosine-3'-phosphate
  modified_base 9: mod_base = OTHER; note = 2'-deoxy-2'-fluorouridine-3'-phosphate
  modified_base 10: mod_base = OTHER; note = 2'-deoxy-2'-fluoroadenosine-3'-phosphate
  modified_base 11: mod_base = OTHER; note = 2'-deoxy-2'-fluoroadenosine-3'-phosphate
  modified_base 12: mod_base = OTHER; note = 2'-O-methyladenosine-3'-phosphate
  modified_base 13: mod_base = OTHER; note = 2'-O-methyluridine-3'-phosphate
  modified_base 14: mod_base = OTHER; note = 2'-O-methylguanosine-3'-phosphate
  modified_base 15: mod_base = OTHER; note = 2'-O-methylcytidine-3'-phosphate
  modified_base 16: mod_base = OTHER; note = 2'-O-methyluridine-3'-phosphate
  modified_base 17: mod_base = OTHER; note = 2'-O-methyladenosine-3'-phosphate
  modified_base 18: mod_base = OTHER; note = 2'-O-methyluridine-3'-phosphate
  modified_base 19: mod_base = OTHER; note = 2'-O-methyluridine-3'-phosphorothioate
  modified_base 20: mod_base = OTHER; note = 2'-O-methylguanosine-3'-phosphorothioate
  modified_base 21: mod_base = OTHER; note = 2'-O-methyladenosine
gagtgaagtaaatgctattga

SEQ ID NO: 11203 - RNA, 21 nt, synthetic construct
  source 1..21: mol_type = other RNA
  modified_base 1: mod_base = OTHER; note = 2'-O-methyladenosine-3'-phosphorothioate
  modified_base 2: mod_base = OTHER; note = 2'-O-methylguanosine-3'-phosphorothioate
  modified_base 3: mod_base = OTHER; note = 2'-O-methyluridine-3'-phosphate
  modified_base 4: mod_base = OTHER; note = 2'-O-methylguanosine-3'-phosphate
  modified_base 5: mod_base = OTHER; note = 2'-O-methyladenosine-3'-phosphate
  modified_base 6: mod_base = OTHER; note = 2'-O-docosanyl-adenosine-3'-phosphate
  modified_base 7: mod_base = OTHER; note = 2'-deoxy-2'-fluoroguanosine-3'-phosphate
  modified_base 8: mod_base = OTHER; note = 2'-O-methyluridine-3'-phosphate
  modified_base 9: mod_base = OTHER; note = 2'-deoxy-2'-fluoroadenosine-3'-phosphate
  modified_base 10: mod_base = OTHER; note = 2'-deoxy-2'-fluoroadenosine-3'-phosphate
  modified_base 11: mod_base = OTHER; note = 2'-deoxy-2'-fluoroadenosine-3'-phosphate
  modified_base 12: mod_base = OTHER; note = 2'-O-methyluridine-3'-phosphate
  modified_base 13: mod_base = OTHER; note = 2'-O-methylguanosine-3'-phosphate
  modified_base 14: mod_base = OTHER; note = 2'-O-methylcytidine-3'-phosphate
  modified_base 15: mod_base = OTHER; note = 2'-O-methyluridine-3'-phosphate
  modified_base 16: mod_base = OTHER; note = 2'-O-methyladenosine-3'-phosphate
  modified_base 17: mod_base = OTHER; note = 2'-O-methyluridine-3'-phosphate
  modified_base 18: mod_base = OTHER; note = 2'-O-methyluridine-3'-phosphate
  modified_base 19: mod_base = OTHER; note = 2'-O-methylguanosine-3'-phosphorothioate
  modified_base 20: mod_base = OTHER; note = 2'-O-methyladenosine-3'-phosphorothioate
  modified_base 21: mod_base = OTHER; note = 2'-O-methyladenosine
agtgaagtaaatgctattgaa

SEQ ID NO: 11204 - RNA, 21 nt, synthetic construct
  source 1..21: mol_type = other RNA
  modified_base 1: mod_base = OTHER; note = 2'-O-methylguanosine-3'-phosphorothioate
  modified_base 2: mod_base = OTHER; note = 2'-O-methyluridine-3'-phosphorothioate
  modified_base 3: mod_base = OTHER; note = 2'-O-methylguanosine-3'-phosphate
  modified_base 4: mod_base = OTHER; note = 2'-O-methyladenosine-3'-phosphate
  modified_base 5: mod_base = OTHER; note = 2'-O-methyladenosine-3'-phosphate
  modified_base 6: mod_base = OTHER; note = 2'-O-docosanyl-guanosine-3'-phosphate
  modified_base 7: mod_base = OTHER; note = 2'-deoxy-2'-fluorouridine-3'-phosphate
  modified_base 8: mod_base = OTHER; note = 2'-O-methyladenosine-3'-phosphate
  modified_base 9: mod_base = OTHER; note = 2'-deoxy-2'-fluoroadenosine-3'-phosphate
  modified_base 10: mod_base = OTHER; note = 2'-deoxy-2'-fluoroadenosine-3'-phosphate
  modified_base 11: mod_base = OTHER; note = 2'-deoxy-2'-fluorouridine-3'-phosphate
  modified_base 12: mod_base = OTHER; note = 2'-O-methylguanosine-3'-phosphate
  modified_base 13: mod_base = OTHER; note = 2'-O-methylcytidine-3'-phosphate
  modified_base 14: mod_base = OTHER; note = 2'-O-methyluridine-3'-phosphate
  modified_base 15: mod_base = OTHER; note = 2'-O-methyladenosine-3'-phosphate
  modified_base 16: mod_base = OTHER; note = 2'-O-methyluridine-3'-phosphate
  modified_base 17: mod_base = OTHER; note = 2'-O-methyluridine-3'-phosphate
  modified_base 18: mod_base = OTHER; note = 2'-O-methylguanosine-3'-phosphate
  modified_base 19: mod_base = OTHER; note = 2'-O-methyladenosine-3'-phosphorothioate
  modified_base 20: mod_base = OTHER; note = 2'-O-methyluridine-3'-phosphorothioate
  modified_base 21: mod_base = OTHER; note = 2'-O-methyladenosine
gtgaagtaaatgctattgata

SEQ ID NO: 11205 - RNA, 21 nt, synthetic construct
  source 1..21: mol_type = other RNA
  modified_base 1: mod_base = OTHER; note = 2'-O-methyluridine-3'-phosphorothioate
  modified_base 2: mod_base = OTHER; note = 2'-O-methylguanosine-3'-phosphorothioate
  modified_base 3: mod_base = OTHER; note = 2'-O-methyladenosine-3'-phosphate
  modified_base 4: mod_base = OTHER; note = 2'-O-methyladenosine-3'-phosphate
  modified_base 5: mod_base = OTHER; note = 2'-O-methylguanosine-3'-phosphate
  modified_base 6: mod_base = OTHER; note = 2'-O-docosanyl-uridine-3'-phosphate
  modified_base 7: mod_base = OTHER; note = 2'-deoxy-2'-fluoroadenosine-3'-phosphate
  modified_base 8: mod_base = OTHER; note = 2'-O-methyladenosine-3'-phosphate
  modified_base 9: mod_base = OTHER; note = 2'-deoxy-2'-fluoroadenosine-3'-phosphate
  modified_base 10: mod_base = OTHER; note = 2'-deoxy-2'-fluorouridine-3'-phosphate
  modified_base 11: mod_base = OTHER; note = 2'-deoxy-2'-fluoroguanosine-3'-phosphate
  modified_base 12: mod_base = OTHER; note = 2'-O-methylcytidine-3'-phosphate
  modified_base 13: mod_base = OTHER; note = 2'-O-methyluridine-3'-phosphate
  modified_base 14: mod_base = OTHER; note = 2'-O-methyladenosine-3'-phosphate
  modified_base 15: mod_base = OTHER; note = 2'-O-methyluridine-3'-phosphate
  modified_base 16: mod_base = OTHER; note = 2'-O-methyluridine-3'-phosphate
  modified_base 17: mod_base = OTHER; note = 2'-O-methylguanosine-3'-phosphate
  modified_base 18: mod_base = OTHER; note = 2'-O-methyladenosine-3'-phosphate
  modified_base 19: mod_base = OTHER; note = 2'-O-methyluridine-3'-phosphorothioate
  modified_base 20: mod_base = OTHER; note = 2'-O-methyladenosine-3'-phosphorothioate
  modified_base 21: mod_base = OTHER; note = 2'-O-methyladenosine
tgaagtaaatgctattgataa

SEQ ID NO: 11206 - RNA, 21 nt, synthetic construct
  source 1..21: mol_type = other RNA
  modified_base 1: mod_base = OTHER; note = 2'-O-methylguanosine-3'-phosphorothioate
  modified_base 2: mod_base = OTHER; note = 2'-O-methyladenosine-3'-phosphorothioate
  modified_base 3: mod_base = OTHER; note = 2'-O-methyladenosine-3'-phosphate
  modified_base 4: mod_base = OTHER; note = 2'-O-methylguanosine-3'-phosphate
  modified_base 5: mod_base = OTHER; note = 2'-O-methyluridine-3'-phosphate
  modified_base 6: mod_base = OTHER; note = 2'-O-docosanyl-adenosine-3'-phosphate
  modified_base 7: mod_base = OTHER; note = 2'-deoxy-2'-fluoroadenosine-3'-phosphate
  modified_base 8: mod_base = OTHER; note = 2'-O-methyladenosine-3'-phosphate
  modified_base 9: mod_base = OTHER; note = 2'-deoxy-2'-fluorouridine-3'-phosphate
  modified_base 10: mod_base = OTHER; note = 2'-deoxy-2'-fluoroguanosine-3'-phosphate
  modified_base 11: mod_base = OTHER; note = 2'-deoxy-2'-fluorocytidine-3'-phosphate
  modified_base 12: mod_base = OTHER; note = 2'-O-methyluridine-3'-phosphate
  modified_base 13: mod_base = OTHER; note = 2'-O-methyladenosine-3'-phosphate
  modified_base 14: mod_base = OTHER; note = 2'-O-methyluridine-3'-phosphate
  modified_base 15: mod_base = OTHER; note = 2'-O-methyluridine-3'-phosphate
  modified_base 16: mod_base = OTHER; note = 2'-O-methylguanosine-3'-phosphate
  modified_base 17: mod_base = OTHER; note = 2'-O-methyladenosine-3'-phosphate
  modified_base 18: mod_base = OTHER; note = 2'-O-methyluridine-3'-phosphate
  modified_base 19: mod_base = OTHER; note = 2'-O-methyladenosine-3'-phosphorothioate
  modified_base 20: mod_base = OTHER; note = 2'-O-methyladenosine-3'-phosphorothioate
  modified_base 21: mod_base = OTHER; note = 2'-O-methyladenosine
gaagtaaatgctattgataaa

SEQ ID NO: 11207 - RNA, 21 nt, synthetic construct
  source 1..21: mol_type = other RNA
  modified_base 1: mod_base = OTHER; note = 2'-O-methyladenosine-3'-phosphorothioate
  modified_base 2: mod_base = OTHER; note = 2'-O-methyladenosine-3'-phosphorothioate
  modified_base 3: mod_base = OTHER; note = 2'-O-methylcytidine-3'-phosphate
  modified_base 4: mod_base = OTHER; note = 2'-O-methyladenosine-3'-phosphate
  modified_base 5: mod_base = OTHER; note = 2'-O-methylguanosine-3'-phosphate
  modified_base 6: mod_base = OTHER; note = 2'-O-docosanyl-uridine-3'-phosphate
  modified_base 7: mod_base = OTHER; note = 2'-deoxy-2'-fluoroadenosine-3'-phosphate
  modified_base 8: mod_base = OTHER; note = 2'-O-methyladenosine-3'-phosphate
  modified_base 9: mod_base = OTHER; note = 2'-deoxy-2'-fluoroadenosine-3'-phosphate
  modified_base 10: mod_base = OTHER; note = 2'-deoxy-2'-fluoroguanosine-3'-phosphate
  modified_base 11: mod_base = OTHER; note = 2'-deoxy-2'-fluoroadenosine-3'-phosphate
  modified_base 12: mod_base = OTHER; note = 2'-O-methyladenosine-3'-phosphate
  modified_base 13: mod_base = OTHER; note = 2'-O-methyladenosine-3'-phosphate
  modified_base 14: mod_base = OTHER; note = 2'-O-methyluridine-3'-phosphate
  modified_base 15: mod_base = OTHER; note = 2'-O-methylguanosine-3'-phosphate
  modified_base 16: mod_base = OTHER; note = 2'-O-methylcytidine-3'-phosphate
  modified_base 17: mod_base = OTHER; note = 2'-O-methyluridine-3'-phosphate
  modified_base 18: mod_base = OTHER; note = 2'-O-methyladenosine-3'-phosphate
  modified_base 19: mod_base = OTHER; note = 2'-O-methylcytidine-3'-phosphorothioate
  modified_base 20: mod_base = OTHER; note = 2'-O-methyluridine-3'-phosphorothioate
  modified_base 21: mod_base = OTHER; note = 2'-O-methyladenosine
aacagtaaagaaatgctacta

SEQ ID NO: 11208 - RNA, 21 nt, synthetic construct
  source 1..21: mol_type = other RNA
  modified_base 1: mod_base = OTHER; note = 2'-O-methyluridine-3'-phosphorothioate
  modified_base 2: mod_base = OTHER; note = 2'-O-methyladenosine-3'-phosphorothioate
  modified_base 3: mod_base = OTHER; note = 2'-O-methyladenosine-3'-phosphate
  modified_base 4: mod_base = OTHER; note = 2'-O-methyluridine-3'-phosphate
  modified_base 5: mod_base = OTHER; note = 2'-O-methyladenosine-3'-phosphate
  modified_base 6: mod_base = OTHER; note = 2'-O-docosanyl-adenosine-3'-phosphate
  modified_base 7: mod_base = OTHER; note = 2'-deoxy-2'-fluorocytidine-3'-phosphate
  modified_base 8: mod_base = OTHER; note = 2'-O-methyladenosine-3'-phosphate
  modified_base 9: mod_base = OTHER; note = 2'-deoxy-2'-fluoroguanosine-3'-phosphate
  modified_base 10: mod_base = OTHER; note = 2'-deoxy-2'-fluorouridine-3'-phosphate
  modified_base 11: mod_base = OTHER; note = 2'-deoxy-2'-fluoroadenosine-3'-phosphate
  modified_base 12: mod_base = OTHER; note = 2'-O-methyladenosine-3'-phosphate
  modified_base 13: mod_base = OTHER; note = 2'-O-methyladenosine-3'-phosphate
  modified_base 14: mod_base = OTHER; note = 2'-O-methylguanosine-3'-phosphate
  modified_base 15: mod_base = OTHER; note = 2'-O-methyladenosine-3'-phosphate
  modified_base 16: mod_base = OTHER; note = 2'-O-methyladenosine-3'-phosphate
  modified_base 17: mod_base = OTHER; note = 2'-O-methyladenosine-3'-phosphate
  modified_base 18: mod_base = OTHER; note = 2'-O-methyluridine-3'-phosphate
  modified_base 19: mod_base = OTHER; note = 2'-O-methylguanosine-3'-phosphorothioate
  modified_base 20: mod_base = OTHER; note = 2'-O-methylcytidine-3'-phosphorothioate
  modified_base 21: mod_base = OTHER; note = 2'-O-methyladenosine
taataacagtaaagaaatgca

SEQ ID NO: 11209 - RNA, 21 nt, synthetic construct
  source 1..21: mol_type = other RNA
  modified_base 1: mod_base = OTHER; note = 2'-O-methyladenosine-3'-phosphorothioate
  modified_base 2: mod_base = OTHER; note = 2'-O-methyladenosine-3'-phosphorothioate
  modified_base 3: mod_base = OTHER; note = 2'-O-methyluridine-3'-phosphate
  modified_base 4: mod_base = OTHER; note = 2'-O-methyladenosine-3'-phosphate
  modified_base 5: mod_base = OTHER; note = 2'-O-methyladenosine-3'-phosphate
  modified_base 6: mod_base = OTHER; note = 2'-O-docosanyl-cytidine-3'-phosphate
  modified_base 7: mod_base = OTHER; note = 2'-deoxy-2'-fluoroadenosine-3'-phosphate
  modified_base 8: mod_base = OTHER; note = 2'-O-methylguanosine-3'-phosphate
  modified_base 9: mod_base = OTHER; note = 2'-deoxy-2'-fluorouridine-3'-phosphate
  modified_base 10: mod_base = OTHER; note = 2'-deoxy-2'-fluoroadenosine-3'-phosphate
  modified_base 11: mod_base = OTHER; note = 2'-deoxy-2'-fluoroadenosine-3'-phosphate
  modified_base 12: mod_base = OTHER; note = 2'-O-methyladenosine-3'-phosphate
  modified_base 13: mod_base = OTHER; note = 2'-O-methylguanosine-3'-phosphate
  modified_base 14: mod_base = OTHER; note = 2'-O-methyladenosine-3'-phosphate
  modified_base 15: mod_base = OTHER; note = 2'-O-methyladenosine-3'-phosphate
  modified_base 16: mod_base = OTHER; note = 2'-O-methyladenosine-3'-phosphate
  modified_base 17: mod_base = OTHER; note = 2'-O-methyluridine-3'-phosphate
  modified_base 18: mod_base = OTHER; note = 2'-O-methylguanosine-3'-phosphate
  modified_base 19: mod_base = OTHER; note = 2'-O-methylcytidine-3'-phosphorothioate
  modified_base 20: mod_base = OTHER; note = 2'-O-methyluridine-3'-phosphorothioate
  modified_base 21: mod_base = OTHER; note = 2'-O-methyladenosine
aataacagtaaagaaatgcta

SEQ ID NO: 11210 - RNA, 21 nt, synthetic construct
  source 1..21: mol_type = other RNA
  modified_base 1: mod_base = OTHER; note = 2'-O-methyluridine-3'-phosphorothioate
  modified_base 2: mod_base = OTHER; note = 2'-O-methyladenosine-3'-phosphorothioate
  modified_base 3: mod_base = OTHER; note = 2'-O-methyladenosine-3'-phosphate
  modified_base 4: mod_base = OTHER; note = 2'-O-methylcytidine-3'-phosphate
  modified_base 5: mod_base = OTHER; note = 2'-O-methyladenosine-3'-phosphate
  modified_base 6: mod_base = OTHER; note = 2'-O-docosanyl-guanosine-3'-phosphate
  modified_base 7: mod_base = OTHER; note = 2'-deoxy-2'-fluorouridine-3'-phosphate
  modified_base 8: mod_base = OTHER; note = 2'-O-methyladenosine-3'-phosphate
  modified_base 9: mod_base = OTHER; note = 2'-deoxy-2'-fluoroadenosine-3'-phosphate
  modified_base 10: mod_base = OTHER; note = 2'-deoxy-2'-fluoroadenosine-3'-phosphate
  modified_base 11: mod_base = OTHER; note = 2'-deoxy-2'-fluoroguanosine-3'-phosphate
  modified_base 12: mod_base = OTHER; note = 2'-O-methyladenosine-3'-phosphate
  modified_base 13: mod_base = OTHER; note = 2'-O-methyladenosine-3'-phosphate
  modified_base 14: mod_base = OTHER; note = 2'-O-methyladenosine-3'-phosphate
  modified_base 15: mod_base = OTHER; note = 2'-O-methyluridine-3'-phosphate
  modified_base 16: mod_base = OTHER; note = 2'-O-methylguanosine-3'-phosphate
  modified_base 17: mod_base = OTHER; note = 2'-O-methylcytidine-3'-phosphate
  modified_base 18: mod_base = OTHER; note = 2'-O-methyluridine-3'-phosphate
  modified_base 19: mod_base = OTHER; note = 2'-O-methyladenosine-3'-phosphorothioate
  modified_base 20: mod_base = OTHER; note = 2'-O-methylcytidine-3'-phosphorothioate
  modified_base 21: mod_base = OTHER; note = 2'-O-methyladenosine
taacagtaaagaaatgctaca

SEQ ID NO: 11211 - RNA, 21 nt, synthetic construct
  source 1..21: mol_type = other RNA
  modified_base 1: mod_base = OTHER; note = 2'-O-methyladenosine-3'-phosphorothioate
  modified_base 2: mod_base = OTHER; note = 2'-O-methylcytidine-3'-phosphorothioate
  modified_base 3: mod_base = OTHER; note = 2'-O-methyladenosine-3'-phosphate
  modified_base 4: mod_base = OTHER; note = 2'-O-methylguanosine-3'-phosphate
  modified_base 5: mod_base = OTHER; note = 2'-O-methyluridine-3'-phosphate
  modified_base 6: mod_base = OTHER; note = 2'-O-docosanyl-adenosine-3'-phosphate
  modified_base 7: mod_base = OTHER; note = 2'-deoxy-2'-fluoroadenosine-3'-phosphate
  modified_base 8: mod_base = OTHER; note = 2'-O-methyladenosine-3'-phosphate
  modified_base 9: mod_base = OTHER; note = 2'-deoxy-2'-fluoroguanosine-3'-phosphate
  modified_base 10: mod_base = OTHER; note = 2'-deoxy-2'-fluoroadenosine-3'-phosphate
  modified_base 11: mod_base = OTHER; note = 2'-deoxy-2'-fluoroadenosine-3'-phosphate
  modified_base 12: mod_base = OTHER; note = 2'-O-methyladenosine-3'-phosphate
  modified_base 13: mod_base = OTHER; note = 2'-O-methyluridine-3'-phosphate
  modified_base 14: mod_base = OTHER; note = 2'-O-methylguanosine-3'-phosphate
  modified_base 15: mod_base = OTHER; note = 2'-O-methylcytidine-3'-phosphate
  modified_base 16: mod_base = OTHER; note = 2'-O-methyluridine-3'-phosphate
  modified_base 17: mod_base = OTHER; note = 2'-O-methyladenosine-3'-phosphate
  modified_base 18: mod_base = OTHER; note = 2'-O-methylcytidine-3'-phosphate
  modified_base 19: mod_base = OTHER; note = 2'-O-methyluridine-3'-phosphorothioate
  modified_base 20: mod_base = OTHER; note = 2'-O-methyluridine-3'-phosphorothioate
  modified_base 21: mod_base = OTHER; note = 2'-O-methyladenosine
acagtaaagaaatgctactta

SEQ ID NO: 11212 - RNA, 21 nt, synthetic construct
  source 1..21: mol_type = other RNA
  modified_base 1: mod_base = OTHER; note = 2'-O-methylcytidine-3'-phosphorothioate
  modified_base 2: mod_base = OTHER; note = 2'-O-methyladenosine-3'-phosphorothioate
  modified_base 3: mod_base = OTHER; note = 2'-O-methylguanosine-3'-phosphate
  modified_base 4: mod_base = OTHER; note = 2'-O-methyluridine-3'-phosphate
  modified_base 5: mod_base = OTHER; note = 2'-O-methyladenosine-3'-phosphate
  modified_base 6: mod_base = OTHER; note = 2'-O-docosanyl-adenosine-3'-phosphate
  modified_base 7: mod_base = OTHER; note = 2'-deoxy-2'-fluoroadenosine-3'-phosphate
  modified_base 8: mod_base = OTHER; note = 2'-O-methylguanosine-3'-phosphate
  modified_base 9: mod_base = OTHER; note = 2'-deoxy-2'-fluoroadenosine-3'-phosphate
  modified_base 10: mod_base = OTHER; note = 2'-deoxy-2'-fluoroadenosine-3'-phosphate
  modified_base 11: mod_base = OTHER; note = 2'-deoxy-2'-fluoroadenosine-3'-phosphate
  modified_base 12: mod_base = OTHER; note = 2'-O-methyluridine-3'-phosphate
  modified_base 13: mod_base = OTHER; note = 2'-O-methylguanosine-3'-phosphate
  modified_base 14: mod_base = OTHER; note = 2'-O-methylcytidine-3'-phosphate
  modified_base 15: mod_base = OTHER; note = 2'-O-methyluridine-3'-phosphate
  modified_base 16: mod_base = OTHER; note = 2'-O-methyladenosine-3'-phosphate
  modified_base 17: mod_base = OTHER; note = 2'-O-methylcytidine-3'-phosphate
  modified_base 18: mod_base = OTHER; note = 2'-O-methyluridine-3'-phosphate
  modified_base 19: mod_base = OTHER; note = 2'-O-methyluridine-3'-phosphorothioate
  modified_base 20: mod_base = OTHER; note = 2'-O-methylguanosine-3'-phosphorothioate
  modified_base 21: mod_base = OTHER; note = 2'-O-methyladenosine
cagtaaagaaatgctacttga

SEQ ID NO: 11213 - RNA, 21 nt, synthetic construct
  source 1..21: mol_type = other RNA
  modified_base 1: mod_base = OTHER; note = 2'-O-methyladenosine-3'-phosphorothioate
  modified_base 2: mod_base = OTHER; note = 2'-O-methylguanosine-3'-phosphorothioate
  modified_base 3: mod_base = OTHER; note = 2'-O-methyluridine-3'-phosphate
  modified_base 4: mod_base = OTHER; note = 2'-O-methyladenosine-3'-phosphate
  modified_base 5: mod_base = OTHER; note = 2'-O-methyladenosine-3'-phosphate
  modified_base 6: mod_base = OTHER; note = 2'-O-docosanyl-adenosine-3'-phosphate
  modified_base 7: mod_base = OTHER; note = 2'-deoxy-2'-fluoroguanosine-3'-phosphate
  modified_base 8: mod_base = OTHER; note = 2'-O-methyladenosine-3'-phosphate
  modified_base 9: mod_base = OTHER; note = 2'-deoxy-2'-fluoroadenosine-3'-phosphate
  modified_base 10: mod_base = OTHER; note = 2'-deoxy-2'-fluoroadenosine-3'-phosphate
  modified_base 11: mod_base = OTHER; note = 2'-deoxy-2'-fluorouridine-3'-phosphate
  modified_base 12: mod_base = OTHER; note = 2'-O-methylguanosine-3'-phosphate
  modified_base 13: mod_base = OTHER; note = 2'-O-methylcytidine-3'-phosphate
  modified_base 14: mod_base = OTHER; note = 2'-O-methyluridine-3'-phosphate
  modified_base 15: mod_base = OTHER; note = 2'-O-methyladenosine-3'-phosphate
  modified_base 16: mod_base = OTHER; note = 2'-O-methylcytidine-3'-phosphate
  modified_base 17: mod_base = OTHER; note = 2'-O-methyluridine-3'-phosphate
  modified_base 18: mod_base = OTHER; note = 2'-O-methyluridine-3'-phosphate
  modified_base 19: mod_base = OTHER; note = 2'-O-methylguanosine-3'-phosphorothioate
  modified_base 20: mod_base = OTHER; note = 2'-O-methyladenosine-3'-phosphorothioate
  modified_base 21: mod_base = OTHER; note = 2'-O-methyladenosine
agtaaagaaatgctacttgaa

SEQ ID NO: 11214 - RNA, 21 nt, synthetic construct
  source 1..21: mol_type = other RNA
  modified_base 1: mod_base = OTHER; note = 2'-O-methylguanosine-3'-phosphorothioate
  modified_base 2: mod_base = OTHER; note = 2'-O-methyluridine-3'-phosphorothioate
  modified_base 3: mod_base = OTHER; note = 2'-O-methyladenosine-3'-phosphate
  modified_base 4: mod_base = OTHER; note = 2'-O-methyladenosine-3'-phosphate
  modified_base 5: mod_base = OTHER; note = 2'-O-methyladenosine-3'-phosphate
  modified_base 6: mod_base = OTHER; note = 2'-O-docosanyl-guanosine-3'-phosphate
  modified_base 7: mod_base = OTHER; note = 2'-deoxy-2'-fluoroadenosine-3'-phosphate
  modified_base 8: mod_base = OTHER; note = 2'-O-methyladenosine-3'-phosphate
  modified_base 9: mod_base = OTHER; note = 2'-deoxy-2'-fluoroadenosine-3'-phosphate
  modified_base 10: mod_base = OTHER; note = 2'-deoxy-2'-fluorouridine-3'-phosphate
  modified_base 11: mod_base = OTHER; note = 2'-deoxy-2'-fluoroguanosine-3'-phosphate
  modified_base 12: mod_base = OTHER; note = 2'-O-methylcytidine-3'-phosphate
  modified_base 13: mod_base = OTHER; note = 2'-O-methyluridine-3'-phosphate
  modified_base 14: mod_base = OTHER; note = 2'-O-methyladenosine-3'-phosphate
  modified_base 15: mod_base = OTHER; note = 2'-O-methylcytidine-3'-phosphate
  modified_base 16: mod_base = OTHER; note = 2'-O-methyluridine-3'-phosphate
  modified_base 17: mod_base = OTHER; note = 2'-O-methyluridine-3'-phosphate
  modified_base 18: mod_base = OTHER; note = 2'-O-methylguanosine-3'-phosphate
  modified_base 19: mod_base = OTHER; note = 2'-O-methyladenosine-3'-phosphorothioate
  modified_base 20: mod_base = OTHER; note = 2'-O-methyluridine-3'-phosphorothioate
  modified_base 21: mod_base = OTHER; note = 2'-O-methyladenosine
gtaaagaaatgctacttgata

SEQ ID NO: 11215 - RNA, 21 nt, synthetic construct
  source 1..21: mol_type = other RNA
  modified_base 1: mod_base = OTHER; note = 2'-O-methyluridine-3'-phosphorothioate
  modified_base 2: mod_base = OTHER; note = 2'-O-methyladenosine-3'-phosphorothioate
  modified_base 3: mod_base = OTHER; note = 2'-O-methyladenosine-3'-phosphate
  modified_base 4: mod_base = OTHER; note = 2'-O-methyladenosine-3'-phosphate
  modified_base 5: mod_base = OTHER; note = 2'-O-methylguanosine-3'-phosphate
  modified_base 6: mod_base = OTHER; note = 2'-O-docosanyl-adenosine-3'-phosphate
  modified_base 7: mod_base = OTHER; note = 2'-deoxy-2'-fluoroadenosine-3'-phosphate
  modified_base 8: mod_base = OTHER; note = 2'-O-methyladenosine-3'-phosphate
  modified_base 9: mod_base = OTHER; note = 2'-deoxy-2'-fluorouridine-3'-phosphate
  modified_base 10: mod_base = OTHER; note = 2'-deoxy-2'-fluoroguanosine-3'-phosphate
  modified_base 11: mod_base = OTHER; note = 2'-deoxy-2'-fluorocytidine-3'-phosphate
  modified_base 12: mod_base = OTHER; note = 2'-O-methyluridine-3'-phosphate
  modified_base 13: mod_base = OTHER; note = 2'-O-methyladenosine-3'-phosphate
  modified_base 14: mod_base = OTHER; note = 2'-O-methylcytidine-3'-phosphate
  modified_base 15: mod_base = OTHER; note = 2'-O-methyluridine-3'-phosphate
  modified_base 16: mod_base = OTHER; note = 2'-O-methyluridine-3'-phosphate
  modified_base 17: mod_base = OTHER; note = 2'-O-methylguanosine-3'-phosphate
  modified_base 18: mod_base = OTHER; note = 2'-O-methyladenosine-3'-phosphate
  modified_base 19: mod_base = OTHER; note = 2'-O-methyluridine-3'-phosphorothioate
  modified_base 20: mod_base = OTHER; note = 2'-O-methyluridine-3'-phosphorothioate
  modified_base 21: mod_base = OTHER; note = 2'-O-methyladenosine
taaagaaatgctacttgatta

SEQ ID NO: 11216 - RNA, 21 nt, synthetic construct
  source 1..21: mol_type = other RNA
  modified_base 1: mod_base = OTHER; note = 2'-O-methyladenosine-3'-phosphorothioate
  modified_base 2: mod_base = OTHER; note = 2'-O-methyladenosine-3'-phosphorothioate
  modified_base 3: mod_base = OTHER; note = 2'-O-methyladenosine-3'-phosphate
  modified_base 4: mod_base = OTHER; note = 2'-O-methylguanosine-3'-phosphate
  modified_base 5: mod_base = OTHER; note = 2'-O-methyladenosine-3'-phosphate
  modified_base 6: mod_base = OTHER; note = 2'-O-docosanyl-adenosine-3'-phosphate
  modified_base 7: mod_base = OTHER; note = 2'-deoxy-2'-fluoroadenosine-3'-phosphate
  modified_base 8: mod_base = OTHER; note = 2'-O-methyluridine-3'-phosphate
  modified_base 9: mod_base = OTHER; note = 2'-deoxy-2'-fluoroguanosine-3'-phosphate
  modified_base 10: mod_base = OTHER; note = 2'-deoxy-2'-fluorocytidine-3'-phosphate
  modified_base 11: mod_base = OTHER; note = 2'-deoxy-2'-fluorouridine-3'-phosphate
  modified_base 12: mod_base = OTHER; note = 2'-O-methyladenosine-3'-phosphate
  modified_base 13: mod_base = OTHER; note = 2'-O-methylcytidine-3'-phosphate
  modified_base 14: mod_base = OTHER; note = 2'-O-methyluridine-3'-phosphate
  modified_base 15: mod_base = OTHER; note = 2'-O-methyluridine-3'-phosphate
  modified_base 16: mod_base = OTHER; note = 2'-O-methylguanosine-3'-phosphate
  modified_base 17: mod_base = OTHER; note = 2'-O-methyladenosine-3'-phosphate
  modified_base 18: mod_base = OTHER; note = 2'-O-methyluridine-3'-phosphate
  modified_base 19: mod_base = OTHER; note = 2'-O-methyluridine-3'-phosphorothioate
  modified_base 20: mod_base = OTHER; note = 2'-O-methyluridine-3'-phosphorothioate
  modified_base 21: mod_base = OTHER; note = 2'-O-methyladenosine
aaagaaatgctacttgattta

SEQ ID NO: 11217 - RNA, 21 nt, synthetic construct
  source 1..21: mol_type = other RNA
  modified_base 1: mod_base = OTHER; note = 2'-O-methyladenosine-3'-phosphorothioate
  modified_base 2: mod_base = OTHER; note = 2'-O-methyladenosine-3'-phosphorothioate
  modified_base 3: mod_base = OTHER; note = 2'-O-methylcytidine-3'-phosphate
  modified_base 4: mod_base = OTHER; note = 2'-O-methyluridine-3'-phosphate
  modified_base 5: mod_base = OTHER; note = 2'-O-methylguanosine-3'-phosphate
  modified_base 6: mod_base = OTHER; note = 2'-O-docosanyl-guanosine-3'-phosphate
  modified_base 7: mod_base = OTHER; note = 2'-deoxy-2'-fluoroadenosine-3'-phosphate
  modified_base 8: mod_base = OTHER; note = 2'-O-methyluridine-3'-phosphate
  modified_base 9: mod_base = OTHER; note = 2'-deoxy-2'-fluorouridine-3'-phosphate
  modified_base 10: mod_base = OTHER; note = 2'-deoxy-2'-fluoroguanosine-3'-phosphate
  modified_base 11: mod_base = OTHER; note = 2'-deoxy-2'-fluorocytidine-3'-phosphate
  modified_base 12: mod_base = OTHER; note = 2'-O-methyluridine-3'-phosphate
  modified_base 13: mod_base = OTHER; note = 2'-O-methylcytidine-3'-phosphate
  modified_base 14: mod_base = OTHER; note = 2'-O-methyladenosine-3'-phosphate
  modified_base 15: mod_base = OTHER; note = 2'-O-methylguanosine-3'-phosphate
  modified_base 16: mod_base = OTHER; note = 2'-O-methyladenosine-3'-phosphate
  modified_base 17: mod_base = OTHER; note = 2'-O-methyluridine-3'-phosphate
  modified_base 18: mod_base = OTHER; note = 2'-O-methyluridine-3'-phosphate
  modified_base 19: mod_base = OTHER; note = 2'-O-methyladenosine-3'-phosphorothioate
  modified_base 20: mod_base = OTHER; note = 2'-O-methylcytidine-3'-phosphorothioate
  modified_base 21: mod_base = OTHER; note = 2'-O-methyladenosine
aactggattgctcagattaca

SEQ ID NO: 11218 - RNA, 21 nt, synthetic construct
  source 1..21: mol_type = other RNA
  modified_base 1: mod_base = OTHER; note = 2'-O-methyladenosine-3'-phosphorothioate
  modified_base 2: mod_base = OTHER; note = 2'-O-methyluridine-3'-phosphorothioate
  modified_base 3: mod_base = OTHER; note = 2'-O-methyluridine-3'-phosphate
  modified_base 4: mod_base = OTHER; note = 2'-O-methylguanosine-3'-phosphate
  modified_base 5: mod_base = OTHER; note = 2'-O-methylcytidine-3'-phosphate
  modified_base 6: mod_base = OTHER; note = 2'-O-docosanyl-uridine-3'-phosphate
  modified_base 7: mod_base = OTHER; note = 2'-deoxy-2'-fluorocytidine-3'-phosphate
  modified_base 8: mod_base = OTHER; note = 2'-O-methyladenosine-3'-phosphate
  modified_base 9: mod_base = OTHER; note = 2'-deoxy-2'-fluoroguanosine-3'-phosphate
  modified_base 10: mod_base = OTHER; note = 2'-deoxy-2'-fluoroadenosine-3'-phosphate
  modified_base 11: mod_base = OTHER; note = 2'-deoxy-2'-fluorouridine-3'-phosphate
  modified_base 12: mod_base = OTHER; note = 2'-O-methyluridine-3'-phosphate
  modified_base 13: mod_base = OTHER; note = 2'-O-methyladenosine-3'-phosphate
  modified_base 14: mod_base = OTHER; note = 2'-O-methylcytidine-3'-phosphate
  modified_base 15: mod_base = OTHER; note = 2'-O-methylcytidine-3'-phosphate
  modified_base 16: mod_base = OTHER; note = 2'-O-methyluridine-3'-phosphate
  modified_base 17: mod_base = OTHER; note = 2'-O-methylguanosine-3'-phosphate
  modified_base 18: mod_base = OTHER; note = 2'-O-methyladenosine-3'-phosphate
  modified_base 19: mod_base = OTHER; note = 2'-O-methyluridine-3'-phosphorothioate
  modified_base 20: mod_base = OTHER; note = 2'-O-methylcytidine-3'-phosphorothioate
  modified_base 21: mod_base = OTHER; note = 2'-O-methyladenosine
attgctcagattacctgatca

SEQ ID NO: 11219 - RNA, 21 nt, synthetic construct
  source 1..21: mol_type = other RNA
  modified_base 1: mod_base = OTHER; note = 2'-O-methylcytidine-3'-phosphorothioate
  modified_base 2: mod_base = OTHER; note = 2'-O-methyladenosine-3'-phosphorothioate
  modified_base 3: mod_base = OTHER; note = 2'-O-methylguanosine-3'-phosphate
  modified_base 4: mod_base = OTHER; note = 2'-O-methyladenosine-3'-phosphate
  modified_base 5: mod_base = OTHER; note = 2'-O-methyluridine-3'-phosphate
  modified_base 6: mod_base = OTHER; note = 2'-O-docosanyl-uridine-3'-phosphate
  modified_base 7: mod_base = OTHER; note = 2'-deoxy-2'-fluoroadenosine-3'-phosphate
  modified_base 8: mod_base = OTHER; note = 2'-O-methylcytidine-3'-phosphate
  modified_base 9: mod_base = OTHER; note = 2'-deoxy-2'-fluorocytidine-3'-phosphate
  modified_base 10: mod_base = OTHER; note = 2'-deoxy-2'-fluorouridine-3'-phosphate
  modified_base 11: mod_base = OTHER; note = 2'-deoxy-2'-fluoroguanosine-3'-phosphate
  modified_base 12: mod_base = OTHER; note = 2'-O-methyladenosine-3'-phosphate
  modified_base 13: mod_base = OTHER; note = 2'-O-methyluridine-3'-phosphate
  modified_base 14: mod_base = OTHER; note = 2'-O-methylcytidine-3'-phosphate
  modified_base 15: mod_base = OTHER; note = 2'-O-methylguanosine-3'-phosphate
  modified_base 16: mod_base = OTHER; note = 2'-O-methyluridine-3'-phosphate
  modified_base 17: mod_base = OTHER; note = 2'-O-methylguanosine-3'-phosphate
  modified_base 18: mod_base = OTHER; note = 2'-O-methylguanosine-3'-phosphate
  modified_base 19: mod_base = OTHER; note = 2'-O-methyluridine-3'-phosphorothioate
  modified_base 20: mod_base = OTHER; note = 2'-O-methylguanosine-3'-phosphorothioate
  modified_base 21: mod_base = OTHER; note = 2'-O-methyladenosine
cagattacctgatcgtggtga

SEQ ID NO: 11220 - RNA, 21 nt, synthetic construct
  source 1..21: mol_type = other RNA
  modified_base 1: mod_base = OTHER; note = 2'-O-methyladenosine-3'-phosphorothioate
  modified_base 2: mod_base = OTHER; note = 2'-O-methylguanosine-3'-phosphorothioate
  modified_base 3: mod_base = OTHER; note = 2'-O-methyladenosine-3'-phosphate
  modified_base 4: mod_base = OTHER; note = 2'-O-methyluridine-3'-phosphate
  modified_base 5: mod_base = OTHER; note = 2'-O-methyluridine-3'-phosphate
  modified_base 6: mod_base = OTHER; note = 2'-O-docosanyl-adenosine-3'-phosphate
  modified_base 7: mod_base = OTHER; note = 2'-deoxy-2'-fluorocytidine-3'-phosphate
  modified_base 8: mod_base = OTHER; note = 2'-O-methylcytidine-3'-phosphate
  modified_base 9: mod_base = OTHER; note = 2'-deoxy-2'-fluorouridine-3'-phosphate
  modified_base 10: mod_base = OTHER; note = 2'-deoxy-2'-fluoroguanosine-3'-phosphate
  modified_base 11: mod_base = OTHER; note = 2'-deoxy-2'-fluoroadenosine-3'-phosphate
  modified_base 12: mod_base = OTHER; note = 2'-O-methyluridine-3'-phosphate
  modified_base 13: mod_base = OTHER; note = 2'-O-methylcytidine-3'-phosphate
  modified_base 14: mod_base = OTHER; note = 2'-O-methylguanosine-3'-phosphate
  modified_base 15: mod_base = OTHER; note = 2'-O-methyluridine-3'-phosphate
  modified_base 16: mod_base = OTHER; note = 2'-O-methylguanosine-3'-phosphate
  modified_base 17: mod_base = OTHER; note = 2'-O-methylguanosine-3'-phosphate
  modified_base 18: mod_base = OTHER; note = 2'-O-methyluridine-3'-phosphate
  modified_base 19: mod_base = OTHER; note = 2'-O-methylguanosine-3'-phosphorothioate
  modified_base 20: mod_base = OTHER; note = 2'-O-methylguanosine-3'-phosphorothioate
  modified_base 21: mod_base = OTHER; note = 2'-O-methyladenosine
agattacctgatcgtggtgga

SEQ ID NO: 11221 - RNA, 21 nt, synthetic construct
  source 1..21: mol_type = other RNA
  modified_base 1: mod_base = OTHER; note = 2'-O-methylguanosine-3'-phosphorothioate
  modified_base 2: mod_base = OTHER; note = 2'-O-methyladenosine-3'-phosphorothioate
  modified_base 3: mod_base = OTHER; note = 2'-O-methyluridine-3'-phosphate
  modified_base 4: mod_base = OTHER; note = 2'-O-methyluridine-3'-phosphate
  modified_base 5: mod_base = OTHER; note = 2'-O-methyladenosine-3'-phosphate
  modified_base 6: mod_base = OTHER; note = 2'-O-docosanyl-cytidine-3'-phosphate
  modified_base 7: mod_base = OTHER; note = 2'-deoxy-2'-fluorocytidine-3'-phosphate
  modified_base 8: mod_base = OTHER; note = 2'-O-methyluridine-3'-phosphate
  modified_base 9: mod_base = OTHER; note = 2'-deoxy-2'-fluoroguanosine-3'-phosphate
  modified_base 10: mod_base = OTHER; note = 2'-deoxy-2'-fluoroadenosine-3'-phosphate
  modified_base 11: mod_base = OTHER; note = 2'-deoxy-2'-fluorouridine-3'-phosphate
  modified_base 12: mod_base = OTHER; note = 2'-O-methylcytidine-3'-phosphate
  modified_base 13: mod_base = OTHER; note = 2'-O-methylguanosine-3'-phosphate
  modified_base 14: mod_base = OTHER; note = 2'-O-methyluridine-3'-phosphate
  modified_base 15: mod_base = OTHER; note = 2'-O-methylguanosine-3'-phosphate
  modified_base 16: mod_base = OTHER; note = 2'-O-methylguanosine-3'-phosphate
  modified_base 17: mod_base = OTHER; note = 2'-O-methyluridine-3'-phosphate
  modified_base 18: mod_base = OTHER; note = 2'-O-methylguanosine-3'-phosphate
  modified_base 19: mod_base = OTHER; note = 2'-O-methylguanosine-3'-phosphorothioate
  modified_base 20: mod_base = OTHER; note = 2'-O-methyladenosine-3'-phosphorothioate
  modified_base 21: mod_base = OTHER; note = 2'-O-methyladenosine
gattacctgatcgtggtggaa

SEQ ID NO: 11222 - RNA, 21 nt, synthetic construct
  source 1..21: mol_type = other RNA
  modified_base 1: mod_base = OTHER; note = 2'-O-methyladenosine-3'-phosphorothioate
  modified_base 2: mod_base = OTHER; note = 2'-O-methyluridine-3'-phosphorothioate
  modified_base 3: mod_base = OTHER; note = 2'-O-methyluridine-3'-phosphate
  modified_base 4: mod_base = OTHER; note = 2'-O-methyladenosine-3'-phosphate
  modified_base 5: mod_base = OTHER; note = 2'-O-methylcytidine-3'-phosphate
  modified_base 6: mod_base = OTHER; note = 2'-O-docosanyl-cytidine-3'-phosphate
  modified_base 7: mod_base = OTHER; note = 2'-deoxy-2'-fluorouridine-3'-phosphate
  modified_base 8: mod_base = OTHER; note = 2'-O-methylguanosine-3'-phosphate
  modified_base 9: mod_base = OTHER; note = 2'-deoxy-2'-fluoroadenosine-3'-phosphate
  modified_base 10: mod_base = OTHER; note = 2'-deoxy-2'-fluorouridine-3'-phosphate
  modified_base 11: mod_base = OTHER; note = 2'-deoxy-2'-fluorocytidine-3'-phosphate
  modified_base 12: mod_base = OTHER; note = 2'-O-methylguanosine-3'-phosphate
  modified_base 13: mod_base = OTHER; note = 2'-O-methyluridine-3'-phosphate
  modified_base 14: mod_base = OTHER; note = 2'-O-methylguanosine-3'-phosphate
  modified_base 15: mod_base = OTHER; note = 2'-O-methylguanosine-3'-phosphate
  modified_base 16: mod_base = OTHER; note = 2'-O-methyluridine-3'-phosphate
  modified_base 17: mod_base = OTHER; note = 2'-O-methylguanosine-3'-phosphate
  modified_base 18: mod_base = OTHER; note = 2'-O-methylguanosine-3'-phosphate
  modified_base 19: mod_base = OTHER; note = 2'-O-methyladenosine-3'-phosphorothioate
  modified_base 20: mod_base = OTHER; note = 2'-O-methyladenosine-3'-phosphorothioate
  modified_base 21: mod_base = OTHER; note = 2'-O-methyladenosine
attacctgatcgtggtggaaa

SEQ ID NO: 11223 - RNA, 21 nt, synthetic construct
  source 1..21: mol_type = other RNA
  modified_base 1: mod_base = OTHER; note = 2'-O-methyluridine-3'-phosphorothioate
  modified_base 2: mod_base = OTHER; note = 2'-O-methyluridine-3'-phosphorothioate
  modified_base 3: mod_base = OTHER; note = 2'-O-methyladenosine-3'-phosphate
  modified_base 4: mod_base = OTHER; note = 2'-O-methylcytidine-3'-phosphate
  modified_base 5: mod_base = OTHER; note = 2'-O-methylcytidine-3'-phosphate
  modified_base 6: mod_base = OTHER; note = 2'-O-docosanyl-uridine-3'-phosphate
  modified_base 7: mod_base = OTHER; note = 2'-deoxy-2'-fluoroguanosine-3'-phosphate
  modified_base 8: mod_base = OTHER; note = 2'-O-methyladenosine-3'-phosphate
  modified_base 9: mod_base = OTHER; note = 2'-deoxy-2'-fluorouridine-3'-phosphate
  modified_base 10: mod_base = OTHER; note = 2'-deoxy-2'-fluorocytidine-3'-phosphate
  modified_base 11: mod_base = OTHER; note = 2'-deoxy-2'-fluoroguanosine-3'-phosphate
  modified_base 12: mod_base = OTHER; note = 2'-O-methyluridine-3'-phosphate
  modified_base 13: mod_base = OTHER; note = 2'-O-methylguanosine-3'-phosphate
  modified_base 14: mod_base = OTHER; note = 2'-O-methylguanosine-3'-phosphate
  modified_base 15: mod_base = OTHER; note = 2'-O-methyluridine-3'-phosphate
  modified_base 16: mod_base = OTHER; note = 2'-O-methylguanosine-3'-phosphate
  modified_base 17: mod_base = OTHER; note = 2'-O-methylguanosine-3'-phosphate
  modified_base 18: mod_base = OTHER; note = 2'-O-methyladenosine-3'-phosphate
  modified_base 19: mod_base = OTHER; note = 2'-O-methyladenosine-3'-phosphorothioate
  modified_base 20: mod_base = OTHER; note = 2'-O-methylcytidine-3'-phosphorothioate
  modified_base 21: mod_base = OTHER; note = 2'-O-methyladenosine
ttacctgatcgtggtggaaca

SEQ ID NO: 11224 - RNA, 21 nt, synthetic construct
  source 1..21: mol_type = other RNA
  modified_base 1: mod_base = OTHER; note = 2'-O-methyluridine-3'-phosphorothioate
  modified_base 2: mod_base = OTHER; note = 2'-O-methyladenosine-3'-phosphorothioate
  modified_base 3: mod_base = OTHER; note = 2'-O-methylcytidine-3'-phosphate
  modified_base 4: mod_base = OTHER; note = 2'-O-methylcytidine-3'-phosphate
  modified_base 5: mod_base = OTHER; note = 2'-O-methyluridine-3'-phosphate
  modified_base 6: mod_base = OTHER; note = 2'-O-docosanyl-guanosine-3'-phosphate
  modified_base 7: mod_base = OTHER; note = 2'-deoxy-2'-fluoroadenosine-3'-phosphate
  modified_base 8: mod_base = OTHER; note = 2'-O-methyluridine-3'-phosphate
  modified_base 9: mod_base = OTHER; note = 2'-deoxy-2'-fluorocytidine-3'-phosphate
  modified_base 10: mod_base = OTHER; note = 2'-deoxy-2'-fluoroguanosine-3'-phosphate
  modified_base 11: mod_base = OTHER; note = 2'-deoxy-2'-fluorouridine-3'-phosphate
  modified_base 12: mod_base = OTHER; note = 2'-O-methylguanosine-3'-phosphate
  modified_base 13: mod_base = OTHER; note = 2'-O-methylguanosine-3'-phosphate
  modified_base 14: mod_base = OTHER; note = 2'-O-methyluridine-3'-phosphate
  modified_base 15: mod_base = OTHER; note = 2'-O-methylguanosine-3'-phosphate
  modified_base 16: mod_base = OTHER; note = 2'-O-methylguanosine-3'-phosphate
  modified_base 17: mod_base = OTHER; note = 2'-O-methyladenosine-3'-phosphate
  modified_base 18: mod_base = OTHER; note = 2'-O-methyladenosine-3'-phosphate
  modified_base 19: mod_base = OTHER; note = 2'-O-methylcytidine-3'-phosphorothioate
  modified_base 20: mod_base = OTHER; note = 2'-O-methylcytidine-3'-phosphorothioate
  modified_base 21: mod_base = OTHER; note = 2'-O-methyladenosine
tacctgatcgtggtggaacca

SEQ ID NO: 11225 - RNA, 21 nt, synthetic construct
  source 1..21: mol_type = other RNA
  modified_base 1: mod_base = OTHER; note = 2'-O-methyladenosine-3'-phosphorothioate
  modified_base 2: mod_base = OTHER; note = 2'-O-methylcytidine-3'-phosphorothioate
  modified_base 3: mod_base = OTHER; note = 2'-O-methylcytidine-3'-phosphate
  modified_base 4: mod_base = OTHER; note = 2'-O-methyluridine-3'-phosphate
  modified_base 5: mod_base = OTHER; note = 2'-O-methylguanosine-3'-phosphate
  modified_base 6: mod_base = OTHER; note = 2'-O-docosanyl-adenosine-3'-phosphate
  modified_base 7: mod_base = OTHER; note = 2'-deoxy-2'-fluorouridine-3'-phosphate
  modified_base 8: mod_base = OTHER; note = 2'-O-methylcytidine-3'-phosphate
  modified_base 9: mod_base = OTHER; note = 2'-deoxy-2'-fluoroguanosine-3'-phosphate
  modified_base 10: mod_base = OTHER; note = 2'-deoxy-2'-fluorouridine-3'-phosphate
  modified_base 11: mod_base = OTHER; note = 2'-deoxy-2'-fluoroguanosine-3'-phosphate
  modified_base 12: mod_base = OTHER; note = 2'-O-methylguanosine-3'-phosphate
  modified_base 13: mod_base = OTHER; note = 2'-O-methyluridine-3'-phosphate
  modified_base 14: mod_base = OTHER; note = 2'-O-methylguanosine-3'-phosphate
  modified_base 15: mod_base = OTHER; note = 2'-O-methylguanosine-3'-phosphate
  modified_base 16: mod_base = OTHER; note = 2'-O-methyladenosine-3'-phosphate
  modified_base 17: mod_base = OTHER; note = 2'-O-methyladenosine-3'-phosphate
  modified_base 18: mod_base = OTHER; note = 2'-O-methylcytidine-3'-phosphate
  modified_base 19: mod_base = OTHER; note = 2'-O-methylcytidine-3'-phosphorothioate
  modified_base 20: mod_base = OTHER; note = 2'-O-methylcytidine-3'-phosphorothioate
  modified_base 21: mod_base = OTHER; note = 2'-O-methyladenosine
acctgatcgtggtggaaccca

SEQ ID NO: 11226 - RNA, 21 nt, synthetic construct
  source 1..21: mol_type = other RNA
  modified_base 1: mod_base = OTHER; note = 2'-O-methylcytidine-3'-phosphorothioate
  modified_base 2: mod_base = OTHER; note = 2'-O-methylcytidine-3'-phosphorothioate
  modified_base 3: mod_base = OTHER; note = 2'-O-methyluridine-3'-phosphate
  modified_base 4: mod_base = OTHER; note = 2'-O-methylguanosine-3'-phosphate
  modified_base 5: mod_base = OTHER; note = 2'-O-methyladenosine-3'-phosphate
  modified_base 6: mod_base = OTHER; note = 2'-O-docosanyl-uridine-3'-phosphate
  modified_base 7: mod_base = OTHER; note = 2'-deoxy-2'-fluorocytidine-3'-phosphate
  modified_base 8: mod_base = OTHER; note = 2'-O-methylguanosine-3'-phosphate
  modified_base 9: mod_base = OTHER; note = 2'-deoxy-2'-fluorouridine-3'-phosphate
  modified_base 10: mod_base = OTHER; note = 2'-deoxy-2'-fluoroguanosine-3'-phosphate
  modified_base 11: mod_base = OTHER; note = 2'-deoxy-2'-fluoroguanosine-3'-phosphate
  modified_base 12: mod_base = OTHER; note = 2'-O-methyluridine-3'-phosphate
  modified_base 13: mod_base = OTHER; note = 2'-O-methylguanosine-3'-phosphate
  modified_base 14: mod_base = OTHER; note = 2'-O-methylguanosine-3'-phosphate
  modified_base 15: mod_base = OTHER; note = 2'-O-methyladenosine-3'-phosphate
  modified_base 16: mod_base = OTHER; note = 2'-O-methyladenosine-3'-phosphate
  modified_base 17: mod_base = OTHER; note = 2'-O-methylcytidine-3'-phosphate
  modified_base 18: mod_base = OTHER; note = 2'-O-methylcytidine-3'-phosphate
  modified_base 19: mod_base = OTHER; note = 2'-O-methylcytidine-3'-phosphorothioate
  modified_base 20: mod_base = OTHER; note = 2'-O-methyluridine-3'-phosphorothioate
  modified_base 21: mod_base = OTHER; note = 2'-O-methyladenosine
cctgatcgtggtggaacccta

SEQ ID NO: 11227 - RNA, 21 nt, synthetic construct
  source 1..21: mol_type = other RNA
  modified_base 1: mod_base = OTHER; note = 2'-O-methyladenosine-3'-phosphorothioate
  modified_base 2: mod_base = OTHER; note = 2'-O-methyladenosine-3'-phosphorothioate
  modified_base 3: mod_base = OTHER; note = 2'-O-methylcytidine-3'-phosphate
  modified_base 4: mod_base = OTHER; note = 2'-O-methyluridine-3'-phosphate
  modified_base 5: mod_base = OTHER; note = 2'-O-methylguanosine-3'-phosphate
  modified_base 6: mod_base = OTHER; note = 2'-O-docosanyl-uridine-3'-phosphate
  modified_base 7: mod_base = OTHER; note = 2'-deoxy-2'-fluorouridine-3'-phosphate
  modified_base 8: mod_base = OTHER; note = 2'-O-methylcytidine-3'-phosphate
  modified_base 9: mod_base = OTHER; note = 2'-deoxy-2'-fluorouridine-3'-phosphate
  modified_base 10: mod_base = OTHER; note = 2'-deoxy-2'-fluoroadenosine-3'-phosphate
  modified_base 11: mod_base = OTHER; note = 2'-deoxy-2'-fluorouridine-3'-phosphate
  modified_base 12: mod_base = OTHER; note = 2'-O-methyladenosine-3'-phosphate
  modified_base 13: mod_base = OTHER; note = 2'-O-methyladenosine-3'-phosphate
  modified_base 14: mod_base = OTHER; note = 2'-O-methyladenosine-3'-phosphate
  modified_base 15: mod_base = OTHER; note = 2'-O-methylguanosine-3'-phosphate
  modified_base 16: mod_base = OTHER; note = 2'-O-methylcytidine-3'-phosphate
  modified_base 17: mod_base = OTHER; note = 2'-O-methyladenosine-3'-phosphate
  modified_base 18: mod_base = OTHER; note = 2'-O-methyladenosine-3'-phosphate
  modified_base 19: mod_base = OTHER; note = 2'-O-methyladenosine-3'-phosphorothioate
  modified_base 20: mod_base = OTHER; note = 2'-O-methylguanosine-3'-phosphorothioate
  modified_base 21: mod_base = OTHER; note = 2'-O-methyladenosine
aactgttctataaagcaaaga

SEQ ID NO: 11228 - RNA, 21 nt, synthetic construct
  source 1..21: mol_type = other RNA
  modified_base 1: mod_base = OTHER; note = 2'-O-methyluridine-3'-phosphorothioate
  modified_base 2: mod_base = OTHER; note = 2'-O-methyladenosine-3'-phosphorothioate
  modified_base 3: mod_base = OTHER; note = 2'-O-methyluridine-3'-phosphate
  modified_base 4: mod_base = OTHER; note = 2'-O-methylcytidine-3'-phosphate
  modified_base 5: mod_base = OTHER; note = 2'-O-methylcytidine-3'-phosphate
  modified_base 6: mod_base = OTHER; note = 2'-O-docosanyl-cytidine-3'-phosphate
  modified_base 7: mod_base = OTHER; note = 2'-deoxy-2'-fluoroadenosine-3'-phosphate
  modified_base 8: mod_base = OTHER; note = 2'-O-methyluridine-3'-phosphate
  modified_base 9: mod_base = OTHER; note = 2'-deoxy-2'-fluoroadenosine-3'-phosphate
  modified_base 10: mod_base = OTHER; note = 2'-deoxy-2'-fluorouridine-3'-phosphate
  modified_base 11: mod_base = OTHER; note = 2'-deoxy-2'-fluorouridine-3'-phosphate
  modified_base 12: mod_base = OTHER; note = 2'-O-methyluridine-3'-phosphate
  modified_base 13: mod_base = OTHER; note = 2'-O-methyladenosine-3'-phosphate
  modified_base 14: mod_base = OTHER; note = 2'-O-methyladenosine-3'-phosphate
  modified_base 15: mod_base = OTHER; note = 2'-O-methylcytidine-3'-phosphate
  modified_base 16: mod_base = OTHER; note = 2'-O-methyluridine-3'-phosphate
  modified_base 17: mod_base = OTHER; note = 2'-O-methylguanosine-3'-phosphate
  modified_base 18: mod_base = OTHER; note = 2'-O-methyluridine-3'-phosphate
  modified_base 19: mod_base = OTHER; note = 2'-O-methyluridine-3'-phosphorothioate
  modified_base 20: mod_base = OTHER; note = 2'-O-methylcytidine-3'-phosphorothioate
  modified_base 21: mod_base = OTHER; note = 2'-O-methyladenosine
tatcccatatttaactgttca

SEQ ID NO: 11229 - RNA, 21 nt, synthetic construct
  source 1..21: mol_type = other RNA
  modified_base 1: mod_base = OTHER; note = 2'-O-methyladenosine-3'-phosphorothioate
  modified_base 2: mod_base = OTHER; note = 2'-O-methyluridine-3'-phosphorothioate
  modified_base 3: mod_base = OTHER; note = 2'-O-methylcytidine-3'-phosphate
  modified_base 4: mod_base = OTHER; note = 2'-O-methylcytidine-3'-phosphate
  modified_base 5: mod_base = OTHER; note = 2'-O-methylcytidine-3'-phosphate
  modified_base 6: mod_base = OTHER; note = 2'-O-docosanyl-adenosine-3'-phosphate
  modified_base 7: mod_base = OTHER; note = 2'-deoxy-2'-fluorouridine-3'-phosphate
  modified_base 8: mod_base = OTHER; note = 2'-O-methyladenosine-3'-phosphate
  modified_base 9: mod_base = OTHER; note = 2'-deoxy-2'-fluorouridine-3'-phosphate
  modified_base 10: mod_base = OTHER; note = 2'-deoxy-2'-fluorouridine-3'-phosphate
  modified_base 11: mod_base = OTHER; note = 2'-deoxy-2'-fluorouridine-3'-phosphate
  modified_base 12: mod_base = OTHER; note = 2'-O-methyladenosine-3'-phosphate
  modified_base 13: mod_base = OTHER; note = 2'-O-methyladenosine-3'-phosphate
  modified_base 14: mod_base = OTHER; note = 2'-O-methylcytidine-3'-phosphate
  modified_base 15: mod_base = OTHER; note = 2'-O-methyluridine-3'-phosphate
  modified_base 16: mod_base = OTHER; note = 2'-O-methylguanosine-3'-phosphate
  modified_base 17: mod_base = OTHER; note = 2'-O-methyluridine-3'-phosphate
  modified_base 18: mod_base = OTHER; note = 2'-O-methyluridine-3'-phosphate
  modified_base 19: mod_base = OTHER; note = 2'-O-methylcytidine-3'-phosphorothioate
  modified_base 20: mod_base = OTHER; note = 2'-O-methyluridine-3'-phosphorothioate
  modified_base 21: mod_base = OTHER; note = 2'-O-methyladenosine
atcccatatttaactgttcta

SEQ ID NO: 11230 - RNA, 21 nt, synthetic construct
  source 1..21: mol_type = other RNA
  modified_base 1: mod_base = OTHER; note = 2'-O-methyluridine-3'-phosphorothioate
  modified_base 2: mod_base = OTHER; note = 2'-O-methylcytidine-3'-phosphorothioate
  modified_base 3: mod_base = OTHER; note = 2'-O-methylcytidine-3'-phosphate
  modified_base 4: mod_base = OTHER; note = 2'-O-methylcytidine-3'-phosphate
  modified_base 5: mod_base = OTHER; note = 2'-O-methyladenosine-3'-phosphate
  modified_base 6: mod_base = OTHER; note = 2'-O-docosanyl-uridine-3'-phosphate
  modified_base 7: mod_base = OTHER; note = 2'-deoxy-2'-fluoroadenosine-3'-phosphate
  modified_base 8: mod_base = OTHER; note = 2'-O-methyluridine-3'-phosphate
  modified_base 9: mod_base = OTHER; note = 2'-deoxy-2'-fluorouridine-3'-phosphate
  modified_base 10: mod_base = OTHER; note = 2'-deoxy-2'-fluorouridine-3'-phosphate
  modified_base 11: mod_base = OTHER; note = 2'-deoxy-2'-fluoroadenosine-3'-phosphate
  modified_base 12: mod_base = OTHER; note = 2'-O-methyladenosine-3'-phosphate
  modified_base 13: mod_base = OTHER; note = 2'-O-methylcytidine-3'-phosphate
  modified_base 14: mod_base = OTHER; note = 2'-O-methyluridine-3'-phosphate
  modified_base 15: mod_base = OTHER; note = 2'-O-methylguanosine-3'-phosphate
  modified_base 16: mod_base = OTHER; note = 2'-O-methyluridine-3'-phosphate
  modified_base 17: mod_base = OTHER; note = 2'-O-methyluridine-3'-phosphate
  modified_base 18: mod_base = OTHER; note = 2'-O-methylcytidine-3'-phosphate
  modified_base 19: mod_base = OTHER; note = 2'-O-methyluridine-3'-phosphorothioate
  modified_base 20: mod_base = OTHER; note = 2'-O-methyladenosine-3'-phosphorothioate
  modified_base 21: mod_base = OTHER; note = 2'-O-methyladenosine
tcccatatttaactgttctaa

SEQ ID NO: 11231 - RNA, 21 nt, synthetic construct
  source 1..21: mol_type = other RNA
  modified_base 1: mod_base = OTHER; note = 2'-O-methylcytidine-3'-phosphorothioate
  modified_base 2: mod_base = OTHER; note = 2'-O-methylcytidine-3'-phosphorothioate
  modified_base 3: mod_base = OTHER; note = 2'-O-methylcytidine-3'-phosphate
  modified_base 4: mod_base = OTHER; note = 2'-O-methyladenosine-3'-phosphate
  modified_base 5: mod_base = OTHER; note = 2'-O-methyluridine-3'-phosphate
  modified_base 6: mod_base = OTHER; note = 2'-O-docosanyl-adenosine-3'-phosphate
  modified_base 7: mod_base = OTHER; note = 2'-deoxy-2'-fluorouridine-3'-phosphate
  modified_base 8: mod_base = OTHER; note = 2'-O-methyluridine-3'-phosphate
  modified_base 9: mod_base = OTHER; note = 2'-deoxy-2'-fluorouridine-3'-phosphate
  modified_base 10: mod_base = OTHER; note = 2'-deoxy-2'-fluoroadenosine-3'-phosphate
  modified_base 11: mod_base = OTHER; note = 2'-deoxy-2'-fluoroadenosine-3'-phosphate
  modified_base 12: mod_base = OTHER; note = 2'-O-methylcytidine-3'-phosphate
  modified_base 13: mod_base = OTHER; note = 2'-O-methyluridine-3'-phosphate
  modified_base 14: mod_base = OTHER; note = 2'-O-methylguanosine-3'-phosphate
  modified_base 15: mod_base = OTHER; note = 2'-O-methyluridine-3'-phosphate
  modified_base 16: mod_base = OTHER; note = 2'-O-methyluridine-3'-phosphate
  modified_base 17: mod_base = OTHER; note = 2'-O-methylcytidine-3'-phosphate
  modified_base 18: mod_base = OTHER; note = 2'-O-methyluridine-3'-phosphate
  modified_base 19: mod_base = OTHER; note = 2'-O-methyladenosine-3'-phosphorothioate
  modified_base 20: mod_base = OTHER; note = 2'-O-methyluridine-3'-phosphorothioate
  modified_base 21: mod_base = OTHER; note = 2'-O-methyladenosine
cccatatttaactgttctata

SEQ ID NO: 11232 - RNA, 21 nt, synthetic construct
  source 1..21: mol_type = other RNA
  modified_base 1: mod_base = OTHER; note = 2'-O-methylcytidine-3'-phosphorothioate
  modified_base 2: mod_base = OTHER; note = 2'-O-methylcytidine-3'-phosphorothioate
  modified_base 3: mod_base = OTHER; note = 2'-O-methyladenosine-3'-phosphate
  modified_base 4: mod_base = OTHER; note = 2'-O-methyluridine-3'-phosphate
  modified_base 5: mod_base = OTHER; note = 2'-O-methyladenosine-3'-phosphate
  modified_base 6: mod_base = OTHER; note = 2'-O-docosanyl-uridine-3'-phosphate
  modified_base 7: mod_base = OTHER; note = 2'-deoxy-2'-fluorouridine-3'-phosphate
  modified_base 8: mod_base = OTHER; note = 2'-O-methyluridine-3'-phosphate
  modified_base 9: mod_base = OTHER; note = 2'-deoxy-2'-fluoroadenosine-3'-phosphate
  modified_base 10: mod_base = OTHER; note = 2'-deoxy-2'-fluoroadenosine-3'-phosphate
  modified_base 11: mod_base = OTHER; note = 2'-deoxy-2'-fluorocytidine-3'-phosphate
  modified_base 12: mod_base = OTHER; note = 2'-O-methyluridine-3'-phosphate
  modified_base 13: mod_base = OTHER; note = 2'-O-methylguanosine-3'-phosphate
  modified_base 14: mod_base = OTHER; note = 2'-O-methyluridine-3'-phosphate
  modified_base 15: mod_base = OTHER; note = 2'-O-methyluridine-3'-phosphate
  modified_base 16: mod_base = OTHER; note = 2'-O-methylcytidine-3'-phosphate
  modified_base 17: mod_base = OTHER; note = 2'-O-methyluridine-3'-phosphate
  modified_base 18: mod_base = OTHER; note = 2'-O-methyladenosine-3'-phosphate
  modified_base 19: mod_base = OTHER; note = 2'-O-methyluridine-3'-phosphorothioate
  modified_base 20: mod_base = OTHER; note = 2'-O-methyladenosine-3'-phosphorothioate
  modified_base 21: mod_base = OTHER; note = 2'-O-methyladenosine
ccatatttaactgttctataa

SEQ ID NO: 11233 - RNA, 21 nt, synthetic construct
  source 1..21: mol_type = other RNA
  modified_base 1: mod_base = OTHER; note = 2'-O-methylcytidine-3'-phosphorothioate
  modified_base 2: mod_base = OTHER; note = 2'-O-methyladenosine-3'-phosphorothioate
  modified_base 3: mod_base = OTHER; note = 2'-O-methyluridine-3'-phosphate
  modified_base 4: mod_base = OTHER; note = 2'-O-methyladenosine-3'-phosphate
  modified_base 5: mod_base = OTHER; note = 2'-O-methyluridine-3'-phosphate
  modified_base 6: mod_base = OTHER; note = 2'-O-docosanyl-uridine-3'-phosphate
  modified_base 7: mod_base = OTHER; note = 2'-deoxy-2'-fluorouridine-3'-phosphate
  modified_base 8: mod_base = OTHER; note = 2'-O-methyladenosine-3'-phosphate
  modified_base 9: mod_base = OTHER; note = 2'-deoxy-2'-fluoroadenosine-3'-phosphate
  modified_base 10: mod_base = OTHER; note = 2'-deoxy-2'-fluorocytidine-3'-phosphate
  modified_base 11: mod_base = OTHER; note = 2'-deoxy-2'-fluorouridine-3'-phosphate
  modified_base 12: mod_base = OTHER; note = 2'-O-methylguanosine-3'-phosphate
  modified_base 13: mod_base = OTHER; note = 2'-O-methyluridine-3'-phosphate
  modified_base 14: mod_base = OTHER; note = 2'-O-methyluridine-3'-phosphate
  modified_base 15: mod_base = OTHER; note = 2'-O-methylcytidine-3'-phosphate
  modified_base 16: mod_base = OTHER; note = 2'-O-methyluridine-3'-phosphate
  modified_base 17: mod_base = OTHER; note = 2'-O-methyladenosine-3'-phosphate
  modified_base 18: mod_base = OTHER; note = 2'-O-methyluridine-3'-phosphate
  modified_base 19: mod_base = OTHER; note = 2'-O-methyladenosine-3'-phosphorothioate
  modified_base 20: mod_base = OTHER; note = 2'-O-methyladenosine-3'-phosphorothioate
  modified_base 21: mod_base = OTHER; note = 2'-O-methyladenosine
catatttaactgttctataaa

SEQ ID NO: 11234 - RNA, 21 nt, synthetic construct
  source 1..21: mol_type = other RNA
  modified_base 1: mod_base = OTHER; note = 2'-O-methyladenosine-3'-phosphorothioate
  modified_base 2: mod_base = OTHER; note = 2'-O-methylcytidine-3'-phosphorothioate
  modified_base 3: mod_base = OTHER; note = 2'-O-methyluridine-3'-phosphate
  modified_base 4: mod_base = OTHER; note = 2'-O-methylguanosine-3'-phosphate
  modified_base 5: mod_base = OTHER; note = 2'-O-methyluridine-3'-phosphate
  modified_base 6: mod_base = OTHER; note = 2'-O-docosanyl-uridine-3'-phosphate
  modified_base 7: mod_base = OTHER; note = 2'-deoxy-2'-fluorocytidine-3'-phosphate
  modified_base 8: mod_base = OTHER; note = 2'-O-methyluridine-3'-phosphate
  modified_base 9: mod_base = OTHER; note = 2'-deoxy-2'-fluoroadenosine-3'-phosphate
  modified_base 10: mod_base = OTHER; note = 2'-deoxy-2'-fluorouridine-3'-phosphate
  modified_base 11: mod_base = OTHER; note = 2'-deoxy-2'-fluoroadenosine-3'-phosphate
  modified_base 12: mod_base = OTHER; note = 2'-O-methyladenosine-3'-phosphate
  modified_base 13: mod_base = OTHER; note = 2'-O-methyladenosine-3'-phosphate
  modified_base 14: mod_base = OTHER; note = 2'-O-methylguanosine-3'-phosphate
  modified_base 15: mod_base = OTHER; note = 2'-O-methylcytidine-3'-phosphate
  modified_base 16: mod_base = OTHER; note = 2'-O-methyladenosine-3'-phosphate
  modified_base 17: mod_base = OTHER; note = 2'-O-methyladenosine-3'-phosphate
  modified_base 18: mod_base = OTHER; note = 2'-O-methyladenosine-3'-phosphate
  modified_base 19: mod_base = OTHER; note = 2'-O-methylguanosine-3'-phosphorothioate
  modified_base 20: mod_base = OTHER; note = 2'-O-methylcytidine-3'-phosphorothioate
  modified_base 21: mod_base = OTHER; note = 2'-O-methyladenosine
actgttctataaagcaaagca

SEQ ID NO: 11235 - RNA, 21 nt, synthetic construct
  source 1..21: mol_type = other RNA
  modified_base 1: mod_base = OTHER; note = 2'-O-methylcytidine-3'-phosphorothioate
  modified_base 2: mod_base = OTHER; note = 2'-O-methyluridine-3'-phosphorothioate
  modified_base 3: mod_base = OTHER; note = 2'-O-methylguanosine-3'-phosphate
  modified_base 4: mod_base = OTHER; note = 2'-O-methyluridine-3'-phosphate
  modified_base 5: mod_base = OTHER; note = 2'-O-methyluridine-3'-phosphate
  modified_base 6: mod_base = OTHER; note = 2'-O-docosanyl-cytidine-3'-phosphate
  modified_base 7: mod_base = OTHER; note = 2'-deoxy-2'-fluorouridine-3'-phosphate
  modified_base 8: mod_base = OTHER; note = 2'-O-methyladenosine-3'-phosphate
  modified_base 9: mod_base = OTHER; note = 2'-deoxy-2'-fluorouridine-3'-phosphate
  modified_base 10: mod_base = OTHER; note = 2'-deoxy-2'-fluoroadenosine-3'-phosphate
  modified_base 11: mod_base = OTHER; note = 2'-deoxy-2'-fluoroadenosine-3'-phosphate
  modified_base 12: mod_base = OTHER; note = 2'-O-methyladenosine-3'-phosphate
  modified_base 13: mod_base = OTHER; note = 2'-O-methylguanosine-3'-phosphate
  modified_base 14: mod_base = OTHER; note = 2'-O-methylcytidine-3'-phosphate
  modified_base 15: mod_base = OTHER; note = 2'-O-methyladenosine-3'-phosphate
  modified_base 16: mod_base = OTHER; note = 2'-O-methyladenosine-3'-phosphate
  modified_base 17: mod_base = OTHER; note = 2'-O-methyladenosine-3'-phosphate
  modified_base 18: mod_base = OTHER; note = 2'-O-methylguanosine-3'-phosphate
  modified_base 19: mod_base = OTHER; note = 2'-O-methylcytidine-3'-phosphorothioate
  modified_base 20: mod_base = OTHER; note = 2'-O-methyladenosine-3'-phosphorothioate
  modified_base 21: mod_base = OTHER; note = 2'-O-methyladenosine
ctgttctataaagcaaagcaa

SEQ ID NO: 11236 - RNA, 21 nt, synthetic construct
  source 1..21: mol_type = other RNA
  modified_base 1: mod_base = OTHER; note = 2'-O-methyluridine-3'-phosphorothioate
  modified_base 2: mod_base = OTHER; note = 2'-O-methylguanosine-3'-phosphorothioate
  modified_base 3: mod_base = OTHER; note = 2'-O-methyluridine-3'-phosphate
  modified_base 4: mod_base = OTHER; note = 2'-O-methyluridine-3'-phosphate
  modified_base 5: mod_base = OTHER; note = 2'-O-methylcytidine-3'-phosphate
  modified_base 6: mod_base = OTHER; note = 2'-O-docosanyl-uridine-3'-phosphate
  modified_base 7: mod_base = OTHER; note = 2'-deoxy-2'-fluoroadenosine-3'-phosphate
  modified_base 8: mod_base = OTHER; note = 2'-O-methyluridine-3'-phosphate
  modified_base 9: mod_base = OTHER; note = 2'-deoxy-2'-fluoroadenosine-3'-phosphate
  modified_base 10: mod_base = OTHER; note = 2'-deoxy-2'-fluoroadenosine-3'-phosphate
  modified_base 11: mod_base = OTHER; note = 2'-deoxy-2'-fluoroadenosine-3'-phosphate
  modified_base 12: mod_base = OTHER; note = 2'-O-methylguanosine-3'-phosphate
  modified_base 13: mod_base = OTHER; note = 2'-O-methylcytidine-3'-phosphate
  modified_base 14: mod_base = OTHER; note = 2'-O-methyladenosine-3'-phosphate
  modified_base 15: mod_base = OTHER; note = 2'-O-methyladenosine-3'-phosphate
  modified_base 16: mod_base = OTHER; note = 2'-O-methyladenosine-3'-phosphate
  modified_base 17: mod_base = OTHER; note = 2'-O-methylguanosine-3'-phosphate
  modified_base 18: mod_base = OTHER; note = 2'-O-methylcytidine-3'-phosphate
  modified_base 19: mod_base = OTHER; note = 2'-O-methyladenosine-3'-phosphorothioate
  modified_base 20: mod_base = OTHER; note = 2'-O-methylcytidine-3'-phosphorothioate
  modified_base 21: mod_base = OTHER; note = 2'-O-methyladenosine
tgttctataaagcaaagcaca

SEQ ID NO: 11237 - RNA, 21 nt, synthetic construct
  source 1..21: mol_type = other RNA
  modified_base 1: mod_base = OTHER; note = 2'-O-methylguanosine-3'-phosphorothioate
  modified_base 2: mod_base = OTHER; note = 2'-O-methyluridine-3'-phosphorothioate
  modified_base 3: mod_base = OTHER; note = 2'-O-methyluridine-3'-phosphate
  modified_base 4: mod_base = OTHER; note = 2'-O-methylcytidine-3'-phosphate
  modified_base 5: mod_base = OTHER; note = 2'-O-methyluridine-3'-phosphate
  modified_base 6: mod_base = OTHER; note = 2'-O-docosanyl-adenosine-3'-phosphate
  modified_base 7: mod_base = OTHER; note = 2'-deoxy-2'-fluorouridine-3'-phosphate
  modified_base 8: mod_base = OTHER; note = 2'-O-methyladenosine-3'-phosphate
  modified_base 9: mod_base = OTHER; note = 2'-deoxy-2'-fluoroadenosine-3'-phosphate
  modified_base 10: mod_base = OTHER; note = 2'-deoxy-2'-fluoroadenosine-3'-phosphate
  modified_base 11: mod_base = OTHER; note = 2'-deoxy-2'-fluoroguanosine-3'-phosphate
  modified_base 12: mod_base = OTHER; note = 2'-O-methylcytidine-3'-phosphate
  modified_base 13: mod_base = OTHER; note = 2'-O-methyladenosine-3'-phosphate
  modified_base 14: mod_base = OTHER; note = 2'-O-methyladenosine-3'-phosphate
  modified_base 15: mod_base = OTHER; note = 2'-O-methyladenosine-3'-phosphate
  modified_base 16: mod_base = OTHER; note = 2'-O-methylguanosine-3'-phosphate
  modified_base 17: mod_base = OTHER; note = 2'-O-methylcytidine-3'-phosphate
  modified_base 18: mod_base = OTHER; note = 2'-O-methyladenosine-3'-phosphate
  modified_base 19: mod_base = OTHER; note = 2'-O-methylcytidine-3'-phosphorothioate
  modified_base 20: mod_base = OTHER; note = 2'-O-methyladenosine-3'-phosphorothioate
  modified_base 21: mod_base = OTHER; note = 2'-O-methyladenosine
gttctataaagcaaagcacaa

SEQ ID NO: 11238 - RNA, 21 nt, synthetic construct
  source 1..21: mol_type = other RNA
  modified_base 1: mod_base = OTHER; note = 2'-O-methyluridine-3'-phosphorothioate
  modified_base 2: mod_base = OTHER; note = 2'-O-methyluridine-3'-phosphorothioate
  modified_base 3: mod_base = OTHER; note = 2'-O-methylcytidine-3'-phosphate
  modified_base 4: mod_base = OTHER; note = 2'-O-methyluridine-3'-phosphate
  modified_base 5: mod_base = OTHER; note = 2'-O-methyladenosine-3'-phosphate
  modified_base 6: mod_base = OTHER; note = 2'-O-docosanyl-uridine-3'-phosphate
  modified_base 7: mod_base = OTHER; note = 2'-deoxy-2'-fluoroadenosine-3'-phosphate
  modified_base 8: mod_base = OTHER; note = 2'-O-methyladenosine-3'-phosphate
  modified_base 9: mod_base = OTHER; note = 2'-deoxy-2'-fluoroadenosine-3'-phosphate
  modified_base 10: mod_base = OTHER; note = 2'-deoxy-2'-fluoroguanosine-3'-phosphate
  modified_base 11: mod_base = OTHER; note = 2'-deoxy-2'-fluorocytidine-3'-phosphate
  modified_base 12: mod_base = OTHER; note = 2'-O-methyladenosine-3'-phosphate
  modified_base 13: mod_base = OTHER; note = 2'-O-methyladenosine-3'-phosphate
  modified_base 14: mod_base = OTHER; note = 2'-O-methyladenosine-3'-phosphate
  modified_base 15: mod_base = OTHER; note = 2'-O-methylguanosine-3'-phosphate
  modified_base 16: mod_base = OTHER; note = 2'-O-methylcytidine-3'-phosphate
  modified_base 17: mod_base = OTHER; note = 2'-O-methyladenosine-3'-phosphate
  modified_base 18: mod_base = OTHER; note = 2'-O-methylcytidine-3'-phosphate
  modified_base 19: mod_base = OTHER; note = 2'-O-methyladenosine-3'-phosphorothioate
  modified_base 20: mod_base = OTHER; note = 2'-O-methylguanosine-3'-phosphorothioate
  modified_base 21: mod_base = OTHER; note = 2'-O-methyladenosine
ttctataaagcaaagcacaga

SEQ ID NO: 11239 - RNA, 21 nt, synthetic construct
  source 1..21: mol_type = other RNA
  modified_base 1: mod_base = OTHER; note = 2'-O-methyluridine-3'-phosphorothioate
  modified_base 2: mod_base = OTHER; note = 2'-O-methylcytidine-3'-phosphorothioate
  modified_base 3: mod_base = OTHER; note = 2'-O-methyluridine-3'-phosphate
  modified_base 4: mod_base = OTHER; note = 2'-O-methyladenosine-3'-phosphate
  modified_base 5: mod_base = OTHER; note = 2'-O-methyluridine-3'-phosphate
  modified_base 6: mod_base = OTHER; note = 2'-O-docosanyl-adenosine-3'-phosphate
  modified_base 7: mod_base = OTHER; note = 2'-deoxy-2'-fluoroadenosine-3'-phosphate
  modified_base 8: mod_base = OTHER; note = 2'-O-methyladenosine-3'-phosphate
  modified_base 9: mod_base = OTHER; note = 2'-deoxy-2'-fluoroguanosine-3'-phosphate
  modified_base 10: mod_base = OTHER; note = 2'-deoxy-2'-fluorocytidine-3'-phosphate
  modified_base 11: mod_base = OTHER; note = 2'-deoxy-2'-fluoroadenosine-3'-phosphate
  modified_base 12: mod_base = OTHER; note = 2'-O-methyladenosine-3'-phosphate
  modified_base 13: mod_base = OTHER; note = 2'-O-methyladenosine-3'-phosphate
  modified_base 14: mod_base = OTHER; note = 2'-O-methylguanosine-3'-phosphate
  modified_base 15: mod_base = OTHER; note = 2'-O-methylcytidine-3'-phosphate
  modified_base 16: mod_base = OTHER; note = 2'-O-methyladenosine-3'-phosphate
  modified_base 17: mod_base = OTHER; note = 2'-O-methylcytidine-3'-phosphate
  modified_base 18: mod_base = OTHER; note = 2'-O-methyladenosine-3'-phosphate
  modified_base 19: mod_base = OTHER; note = 2'-O-methylguanosine-3'-phosphorothioate
  modified_base 20: mod_base = OTHER; note = 2'-O-methylcytidine-3'-phosphorothioate
  modified_base 21: mod_base = OTHER; note = 2'-O-methyladenosine
tctataaagcaaagcacagca

SEQ ID NO: 11240 - RNA, 21 nt, synthetic construct
  source 1..21: mol_type = other RNA
  modified_base 1: mod_base = OTHER; note = 2'-O-methylcytidine-3'-phosphorothioate
  modified_base 2: mod_base = OTHER; note = 2'-O-methyluridine-3'-phosphorothioate
  modified_base 3: mod_base = OTHER; note = 2'-O-methyladenosine-3'-phosphate
  modified_base 4: mod_base = OTHER; note = 2'-O-methyluridine-3'-phosphate
  modified_base 5: mod_base = OTHER; note = 2'-O-methyladenosine-3'-phosphate
  modified_base 6: mod_base = OTHER; note = 2'-O-docosanyl-adenosine-3'-phosphate
  modified_base 7: mod_base = OTHER; note = 2'-deoxy-2'-fluoroadenosine-3'-phosphate
  modified_base 8: mod_base = OTHER; note = 2'-O-methylguanosine-3'-phosphate
  modified_base 9: mod_base = OTHER; note = 2'-deoxy-2'-fluorocytidine-3'-phosphate
  modified_base 10: mod_base = OTHER; note = 2'-deoxy-2'-fluoroadenosine-3'-phosphate
  modified_base 11: mod_base = OTHER; note = 2'-deoxy-2'-fluoroadenosine-3'-phosphate
  modified_base 12: mod_base = OTHER; note = 2'-O-methyladenosine-3'-phosphate
  modified_base 13: mod_base = OTHER; note = 2'-O-methylguanosine-3'-phosphate
  modified_base 14: mod_base = OTHER; note = 2'-O-methylcytidine-3'-phosphate
  modified_base 15: mod_base = OTHER; note = 2'-O-methyladenosine-3'-phosphate
  modified_base 16: mod_base = OTHER; note = 2'-O-methylcytidine-3'-phosphate
  modified_base 17: mod_base = OTHER; note = 2'-O-methyladenosine-3'-phosphate
  modified_base 18: mod_base = OTHER; note = 2'-O-methylguanosine-3'-phosphate
  modified_base 19: mod_base = OTHER; note = 2'-O-methylcytidine-3'-phosphorothioate
  modified_base 20: mod_base = OTHER; note = 2'-O-methyluridine-3'-phosphorothioate
  modified_base 21: mod_base = OTHER; note = 2'-O-methyladenosine
ctataaagcaaagcacagcta

SEQ ID NO: 11241 - RNA, 21 nt, synthetic construct
  source 1..21: mol_type = other RNA
  modified_base 1: mod_base = OTHER; note = 2'-O-methyluridine-3'-phosphorothioate
  modified_base 2: mod_base = OTHER; note = 2'-O-methyladenosine-3'-phosphorothioate
  modified_base 3: mod_base = OTHER; note = 2'-O-methyluridine-3'-phosphate
  modified_base 4: mod_base = OTHER; note = 2'-O-methyladenosine-3'-phosphate
  modified_base 5: mod_base = OTHER; note = 2'-O-methyladenosine-3'-phosphate
  modified_base 6: mod_base = OTHER; note = 2'-O-docosanyl-adenosine-3'-phosphate
  modified_base 7: mod_base = OTHER; note = 2'-deoxy-2'-fluoroguanosine-3'-phosphate
  modified_base 8: mod_base = OTHER; note = 2'-O-methylcytidine-3'-phosphate
  modified_base 9: mod_base = OTHER; note = 2'-deoxy-2'-fluoroadenosine-3'-phosphate
  modified_base 10: mod_base = OTHER; note = 2'-deoxy-2'-fluoroadenosine-3'-phosphate
  modified_base 11: mod_base = OTHER; note = 2'-deoxy-2'-fluoroadenosine-3'-phosphate
  modified_base 12: mod_base = OTHER; note = 2'-O-methylguanosine-3'-phosphate
  modified_base 13: mod_base = OTHER; note = 2'-O-methylcytidine-3'-phosphate
  modified_base 14: mod_base = OTHER; note = 2'-O-methyladenosine-3'-phosphate
  modified_base 15: mod_base = OTHER; note = 2'-O-methylcytidine-3'-phosphate
  modified_base 16: mod_base = OTHER; note = 2'-O-methyladenosine-3'-phosphate
  modified_base 17: mod_base = OTHER; note = 2'-O-methylguanosine-3'-phosphate
  modified_base 18: mod_base = OTHER; note = 2'-O-methylcytidine-3'-phosphate
  modified_base 19: mod_base = OTHER; note = 2'-O-methyluridine-3'-phosphorothioate
  modified_base 20: mod_base = OTHER; note = 2'-O-methyluridine-3'-phosphorothioate
  modified_base 21: mod_base = OTHER; note = 2'-O-methyladenosine
tataaagcaaagcacagctta

SEQ ID NO: 11242 - RNA, 21 nt, synthetic construct
  source 1..21: mol_type = other RNA
  modified_base 1: mod_base = OTHER; note = 2'-O-methylguanosine-3'-phosphorothioate
  modified_base 2: mod_base = OTHER; note = 2'-O-methyluridine-3'-phosphorothioate
  modified_base 3: mod_base = OTHER; note = 2'-O-methyluridine-3'-phosphate
  modified_base 4: mod_base = OTHER; note = 2'-O-methylcytidine-3'-phosphate
  modified_base 5: mod_base = OTHER; note = 2'-O-methyluridine-3'-phosphate
  modified_base 6: mod_base = OTHER; note = 2'-O-docosanyl-guanosine-3'-phosphate
  modified_base 7: mod_base = OTHER; note = 2'-deoxy-2'-fluoroadenosine-3'-phosphate
  modified_base 8: mod_base = OTHER; note = 2'-O-methyladenosine-3'-phosphate
  modified_base 9: mod_base = OTHER; note = 2'-deoxy-2'-fluoroguanosine-3'-phosphate
  modified_base 10: mod_base = OTHER; note = 2'-deoxy-2'-fluoroguanosine-3'-phosphate
  modified_base 11: mod_base = OTHER; note = 2'-deoxy-2'-fluoroadenosine-3'-phosphate
  modified_base 12: mod_base = OTHER; note = 2'-O-methyluridine-3'-phosphate
  modified_base 13: mod_base = OTHER; note = 2'-O-methyladenosine-3'-phosphate
  modified_base 14: mod_base = OTHER; note = 2'-O-methyluridine-3'-phosphate
  modified_base 15: mod_base = OTHER; note = 2'-O-methyladenosine-3'-phosphate
  modified_base 16: mod_base = OTHER; note = 2'-O-methylcytidine-3'-phosphate
  modified_base 17: mod_base = OTHER; note = 2'-O-methyluridine-3'-phosphate
  modified_base 18: mod_base = OTHER; note = 2'-O-methyluridine-3'-phosphate
  modified_base 19: mod_base = OTHER; note = 2'-O-methylcytidine-3'-phosphorothioate
  modified_base 20: mod_base = OTHER; note = 2'-O-methyluridine-3'-phosphorothioate
  modified_base 21: mod_base = OTHER; note = 2'-O-methyladenosine
gttctgaaggatatacttcta

SEQ ID NO: 11243 - RNA, 21 nt, synthetic construct
  source 1..21: mol_type = other RNA
  modified_base 1: mod_base = OTHER; note = 2'-O-methylcytidine-3'-phosphorothioate
  modified_base 2: mod_base = OTHER; note = 2'-O-methyluridine-3'-phosphorothioate
  modified_base 3: mod_base = OTHER; note = 2'-O-methylguanosine-3'-phosphate
  modified_base 4: mod_base = OTHER; note = 2'-O-methyluridine-3'-phosphate
  modified_base 5: mod_base = OTHER; note = 2'-O-methyladenosine-3'-phosphate
  modified_base 6: mod_base = OTHER; note = 2'-O-docosanyl-uridine-3'-phosphate
  modified_base 7: mod_base = OTHER; note = 2'-deoxy-2'-fluorouridine-3'-phosphate
  modified_base 8: mod_base = OTHER; note = 2'-O-methyluridine-3'-phosphate
  modified_base 9: mod_base = OTHER; note = 2'-deoxy-2'-fluorouridine-3'-phosphate
  modified_base 10: mod_base = OTHER; note = 2'-deoxy-2'-fluorocytidine-3'-phosphate
  modified_base 11: mod_base = OTHER; note = 2'-deoxy-2'-fluorouridine-3'-phosphate
  modified_base 12: mod_base = OTHER; note = 2'-O-methylcytidine-3'-phosphate
  modified_base 13: mod_base = OTHER; note = 2'-O-methyladenosine-3'-phosphate
  modified_base 14: mod_base = OTHER; note = 2'-O-methyluridine-3'-phosphate
  modified_base 15: mod_base = OTHER; note = 2'-O-methyladenosine-3'-phosphate
  modified_base 16: mod_base = OTHER; note = 2'-O-methylguanosine-3'-phosphate
  modified_base 17: mod_base = OTHER; note = 2'-O-methyladenosine-3'-phosphate
  modified_base 18: mod_base = OTHER; note = 2'-O-methylguanosine-3'-phosphate
  modified_base 19: mod_base = OTHER; note = 2'-O-methyluridine-3'-phosphorothioate
  modified_base 20: mod_base = OTHER; note = 2'-O-methyladenosine-3'-phosphorothioate
  modified_base 21: mod_base = OTHER; note = 2'-O-methyladenosine
ctgtattttctcatagagtaa

SEQ ID NO: 11244 - RNA, 21 nt, synthetic construct
  source 1..21: mol_type = other RNA
  modified_base 1: mod_base = OTHER; note = 2'-O-methylcytidine-3'-phosphorothioate
  modified_base 2: mod_base = OTHER; note = 2'-O-methyladenosine-3'-phosphorothioate
  modified_base 3: mod_base = OTHER; note = 2'-O-methylguanosine-3'-phosphate
  modified_base 4: mod_base = OTHER; note = 2'-O-methylcytidine-3'-phosphate
  modified_base 5: mod_base = OTHER; note = 2'-O-methyluridine-3'-phosphate
  modified_base 6: mod_base = OTHER; note = 2'-O-docosanyl-uridine-3'-phosphate
  modified_base 7: mod_base = OTHER; note = 2'-deoxy-2'-fluoroguanosine-3'-phosphate
  modified_base 8: mod_base = OTHER; note = 2'-O-methylguanosine-3'-phosphate
  modified_base 9: mod_base = OTHER; note = 2'-deoxy-2'-fluoroguanosine-3'-phosphate
  modified_base 10: mod_base = OTHER; note = 2'-deoxy-2'-fluorouridine-3'-phosphate
  modified_base 11: mod_base = OTHER; note = 2'-deoxy-2'-fluoroadenosine-3'-phosphate
  modified_base 12: mod_base = OTHER; note = 2'-O-methyladenosine-3'-phosphate
  modified_base 13: mod_base = OTHER; note = 2'-O-methyluridine-3'-phosphate
  modified_base 14: mod_base = OTHER; note = 2'-O-methyladenosine-3'-phosphate
  modified_base 15: mod_base = OTHER; note = 2'-O-methylguanosine-3'-phosphate
  modified_base 16: mod_base = OTHER; note = 2'-O-methylcytidine-3'-phosphate
  modified_base 17: mod_base = OTHER; note = 2'-O-methylguanosine-3'-phosphate
  modified_base 18: mod_base = OTHER; note = 2'-O-methyluridine-3'-phosphate
  modified_base 19: mod_base = OTHER; note = 2'-O-methyluridine-3'-phosphorothioate
  modified_base 20: mod_base = OTHER; note = 2'-O-methylcytidine-3'-phosphorothioate
  modified_base 21: mod_base = OTHER; note = 2'-O-methyladenosine
cagcttgggtaatagcgttca

SEQ ID NO: 11245 - RNA, 21 nt, synthetic construct
  source 1..21: mol_type = other RNA
  modified_base 1: mod_base = OTHER; note = 2'-O-methyladenosine-3'-phosphorothioate
  modified_base 2: mod_base = OTHER; note = 2'-O-methylguanosine-3'-phosphorothioate
  modified_base 3: mod_base = OTHER; note = 2'-O-methylcytidine-3'-phosphate
  modified_base 4: mod_base = OTHER; note = 2'-O-methyluridine-3'-phosphate
  modified_base 5: mod_base = OTHER; note = 2'-O-methyluridine-3'-phosphate
  modified_base 6: mod_base = OTHER; note = 2'-O-docosanyl-guanosine-3'-phosphate
  modified_base 7: mod_base = OTHER; note = 2'-deoxy-2'-fluoroguanosine-3'-phosphate
  modified_base 8: mod_base = OTHER; note = 2'-O-methylguanosine-3'-phosphate
  modified_base 9: mod_base = OTHER; note = 2'-deoxy-2'-fluorouridine-3'-phosphate
  modified_base 10: mod_base = OTHER; note = 2'-deoxy-2'-fluoroadenosine-3'-phosphate
  modified_base 11: mod_base = OTHER; note = 2'-deoxy-2'-fluoroadenosine-3'-phosphate
  modified_base 12: mod_base = OTHER; note = 2'-O-methyluridine-3'-phosphate
  modified_base 13: mod_base = OTHER; note = 2'-O-methyladenosine-3'-phosphate
  modified_base 14: mod_base = OTHER; note = 2'-O-methylguanosine-3'-phosphate
  modified_base 15: mod_base = OTHER; note = 2'-O-methylcytidine-3'-phosphate
  modified_base 16: mod_base = OTHER; note = 2'-O-methylguanosine-3'-phosphate
  modified_base 17: mod_base = OTHER; note = 2'-O-methyluridine-3'-phosphate
  modified_base 18: mod_base = OTHER; note = 2'-O-methyluridine-3'-phosphate
  modified_base 19: mod_base = OTHER; note = 2'-O-methylcytidine-3'-phosphorothioate
  modified_base 20: mod_base = OTHER; note = 2'-O-methyluridine-3'-phosphorothioate
  modified_base 21: mod_base = OTHER; note = 2'-O-methyladenosine
agcttgggtaatagcgttcta

SEQ ID NO: 11246 - RNA, 21 nt, synthetic construct
  source 1..21: mol_type = other RNA
  modified_base 1: mod_base = OTHER; note = 2'-O-methylguanosine-3'-phosphorothioate
  modified_base 2: mod_base = OTHER; note = 2'-O-methylcytidine-3'-phosphorothioate
  modified_base 3: mod_base = OTHER; note = 2'-O-methyluridine-3'-phosphate
  modified_base 4: mod_base = OTHER; note = 2'-O-methyluridine-3'-phosphate
  modified_base 5: mod_base = OTHER; note = 2'-O-methylguanosine-3'-phosphate
  modified_base 6: mod_base = OTHER; note = 2'-O-docosanyl-guanosine-3'-phosphate
  modified_base 7: mod_base = OTHER; note = 2'-deoxy-2'-fluoroguanosine-3'-phosphate
  modified_base 8: mod_base = OTHER; note = 2'-O-methyluridine-3'-phosphate
  modified_base 9: mod_base = OTHER; note = 2'-deoxy-2'-fluoroadenosine-3'-phosphate
  modified_base 10: mod_base = OTHER; note = 2'-deoxy-2'-fluoroadenosine-3'-phosphate
  modified_base 11: mod_base = OTHER; note = 2'-deoxy-2'-fluorouridine-3'-phosphate
  modified_base 12: mod_base = OTHER; note = 2'-O-methyladenosine-3'-phosphate
  modified_base 13: mod_base = OTHER; note = 2'-O-methylguanosine-3'-phosphate
  modified_base 14: mod_base = OTHER; note = 2'-O-methylcytidine-3'-phosphate
  modified_base 15: mod_base = OTHER; note = 2'-O-methylguanosine-3'-phosphate
  modified_base 16: mod_base = OTHER; note = 2'-O-methyluridine-3'-phosphate
  modified_base 17: mod_base = OTHER; note = 2'-O-methyluridine-3'-phosphate
  modified_base 18: mod_base = OTHER; note = 2'-O-methylcytidine-3'-phosphate
  modified_base 19: mod_base = OTHER; note = 2'-O-methyluridine-3'-phosphorothioate
  modified_base 20: mod_base = OTHER; note = 2'-O-methylguanosine-3'-phosphorothioate
  modified_base 21: mod_base = OTHER; note = 2'-O-methyladenosine
gcttgggtaatagcgttctga

SEQ ID NO: 11247 - RNA, 21 nt, synthetic construct
  source 1..21: mol_type = other RNA
  modified_base 1: mod_base = OTHER; note = 2'-O-methylcytidine-3'-phosphorothioate
  modified_base 2: mod_base = OTHER; note = 2'-O-methyluridine-3'-phosphorothioate
  modified_base 3: mod_base = OTHER; note = 2'-O-methyluridine-3'-phosphate
  modified_base 4: mod_base = OTHER; note = 2'-O-methylguanosine-3'-phosphate
  modified_base 5: mod_base = OTHER; note = 2'-O-methylguanosine-3'-phosphate
  modified_base 6: mod_base = OTHER; note = 2'-O-docosanyl-guanosine-3'-phosphate
  modified_base 7: mod_base = OTHER; note = 2'-deoxy-2'-fluorouridine-3'-phosphate
  modified_base 8: mod_base = OTHER; note = 2'-O-methyladenosine-3'-phosphate
  modified_base 9: mod_base = OTHER; note = 2'-deoxy-2'-fluoroadenosine-3'-phosphate
  modified_base 10: mod_base = OTHER; note = 2'-deoxy-2'-fluorouridine-3'-phosphate
  modified_base 11: mod_base = OTHER; note = 2'-deoxy-2'-fluoroadenosine-3'-phosphate
  modified_base 12: mod_base = OTHER; note = 2'-O-methylguanosine-3'-phosphate
  modified_base 13: mod_base = OTHER; note = 2'-O-methylcytidine-3'-phosphate
  modified_base 14: mod_base = OTHER; note = 2'-O-methylguanosine-3'-phosphate
  modified_base 15: mod_base = OTHER; note = 2'-O-methyluridine-3'-phosphate
  modified_base 16: mod_base = OTHER; note = 2'-O-methyluridine-3'-phosphate
  modified_base 17: mod_base = OTHER; note = 2'-O-methylcytidine-3'-phosphate
  modified_base 18: mod_base = OTHER; note = 2'-O-methyluridine-3'-phosphate
  modified_base 19: mod_base = OTHER; note = 2'-O-methylguanosine-3'-phosphorothioate
  modified_base 20: mod_base = OTHER; note = 2'-O-methyladenosine-3'-phosphorothioate
  modified_base 21: mod_base = OTHER; note = 2'-O-methyladenosine
cttgggtaatagcgttctgaa

SEQ ID NO: 11248 - RNA, 21 nt, synthetic construct
  source 1..21: mol_type = other RNA
  modified_base 1: mod_base = OTHER; note = 2'-O-methyluridine-3'-phosphorothioate
  modified_base 2: mod_base = OTHER; note = 2'-O-methyluridine-3'-phosphorothioate
  modified_base 3: mod_base = OTHER; note = 2'-O-methylguanosine-3'-phosphate
  modified_base 4: mod_base = OTHER; note = 2'-O-methylguanosine-3'-phosphate
  modified_base 5: mod_base = OTHER; note = 2'-O-methylguanosine-3'-phosphate
  modified_base 6: mod_base = OTHER; note = 2'-O-docosanyl-uridine-3'-phosphate
  modified_base 7: mod_base = OTHER; note = 2'-deoxy-2'-fluoroadenosine-3'-phosphate
  modified_base 8: mod_base = OTHER; note = 2'-O-methyladenosine-3'-phosphate
  modified_base 9: mod_base = OTHER; note = 2'-deoxy-2'-fluorouridine-3'-phosphate
  modified_base 10: mod_base = OTHER; note = 2'-deoxy-2'-fluoroadenosine-3'-phosphate
  modified_base 11: mod_base = OTHER; note = 2'-deoxy-2'-fluoroguanosine-3'-phosphate
  modified_base 12: mod_base = OTHER; note = 2'-O-methylcytidine-3'-phosphate
  modified_base 13: mod_base = OTHER; note = 2'-O-methylguanosine-3'-phosphate
  modified_base 14: mod_base = OTHER; note = 2'-O-methyluridine-3'-phosphate
  modified_base 15: mod_base = OTHER; note = 2'-O-methyluridine-3'-phosphate
  modified_base 16: mod_base = OTHER; note = 2'-O-methylcytidine-3'-phosphate
  modified_base 17: mod_base = OTHER; note = 2'-O-methyluridine-3'-phosphate
  modified_base 18: mod_base = OTHER; note = 2'-O-methylguanosine-3'-phosphate
  modified_base 19: mod_base = OTHER; note = 2'-O-methyladenosine-3'-phosphorothioate
  modified_base 20: mod_base = OTHER; note = 2'-O-methyladenosine-3'-phosphorothioate
  modified_base 21: mod_base = OTHER; note = 2'-O-methyladenosine
ttgggtaatagcgttctgaaa

SEQ ID NO: 11249 - RNA, 21 nt, synthetic construct
  source 1..21: mol_type = other RNA
  modified_base 1: mod_base = OTHER; note = 2'-O-methyluridine-3'-phosphorothioate
  modified_base 2: mod_base = OTHER; note = 2'-O-methylguanosine-3'-phosphorothioate
  modified_base 3: mod_base = OTHER; note = 2'-O-methylguanosine-3'-phosphate
  modified_base 4: mod_base = OTHER; note = 2'-O-methylguanosine-3'-phosphate
  modified_base 5: mod_base = OTHER; note = 2'-O-methyluridine-3'-phosphate
  modified_base 6: mod_base = OTHER; note = 2'-O-docosanyl-adenosine-3'-phosphate
  modified_base 7: mod_base = OTHER; note = 2'-deoxy-2'-fluoroadenosine-3'-phosphate
  modified_base 8: mod_base = OTHER; note = 2'-O-methyluridine-3'-phosphate
  modified_base 9: mod_base = OTHER; note = 2'-deoxy-2'-fluoroadenosine-3'-phosphate
  modified_base 10: mod_base = OTHER; note = 2'-deoxy-2'-fluoroguanosine-3'-phosphate
  modified_base 11: mod_base = OTHER; note = 2'-deoxy-2'-fluorocytidine-3'-phosphate
  modified_base 12: mod_base = OTHER; note = 2'-O-methylguanosine-3'-phosphate
  modified_base 13: mod_base = OTHER; note = 2'-O-methyluridine-3'-phosphate
  modified_base 14: mod_base = OTHER; note = 2'-O-methyluridine-3'-phosphate
  modified_base 15: mod_base = OTHER; note = 2'-O-methylcytidine-3'-phosphate
  modified_base 16: mod_base = OTHER; note = 2'-O-methyluridine-3'-phosphate
  modified_base 17: mod_base = OTHER; note = 2'-O-methylguanosine-3'-phosphate
  modified_base 18: mod_base = OTHER; note = 2'-O-methyladenosine-3'-phosphate
  modified_base 19: mod_base = OTHER; note = 2'-O-methyladenosine-3'-phosphorothioate
  modified_base 20: mod_base = OTHER; note = 2'-O-methylguanosine-3'-phosphorothioate
  modified_base 21: mod_base = OTHER; note = 2'-O-methyladenosine
tgggtaatagcgttctgaaga

SEQ ID NO: 11250 - RNA, 21 nt, synthetic construct
  source 1..21: mol_type = other RNA
  modified_base 1: mod_base = OTHER; note = 2'-O-methylguanosine-3'-phosphorothioate
  modified_base 2: mod_base = OTHER; note = 2'-O-methylguanosine-3'-phosphorothioate
  modified_base 3: mod_base = OTHER; note = 2'-O-methylguanosine-3'-phosphate
  modified_base 4: mod_base = OTHER; note = 2'-O-methyluridine-3'-phosphate
  modified_base 5: mod_base = OTHER; note = 2'-O-methyladenosine-3'-phosphate
  modified_base 6: mod_base = OTHER; note = 2'-O-docosanyl-adenosine-3'-phosphate
  modified_base 7: mod_base = OTHER; note = 2'-deoxy-2'-fluorouridine-3'-phosphate
  modified_base 8: mod_base = OTHER; note = 2'-O-methyladenosine-3'-phosphate
  modified_base 9: mod_base = OTHER; note = 2'-deoxy-2'-fluoroguanosine-3'-phosphate
  modified_base 10: mod_base = OTHER; note = 2'-deoxy-2'-fluorocytidine-3'-phosphate
  modified_base 11: mod_base = OTHER; note = 2'-deoxy-2'-fluoroguanosine-3'-phosphate
  modified_base 12: mod_base = OTHER; note = 2'-O-methyluridine-3'-phosphate
  modified_base 13: mod_base = OTHER; note = 2'-O-methyluridine-3'-phosphate
  modified_base 14: mod_base = OTHER; note = 2'-O-methylcytidine-3'-phosphate
  modified_base 15: mod_base = OTHER; note = 2'-O-methyluridine-3'-phosphate
  modified_base 16: mod_base = OTHER; note = 2'-O-methylguanosine-3'-phosphate
  modified_base 17: mod_base = OTHER; note = 2'-O-methyladenosine-3'-phosphate
  modified_base 18: mod_base = OTHER; note = 2'-O-methyladenosine-3'-phosphate
  modified_base 19: mod_base = OTHER; note = 2'-O-methylguanosine-3'-phosphorothioate
  modified_base 20: mod_base = OTHER; note = 2'-O-methylguanosine-3'-phosphorothioate
  modified_base 21: mod_base = OTHER; note = 2'-O-methyladenosine
gggtaatagcgttctgaagga

SEQ ID NO: 11251 - RNA, 21 nt, synthetic construct
  source 1..21: mol_type = other RNA
  modified_base 1: mod_base = OTHER; note = 2'-O-methylguanosine-3'-phosphorothioate
  modified_base 2: mod_base = OTHER; note = 2'-O-methylguanosine-3'-phosphorothioate
  modified_base 3: mod_base = OTHER; note = 2'-O-methyluridine-3'-phosphate
  modified_base 4: mod_base = OTHER; note = 2'-O-methyladenosine-3'-phosphate
  modified_base 5: mod_base = OTHER; note = 2'-O-methyladenosine-3'-phosphate
  modified_base 6: mod_base = OTHER; note = 2'-O-docosanyl-uridine-3'-phosphate
  modified_base 7: mod_base = OTHER; note = 2'-deoxy-2'-fluoroadenosine-3'-phosphate
  modified_base 8: mod_base = OTHER; note = 2'-O-methylguanosine-3'-phosphate
  modified_base 9: mod_base = OTHER; note = 2'-deoxy-2'-fluorocytidine-3'-phosphate
  modified_base 10: mod_base = OTHER; note = 2'-deoxy-2'-fluoroguanosine-3'-phosphate
  modified_base 11: mod_base = OTHER; note = 2'-deoxy-2'-fluorouridine-3'-phosphate
  modified_base 12: mod_base = OTHER; note = 2'-O-methyluridine-3'-phosphate
  modified_base 13: mod_base = OTHER; note = 2'-O-methylcytidine-3'-phosphate
  modified_base 14: mod_base = OTHER; note = 2'-O-methyluridine-3'-phosphate
  modified_base 15: mod_base = OTHER; note = 2'-O-methylguanosine-3'-phosphate
  modified_base 16: mod_base = OTHER; note = 2'-O-methyladenosine-3'-phosphate
  modified_base 17: mod_base = OTHER; note = 2'-O-methyladenosine-3'-phosphate
  modified_base 18: mod_base = OTHER; note = 2'-O-methylguanosine-3'-phosphate
  modified_base 19: mod_base = OTHER; note = 2'-O-methylguanosine-3'-phosphorothioate
  modified_base 20: mod_base = OTHER; note = 2'-O-methyladenosine-3'-phosphorothioate
  modified_base 21: mod_base = OTHER; note = 2'-O-methyladenosine
ggtaatagcgttctgaaggaa

SEQ ID NO: 11252 - RNA, 21 nt, synthetic construct
  source 1..21: mol_type = other RNA
  modified_base 1: mod_base = OTHER; note = 2'-O-methylguanosine-3'-phosphorothioate
  modified_base 2: mod_base = OTHER; note = 2'-O-methyluridine-3'-phosphorothioate
  modified_base 3: mod_base = OTHER; note = 2'-O-methyladenosine-3'-phosphate
  modified_base 4: mod_base = OTHER; note = 2'-O-methyladenosine-3'-phosphate
  modified_base 5: mod_base = OTHER; note = 2'-O-methyluridine-3'-phosphate
  modified_base 6: mod_base = OTHER; note = 2'-O-docosanyl-adenosine-3'-phosphate
  modified_base 7: mod_base = OTHER; note = 2'-deoxy-2'-fluoroguanosine-3'-phosphate
  modified_base 8: mod_base = OTHER; note = 2'-O-methylcytidine-3'-phosphate
  modified_base 9: mod_base = OTHER; note = 2'-deoxy-2'-fluoroguanosine-3'-phosphate
  modified_base 10: mod_base = OTHER; note = 2'-deoxy-2'-fluorouridine-3'-phosphate
  modified_base 11: mod_base = OTHER; note = 2'-deoxy-2'-fluorouridine-3'-phosphate
  modified_base 12: mod_base = OTHER; note = 2'-O-methylcytidine-3'-phosphate
  modified_base 13: mod_base = OTHER; note = 2'-O-methyluridine-3'-phosphate
  modified_base 14: mod_base = OTHER; note = 2'-O-methylguanosine-3'-phosphate
  modified_base 15: mod_base = OTHER; note = 2'-O-methyladenosine-3'-phosphate
  modified_base 16: mod_base = OTHER; note = 2'-O-methyladenosine-3'-phosphate
  modified_base 17: mod_base = OTHER; note = 2'-O-methylguanosine-3'-phosphate
  modified_base 18: mod_base = OTHER; note = 2'-O-methylguanosine-3'-phosphate
  modified_base 19: mod_base = OTHER; note = 2'-O-methyladenosine-3'-phosphorothioate
  modified_base 20: mod_base = OTHER; note = 2'-O-methyluridine-3'-phosphorothioate
  modified_base 21: mod_base = OTHER; note = 2'-O-methyladenosine
gtaatagcgttctgaaggata

SEQ ID NO: 11253 - RNA, 21 nt, synthetic construct
  source 1..21: mol_type = other RNA
  modified_base 1: mod_base = OTHER; note = 2'-O-methyluridine-3'-phosphorothioate
  modified_base 2: mod_base = OTHER; note = 2'-O-methyladenosine-3'-phosphorothioate
  modified_base 3: mod_base = OTHER; note = 2'-O-methyladenosine-3'-phosphate
  modified_base 4: mod_base = OTHER; note = 2'-O-methyluridine-3'-phosphate
  modified_base 5: mod_base = OTHER; note = 2'-O-methyladenosine-3'-phosphate
  modified_base 6: mod_base = OTHER; note = 2'-O-docosanyl-guanosine-3'-phosphate
  modified_base 7: mod_base = OTHER; note = 2'-deoxy-2'-fluorocytidine-3'-phosphate
  modified_base 8: mod_base = OTHER; note = 2'-O-methylguanosine-3'-phosphate
  modified_base 9: mod_base = OTHER; note = 2'-deoxy-2'-fluorouridine-3'-phosphate
  modified_base 10: mod_base = OTHER; note = 2'-deoxy-2'-fluorouridine-3'-phosphate
  modified_base 11: mod_base = OTHER; note = 2'-deoxy-2'-fluorocytidine-3'-phosphate
  modified_base 12: mod_base = OTHER; note = 2'-O-methyluridine-3'-phosphate
  modified_base 13: mod_base = OTHER; note = 2'-O-methylguanosine-3'-phosphate
  modified_base 14: mod_base = OTHER; note = 2'-O-methyladenosine-3'-phosphate
  modified_base 15: mod_base = OTHER; note = 2'-O-methyladenosine-3'-phosphate
  modified_base 16: mod_base = OTHER; note = 2'-O-methylguanosine-3'-phosphate
  modified_base 17: mod_base = OTHER; note = 2'-O-methylguanosine-3'-phosphate
  modified_base 18: mod_base = OTHER; note = 2'-O-methyladenosine-3'-phosphate
  modified_base 19: mod_base = OTHER; note = 2'-O-methyluridine-3'-phosphorothioate
  modified_base 20: mod_base = OTHER; note = 2'-O-methyladenosine-3'-phosphorothioate
  modified_base 21: mod_base = OTHER; note = 2'-O-methyladenosine
taatagcgttctgaaggataa

SEQ ID NO: 11254 - RNA, 21 nt, synthetic construct
  source 1..21: mol_type = other RNA
  modified_base 1: mod_base = OTHER; note = 2'-O-methyladenosine-3'-phosphorothioate
  modified_base 2: mod_base = OTHER; note = 2'-O-methyladenosine-3'-phosphorothioate
  modified_base 3: mod_base = OTHER; note = 2'-O-methyluridine-3'-phosphate
  modified_base 4: mod_base = OTHER; note = 2'-O-methyladenosine-3'-phosphate
  modified_base 5: mod_base = OTHER; note = 2'-O-methylguanosine-3'-phosphate
  modified_base 6: mod_base = OTHER; note = 2'-O-docosanyl-cytidine-3'-phosphate
  modified_base 7: mod_base = OTHER; note = 2'-deoxy-2'-fluoroguanosine-3'-phosphate
  modified_base 8: mod_base = OTHER; note = 2'-O-methyluridine-3'-phosphate
  modified_base 9: mod_base = OTHER; note = 2'-deoxy-2'-fluorouridine-3'-phosphate
  modified_base 10: mod_base = OTHER; note = 2'-deoxy-2'-fluorocytidine-3'-phosphate
  modified_base 11: mod_base = OTHER; note = 2'-deoxy-2'-fluorouridine-3'-phosphate
  modified_base 12: mod_base = OTHER; note = 2'-O-methylguanosine-3'-phosphate
  modified_base 13: mod_base = OTHER; note = 2'-O-methyladenosine-3'-phosphate
  modified_base 14: mod_base = OTHER; note = 2'-O-methyladenosine-3'-phosphate
  modified_base 15: mod_base = OTHER; note = 2'-O-methylguanosine-3'-phosphate
  modified_base 16: mod_base = OTHER; note = 2'-O-methylguanosine-3'-phosphate
  modified_base 17: mod_base = OTHER; note = 2'-O-methyladenosine-3'-phosphate
  modified_base 18: mod_base = OTHER; note = 2'-O-methyluridine-3'-phosphate
  modified_base 19: mod_base = OTHER; note = 2'-O-methyladenosine-3'-phosphorothioate
  modified_base 20: mod_base = OTHER; note = 2'-O-methyluridine-3'-phosphorothioate
  modified_base 21: mod_base = OTHER; note = 2'-O-methyladenosine
aatagcgttctgaaggatata

SEQ ID NO: 11255 - RNA, 21 nt, synthetic construct
  source 1..21: mol_type = other RNA
  modified_base 1: mod_base = OTHER; note = 2'-O-methyladenosine-3'-phosphorothioate
  modified_base 2: mod_base = OTHER; note = 2'-O-methyluridine-3'-phosphorothioate
  modified_base 3: mod_base = OTHER; note = 2'-O-methyladenosine-3'-phosphate
  modified_base 4: mod_base = OTHER; note = 2'-O-methylguanosine-3'-phosphate
  modified_base 5: mod_base = OTHER; note = 2'-O-methylcytidine-3'-phosphate
  modified_base 6: mod_base = OTHER; note = 2'-O-docosanyl-guanosine-3'-phosphate
  modified_base 7: mod_base = OTHER; note = 2'-deoxy-2'-fluorouridine-3'-phosphate
  modified_base 8: mod_base = OTHER; note = 2'-O-methyluridine-3'-phosphate
  modified_base 9: mod_base = OTHER; note = 2'-deoxy-2'-fluorocytidine-3'-phosphate
  modified_base 10: mod_base = OTHER; note = 2'-deoxy-2'-fluorouridine-3'-phosphate
  modified_base 11: mod_base = OTHER; note = 2'-deoxy-2'-fluoroguanosine-3'-phosphate
  modified_base 12: mod_base = OTHER; note = 2'-O-methyladenosine-3'-phosphate
  modified_base 13: mod_base = OTHER; note = 2'-O-methyladenosine-3'-phosphate
  modified_base 14: mod_base = OTHER; note = 2'-O-methylguanosine-3'-phosphate
  modified_base 15: mod_base = OTHER; note = 2'-O-methylguanosine-3'-phosphate
  modified_base 16: mod_base = OTHER; note = 2'-O-methyladenosine-3'-phosphate
  modified_base 17: mod_base = OTHER; note = 2'-O-methyluridine-3'-phosphate
  modified_base 18: mod_base = OTHER; note = 2'-O-methyladenosine-3'-phosphate
  modified_base 19: mod_base = OTHER; note = 2'-O-methyluridine-3'-phosphorothioate
  modified_base 20: mod_base = OTHER; note = 2'-O-methyladenosine-3'-phosphorothioate
  modified_base 21: mod_base = OTHER; note = 2'-O-methyladenosine
atagcgttctgaaggatataa

SEQ ID NO: 11256 - RNA, 21 nt, synthetic construct
  source 1..21: mol_type = other RNA
  modified_base 1: mod_base = OTHER; note = 2'-O-methyluridine-3'-phosphorothioate
  modified_base 2: mod_base = OTHER; note = 2'-O-methyladenosine-3'-phosphorothioate
  modified_base 3: mod_base = OTHER; note = 2'-O-methylguanosine-3'-phosphate
  modified_base 4: mod_base = OTHER; note = 2'-O-methylcytidine-3'-phosphate
  modified_base 5: mod_base = OTHER; note = 2'-O-methylguanosine-3'-phosphate
  modified_base 6: mod_base = OTHER; note = 2'-O-docosanyl-uridine-3'-phosphate
  modified_base 7: mod_base = OTHER; note = 2'-deoxy-2'-fluorouridine-3'-phosphate
  modified_base 8: mod_base = OTHER; note = 2'-O-methylcytidine-3'-phosphate
  modified_base 9: mod_base = OTHER; note = 2'-deoxy-2'-fluorouridine-3'-phosphate
  modified_base 10: mod_base = OTHER; note = 2'-deoxy-2'-fluoroguanosine-3'-phosphate
  modified_base 11: mod_base = OTHER; note = 2'-deoxy-2'-fluoroadenosine-3'-phosphate
  modified_base 12: mod_base = OTHER; note = 2'-O-methyladenosine-3'-phosphate
  modified_base 13: mod_base = OTHER; note = 2'-O-methylguanosine-3'-phosphate
  modified_base 14: mod_base = OTHER; note = 2'-O-methylguanosine-3'-phosphate
  modified_base 15: mod_base = OTHER; note = 2'-O-methyladenosine-3'-phosphate
  modified_base 16: mod_base = OTHER; note = 2'-O-methyluridine-3'-phosphate
  modified_base 17: mod_base = OTHER; note = 2'-O-methyladenosine-3'-phosphate
  modified_base 18: mod_base = OTHER; note = 2'-O-methyluridine-3'-phosphate
  modified_base 19: mod_base = OTHER; note = 2'-O-methyladenosine-3'-phosphorothioate
  modified_base 20: mod_base = OTHER; note = 2'-O-methylcytidine-3'-phosphorothioate
  modified_base 21: mod_base = OTHER; note = 2'-O-methyladenosine
tagcgttctgaaggatataca

SEQ ID NO: 11257 - RNA, 21 nt, synthetic construct
  source 1..21: mol_type = other RNA
  modified_base 1: mod_base = OTHER; note = 2'-O-methyladenosine-3'-phosphorothioate
  modified_base 2: mod_base = OTHER; note = 2'-O-methylguanosine-3'-phosphorothioate
  modified_base 3: mod_base = OTHER; note = 2'-O-methylcytidine-3'-phosphate
  modified_base 4: mod_base = OTHER; note = 2'-O-methylguanosine-3'-phosphate
  modified_base 5: mod_base = OTHER; note = 2'-O-methyluridine-3'-phosphate
  modified_base 6: mod_base = OTHER; note = 2'-O-docosanyl-uridine-3'-phosphate
  modified_base 7: mod_base = OTHER; note = 2'-deoxy-2'-fluorocytidine-3'-phosphate
  modified_base 8: mod_base = OTHER; note = 2'-O-methyluridine-3'-phosphate
  modified_base 9: mod_base = OTHER; note = 2'-deoxy-2'-fluoroguanosine-3'-phosphate
  modified_base 10: mod_base = OTHER; note = 2'-deoxy-2'-fluoroadenosine-3'-phosphate
  modified_base 11: mod_base = OTHER; note = 2'-deoxy-2'-fluoroadenosine-3'-phosphate
  modified_base 12: mod_base = OTHER; note = 2'-O-methylguanosine-3'-phosphate
  modified_base 13: mod_base = OTHER; note = 2'-O-methylguanosine-3'-phosphate
  modified_base 14: mod_base = OTHER; note = 2'-O-methyladenosine-3'-phosphate
  modified_base 15: mod_base = OTHER; note = 2'-O-methyluridine-3'-phosphate
  modified_base 16: mod_base = OTHER; note = 2'-O-methyladenosine-3'-phosphate
  modified_base 17: mod_base = OTHER; note = 2'-O-methyluridine-3'-phosphate
  modified_base 18: mod_base = OTHER; note = 2'-O-methyladenosine-3'-phosphate
  modified_base 19: mod_base = OTHER; note = 2'-O-methylcytidine-3'-phosphorothioate
  modified_base 20: mod_base = OTHER; note = 2'-O-methyluridine-3'-phosphorothioate
  modified_base 21: mod_base = OTHER; note = 2'-O-methyladenosine
agcgttctgaaggatatacta

SEQ ID NO: 11258 - RNA, 21 nt, synthetic construct
  source 1..21: mol_type = other RNA
  modified_base 1: mod_base = OTHER; note = 2'-O-methylguanosine-3'-phosphorothioate
  modified_base 2: mod_base = OTHER; note = 2'-O-methylcytidine-3'-phosphorothioate
  modified_base 3: mod_base = OTHER; note = 2'-O-methylguanosine-3'-phosphate
  modified_base 4: mod_base = OTHER; note = 2'-O-methyluridine-3'-phosphate
  modified_base 5: mod_base = OTHER; note = 2'-O-methyluridine-3'-phosphate
  modified_base 6: mod_base = OTHER; note = 2'-O-docosanyl-cytidine-3'-phosphate
  modified_base 7: mod_base = OTHER; note = 2'-deoxy-2'-fluorouridine-3'-phosphate
  modified_base 8: mod_base = OTHER; note = 2'-O-methylguanosine-3'-phosphate
  modified_base 9: mod_base = OTHER; note = 2'-deoxy-2'-fluoroadenosine-3'-phosphate
  modified_base 10: mod_base = OTHER; note = 2'-deoxy-2'-fluoroadenosine-3'-phosphate
  modified_base 11: mod_base = OTHER; note = 2'-deoxy-2'-fluoroguanosine-3'-phosphate
  modified_base 12: mod_base = OTHER; note = 2'-O-methylguanosine-3'-phosphate
  modified_base 13: mod_base = OTHER; note = 2'-O-methyladenosine-3'-phosphate
  modified_base 14: mod_base = OTHER; note = 2'-O-methyluridine-3'-phosphate
  modified_base 15: mod_base = OTHER; note = 2'-O-methyladenosine-3'-phosphate
  modified_base 16: mod_base = OTHER; note = 2'-O-methyluridine-3'-phosphate
  modified_base 17: mod_base = OTHER; note = 2'-O-methyladenosine-3'-phosphate
  modified_base 18: mod_base = OTHER; note = 2'-O-methylcytidine-3'-phosphate
  modified_base 19: mod_base = OTHER; note = 2'-O-methyluridine-3'-phosphorothioate
  modified_base 20: mod_base = OTHER; note = 2'-O-methyluridine-3'-phosphorothioate
  modified_base 21: mod_base = OTHER; note = 2'-O-methyladenosine
gcgttctgaaggatatactta

SEQ ID NO: 11259 - RNA, 21 nt, synthetic construct
  source 1..21: mol_type = other RNA
  modified_base 1: mod_base = OTHER; note = 2'-O-methylcytidine-3'-phosphorothioate
  modified_base 2: mod_base = OTHER; note = 2'-O-methylguanosine-3'-phosphorothioate
  modified_base 3: mod_base = OTHER; note = 2'-O-methyluridine-3'-phosphate
  modified_base 4: mod_base = OTHER; note = 2'-O-methyluridine-3'-phosphate
  modified_base 5: mod_base = OTHER; note = 2'-O-methylcytidine-3'-phosphate
  modified_base 6: mod_base = OTHER; note = 2'-O-docosanyl-uridine-3'-phosphate
  modified_base 7: mod_base = OTHER; note = 2'-deoxy-2'-fluoroguanosine-3'-phosphate
  modified_base 8: mod_base = OTHER; note = 2'-O-methyladenosine-3'-phosphate
  modified_base 9: mod_base = OTHER; note = 2'-deoxy-2'-fluoroadenosine-3'-phosphate
  modified_base 10: mod_base = OTHER; note = 2'-deoxy-2'-fluoroguanosine-3'-phosphate
  modified_base 11: mod_base = OTHER; note = 2'-deoxy-2'-fluoroguanosine-3'-phosphate
  modified_base 12: mod_base = OTHER; note = 2'-O-methyladenosine-3'-phosphate
  modified_base 13: mod_base = OTHER; note = 2'-O-methyluridine-3'-phosphate
  modified_base 14: mod_base = OTHER; note = 2'-O-methyladenosine-3'-phosphate
  modified_base 15: mod_base = OTHER; note = 2'-O-methyluridine-3'-phosphate
  modified_base 16: mod_base = OTHER; note = 2'-O-methyladenosine-3'-phosphate
  modified_base 17: mod_base = OTHER; note = 2'-O-methylcytidine-3'-phosphate
  modified_base 18: mod_base = OTHER; note = 2'-O-methyluridine-3'-phosphate
  modified_base 19: mod_base = OTHER; note = 2'-O-methyluridine-3'-phosphorothioate
  modified_base 20: mod_base = OTHER; note = 2'-O-methylcytidine-3'-phosphorothioate
  modified_base 21: mod_base = OTHER; note = 2'-O-methyladenosine
cgttctgaaggatatacttca

SEQ ID NO: 11260 - RNA, 21 nt, synthetic construct
  source 1..21: mol_type = other RNA
  modified_base 1: mod_base = OTHER; note = 2'-O-methyluridine-3'-phosphorothioate
  modified_base 2: mod_base = OTHER; note = 2'-O-methyluridine-3'-phosphorothioate
  modified_base 3: mod_base = OTHER; note = 2'-O-methylcytidine-3'-phosphate
  modified_base 4: mod_base = OTHER; note = 2'-O-methyluridine-3'-phosphate
  modified_base 5: mod_base = OTHER; note = 2'-O-methylguanosine-3'-phosphate
  modified_base 6: mod_base = OTHER; note = 2'-O-docosanyl-adenosine-3'-phosphate
  modified_base 7: mod_base = OTHER; note = 2'-deoxy-2'-fluoroadenosine-3'-phosphate
  modified_base 8: mod_base = OTHER; note = 2'-O-methylguanosine-3'-phosphate
  modified_base 9: mod_base = OTHER; note = 2'-deoxy-2'-fluoroguanosine-3'-phosphate
  modified_base 10: mod_base = OTHER; note = 2'-deoxy-2'-fluoroadenosine-3'-phosphate
  modified_base 11: mod_base = OTHER; note = 2'-deoxy-2'-fluorouridine-3'-phosphate
  modified_base 12: mod_base = OTHER; note = 2'-O-methyladenosine-3'-phosphate
  modified_base 13: mod_base = OTHER; note = 2'-O-methyluridine-3'-phosphate
  modified_base 14: mod_base = OTHER; note = 2'-O-methyladenosine-3'-phosphate
  modified_base 15: mod_base = OTHER; note = 2'-O-methylcytidine-3'-phosphate
  modified_base 16: mod_base = OTHER; note = 2'-O-methyluridine-3'-phosphate
  modified_base 17: mod_base = OTHER; note = 2'-O-methyluridine-3'-phosphate
  modified_base 18: mod_base = OTHER; note = 2'-O-methylcytidine-3'-phosphate
  modified_base 19: mod_base = OTHER; note = 2'-O-methyluridine-3'-phosphorothioate
  modified_base 20: mod_base = OTHER; note = 2'-O-methylguanosine-3'-phosphorothioate
  modified_base 21: mod_base = OTHER; note = 2'-O-methyladenosine
ttctgaaggatatacttctga

SEQ ID NO: 11261 - RNA, 21 nt, synthetic construct
  source 1..21: mol_type = other RNA
  modified_base 1: mod_base = OTHER; note = 2'-O-methyluridine-3'-phosphorothioate
  modified_base 2: mod_base = OTHER; note = 2'-O-methylcytidine-3'-phosphorothioate
  modified_base 3: mod_base = OTHER; note = 2'-O-methyluridine-3'-phosphate
  modified_base 4: mod_base = OTHER; note = 2'-O-methylguanosine-3'-phosphate
  modified_base 5: mod_base = OTHER; note = 2'-O-methyladenosine-3'-phosphate
  modified_base 6: mod_base = OTHER; note = 2'-O-docosanyl-adenosine-3'-phosphate
  modified_base 7: mod_base = OTHER; note = 2'-deoxy-2'-fluoroguanosine-3'-phosphate
  modified_base 8: mod_base = OTHER; note = 2'-O-methylguanosine-3'-phosphate
  modified_base 9: mod_base = OTHER; note = 2'-deoxy-2'-fluoroadenosine-3'-phosphate
  modified_base 10: mod_base = OTHER; note = 2'-deoxy-2'-fluorouridine-3'-phosphate
  modified_base 11: mod_base = OTHER; note = 2'-deoxy-2'-fluoroadenosine-3'-phosphate
  modified_base 12: mod_base = OTHER; note = 2'-O-methyluridine-3'-phosphate
  modified_base 13: mod_base = OTHER; note = 2'-O-methyladenosine-3'-phosphate
  modified_base 14: mod_base = OTHER; note = 2'-O-methylcytidine-3'-phosphate
  modified_base 15: mod_base = OTHER; note = 2'-O-methyluridine-3'-phosphate
  modified_base 16: mod_base = OTHER; note = 2'-O-methyluridine-3'-phosphate
  modified_base 17: mod_base = OTHER; note = 2'-O-methylcytidine-3'-phosphate
  modified_base 18: mod_base = OTHER; note = 2'-O-methyluridine-3'-phosphate
  modified_base 19: mod_base = OTHER; note = 2'-O-methylguanosine-3'-phosphorothioate
  modified_base 20: mod_base = OTHER; note = 2'-O-methyluridine-3'-phosphorothioate
  modified_base 21: mod_base = OTHER; note = 2'-O-methyladenosine
tctgaaggatatacttctgta

SEQ ID NO: 11262 - RNA, 21 nt, synthetic construct
  source 1..21: mol_type = other RNA
  modified_base 1: mod_base = OTHER; note = 2'-O-methylcytidine-3'-phosphorothioate
  modified_base 2: mod_base = OTHER; note = 2'-O-methyluridine-3'-phosphorothioate
  modified_base 3: mod_base = OTHER; note = 2'-O-methylguanosine-3'-phosphate
  modified_base 4: mod_base = OTHER; note = 2'-O-methyladenosine-3'-phosphate
  modified_base 5: mod_base = OTHER; note = 2'-O-methyladenosine-3'-phosphate
  modified_base 6: mod_base = OTHER; note = 2'-O-docosanyl-guanosine-3'-phosphate
  modified_base 7: mod_base = OTHER; note = 2'-deoxy-2'-fluoroguanosine-3'-phosphate
  modified_base 8: mod_base = OTHER; note = 2'-O-methyladenosine-3'-phosphate
  modified_base 9: mod_base = OTHER; note = 2'-deoxy-2'-fluorouridine-3'-phosphate
  modified_base 10: mod_base = OTHER; note = 2'-deoxy-2'-fluoroadenosine-3'-phosphate
  modified_base 11: mod_base = OTHER; note = 2'-deoxy-2'-fluorouridine-3'-phosphate
  modified_base 12: mod_base = OTHER; note = 2'-O-methyladenosine-3'-phosphate
  modified_base 13: mod_base = OTHER; note = 2'-O-methylcytidine-3'-phosphate
  modified_base 14: mod_base = OTHER; note = 2'-O-methyluridine-3'-phosphate
  modified_base 15: mod_base = OTHER; note = 2'-O-methyluridine-3'-phosphate
  modified_base 16: mod_base = OTHER; note = 2'-O-methylcytidine-3'-phosphate
  modified_base 17: mod_base = OTHER; note = 2'-O-methyluridine-3'-phosphate
  modified_base 18: mod_base = OTHER; note = 2'-O-methylguanosine-3'-phosphate
  modified_base 19: mod_base = OTHER; note = 2'-O-methyluridine-3'-phosphorothioate
  modified_base 20: mod_base = OTHER; note = 2'-O-methyladenosine-3'-phosphorothioate
  modified_base 21: mod_base = OTHER; note = 2'-O-methyladenosine
ctgaaggatatacttctgtaa

SEQ ID NO: 11263 - RNA, 21 nt, synthetic construct
  source 1..21: mol_type = other RNA
  modified_base 1: mod_base = OTHER; note = 2'-O-methyluridine-3'-phosphorothioate
  modified_base 2: mod_base = OTHER; note = 2'-O-methylguanosine-3'-phosphorothioate
  modified_base 3: mod_base = OTHER; note = 2'-O-methyladenosine-3'-phosphate
  modified_base 4: mod_base = OTHER; note = 2'-O-methyladenosine-3'-phosphate
  modified_base 5: mod_base = OTHER; note = 2'-O-methylguanosine-3'-phosphate
  modified_base 6: mod_base = OTHER; note = 2'-O-docosanyl-guanosine-3'-phosphate
  modified_base 7: mod_base = OTHER; note = 2'-deoxy-2'-fluoroadenosine-3'-phosphate
  modified_base 8: mod_base = OTHER; note = 2'-O-methyluridine-3'-phosphate
  modified_base 9: mod_base = OTHER; note = 2'-deoxy-2'-fluoroadenosine-3'-phosphate
  modified_base 10: mod_base = OTHER; note = 2'-deoxy-2'-fluorouridine-3'-phosphate
  modified_base 11: mod_base = OTHER; note = 2'-deoxy-2'-fluoroadenosine-3'-phosphate
  modified_base 12: mod_base = OTHER; note = 2'-O-methylcytidine-3'-phosphate
  modified_base 13: mod_base = OTHER; note = 2'-O-methyluridine-3'-phosphate
  modified_base 14: mod_base = OTHER; note = 2'-O-methyluridine-3'-phosphate
  modified_base 15: mod_base = OTHER; note = 2'-O-methylcytidine-3'-phosphate
  modified_base 16: mod_base = OTHER; note = 2'-O-methyluridine-3'-phosphate
  modified_base 17: mod_base = OTHER; note = 2'-O-methylguanosine-3'-phosphate
  modified_base 18: mod_base = OTHER; note = 2'-O-methyluridine-3'-phosphate
  modified_base 19: mod_base = OTHER; note = 2'-O-methyladenosine-3'-phosphorothioate
  modified_base 20: mod_base = OTHER; note = 2'-O-methyluridine-3'-phosphorothioate
  modified_base 21: mod_base = OTHER; note = 2'-O-methyladenosine
tgaaggatatacttctgtata

SEQ ID NO: 11264 - RNA, 21 nt, synthetic construct
  source 1..21: mol_type = other RNA
  modified_base 1: mod_base = OTHER; note = 2'-O-methylguanosine-3'-phosphorothioate
  modified_base 2: mod_base = OTHER; note = 2'-O-methyladenosine-3'-phosphorothioate
  modified_base 3: mod_base = OTHER; note = 2'-O-methyladenosine-3'-phosphate
  modified_base 4: mod_base = OTHER; note = 2'-O-methylguanosine-3'-phosphate
  modified_base 5: mod_base = OTHER; note = 2'-O-methylguanosine-3'-phosphate
  modified_base 6: mod_base = OTHER; note = 2'-O-docosanyl-adenosine-3'-phosphate
  modified_base 7: mod_base = OTHER; note = 2'-deoxy-2'-fluorouridine-3'-phosphate
  modified_base 8: mod_base = OTHER; note = 2'-O-methyladenosine-3'-phosphate
  modified_base 9: mod_base = OTHER; note = 2'-deoxy-2'-fluorouridine-3'-phosphate
  modified_base 10: mod_base = OTHER; note = 2'-deoxy-2'-fluoroadenosine-3'-phosphate
  modified_base 11: mod_base = OTHER; note = 2'-deoxy-2'-fluorocytidine-3'-phosphate
  modified_base 12: mod_base = OTHER; note = 2'-O-methyluridine-3'-phosphate
  modified_base 13: mod_base = OTHER; note = 2'-O-methyluridine-3'-phosphate
  modified_base 14: mod_base = OTHER; note = 2'-O-methylcytidine-3'-phosphate
  modified_base 15: mod_base = OTHER; note = 2'-O-methyluridine-3'-phosphate
  modified_base 16: mod_base = OTHER; note = 2'-O-methylguanosine-3'-phosphate
  modified_base 17: mod_base = OTHER; note = 2'-O-methyluridine-3'-phosphate
  modified_base 18: mod_base = OTHER; note = 2'-O-methyladenosine-3'-phosphate
  modified_base 19: mod_base = OTHER; note = 2'-O-methyluridine-3'-phosphorothioate
  modified_base 20: mod_base = OTHER; note = 2'-O-methyluridine-3'-phosphorothioate
  modified_base 21: mod_base = OTHER; note = 2'-O-methyladenosine
gaaggatatacttctgtatta

SEQ ID NO: 11265 - RNA, 21 nt, synthetic construct
  source 1..21: mol_type = other RNA
  modified_base 1: mod_base = OTHER; note = 2'-O-methyladenosine-3'-phosphorothioate
  modified_base 2: mod_base = OTHER; note = 2'-O-methyladenosine-3'-phosphorothioate
  modified_base 3: mod_base = OTHER; note = 2'-O-methylguanosine-3'-phosphate
  modified_base 4: mod_base = OTHER; note = 2'-O-methylguanosine-3'-phosphate
  modified_base 5: mod_base = OTHER; note = 2'-O-methyladenosine-3'-phosphate
  modified_base 6: mod_base = OTHER; note = 2'-O-docosanyl-uridine-3'-phosphate
  modified_base 7: mod_base = OTHER; note = 2'-deoxy-2'-fluoroadenosine-3'-phosphate
  modified_base 8: mod_base = OTHER; note = 2'-O-methyluridine-3'-phosphate
  modified_base 9: mod_base = OTHER; note = 2'-deoxy-2'-fluoroadenosine-3'-phosphate
  modified_base 10: mod_base = OTHER; note = 2'-deoxy-2'-fluorocytidine-3'-phosphate
  modified_base 11: mod_base = OTHER; note = 2'-deoxy-2'-fluorouridine-3'-phosphate
  modified_base 12: mod_base = OTHER; note = 2'-O-methyluridine-3'-phosphate
  modified_base 13: mod_base = OTHER; note = 2'-O-methylcytidine-3'-phosphate
  modified_base 14: mod_base = OTHER; note = 2'-O-methyluridine-3'-phosphate
  modified_base 15: mod_base = OTHER; note = 2'-O-methylguanosine-3'-phosphate
  modified_base 16: mod_base = OTHER; note = 2'-O-methyluridine-3'-phosphate
  modified_base 17: mod_base = OTHER; note = 2'-O-methyladenosine-3'-phosphate
  modified_base 18: mod_base = OTHER; note = 2'-O-methyluridine-3'-phosphate
  modified_base 19: mod_base = OTHER; note = 2'-O-methyluridine-3'-phosphorothioate
  modified_base 20: mod_base = OTHER; note = 2'-O-methyluridine-3'-phosphorothioate
  modified_base 21: mod_base = OTHER; note = 2'-O-methyladenosine
aaggatatacttctgtattta

SEQ ID NO: 11266 - RNA, 21 nt, synthetic construct
  source 1..21: mol_type = other RNA
  modified_base 1: mod_base = OTHER; note = 2'-O-methyladenosine-3'-phosphorothioate
  modified_base 2: mod_base = OTHER; note = 2'-O-methylguanosine-3'-phosphorothioate
  modified_base 3: mod_base = OTHER; note = 2'-O-methylguanosine-3'-phosphate
  modified_base 4: mod_base = OTHER; note = 2'-O-methyladenosine-3'-phosphate
  modified_base 5: mod_base = OTHER; note = 2'-O-methyluridine-3'-phosphate
  modified_base 6: mod_base = OTHER; note = 2'-O-docosanyl-adenosine-3'-phosphate
  modified_base 7: mod_base = OTHER; note = 2'-deoxy-2'-fluorouridine-3'-phosphate
  modified_base 8: mod_base = OTHER; note = 2'-O-methyladenosine-3'-phosphate
  modified_base 9: mod_base = OTHER; note = 2'-deoxy-2'-fluorocytidine-3'-phosphate
  modified_base 10: mod_base = OTHER; note = 2'-deoxy-2'-fluorouridine-3'-phosphate
  modified_base 11: mod_base = OTHER; note = 2'-deoxy-2'-fluorouridine-3'-phosphate
  modified_base 12: mod_base = OTHER; note = 2'-O-methylcytidine-3'-phosphate
  modified_base 13: mod_base = OTHER; note = 2'-O-methyluridine-3'-phosphate
  modified_base 14: mod_base = OTHER; note = 2'-O-methylguanosine-3'-phosphate
  modified_base 15: mod_base = OTHER; note = 2'-O-methyluridine-3'-phosphate
  modified_base 16: mod_base = OTHER; note = 2'-O-methyladenosine-3'-phosphate
  modified_base 17: mod_base = OTHER; note = 2'-O-methyluridine-3'-phosphate
  modified_base 18: mod_base = OTHER; note = 2'-O-methyluridine-3'-phosphate
  modified_base 19: mod_base = OTHER; note = 2'-O-methyluridine-3'-phosphorothioate
  modified_base 20: mod_base = OTHER; note = 2'-O-methyluridine-3'-phosphorothioate
  modified_base 21: mod_base = OTHER; note = 2'-O-methyladenosine
aggatatacttctgtatttta

SEQ ID NO: 11267 - RNA, 21 nt, synthetic construct
  source 1..21: mol_type = other RNA
  modified_base 1: mod_base = OTHER; note = 2'-O-methylguanosine-3'-phosphorothioate
  modified_base 2: mod_base = OTHER; note = 2'-O-methylguanosine-3'-phosphorothioate
  modified_base 3: mod_base = OTHER; note = 2'-O-methyladenosine-3'-phosphate
  modified_base 4: mod_base = OTHER; note = 2'-O-methyluridine-3'-phosphate
  modified_base 5: mod_base = OTHER; note = 2'-O-methyladenosine-3'-phosphate
  modified_base 6: mod_base = OTHER; note = 2'-O-docosanyl-uridine-3'-phosphate
  modified_base 7: mod_base = OTHER; note = 2'-deoxy-2'-fluoroadenosine-3'-phosphate
  modified_base 8: mod_base = OTHER; note = 2'-O-methylcytidine-3'-phosphate
  modified_base 9: mod_base = OTHER; note = 2'-deoxy-2'-fluorouridine-3'-phosphate
  modified_base 10: mod_base = OTHER; note = 2'-deoxy-2'-fluorouridine-3'-phosphate
  modified_base 11: mod_base = OTHER; note = 2'-deoxy-2'-fluorocytidine-3'-phosphate
  modified_base 12: mod_base = OTHER; note = 2'-O-methyluridine-3'-phosphate
  modified_base 13: mod_base = OTHER; note = 2'-O-methylguanosine-3'-phosphate
  modified_base 14: mod_base = OTHER; note = 2'-O-methyluridine-3'-phosphate
  modified_base 15: mod_base = OTHER; note = 2'-O-methyladenosine-3'-phosphate
  modified_base 16: mod_base = OTHER; note = 2'-O-methyluridine-3'-phosphate
  modified_base 17: mod_base = OTHER; note = 2'-O-methyluridine-3'-phosphate
  modified_base 18: mod_base = OTHER; note = 2'-O-methyluridine-3'-phosphate
  modified_base 19: mod_base = OTHER; note = 2'-O-methyluridine-3'-phosphorothioate
  modified_base 20: mod_base = OTHER; note = 2'-O-methylcytidine-3'-phosphorothioate
  modified_base 21: mod_base = OTHER; note = 2'-O-methyladenosine
ggatatacttctgtattttca

SEQ ID NO: 11268 - RNA, 21 nt, synthetic construct
  source 1..21: mol_type = other RNA
  modified_base 1: mod_base = OTHER; note = 2'-O-methylguanosine-3'-phosphorothioate
  modified_base 2: mod_base = OTHER; note = 2'-O-methyladenosine-3'-phosphorothioate
  modified_base 3: mod_base = OTHER; note = 2'-O-methyluridine-3'-phosphate
  modified_base 4: mod_base = OTHER; note = 2'-O-methyladenosine-3'-phosphate
  modified_base 5: mod_base = OTHER; note = 2'-O-methyluridine-3'-phosphate
  modified_base 6: mod_base = OTHER; note = 2'-O-docosanyl-adenosine-3'-phosphate
  modified_base 7: mod_base = OTHER; note = 2'-deoxy-2'-fluorocytidine-3'-phosphate
  modified_base 8: mod_base = OTHER; note = 2'-O-methyluridine-3'-phosphate
  modified_base 9: mod_base = OTHER; note = 2'-deoxy-2'-fluorouridine-3'-phosphate
  modified_base 10: mod_base = OTHER; note = 2'-deoxy-2'-fluorocytidine-3'-phosphate
  modified_base 11: mod_base = OTHER; note = 2'-deoxy-2'-fluorouridine-3'-phosphate
  modified_base 12: mod_base = OTHER; note = 2'-O-methylguanosine-3'-phosphate
  modified_base 13: mod_base = OTHER; note = 2'-O-methyluridine-3'-phosphate
  modified_base 14: mod_base = OTHER; note = 2'-O-methyladenosine-3'-phosphate
  modified_base 15: mod_base = OTHER; note = 2'-O-methyluridine-3'-phosphate
  modified_base 16: mod_base = OTHER; note = 2'-O-methyluridine-3'-phosphate
  modified_base 17: mod_base = OTHER; note = 2'-O-methyluridine-3'-phosphate
  modified_base 18: mod_base = OTHER; note = 2'-O-methyluridine-3'-phosphate
  modified_base 19: mod_base = OTHER; note = 2'-O-methylcytidine-3'-phosphorothioate
  modified_base 20: mod_base = OTHER; note = 2'-O-methyluridine-3'-phosphorothioate
  modified_base 21: mod_base = OTHER; note = 2'-O-methyladenosine
gatatacttctgtattttcta

SEQ ID NO: 11269 - RNA, 21 nt, synthetic construct
  source 1..21: mol_type = other RNA
  modified_base 1: mod_base = OTHER; note = 2'-O-methyladenosine-3'-phosphorothioate
  modified_base 2: mod_base = OTHER; note = 2'-O-methyluridine-3'-phosphorothioate
  modified_base 3: mod_base = OTHER; note = 2'-O-methyladenosine-3'-phosphate
  modified_base 4: mod_base = OTHER; note = 2'-O-methyluridine-3'-phosphate
  modified_base 5: mod_base = OTHER; note = 2'-O-methyladenosine-3'-phosphate
  modified_base 6: mod_base = OTHER; note = 2'-O-docosanyl-cytidine-3'-phosphate
  modified_base 7: mod_base = OTHER; note = 2'-deoxy-2'-fluorouridine-3'-phosphate
  modified_base 8: mod_base = OTHER; note = 2'-O-methyluridine-3'-phosphate
  modified_base 9: mod_base = OTHER; note = 2'-deoxy-2'-fluorocytidine-3'-phosphate
  modified_base 10: mod_base = OTHER; note = 2'-deoxy-2'-fluorouridine-3'-phosphate
  modified_base 11: mod_base = OTHER; note = 2'-deoxy-2'-fluoroguanosine-3'-phosphate
  modified_base 12: mod_base = OTHER; note = 2'-O-methyluridine-3'-phosphate
  modified_base 13: mod_base = OTHER; note = 2'-O-methyladenosine-3'-phosphate
  modified_base 14: mod_base = OTHER; note = 2'-O-methyluridine-3'-phosphate
  modified_base 15: mod_base = OTHER; note = 2'-O-methyluridine-3'-phosphate
  modified_base 16: mod_base = OTHER; note = 2'-O-methyluridine-3'-phosphate
  modified_base 17: mod_base = OTHER; note = 2'-O-methyluridine-3'-phosphate
  modified_base 18: mod_base = OTHER; note = 2'-O-methylcytidine-3'-phosphate
  modified_base 19: mod_base = OTHER; note = 2'-O-methyluridine-3'-phosphorothioate
  modified_base 20: mod_base = OTHER; note = 2'-O-methylcytidine-3'-phosphorothioate
  modified_base 21: mod_base = OTHER; note = 2'-O-methyladenosine
atatacttctgtattttctca

SEQ ID NO: 11270 - RNA, 21 nt, synthetic construct
  source 1..21: mol_type = other RNA
  modified_base 1: mod_base = OTHER; note = 2'-O-methyluridine-3'-phosphorothioate
  modified_base 2: mod_base = OTHER; note = 2'-O-methyladenosine-3'-phosphorothioate
  modified_base 3: mod_base = OTHER; note = 2'-O-methyluridine-3'-phosphate
  modified_base 4: mod_base = OTHER; note = 2'-O-methyladenosine-3'-phosphate
  modified_base 5: mod_base = OTHER; note = 2'-O-methylcytidine-3'-phosphate
  modified_base 6: mod_base = OTHER; note = 2'-O-docosanyl-uridine-3'-phosphate
  modified_base 7: mod_base = OTHER; note = 2'-deoxy-2'-fluorouridine-3'-phosphate
  modified_base 8: mod_base = OTHER; note = 2'-O-methylcytidine-3'-phosphate
  modified_base 9: mod_base = OTHER; note = 2'-deoxy-2'-fluorouridine-3'-phosphate
  modified_base 10: mod_base = OTHER; note = 2'-deoxy-2'-fluoroguanosine-3'-phosphate
  modified_base 11: mod_base = OTHER; note = 2'-deoxy-2'-fluorouridine-3'-phosphate
  modified_base 12: mod_base = OTHER; note = 2'-O-methyladenosine-3'-phosphate
  modified_base 13: mod_base = OTHER; note = 2'-O-methyluridine-3'-phosphate
  modified_base 14: mod_base = OTHER; note = 2'-O-methyluridine-3'-phosphate
  modified_base 15: mod_base = OTHER; note = 2'-O-methyluridine-3'-phosphate
  modified_base 16: mod_base = OTHER; note = 2'-O-methyluridine-3'-phosphate
  modified_base 17: mod_base = OTHER; note = 2'-O-methylcytidine-3'-phosphate
  modified_base 18: mod_base = OTHER; note = 2'-O-methyluridine-3'-phosphate
  modified_base 19: mod_base = OTHER; note = 2'-O-methylcytidine-3'-phosphorothioate
  modified_base 20: mod_base = OTHER; note = 2'-O-methyladenosine-3'-phosphorothioate
  modified_base 21: mod_base = OTHER; note = 2'-O-methyladenosine
tatacttctgtattttctcaa

SEQ ID NO: 11271 - RNA, 21 nt, synthetic construct
  source 1..21: mol_type = other RNA
  modified_base 1: mod_base = OTHER; note = 2'-O-methyladenosine-3'-phosphorothioate
  modified_base 2: mod_base = OTHER; note = 2'-O-methylcytidine-3'-phosphorothioate
  modified_base 3: mod_base = OTHER; note = 2'-O-methyluridine-3'-phosphate
  modified_base 4: mod_base = OTHER; note = 2'-O-methyluridine-3'-phosphate
  modified_base 5: mod_base = OTHER; note = 2'-O-methylcytidine-3'-phosphate
  modified_base 6: mod_base = OTHER; note = 2'-O-docosanyl-uridine-3'-phosphate
  modified_base 7: mod_base = OTHER; note = 2'-deoxy-2'-fluoroguanosine-3'-phosphate
  modified_base 8: mod_base = OTHER; note = 2'-O-methyluridine-3'-phosphate
  modified_base 9: mod_base = OTHER; note = 2'-deoxy-2'-fluoroadenosine-3'-phosphate
  modified_base 10: mod_base = OTHER; note = 2'-deoxy-2'-fluorouridine-3'-phosphate
  modified_base 11: mod_base = OTHER; note = 2'-deoxy-2'-fluorouridine-3'-phosphate
  modified_base 12: mod_base = OTHER; note = 2'-O-methyluridine-3'-phosphate
  modified_base 13: mod_base = OTHER; note = 2'-O-methyluridine-3'-phosphate
  modified_base 14: mod_base = OTHER; note = 2'-O-methylcytidine-3'-phosphate
  modified_base 15: mod_base = OTHER; note = 2'-O-methyluridine-3'-phosphate
  modified_base 16: mod_base = OTHER; note = 2'-O-methylcytidine-3'-phosphate
  modified_base 17: mod_base = OTHER; note = 2'-O-methyladenosine-3'-phosphate
  modified_base 18: mod_base = OTHER; note = 2'-O-methyluridine-3'-phosphate
  modified_base 19: mod_base = OTHER; note = 2'-O-methyladenosine-3'-phosphorothioate
  modified_base 20: mod_base = OTHER; note = 2'-O-methylguanosine-3'-phosphorothioate
  modified_base 21: mod_base = OTHER; note = 2'-O-methyladenosine
acttctgtattttctcataga

SEQ ID NO: 11272 - RNA, 21 nt, synthetic construct
  source 1..21: mol_type = other RNA
  modified_base 1: mod_base = OTHER; note = 2'-O-methylcytidine-3'-phosphorothioate
  modified_base 2: mod_base = OTHER; note = 2'-O-methyluridine-3'-phosphorothioate
  modified_base 3: mod_base = OTHER; note = 2'-O-methyluridine-3'-phosphate
  modified_base 4: mod_base = OTHER; note = 2'-O-methylcytidine-3'-phosphate
  modified_base 5: mod_base = OTHER; note = 2'-O-methyluridine-3'-phosphate
  modified_base 6: mod_base = OTHER; note = 2'-O-docosanyl-guanosine-3'-phosphate
  modified_base 7: mod_base = OTHER; note = 2'-deoxy-2'-fluorouridine-3'-phosphate
  modified_base 8: mod_base = OTHER; note = 2'-O-methyladenosine-3'-phosphate
  modified_base 9: mod_base = OTHER; note = 2'-deoxy-2'-fluorouridine-3'-phosphate
  modified_base 10: mod_base = OTHER; note = 2'-deoxy-2'-fluorouridine-3'-phosphate
  modified_base 11: mod_base = OTHER; note = 2'-deoxy-2'-fluorouridine-3'-phosphate
  modified_base 12: mod_base = OTHER; note = 2'-O-methyluridine-3'-phosphate
  modified_base 13: mod_base = OTHER; note = 2'-O-methylcytidine-3'-phosphate
  modified_base 14: mod_base = OTHER; note = 2'-O-methyluridine-3'-phosphate
  modified_base 15: mod_base = OTHER; note = 2'-O-methylcytidine-3'-phosphate
  modified_base 16: mod_base = OTHER; note = 2'-O-methyladenosine-3'-phosphate
  modified_base 17: mod_base = OTHER; note = 2'-O-methyluridine-3'-phosphate
  modified_base 18: mod_base = OTHER; note = 2'-O-methyladenosine-3'-phosphate
  modified_base 19: mod_base = OTHER; note = 2'-O-methylguanosine-3'-phosphorothioate
  modified_base 20: mod_base = OTHER; note = 2'-O-methyladenosine-3'-phosphorothioate
  modified_base 21: mod_base = OTHER; note = 2'-O-methyladenosine
cttctgtattttctcatagaa

SEQ ID NO: 11273 - RNA, 21 nt, synthetic construct
  source 1..21: mol_type = other RNA
  modified_base 1: mod_base = OTHER; note = 2'-O-methyluridine-3'-phosphorothioate
  modified_base 2: mod_base = OTHER; note = 2'-O-methyluridine-3'-phosphorothioate
  modified_base 3: mod_base = OTHER; note = 2'-O-methylcytidine-3'-phosphate
  modified_base 4: mod_base = OTHER; note = 2'-O-methyluridine-3'-phosphate
  modified_base 5: mod_base = OTHER; note = 2'-O-methylguanosine-3'-phosphate
  modified_base 6: mod_base = OTHER; note = 2'-O-docosanyl-uridine-3'-phosphate
  modified_base 7: mod_base = OTHER; note = 2'-deoxy-2'-fluoroadenosine-3'-phosphate
  modified_base 8: mod_base = OTHER; note = 2'-O-methyluridine-3'-phosphate
  modified_base 9: mod_base = OTHER; note = 2'-deoxy-2'-fluorouridine-3'-phosphate
  modified_base 10: mod_base = OTHER; note = 2'-deoxy-2'-fluorouridine-3'-phosphate
  modified_base 11: mod_base = OTHER; note = 2'-deoxy-2'-fluorouridine-3'-phosphate
  modified_base 12: mod_base = OTHER; note = 2'-O-methylcytidine-3'-phosphate
  modified_base 13: mod_base = OTHER; note = 2'-O-methyluridine-3'-phosphate
  modified_base 14: mod_base = OTHER; note = 2'-O-methylcytidine-3'-phosphate
  modified_base 15: mod_base = OTHER; note = 2'-O-methyladenosine-3'-phosphate
  modified_base 16: mod_base = OTHER; note = 2'-O-methyluridine-3'-phosphate
  modified_base 17: mod_base = OTHER; note = 2'-O-methyladenosine-3'-phosphate
  modified_base 18: mod_base = OTHER; note = 2'-O-methylguanosine-3'-phosphate
  modified_base 19: mod_base = OTHER; note = 2'-O-methyladenosine-3'-phosphorothioate
  modified_base 20: mod_base = OTHER; note = 2'-O-methylguanosine-3'-phosphorothioate
  modified_base 21: mod_base = OTHER; note = 2'-O-methyladenosine
ttctgtattttctcatagaga

SEQ ID NO: 11274 - RNA, 21 nt, synthetic construct
  source 1..21: mol_type = other RNA
  modified_base 1: mod_base = OTHER; note = 2'-O-methyluridine-3'-phosphorothioate
  modified_base 2: mod_base = OTHER; note = 2'-O-methylcytidine-3'-phosphorothioate
  modified_base 3: mod_base = OTHER; note = 2'-O-methyluridine-3'-phosphate
  modified_base 4: mod_base = OTHER; note = 2'-O-methylguanosine-3'-phosphate
  modified_base 5: mod_base = OTHER; note = 2'-O-methyluridine-3'-phosphate
  modified_base 6: mod_base = OTHER; note = 2'-O-docosanyl-adenosine-3'-phosphate
  modified_base 7: mod_base = OTHER; note = 2'-deoxy-2'-fluorouridine-3'-phosphate
  modified_base 8: mod_base = OTHER; note = 2'-O-methyluridine-3'-phosphate
  modified_base 9: mod_base = OTHER; note = 2'-deoxy-2'-fluorouridine-3'-phosphate
  modified_base 10: mod_base = OTHER; note = 2'-deoxy-2'-fluorouridine-3'-phosphate
  modified_base 11: mod_base = OTHER; note = 2'-deoxy-2'-fluorocytidine-3'-phosphate
  modified_base 12: mod_base = OTHER; note = 2'-O-methyluridine-3'-phosphate
  modified_base 13: mod_base = OTHER; note = 2'-O-methylcytidine-3'-phosphate
  modified_base 14: mod_base = OTHER; note = 2'-O-methyladenosine-3'-phosphate
  modified_base 15: mod_base = OTHER; note = 2'-O-methyluridine-3'-phosphate
  modified_base 16: mod_base = OTHER; note = 2'-O-methyladenosine-3'-phosphate
  modified_base 17: mod_base = OTHER; note = 2'-O-methylguanosine-3'-phosphate
  modified_base 18: mod_base = OTHER; note = 2'-O-methyladenosine-3'-phosphate
  modified_base 19: mod_base = OTHER; note = 2'-O-methylguanosine-3'-phosphorothioate
  modified_base 20: mod_base = OTHER; note = 2'-O-methyluridine-3'-phosphorothioate
  modified_base 21: mod_base = OTHER; note = 2'-O-methyladenosine
tctgtattttctcatagagta

SEQ ID NO: 11275 - RNA, 21 nt, synthetic construct
  source 1..21: mol_type = other RNA
  modified_base 1: mod_base = OTHER; note = 2'-O-methylcytidine-3'-phosphorothioate
  modified_base 2: mod_base = OTHER; note = 2'-O-methyluridine-3'-phosphorothioate
  modified_base 3: mod_base = OTHER; note = 2'-O-methylcytidine-3'-phosphate
  modified_base 4: mod_base = OTHER; note = 2'-O-methyladenosine-3'-phosphate
  modified_base 5: mod_base = OTHER; note = 2'-O-methyluridine-3'-phosphate
  modified_base 6: mod_base = OTHER; note = 2'-O-docosanyl-adenosine-3'-phosphate
  modified_base 7: mod_base = OTHER; note = 2'-deoxy-2'-fluoroguanosine-3'-phosphate
  modified_base 8: mod_base = OTHER; note = 2'-O-methyladenosine-3'-phosphate
  modified_base 9: mod_base = OTHER; note = 2'-deoxy-2'-fluoroguanosine-3'-phosphate
  modified_base 10: mod_base = OTHER; note = 2'-deoxy-2'-fluorouridine-3'-phosphate
  modified_base 11: mod_base = OTHER; note = 2'-deoxy-2'-fluoroadenosine-3'-phosphate
  modified_base 12: mod_base = OTHER; note = 2'-O-methylcytidine-3'-phosphate
  modified_base 13: mod_base = OTHER; note = 2'-O-methyladenosine-3'-phosphate
  modified_base 14: mod_base = OTHER; note = 2'-O-methyladenosine-3'-phosphate
  modified_base 15: mod_base = OTHER; note = 2'-O-methyluridine-3'-phosphate
  modified_base 16: mod_base = OTHER; note = 2'-O-methyluridine-3'-phosphate
  modified_base 17: mod_base = OTHER; note = 2'-O-methyluridine-3'-phosphate
  modified_base 18: mod_base = OTHER; note = 2'-O-methyladenosine-3'-phosphate
  modified_base 19: mod_base = OTHER; note = 2'-O-methylguanosine-3'-phosphorothioate
  modified_base 20: mod_base = OTHER; note = 2'-O-methyluridine-3'-phosphorothioate
  modified_base 21: mod_base = OTHER; note = 2'-O-methyladenosine
ctcatagagtacaatttagta

SEQ ID NO: 11276 - RNA, 21 nt, synthetic construct
  source 1..21: mol_type = other RNA
  modified_base 1: mod_base = OTHER; note = 2'-O-methyluridine-3'-phosphorothioate
  modified_base 2: mod_base = OTHER; note = 2'-O-methylcytidine-3'-phosphorothioate
  modified_base 3: mod_base = OTHER; note = 2'-O-methyladenosine-3'-phosphate
  modified_base 4: mod_base = OTHER; note = 2'-O-methyluridine-3'-phosphate
  modified_base 5: mod_base = OTHER; note = 2'-O-methyladenosine-3'-phosphate
  modified_base 6: mod_base = OTHER; note = 2'-O-docosanyl-guanosine-3'-phosphate
  modified_base 7: mod_base = OTHER; note = 2'-deoxy-2'-fluoroadenosine-3'-phosphate
  modified_base 8: mod_base = OTHER; note = 2'-O-methylguanosine-3'-phosphate
  modified_base 9: mod_base = OTHER; note = 2'-deoxy-2'-fluorouridine-3'-phosphate
  modified_base 10: mod_base = OTHER; note = 2'-deoxy-2'-fluoroadenosine-3'-phosphate
  modified_base 11: mod_base = OTHER; note = 2'-deoxy-2'-fluorocytidine-3'-phosphate
  modified_base 12: mod_base = OTHER; note = 2'-O-methyladenosine-3'-phosphate
  modified_base 13: mod_base = OTHER; note = 2'-O-methyladenosine-3'-phosphate
  modified_base 14: mod_base = OTHER; note = 2'-O-methyluridine-3'-phosphate
  modified_base 15: mod_base = OTHER; note = 2'-O-methyluridine-3'-phosphate
  modified_base 16: mod_base = OTHER; note = 2'-O-methyluridine-3'-phosphate
  modified_base 17: mod_base = OTHER; note = 2'-O-methyladenosine-3'-phosphate
  modified_base 18: mod_base = OTHER; note = 2'-O-methylguanosine-3'-phosphate
  modified_base 19: mod_base = OTHER; note = 2'-O-methyluridine-3'-phosphorothioate
  modified_base 20: mod_base = OTHER; note = 2'-O-methylguanosine-3'-phosphorothioate
  modified_base 21: mod_base = OTHER; note = 2'-O-methyladenosine
tcatagagtacaatttagtga

SEQ ID NO: 11277 - RNA, 21 nt, synthetic construct
  source 1..21: mol_type = other RNA
  modified_base 1: mod_base = OTHER; note = 2'-O-methylcytidine-3'-phosphorothioate
  modified_base 2: mod_base = OTHER; note = 2'-O-methyladenosine-3'-phosphorothioate
  modified_base 3: mod_base = OTHER; note = 2'-O-methyluridine-3'-phosphate
  modified_base 4: mod_base = OTHER; note = 2'-O-methyladenosine-3'-phosphate
  modified_base 5: mod_base = OTHER; note = 2'-O-methylguanosine-3'-phosphate
  modified_base 6: mod_base = OTHER; note = 2'-O-docosanyl-adenosine-3'-phosphate
  modified_base 7: mod_base = OTHER; note = 2'-deoxy-2'-fluoroguanosine-3'-phosphate
  modified_base 8: mod_base = OTHER; note = 2'-O-methyluridine-3'-phosphate
  modified_base 9: mod_base = OTHER; note = 2'-deoxy-2'-fluoroadenosine-3'-phosphate
  modified_base 10: mod_base = OTHER; note = 2'-deoxy-2'-fluorocytidine-3'-phosphate
  modified_base 11: mod_base = OTHER; note = 2'-deoxy-2'-fluoroadenosine-3'-phosphate
  modified_base 12: mod_base = OTHER; note = 2'-O-methyladenosine-3'-phosphate
  modified_base 13: mod_base = OTHER; note = 2'-O-methyluridine-3'-phosphate
  modified_base 14: mod_base = OTHER; note = 2'-O-methyluridine-3'-phosphate
  modified_base 15: mod_base = OTHER; note = 2'-O-methyluridine-3'-phosphate
  modified_base 16: mod_base = OTHER; note = 2'-O-methyladenosine-3'-phosphate
  modified_base 17: mod_base = OTHER; note = 2'-O-methylguanosine-3'-phosphate
  modified_base 18: mod_base = OTHER; note = 2'-O-methyluridine-3'-phosphate
  modified_base 19: mod_base = OTHER; note = 2'-O-methylguanosine-3'-phosphorothioate
  modified_base 20: mod_base = OTHER; note = 2'-O-methyladenosine-3'-phosphorothioate
  modified_base 21: mod_base = OTHER; note = 2'-O-methyladenosine
catagagtacaatttagtgaa

SEQ ID NO: 11278 - RNA, 21 nt, synthetic construct
  source 1..21: mol_type = other RNA
  modified_base 1: mod_base = OTHER; note = 2'-O-methyladenosine-3'-phosphorothioate
  modified_base 2: mod_base = OTHER; note = 2'-O-methyluridine-3'-phosphorothioate
  modified_base 3: mod_base = OTHER; note = 2'-O-methyladenosine-3'-phosphate
  modified_base 4: mod_base = OTHER; note = 2'-O-methylguanosine-3'-phosphate
  modified_base 5: mod_base = OTHER; note = 2'-O-methyladenosine-3'-phosphate
  modified_base 6: mod_base = OTHER; note = 2'-O-docosanyl-guanosine-3'-phosphate
  modified_base 7: mod_base = OTHER; note = 2'-deoxy-2'-fluorouridine-3'-phosphate
  modified_base 8: mod_base = OTHER; note = 2'-O-methyladenosine-3'-phosphate
  modified_base 9: mod_base = OTHER; note = 2'-deoxy-2'-fluorocytidine-3'-phosphate
  modified_base 10: mod_base = OTHER; note = 2'-deoxy-2'-fluoroadenosine-3'-phosphate
  modified_base 11: mod_base = OTHER; note = 2'-deoxy-2'-fluoroadenosine-3'-phosphate
  modified_base 12: mod_base = OTHER; note = 2'-O-methyluridine-3'-phosphate
  modified_base 13: mod_base = OTHER; note = 2'-O-methyluridine-3'-phosphate
  modified_base 14: mod_base = OTHER; note = 2'-O-methyluridine-3'-phosphate
  modified_base 15: mod_base = OTHER; note = 2'-O-methyladenosine-3'-phosphate
  modified_base 16: mod_base = OTHER; note = 2'-O-methylguanosine-3'-phosphate
  modified_base 17: mod_base = OTHER; note = 2'-O-methyluridine-3'-phosphate
  modified_base 18: mod_base = OTHER; note = 2'-O-methylguanosine-3'-phosphate
  modified_base 19: mod_base = OTHER; note = 2'-O-methyladenosine-3'-phosphorothioate
  modified_base 20: mod_base = OTHER; note = 2'-O-methyluridine-3'-phosphorothioate
  modified_base 21: mod_base = OTHER; note = 2'-O-methyladenosine
atagagtacaatttagtgata

SEQ ID NO: 11279 - RNA, 21 nt, synthetic construct
  source 1..21: mol_type = other RNA
  modified_base 1: mod_base = OTHER; note = 2'-O-methyluridine-3'-phosphorothioate
  modified_base 2: mod_base = OTHER; note = 2'-O-methyladenosine-3'-phosphorothioate
  modified_base 3: mod_base = OTHER; note = 2'-O-methylguanosine-3'-phosphate
  modified_base 4: mod_base = OTHER; note = 2'-O-methyladenosine-3'-phosphate
  modified_base 5: mod_base = OTHER; note = 2'-O-methylguanosine-3'-phosphate
  modified_base 6: mod_base = OTHER; note = 2'-O-docosanyl-uridine-3'-phosphate
  modified_base 7: mod_base = OTHER; note = 2'-deoxy-2'-fluoroadenosine-3'-phosphate
  modified_base 8: mod_base = OTHER; note = 2'-O-methylcytidine-3'-phosphate
  modified_base 9: mod_base = OTHER; note = 2'-deoxy-2'-fluoroadenosine-3'-phosphate
  modified_base 10: mod_base = OTHER; note = 2'-deoxy-2'-fluoroadenosine-3'-phosphate
  modified_base 11: mod_base = OTHER; note = 2'-deoxy-2'-fluorouridine-3'-phosphate
  modified_base 12: mod_base = OTHER; note = 2'-O-methyluridine-3'-phosphate
  modified_base 13: mod_base = OTHER; note = 2'-O-methyluridine-3'-phosphate
  modified_base 14: mod_base = OTHER; note = 2'-O-methyladenosine-3'-phosphate
  modified_base 15: mod_base = OTHER; note = 2'-O-methylguanosine-3'-phosphate
  modified_base 16: mod_base = OTHER; note = 2'-O-methyluridine-3'-phosphate
  modified_base 17: mod_base = OTHER; note = 2'-O-methylguanosine-3'-phosphate
  modified_base 18: mod_base = OTHER; note = 2'-O-methyladenosine-3'-phosphate
  modified_base 19: mod_base = OTHER; note = 2'-O-methyluridine-3'-phosphorothioate
  modified_base 20: mod_base = OTHER; note = 2'-O-methyluridine-3'-phosphorothioate
  modified_base 21: mod_base = OTHER; note = 2'-O-methyladenosine
tagagtacaatttagtgatta

SEQ ID NO: 11280 - RNA, 21 nt, synthetic construct
  source 1..21: mol_type = other RNA
  modified_base 1: mod_base = OTHER; note = 2'-O-methyladenosine-3'-phosphorothioate
  modified_base 2: mod_base = OTHER; note = 2'-O-methylguanosine-3'-phosphorothioate
  modified_base 3: mod_base = OTHER; note = 2'-O-methyluridine-3'-phosphate
  modified_base 4: mod_base = OTHER; note = 2'-O-methyladenosine-3'-phosphate
  modified_base 5: mod_base = OTHER; note = 2'-O-methylcytidine-3'-phosphate
  modified_base 6: mod_base = OTHER; note = 2'-O-docosanyl-adenosine-3'-phosphate
  modified_base 7: mod_base = OTHER; note = 2'-deoxy-2'-fluoroadenosine-3'-phosphate
  modified_base 8: mod_base = OTHER; note = 2'-O-methyluridine-3'-phosphate
  modified_base 9: mod_base = OTHER; note = 2'-deoxy-2'-fluorouridine-3'-phosphate
  modified_base 10: mod_base = OTHER; note = 2'-deoxy-2'-fluorouridine-3'-phosphate
  modified_base 11: mod_base = OTHER; note = 2'-deoxy-2'-fluoroadenosine-3'-phosphate
  modified_base 12: mod_base = OTHER; note = 2'-O-methylguanosine-3'-phosphate
  modified_base 13: mod_base = OTHER; note = 2'-O-methyluridine-3'-phosphate
  modified_base 14: mod_base = OTHER; note = 2'-O-methylguanosine-3'-phosphate
  modified_base 15: mod_base = OTHER; note = 2'-O-methyladenosine-3'-phosphate
  modified_base 16: mod_base = OTHER; note = 2'-O-methyluridine-3'-phosphate
  modified_base 17: mod_base = OTHER; note = 2'-O-methyluridine-3'-phosphate
  modified_base 18: mod_base = OTHER; note = 2'-O-methyladenosine-3'-phosphate
  modified_base 19: mod_base = OTHER; note = 2'-O-methyluridine-3'-phosphorothioate
  modified_base 20: mod_base = OTHER; note = 2'-O-methylguanosine-3'-phosphorothioate
  modified_base 21: mod_base = OTHER; note = 2'-O-methyladenosine
agtacaatttagtgattatga

SEQ ID NO: 11281 - RNA, 21 nt, synthetic construct
  source 1..21: mol_type = other RNA
  modified_base 1: mod_base = OTHER; note = 2'-O-methyladenosine-3'-phosphorothioate
  modified_base 2: mod_base = OTHER; note = 2'-O-methyluridine-3'-phosphorothioate
  modified_base 3: mod_base = OTHER; note = 2'-O-methyluridine-3'-phosphate
  modified_base 4: mod_base = OTHER; note = 2'-O-methyladenosine-3'-phosphate
  modified_base 5: mod_base = OTHER; note = 2'-O-methyluridine-3'-phosphate
  modified_base 6: mod_base = OTHER; note = 2'-O-docosanyl-guanosine-3'-phosphate
  modified_base 7: mod_base = OTHER; note = 2'-deoxy-2'-fluorocytidine-3'-phosphate
  modified_base 8: mod_base = OTHER; note = 2'-O-methyluridine-3'-phosphate
  modified_base 9: mod_base = OTHER; note = 2'-deoxy-2'-fluorouridine-3'-phosphate
  modified_base 10: mod_base = OTHER; note = 2'-deoxy-2'-fluorocytidine-3'-phosphate
  modified_base 11: mod_base = OTHER; note = 2'-deoxy-2'-fluoroadenosine-3'-phosphate
  modified_base 12: mod_base = OTHER; note = 2'-O-methyluridine-3'-phosphate
  modified_base 13: mod_base = OTHER; note = 2'-O-methyluridine-3'-phosphate
  modified_base 14: mod_base = OTHER; note = 2'-O-methyluridine-3'-phosphate
  modified_base 15: mod_base = OTHER; note = 2'-O-methylcytidine-3'-phosphate
  modified_base 16: mod_base = OTHER; note = 2'-O-methyladenosine-3'-phosphate
  modified_base 17: mod_base = OTHER; note = 2'-O-methylcytidine-3'-phosphate
  modified_base 18: mod_base = OTHER; note = 2'-O-methyluridine-3'-phosphate
  modified_base 19: mod_base = OTHER; note = 2'-O-methyladenosine-3'-phosphorothioate
  modified_base 20: mod_base = OTHER; note = 2'-O-methyluridine-3'-phosphorothioate
  modified_base 21: mod_base = OTHER; note = 2'-O-methyladenosine
attatgcttcatttcactata

SEQ ID NO: 11282 - RNA, 21 nt, synthetic construct
  source 1..21: mol_type = other RNA
  modified_base 1: mod_base = OTHER; note = 2'-O-methylguanosine-3'-phosphorothioate
  modified_base 2: mod_base = OTHER; note = 2'-O-methyluridine-3'-phosphorothioate
  modified_base 3: mod_base = OTHER; note = 2'-O-methyladenosine-3'-phosphate
  modified_base 4: mod_base = OTHER; note = 2'-O-methylcytidine-3'-phosphate
  modified_base 5: mod_base = OTHER; note = 2'-O-methyladenosine-3'-phosphate
  modified_base 6: mod_base = OTHER; note = 2'-O-docosanyl-adenosine-3'-phosphate
  modified_base 7: mod_base = OTHER; note = 2'-deoxy-2'-fluorouridine-3'-phosphate
  modified_base 8: mod_base = OTHER; note = 2'-O-methyluridine-3'-phosphate
  modified_base 9: mod_base = OTHER; note = 2'-deoxy-2'-fluorouridine-3'-phosphate
  modified_base 10: mod_base = OTHER; note = 2'-deoxy-2'-fluoroadenosine-3'-phosphate
  modified_base 11: mod_base = OTHER; note = 2'-deoxy-2'-fluoroguanosine-3'-phosphate
  modified_base 12: mod_base = OTHER; note = 2'-O-methyluridine-3'-phosphate
  modified_base 13: mod_base = OTHER; note = 2'-O-methylguanosine-3'-phosphate
  modified_base 14: mod_base = OTHER; note = 2'-O-methyladenosine-3'-phosphate
  modified_base 15: mod_base = OTHER; note = 2'-O-methyluridine-3'-phosphate
  modified_base 16: mod_base = OTHER; note = 2'-O-methyluridine-3'-phosphate
  modified_base 17: mod_base = OTHER; note = 2'-O-methyladenosine-3'-phosphate
  modified_base 18: mod_base = OTHER; note = 2'-O-methyluridine-3'-phosphate
  modified_base 19: mod_base = OTHER; note = 2'-O-methylguanosine-3'-phosphorothioate
  modified_base 20: mod_base = OTHER; note = 2'-O-methylcytidine-3'-phosphorothioate
  modified_base 21: mod_base = OTHER; note = 2'-O-methyladenosine
gtacaatttagtgattatgca

SEQ ID NO: 11283 - RNA, 21 nt, synthetic construct
  source 1..21: mol_type = other RNA
  modified_base 1: mod_base = OTHER; note = 2'-O-methyluridine-3'-phosphorothioate
  modified_base 2: mod_base = OTHER; note = 2'-O-methyladenosine-3'-phosphorothioate
  modified_base 3: mod_base = OTHER; note = 2'-O-methylcytidine-3'-phosphate
  modified_base 4: mod_base = OTHER; note = 2'-O-methyladenosine-3'-phosphate
  modified_base 5: mod_base = OTHER; note = 2'-O-methyladenosine-3'-phosphate
  modified_base 6: mod_base = OTHER; note = 2'-O-docosanyl-uridine-3'-phosphate
  modified_base 7: mod_base = OTHER; note = 2'-deoxy-2'-fluorouridine-3'-phosphate
  modified_base 8: mod_base = OTHER; note = 2'-O-methyluridine-3'-phosphate
  modified_base 9: mod_base = OTHER; note = 2'-deoxy-2'-fluoroadenosine-3'-phosphate
  modified_base 10: mod_base = OTHER; note = 2'-deoxy-2'-fluoroguanosine-3'-phosphate
  modified_base 11: mod_base = OTHER; note = 2'-deoxy-2'-fluorouridine-3'-phosphate
  modified_base 12: mod_base = OTHER; note = 2'-O-methylguanosine-3'-phosphate
  modified_base 13: mod_base = OTHER; note = 2'-O-methyladenosine-3'-phosphate
  modified_base 14: mod_base = OTHER; note = 2'-O-methyluridine-3'-phosphate
  modified_base 15: mod_base = OTHER; note = 2'-O-methyluridine-3'-phosphate
  modified_base 16: mod_base = OTHER; note = 2'-O-methyladenosine-3'-phosphate
  modified_base 17: mod_base = OTHER; note = 2'-O-methyluridine-3'-phosphate
  modified_base 18: mod_base = OTHER; note = 2'-O-methylguanosine-3'-phosphate
  modified_base 19: mod_base = OTHER; note = 2'-O-methylcytidine-3'-phosphorothioate
  modified_base 20: mod_base = OTHER; note = 2'-O-methyluridine-3'-phosphorothioate
  modified_base 21: mod_base = OTHER; note = 2'-O-methyladenosine
tacaatttagtgattatgcta

SEQ ID NO: 11284 - RNA, 21 nt, synthetic construct
  source 1..21: mol_type = other RNA
  modified_base 1: mod_base = OTHER; note = 2'-O-methyladenosine-3'-phosphorothioate
  modified_base 2: mod_base = OTHER; note = 2'-O-methylcytidine-3'-phosphorothioate
  modified_base 3: mod_base = OTHER; note = 2'-O-methyladenosine-3'-phosphate
  modified_base 4: mod_base = OTHER; note = 2'-O-methyladenosine-3'-phosphate
  modified_base 5: mod_base = OTHER; note = 2'-O-methyluridine-3'-phosphate
  modified_base 6: mod_base = OTHER; note = 2'-O-docosanyl-uridine-3'-phosphate
  modified_base 7: mod_base = OTHER; note = 2'-deoxy-2'-fluorouridine-3'-phosphate
  modified_base 8: mod_base = OTHER; note = 2'-O-methyladenosine-3'-phosphate
  modified_base 9: mod_base = OTHER; note = 2'-deoxy-2'-fluoroguanosine-3'-phosphate
  modified_base 10: mod_base = OTHER; note = 2'-deoxy-2'-fluorouridine-3'-phosphate
  modified_base 11: mod_base = OTHER; note = 2'-deoxy-2'-fluoroguanosine-3'-phosphate
  modified_base 12: mod_base = OTHER; note = 2'-O-methyladenosine-3'-phosphate
  modified_base 13: mod_base = OTHER; note = 2'-O-methyluridine-3'-phosphate
  modified_base 14: mod_base = OTHER; note = 2'-O-methyluridine-3'-phosphate
  modified_base 15: mod_base = OTHER; note = 2'-O-methyladenosine-3'-phosphate
  modified_base 16: mod_base = OTHER; note = 2'-O-methyluridine-3'-phosphate
  modified_base 17: mod_base = OTHER; note = 2'-O-methylguanosine-3'-phosphate
  modified_base 18: mod_base = OTHER; note = 2'-O-methylcytidine-3'-phosphate
  modified_base 19: mod_base = OTHER; note = 2'-O-methyluridine-3'-phosphorothioate
  modified_base 20: mod_base = OTHER; note = 2'-O-methyluridine-3'-phosphorothioate
  modified_base 21: mod_base = OTHER; note = 2'-O-methyladenosine
acaatttagtgattatgctta

SEQ ID NO: 11285 - RNA, 21 nt, synthetic construct
  source 1..21: mol_type = other RNA
  modified_base 1: mod_base = OTHER; note = 2'-O-methyladenosine-3'-phosphorothioate
  modified_base 2: mod_base = OTHER; note = 2'-O-methylguanosine-3'-phosphorothioate
  modified_base 3: mod_base = OTHER; note = 2'-O-methyluridine-3'-phosphate
  modified_base 4: mod_base = OTHER; note = 2'-O-methylguanosine-3'-phosphate
  modified_base 5: mod_base = OTHER; note = 2'-O-methyladenosine-3'-phosphate
  modified_base 6: mod_base = OTHER; note = 2'-O-docosanyl-uridine-3'-phosphate
  modified_base 7: mod_base = OTHER; note = 2'-deoxy-2'-fluorouridine-3'-phosphate
  modified_base 8: mod_base = OTHER; note = 2'-O-methyladenosine-3'-phosphate
  modified_base 9: mod_base = OTHER; note = 2'-deoxy-2'-fluorouridine-3'-phosphate
  modified_base 10: mod_base = OTHER; note = 2'-deoxy-2'-fluoroguanosine-3'-phosphate
  modified_base 11: mod_base = OTHER; note = 2'-deoxy-2'-fluorocytidine-3'-phosphate
  modified_base 12: mod_base = OTHER; note = 2'-O-methyluridine-3'-phosphate
  modified_base 13: mod_base = OTHER; note = 2'-O-methyluridine-3'-phosphate
  modified_base 14: mod_base = OTHER; note = 2'-O-methylcytidine-3'-phosphate
  modified_base 15: mod_base = OTHER; note = 2'-O-methyladenosine-3'-phosphate
  modified_base 16: mod_base = OTHER; note = 2'-O-methyluridine-3'-phosphate
  modified_base 17: mod_base = OTHER; note = 2'-O-methyluridine-3'-phosphate
  modified_base 18: mod_base = OTHER; note = 2'-O-methyluridine-3'-phosphate
  modified_base 19: mod_base = OTHER; note = 2'-O-methylcytidine-3'-phosphorothioate
  modified_base 20: mod_base = OTHER; note = 2'-O-methyladenosine-3'-phosphorothioate
  modified_base 21: mod_base = OTHER; note = 2'-O-methyladenosine
agtgattatgcttcatttcaa

SEQ ID NO: 11286 - RNA, 21 nt, synthetic construct
  source 1..21: mol_type = other RNA
  modified_base 1: mod_base = OTHER; note = 2'-O-methylguanosine-3'-phosphorothioate
  modified_base 2: mod_base = OTHER; note = 2'-O-methyluridine-3'-phosphorothioate
  modified_base 3: mod_base = OTHER; note = 2'-O-methylguanosine-3'-phosphate
  modified_base 4: mod_base = OTHER; note = 2'-O-methyladenosine-3'-phosphate
  modified_base 5: mod_base = OTHER; note = 2'-O-methyluridine-3'-phosphate
  modified_base 6: mod_base = OTHER; note = 2'-O-docosanyl-uridine-3'-phosphate
  modified_base 7: mod_base = OTHER; note = 2'-deoxy-2'-fluoroadenosine-3'-phosphate
  modified_base 8: mod_base = OTHER; note = 2'-O-methyluridine-3'-phosphate
  modified_base 9: mod_base = OTHER; note = 2'-deoxy-2'-fluoroguanosine-3'-phosphate
  modified_base 10: mod_base = OTHER; note = 2'-deoxy-2'-fluorocytidine-3'-phosphate
  modified_base 11: mod_base = OTHER; note = 2'-deoxy-2'-fluorouridine-3'-phosphate
  modified_base 12: mod_base = OTHER; note = 2'-O-methyluridine-3'-phosphate
  modified_base 13: mod_base = OTHER; note = 2'-O-methylcytidine-3'-phosphate
  modified_base 14: mod_base = OTHER; note = 2'-O-methyladenosine-3'-phosphate
  modified_base 15: mod_base = OTHER; note = 2'-O-methyluridine-3'-phosphate
  modified_base 16: mod_base = OTHER; note = 2'-O-methyluridine-3'-phosphate
  modified_base 17: mod_base = OTHER; note = 2'-O-methyluridine-3'-phosphate
  modified_base 18: mod_base = OTHER; note = 2'-O-methylcytidine-3'-phosphate
  modified_base 19: mod_base = OTHER; note = 2'-O-methyladenosine-3'-phosphorothioate
  modified_base 20: mod_base = OTHER; note = 2'-O-methylcytidine-3'-phosphorothioate
  modified_base 21: mod_base = OTHER; note = 2'-O-methyladenosine
gtgattatgcttcatttcaca

SEQ ID NO: 11287 - RNA, 21 nt, synthetic construct
  source 1..21: mol_type = other RNA
  modified_base 1: mod_base = OTHER; note = 2'-O-methyluridine-3'-phosphorothioate
  modified_base 2: mod_base = OTHER; note = 2'-O-methylguanosine-3'-phosphorothioate
  modified_base 3: mod_base = OTHER; note = 2'-O-methyladenosine-3'-phosphate
  modified_base 4: mod_base = OTHER; note = 2'-O-methyluridine-3'-phosphate
  modified_base 5: mod_base = OTHER; note = 2'-O-methyluridine-3'-phosphate
  modified_base 6: mod_base = OTHER; note = 2'-O-docosanyl-adenosine-3'-phosphate
  modified_base 7: mod_base = OTHER; note = 2'-deoxy-2'-fluorouridine-3'-phosphate
  modified_base 8: mod_base = OTHER; note = 2'-O-methylguanosine-3'-phosphate
  modified_base 9: mod_base = OTHER; note = 2'-deoxy-2'-fluorocytidine-3'-phosphate
  modified_base 10: mod_base = OTHER; note = 2'-deoxy-2'-fluorouridine-3'-phosphate
  modified_base 11: mod_base = OTHER; note = 2'-deoxy-2'-fluorouridine-3'-phosphate
  modified_base 12: mod_base = OTHER; note = 2'-O-methylcytidine-3'-phosphate
  modified_base 13: mod_base = OTHER; note = 2'-O-methyladenosine-3'-phosphate
  modified_base 14: mod_base = OTHER; note = 2'-O-methyluridine-3'-phosphate
  modified_base 15: mod_base = OTHER; note = 2'-O-methyluridine-3'-phosphate
  modified_base 16: mod_base = OTHER; note = 2'-O-methyluridine-3'-phosphate
  modified_base 17: mod_base = OTHER; note = 2'-O-methylcytidine-3'-phosphate
  modified_base 18: mod_base = OTHER; note = 2'-O-methyladenosine-3'-phosphate
  modified_base 19: mod_base = OTHER; note = 2'-O-methylcytidine-3'-phosphorothioate
  modified_base 20: mod_base = OTHER; note = 2'-O-methyluridine-3'-phosphorothioate
  modified_base 21: mod_base = OTHER; note = 2'-O-methyladenosine
tgattatgcttcatttcacta

SEQ ID NO: 11288 - RNA, 21 nt, synthetic construct
  source 1..21: mol_type = other RNA
  modified_base 1: mod_base = OTHER; note = 2'-O-methylguanosine-3'-phosphorothioate
  modified_base 2: mod_base = OTHER; note = 2'-O-methyladenosine-3'-phosphorothioate
  modified_base 3: mod_base = OTHER; note = 2'-O-methyluridine-3'-phosphate
  modified_base 4: mod_base = OTHER; note = 2'-O-methyluridine-3'-phosphate
  modified_base 5: mod_base = OTHER; note = 2'-O-methyladenosine-3'-phosphate
  modified_base 6: mod_base = OTHER; note = 2'-O-docosanyl-uridine-3'-phosphate
  modified_base 7: mod_base = OTHER; note = 2'-deoxy-2'-fluoroguanosine-3'-phosphate
  modified_base 8: mod_base = OTHER; note = 2'-O-methylcytidine-3'-phosphate
  modified_base 9: mod_base = OTHER; note = 2'-deoxy-2'-fluorouridine-3'-phosphate
  modified_base 10: mod_base = OTHER; note = 2'-deoxy-2'-fluorouridine-3'-phosphate
  modified_base 11: mod_base = OTHER; note = 2'-deoxy-2'-fluorocytidine-3'-phosphate
  modified_base 12: mod_base = OTHER; note = 2'-O-methyladenosine-3'-phosphate
  modified_base 13: mod_base = OTHER; note = 2'-O-methyluridine-3'-phosphate
  modified_base 14: mod_base = OTHER; note = 2'-O-methyluridine-3'-phosphate
  modified_base 15: mod_base = OTHER; note = 2'-O-methyluridine-3'-phosphate
  modified_base 16: mod_base = OTHER; note = 2'-O-methylcytidine-3'-phosphate
  modified_base 17: mod_base = OTHER; note = 2'-O-methyladenosine-3'-phosphate
  modified_base 18: mod_base = OTHER; note = 2'-O-methylcytidine-3'-phosphate
  modified_base 19: mod_base = OTHER; note = 2'-O-methyluridine-3'-phosphorothioate
  modified_base 20: mod_base = OTHER; note = 2'-O-methyladenosine-3'-phosphorothioate
  modified_base 21: mod_base = OTHER; note = 2'-O-methyladenosine
gattatgcttcatttcactaa

SEQ ID NO: 11289 - RNA, 21 nt, synthetic construct
  source 1..21: mol_type = other RNA
  modified_base 1: mod_base = OTHER; note = 2'-O-methyluridine-3'-phosphorothioate
  modified_base 2: mod_base = OTHER; note = 2'-O-methyluridine-3'-phosphorothioate
  modified_base 3: mod_base = OTHER; note = 2'-O-methyladenosine-3'-phosphate
  modified_base 4: mod_base = OTHER; note = 2'-O-methyluridine-3'-phosphate
  modified_base 5: mod_base = OTHER; note = 2'-O-methylguanosine-3'-phosphate
  modified_base 6: mod_base = OTHER; note = 2'-O-docosanyl-cytidine-3'-phosphate
  modified_base 7: mod_base = OTHER; note = 2'-deoxy-2'-fluorouridine-3'-phosphate
  modified_base 8: mod_base = OTHER; note = 2'-O-methyluridine-3'-phosphate
  modified_base 9: mod_base = OTHER; note = 2'-deoxy-2'-fluorocytidine-3'-phosphate
  modified_base 10: mod_base = OTHER; note = 2'-deoxy-2'-fluoroadenosine-3'-phosphate
  modified_base 11: mod_base = OTHER; note = 2'-deoxy-2'-fluorouridine-3'-phosphate
  modified_base 12: mod_base = OTHER; note = 2'-O-methyluridine-3'-phosphate
  modified_base 13: mod_base = OTHER; note = 2'-O-methyluridine-3'-phosphate
  modified_base 14: mod_base = OTHER; note = 2'-O-methylcytidine-3'-phosphate
  modified_base 15: mod_base = OTHER; note = 2'-O-methyladenosine-3'-phosphate
  modified_base 16: mod_base = OTHER; note = 2'-O-methylcytidine-3'-phosphate
  modified_base 17: mod_base = OTHER; note = 2'-O-methyluridine-3'-phosphate
  modified_base 18: mod_base = OTHER; note = 2'-O-methyladenosine-3'-phosphate
  modified_base 19: mod_base = OTHER; note = 2'-O-methyluridine-3'-phosphorothioate
  modified_base 20: mod_base = OTHER; note = 2'-O-methylguanosine-3'-phosphorothioate
  modified_base 21: mod_base = OTHER; note = 2'-O-methyladenosine
ttatgcttcatttcactatga

SEQ ID NO: 11290 - RNA, 21 nt, synthetic construct
  source 1..21: mol_type = other RNA
  modified_base 1: mod_base = OTHER; note = 2'-O-methyluridine-3'-phosphorothioate
  modified_base 2: mod_base = OTHER; note = 2'-O-methyladenosine-3'-phosphorothioate
  modified_base 3: mod_base = OTHER; note = 2'-O-methyluridine-3'-phosphate
  modified_base 4: mod_base = OTHER; note = 2'-O-methylguanosine-3'-phosphate
  modified_base 5: mod_base = OTHER; note = 2'-O-methylcytidine-3'-phosphate
  modified_base 6: mod_base = OTHER; note = 2'-O-docosanyl-uridine-3'-phosphate
  modified_base 7: mod_base = OTHER; note = 2'-deoxy-2'-fluorouridine-3'-phosphate
  modified_base 8: mod_base = OTHER; note = 2'-O-methylcytidine-3'-phosphate
  modified_base 9: mod_base = OTHER; note = 2'-deoxy-2'-fluoroadenosine-3'-phosphate
  modified_base 10: mod_base = OTHER; note = 2'-deoxy-2'-fluorouridine-3'-phosphate
  modified_base 11: mod_base = OTHER; note = 2'-deoxy-2'-fluorouridine-3'-phosphate
  modified_base 12: mod_base = OTHER; note = 2'-O-methyluridine-3'-phosphate
  modified_base 13: mod_base = OTHER; note = 2'-O-methylcytidine-3'-phosphate
  modified_base 14: mod_base = OTHER; note = 2'-O-methyladenosine-3'-phosphate
  modified_base 15: mod_base = OTHER; note = 2'-O-methylcytidine-3'-phosphate
  modified_base 16: mod_base = OTHER; note = 2'-O-methyluridine-3'-phosphate
  modified_base 17: mod_base = OTHER; note = 2'-O-methyladenosine-3'-phosphate
  modified_base 18: mod_base = OTHER; note = 2'-O-methyluridine-3'-phosphate
  modified_base 19: mod_base = OTHER; note = 2'-O-methylguanosine-3'-phosphorothioate
  modified_base 20: mod_base = OTHER; note = 2'-O-methylguanosine-3'-phosphorothioate
  modified_base 21: mod_base = OTHER; note = 2'-O-methyladenosine
tatgcttcatttcactatgga

SEQ ID NO: 11291 - RNA, 21 nt, synthetic construct
  source 1..21: mol_type = other RNA
  modified_base 1: mod_base = OTHER; note = 2'-O-methyladenosine-3'-phosphorothioate
  modified_base 2: mod_base = OTHER; note = 2'-O-methyluridine-3'-phosphorothioate
  modified_base 3: mod_base = OTHER; note = 2'-O-methylguanosine-3'-phosphate
  modified_base 4: mod_base = OTHER; note = 2'-O-methylcytidine-3'-phosphate
  modified_base 5: mod_base = OTHER; note = 2'-O-methyluridine-3'-phosphate
  modified_base 6: mod_base = OTHER; note = 2'-O-docosanyl-uridine-3'-phosphate
  modified_base 7: mod_base = OTHER; note = 2'-deoxy-2'-fluorocytidine-3'-phosphate
  modified_base 8: mod_base = OTHER; note = 2'-O-methyladenosine-3'-phosphate
  modified_base 9: mod_base = OTHER; note = 2'-deoxy-2'-fluorouridine-3'-phosphate
  modified_base 10: mod_base = OTHER; note = 2'-deoxy-2'-fluorouridine-3'-phosphate
  modified_base 11: mod_base = OTHER; note = 2'-deoxy-2'-fluorouridine-3'-phosphate
  modified_base 12: mod_base = OTHER; note = 2'-O-methylcytidine-3'-phosphate
  modified_base 13: mod_base = OTHER; note = 2'-O-methyladenosine-3'-phosphate
  modified_base 14: mod_base = OTHER; note = 2'-O-methylcytidine-3'-phosphate
  modified_base 15: mod_base = OTHER; note = 2'-O-methyluridine-3'-phosphate
  modified_base 16: mod_base = OTHER; note = 2'-O-methyladenosine-3'-phosphate
  modified_base 17: mod_base = OTHER; note = 2'-O-methyluridine-3'-phosphate
  modified_base 18: mod_base = OTHER; note = 2'-O-methylguanosine-3'-phosphate
  modified_base 19: mod_base = OTHER; note = 2'-O-methylguanosine-3'-phosphorothioate
  modified_base 20: mod_base = OTHER; note = 2'-O-methyladenosine-3'-phosphorothioate
  modified_base 21: mod_base = OTHER; note = 2'-O-methyladenosine
atgcttcatttcactatggaa

SEQ ID NO: 11292 - RNA, 21 nt, synthetic construct
  source 1..21: mol_type = other RNA
  modified_base 1: mod_base = OTHER; note = 2'-O-methyluridine-3'-phosphorothioate
  modified_base 2: mod_base = OTHER; note = 2'-O-methylguanosine-3'-phosphorothioate
  modified_base 3: mod_base = OTHER; note = 2'-O-methylcytidine-3'-phosphate
  modified_base 4: mod_base = OTHER; note = 2'-O-methyluridine-3'-phosphate
  modified_base 5: mod_base = OTHER; note = 2'-O-methyluridine-3'-phosphate
  modified_base 6: mod_base = OTHER; note = 2'-O-docosanyl-cytidine-3'-phosphate
  modified_base 7: mod_base = OTHER; note = 2'-deoxy-2'-fluoroadenosine-3'-phosphate
  modified_base 8: mod_base = OTHER; note = 2'-O-methyluridine-3'-phosphate
  modified_base 9: mod_base = OTHER; note = 2'-deoxy-2'-fluorouridine-3'-phosphate
  modified_base 10: mod_base = OTHER; note = 2'-deoxy-2'-fluorouridine-3'-phosphate
  modified_base 11: mod_base = OTHER; note = 2'-deoxy-2'-fluorocytidine-3'-phosphate
  modified_base 12: mod_base = OTHER; note = 2'-O-methyladenosine-3'-phosphate
  modified_base 13: mod_base = OTHER; note = 2'-O-methylcytidine-3'-phosphate
  modified_base 14: mod_base = OTHER; note = 2'-O-methyluridine-3'-phosphate
  modified_base 15: mod_base = OTHER; note = 2'-O-methyladenosine-3'-phosphate
  modified_base 16: mod_base = OTHER; note = 2'-O-methyluridine-3'-phosphate
  modified_base 17: mod_base = OTHER; note = 2'-O-methylguanosine-3'-phosphate
  modified_base 18: mod_base = OTHER; note = 2'-O-methylguanosine-3'-phosphate
  modified_base 19: mod_base = OTHER; note = 2'-O-methyladenosine-3'-phosphorothioate
  modified_base 20: mod_base = OTHER; note = 2'-O-methyladenosine-3'-phosphorothioate
  modified_base 21: mod_base = OTHER; note = 2'-O-methyladenosine
tgcttcatttcactatggaaa

SEQ ID NO: 11293 - RNA, 21 nt, synthetic construct
  source 1..21: mol_type = other RNA
  modified_base 1: mod_base = OTHER; note = 2'-O-methylguanosine-3'-phosphorothioate
  modified_base 2: mod_base = OTHER; note = 2'-O-methylcytidine-3'-phosphorothioate
  modified_base 3: mod_base = OTHER; note = 2'-O-methyluridine-3'-phosphate
  modified_base 4: mod_base = OTHER; note = 2'-O-methyluridine-3'-phosphate
  modified_base 5: mod_base = OTHER; note = 2'-O-methylcytidine-3'-phosphate
  modified_base 6: mod_base = OTHER; note = 2'-O-docosanyl-adenosine-3'-phosphate
  modified_base 7: mod_base = OTHER; note = 2'-deoxy-2'-fluorouridine-3'-phosphate
  modified_base 8: mod_base = OTHER; note = 2'-O-methyluridine-3'-phosphate
  modified_base 9: mod_base = OTHER; note = 2'-deoxy-2'-fluorouridine-3'-phosphate
  modified_base 10: mod_base = OTHER; note = 2'-deoxy-2'-fluorocytidine-3'-phosphate
  modified_base 11: mod_base = OTHER; note = 2'-deoxy-2'-fluoroadenosine-3'-phosphate
  modified_base 12: mod_base = OTHER; note = 2'-O-methylcytidine-3'-phosphate
  modified_base 13: mod_base = OTHER; note = 2'-O-methyluridine-3'-phosphate
  modified_base 14: mod_base = OTHER; note = 2'-O-methyladenosine-3'-phosphate
  modified_base 15: mod_base = OTHER; note = 2'-O-methyluridine-3'-phosphate
  modified_base 16: mod_base = OTHER; note = 2'-O-methylguanosine-3'-phosphate
  modified_base 17: mod_base = OTHER; note = 2'-O-methylguanosine-3'-phosphate
  modified_base 18: mod_base = OTHER; note = 2'-O-methyladenosine-3'-phosphate
  modified_base 19: mod_base = OTHER; note = 2'-O-methyladenosine-3'-phosphorothioate
  modified_base 20: mod_base = OTHER; note = 2'-O-methyladenosine-3'-phosphorothioate
  modified_base 21: mod_base = OTHER; note = 2'-O-methyladenosine
gcttcatttcactatggaaaa

SEQ ID NO: 11294 - RNA, 21 nt, synthetic construct
  source 1..21: mol_type = other RNA
  modified_base 1: mod_base = OTHER; note = 2'-O-methylcytidine-3'-phosphorothioate
  modified_base 2: mod_base = OTHER; note = 2'-O-methyluridine-3'-phosphorothioate
  modified_base 3: mod_base = OTHER; note = 2'-O-methyluridine-3'-phosphate
  modified_base 4: mod_base = OTHER; note = 2'-O-methylcytidine-3'-phosphate
  modified_base 5: mod_base = OTHER; note = 2'-O-methyladenosine-3'-phosphate
  modified_base 6: mod_base = OTHER; note = 2'-O-docosanyl-uridine-3'-phosphate
  modified_base 7: mod_base = OTHER; note = 2'-deoxy-2'-fluorouridine-3'-phosphate
  modified_base 8: mod_base = OTHER; note = 2'-O-methyluridine-3'-phosphate
  modified_base 9: mod_base = OTHER; note = 2'-deoxy-2'-fluorocytidine-3'-phosphate
  modified_base 10: mod_base = OTHER; note = 2'-deoxy-2'-fluoroadenosine-3'-phosphate
  modified_base 11: mod_base = OTHER; note = 2'-deoxy-2'-fluorocytidine-3'-phosphate
  modified_base 12: mod_base = OTHER; note = 2'-O-methyluridine-3'-phosphate
  modified_base 13: mod_base = OTHER; note = 2'-O-methyladenosine-3'-phosphate
  modified_base 14: mod_base = OTHER; note = 2'-O-methyluridine-3'-phosphate
  modified_base 15: mod_base = OTHER; note = 2'-O-methylguanosine-3'-phosphate
  modified_base 16: mod_base = OTHER; note = 2'-O-methylguanosine-3'-phosphate
  modified_base 17: mod_base = OTHER; note = 2'-O-methyladenosine-3'-phosphate
  modified_base 18: mod_base = OTHER; note = 2'-O-methyladenosine-3'-phosphate
  modified_base 19: mod_base = OTHER; note = 2'-O-methyladenosine-3'-phosphorothioate
  modified_base 20: mod_base = OTHER; note = 2'-O-methyluridine-3'-phosphorothioate
  modified_base 21: mod_base = OTHER; note = 2'-O-methyladenosine
cttcatttcactatggaaata

SEQ ID NO: 11295 - RNA, 21 nt, synthetic construct
  source 1..21: mol_type = other RNA
  modified_base 1: mod_base = OTHER; note = 2'-O-methyluridine-3'-phosphorothioate
  modified_base 2: mod_base = OTHER; note = 2'-O-methyluridine-3'-phosphorothioate
  modified_base 3: mod_base = OTHER; note = 2'-O-methylcytidine-3'-phosphate
  modified_base 4: mod_base = OTHER; note = 2'-O-methyladenosine-3'-phosphate
  modified_base 5: mod_base = OTHER; note = 2'-O-methyluridine-3'-phosphate
  modified_base 6: mod_base = OTHER; note = 2'-O-docosanyl-uridine-3'-phosphate
  modified_base 7: mod_base = OTHER; note = 2'-deoxy-2'-fluorouridine-3'-phosphate
  modified_base 8: mod_base = OTHER; note = 2'-O-methylcytidine-3'-phosphate
  modified_base 9: mod_base = OTHER; note = 2'-deoxy-2'-fluoroadenosine-3'-phosphate
  modified_base 10: mod_base = OTHER; note = 2'-deoxy-2'-fluorocytidine-3'-phosphate
  modified_base 11: mod_base = OTHER; note = 2'-deoxy-2'-fluorouridine-3'-phosphate
  modified_base 12: mod_base = OTHER; note = 2'-O-methyladenosine-3'-phosphate
  modified_base 13: mod_base = OTHER; note = 2'-O-methyluridine-3'-phosphate
  modified_base 14: mod_base = OTHER; note = 2'-O-methylguanosine-3'-phosphate
  modified_base 15: mod_base = OTHER; note = 2'-O-methylguanosine-3'-phosphate
  modified_base 16: mod_base = OTHER; note = 2'-O-methyladenosine-3'-phosphate
  modified_base 17: mod_base = OTHER; note = 2'-O-methyladenosine-3'-phosphate
  modified_base 18: mod_base = OTHER; note = 2'-O-methyladenosine-3'-phosphate
  modified_base 19: mod_base = OTHER; note = 2'-O-methyluridine-3'-phosphorothioate
  modified_base 20: mod_base = OTHER; note = 2'-O-methyladenosine-3'-phosphorothioate
  modified_base 21: mod_base = OTHER; note = 2'-O-methyladenosine
ttcatttcactatggaaataa

SEQ ID NO: 11296 - RNA, 21 nt, synthetic construct
  source 1..21: mol_type = other RNA
  modified_base 1: mod_base = OTHER; note = 2'-O-methyluridine-3'-phosphorothioate
  modified_base 2: mod_base = OTHER; note = 2'-O-methylcytidine-3'-phosphorothioate
  modified_base 3: mod_base = OTHER; note = 2'-O-methyladenosine-3'-phosphate
  modified_base 4: mod_base = OTHER; note = 2'-O-methyluridine-3'-phosphate
  modified_base 5: mod_base = OTHER; note = 2'-O-methyluridine-3'-phosphate
  modified_base 6: mod_base = OTHER; note = 2'-O-docosanyl-uridine-3'-phosphate
  modified_base 7: mod_base = OTHER; note = 2'-deoxy-2'-fluorocytidine-3'-phosphate
  modified_base 8: mod_base = OTHER; note = 2'-O-methyladenosine-3'-phosphate
  modified_base 9: mod_base = OTHER; note = 2'-deoxy-2'-fluorocytidine-3'-phosphate
  modified_base 10: mod_base = OTHER; note = 2'-deoxy-2'-fluorouridine-3'-phosphate
  modified_base 11: mod_base = OTHER; note = 2'-deoxy-2'-fluoroadenosine-3'-phosphate
  modified_base 12: mod_base = OTHER; note = 2'-O-methyluridine-3'-phosphate
  modified_base 13: mod_base = OTHER; note = 2'-O-methylguanosine-3'-phosphate
  modified_base 14: mod_base = OTHER; note = 2'-O-methylguanosine-3'-phosphate
  modified_base 15: mod_base = OTHER; note = 2'-O-methyladenosine-3'-phosphate
  modified_base 16: mod_base = OTHER; note = 2'-O-methyladenosine-3'-phosphate
  modified_base 17: mod_base = OTHER; note = 2'-O-methyladenosine-3'-phosphate
  modified_base 18: mod_base = OTHER; note = 2'-O-methyluridine-3'-phosphate
  modified_base 19: mod_base = OTHER; note = 2'-O-methyladenosine-3'-phosphorothioate
  modified_base 20: mod_base = OTHER; note = 2'-O-methyluridine-3'-phosphorothioate
  modified_base 21: mod_base = OTHER; note = 2'-O-methyladenosine
tcatttcactatggaaatata

SEQ ID NO: 11297 - RNA, 21 nt, synthetic construct
  source 1..21: mol_type = other RNA
  modified_base 1: mod_base = OTHER; note = 2'-O-methyluridine-3'-phosphorothioate
  modified_base 2: mod_base = OTHER; note = 2'-O-methyluridine-3'-phosphorothioate
  modified_base 3: mod_base = OTHER; note = 2'-O-methyluridine-3'-phosphate
  modified_base 4: mod_base = OTHER; note = 2'-O-methylcytidine-3'-phosphate
  modified_base 5: mod_base = OTHER; note = 2'-O-methyladenosine-3'-phosphate
  modified_base 6: mod_base = OTHER; note = 2'-O-docosanyl-cytidine-3'-phosphate
  modified_base 7: mod_base = OTHER; note = 2'-deoxy-2'-fluorouridine-3'-phosphate
  modified_base 8: mod_base = OTHER; note = 2'-O-methyladenosine-3'-phosphate
  modified_base 9: mod_base = OTHER; note = 2'-deoxy-2'-fluorouridine-3'-phosphate
  modified_base 10: mod_base = OTHER; note = 2'-deoxy-2'-fluoroguanosine-3'-phosphate
  modified_base 11: mod_base = OTHER; note = 2'-deoxy-2'-fluoroguanosine-3'-phosphate
  modified_base 12: mod_base = OTHER; note = 2'-O-methyladenosine-3'-phosphate
  modified_base 13: mod_base = OTHER; note = 2'-O-methyladenosine-3'-phosphate
  modified_base 14: mod_base = OTHER; note = 2'-O-methyladenosine-3'-phosphate
  modified_base 15: mod_base = OTHER; note = 2'-O-methyluridine-3'-phosphate
  modified_base 16: mod_base = OTHER; note = 2'-O-methyladenosine-3'-phosphate
  modified_base 17: mod_base = OTHER; note = 2'-O-methyluridine-3'-phosphate
  modified_base 18: mod_base = OTHER; note = 2'-O-methylguanosine-3'-phosphate
  modified_base 19: mod_base = OTHER; note = 2'-O-methyluridine-3'-phosphorothioate
  modified_base 20: mod_base = OTHER; note = 2'-O-methyluridine-3'-phosphorothioate
  modified_base 21: mod_base = OTHER; note = 2'-O-methyladenosine
tttcactatggaaatatgtta

SEQ ID NO: 11298 - RNA, 21 nt, synthetic construct
  source 1..21: mol_type = other RNA
  modified_base 1: mod_base = OTHER; note = 2'-O-methyladenosine-3'-phosphorothioate
  modified_base 2: mod_base = OTHER; note = 2'-O-methylcytidine-3'-phosphorothioate
  modified_base 3: mod_base = OTHER; note = 2'-O-methyluridine-3'-phosphate
  modified_base 4: mod_base = OTHER; note = 2'-O-methyladenosine-3'-phosphate
  modified_base 5: mod_base = OTHER; note = 2'-O-methyluridine-3'-phosphate
  modified_base 6: mod_base = OTHER; note = 2'-O-docosanyl-guanosine-3'-phosphate
  modified_base 7: mod_base = OTHER; note = 2'-deoxy-2'-fluoroguanosine-3'-phosphate
  modified_base 8: mod_base = OTHER; note = 2'-O-methyladenosine-3'-phosphate
  modified_base 9: mod_base = OTHER; note = 2'-deoxy-2'-fluoroadenosine-3'-phosphate
  modified_base 10: mod_base = OTHER; note = 2'-deoxy-2'-fluoroadenosine-3'-phosphate
  modified_base 11: mod_base = OTHER; note = 2'-deoxy-2'-fluorouridine-3'-phosphate
  modified_base 12: mod_base = OTHER; note = 2'-O-methyladenosine-3'-phosphate
  modified_base 13: mod_base = OTHER; note = 2'-O-methyluridine-3'-phosphate
  modified_base 14: mod_base = OTHER; note = 2'-O-methylguanosine-3'-phosphate
  modified_base 15: mod_base = OTHER; note = 2'-O-methyluridine-3'-phosphate
  modified_base 16: mod_base = OTHER; note = 2'-O-methyluridine-3'-phosphate
  modified_base 17: mod_base = OTHER; note = 2'-O-methyladenosine-3'-phosphate
  modified_base 18: mod_base = OTHER; note = 2'-O-methylcytidine-3'-phosphate
  modified_base 19: mod_base = OTHER; note = 2'-O-methyluridine-3'-phosphorothioate
  modified_base 20: mod_base = OTHER; note = 2'-O-methylguanosine-3'-phosphorothioate
  modified_base 21: mod_base = OTHER; note = 2'-O-methyladenosine
actatggaaatatgttactga

SEQ ID NO: 11299 - RNA, 21 nt, synthetic construct
  source 1..21: mol_type = other RNA
  modified_base 1: mod_base = OTHER; note = 2'-O-methylcytidine-3'-phosphorothioate
  modified_base 2: mod_base = OTHER; note = 2'-O-methyluridine-3'-phosphorothioate
  modified_base 3: mod_base = OTHER; note = 2'-O-methyladenosine-3'-phosphate
  modified_base 4: mod_base = OTHER; note = 2'-O-methyluridine-3'-phosphate
  modified_base 5: mod_base = OTHER; note = 2'-O-methylguanosine-3'-phosphate
  modified_base 6: mod_base = OTHER; note = 2'-O-docosanyl-guanosine-3'-phosphate
  modified_base 7: mod_base = OTHER; note = 2'-deoxy-2'-fluoroadenosine-3'-phosphate
  modified_base 8: mod_base = OTHER; note = 2'-O-methyladenosine-3'-phosphate
  modified_base 9: mod_base = OTHER; note = 2'-deoxy-2'-fluoroadenosine-3'-phosphate
  modified_base 10: mod_base = OTHER; note = 2'-deoxy-2'-fluorouridine-3'-phosphate
  modified_base 11: mod_base = OTHER; note = 2'-deoxy-2'-fluoroadenosine-3'-phosphate
  modified_base 12: mod_base = OTHER; note = 2'-O-methyluridine-3'-phosphate
  modified_base 13: mod_base = OTHER; note = 2'-O-methylguanosine-3'-phosphate
  modified_base 14: mod_base = OTHER; note = 2'-O-methyluridine-3'-phosphate
  modified_base 15: mod_base = OTHER; note = 2'-O-methyluridine-3'-phosphate
  modified_base 16: mod_base = OTHER; note = 2'-O-methyladenosine-3'-phosphate
  modified_base 17: mod_base = OTHER; note = 2'-O-methylcytidine-3'-phosphate
  modified_base 18: mod_base = OTHER; note = 2'-O-methyluridine-3'-phosphate
  modified_base 19: mod_base = OTHER; note = 2'-O-methylguanosine-3'-phosphorothioate
  modified_base 20: mod_base = OTHER; note = 2'-O-methyladenosine-3'-phosphorothioate
  modified_base 21: mod_base = OTHER; note = 2'-O-methyladenosine
ctatggaaatatgttactgaa

SEQ ID NO: 11300 - RNA, 21 nt, synthetic construct
  source 1..21: mol_type = other RNA
  modified_base 1: mod_base = OTHER; note = 2'-O-methyluridine-3'-phosphorothioate
  modified_base 2: mod_base = OTHER; note = 2'-O-methyladenosine-3'-phosphorothioate
  modified_base 3: mod_base = OTHER; note = 2'-O-methyluridine-3'-phosphate
  modified_base 4: mod_base = OTHER; note = 2'-O-methylguanosine-3'-phosphate
  modified_base 5: mod_base = OTHER; note = 2'-O-methylguanosine-3'-phosphate
  modified_base 6: mod_base = OTHER; note = 2'-O-docosanyl-adenosine-3'-phosphate
  modified_base 7: mod_base = OTHER; note = 2'-deoxy-2'-fluoroadenosine-3'-phosphate
  modified_base 8: mod_base = OTHER; note = 2'-O-methyladenosine-3'-phosphate
  modified_base 9: mod_base = OTHER; note = 2'-deoxy-2'-fluorouridine-3'-phosphate
  modified_base 10: mod_base = OTHER; note = 2'-deoxy-2'-fluoroadenosine-3'-phosphate
  modified_base 11: mod_base = OTHER; note = 2'-deoxy-2'-fluorouridine-3'-phosphate
  modified_base 12: mod_base = OTHER; note = 2'-O-methylguanosine-3'-phosphate
  modified_base 13: mod_base = OTHER; note = 2'-O-methyluridine-3'-phosphate
  modified_base 14: mod_base = OTHER; note = 2'-O-methyluridine-3'-phosphate
  modified_base 15: mod_base = OTHER; note = 2'-O-methyladenosine-3'-phosphate
  modified_base 16: mod_base = OTHER; note = 2'-O-methylcytidine-3'-phosphate
  modified_base 17: mod_base = OTHER; note = 2'-O-methyluridine-3'-phosphate
  modified_base 18: mod_base = OTHER; note = 2'-O-methylguanosine-3'-phosphate
  modified_base 19: mod_base = OTHER; note = 2'-O-methyladenosine-3'-phosphorothioate
  modified_base 20: mod_base = OTHER; note = 2'-O-methyladenosine-3'-phosphorothioate
  modified_base 21: mod_base = OTHER; note = 2'-O-methyladenosine
tatggaaatatgttactgaaa

SEQ ID NO: 11301 - RNA, 21 nt, synthetic construct
  source 1..21: mol_type = other RNA
  modified_base 1: mod_base = OTHER; note = 2'-O-methyladenosine-3'-phosphorothioate
  modified_base 2: mod_base = OTHER; note = 2'-O-methyluridine-3'-phosphorothioate
  modified_base 3: mod_base = OTHER; note = 2'-O-methylguanosine-3'-phosphate
  modified_base 4: mod_base = OTHER; note = 2'-O-methylguanosine-3'-phosphate
  modified_base 5: mod_base = OTHER; note = 2'-O-methyladenosine-3'-phosphate
  modified_base 6: mod_base = OTHER; note = 2'-O-docosanyl-adenosine-3'-phosphate
  modified_base 7: mod_base = OTHER; note = 2'-deoxy-2'-fluoroadenosine-3'-phosphate
  modified_base 8: mod_base = OTHER; note = 2'-O-methyluridine-3'-phosphate
  modified_base 9: mod_base = OTHER; note = 2'-deoxy-2'-fluoroadenosine-3'-phosphate
  modified_base 10: mod_base = OTHER; note = 2'-deoxy-2'-fluorouridine-3'-phosphate
  modified_base 11: mod_base = OTHER; note = 2'-deoxy-2'-fluoroguanosine-3'-phosphate
  modified_base 12: mod_base = OTHER; note = 2'-O-methyluridine-3'-phosphate
  modified_base 13: mod_base = OTHER; note = 2'-O-methyluridine-3'-phosphate
  modified_base 14: mod_base = OTHER; note = 2'-O-methyladenosine-3'-phosphate
  modified_base 15: mod_base = OTHER; note = 2'-O-methylcytidine-3'-phosphate
  modified_base 16: mod_base = OTHER; note = 2'-O-methyluridine-3'-phosphate
  modified_base 17: mod_base = OTHER; note = 2'-O-methylguanosine-3'-phosphate
  modified_base 18: mod_base = OTHER; note = 2'-O-methyladenosine-3'-phosphate
  modified_base 19: mod_base = OTHER; note = 2'-O-methyladenosine-3'-phosphorothioate
  modified_base 20: mod_base = OTHER; note = 2'-O-methyluridine-3'-phosphorothioate
  modified_base 21: mod_base = OTHER; note = 2'-O-methyladenosine
atggaaatatgttactgaata

SEQ ID NO: 11302 - RNA, 21 nt, synthetic construct
  source 1..21: mol_type = other RNA
  modified_base 1: mod_base = OTHER; note = 2'-O-methylguanosine-3'-phosphorothioate
  modified_base 2: mod_base = OTHER; note = 2'-O-methyladenosine-3'-phosphorothioate
  modified_base 3: mod_base = OTHER; note = 2'-O-methylcytidine-3'-phosphate
  modified_base 4: mod_base = OTHER; note = 2'-O-methyladenosine-3'-phosphate
  modified_base 5: mod_base = OTHER; note = 2'-O-methylguanosine-3'-phosphate
  modified_base 6: mod_base = OTHER; note = 2'-O-docosanyl-cytidine-3'-phosphate
  modified_base 7: mod_base = OTHER; note = 2'-deoxy-2'-fluorouridine-3'-phosphate
  modified_base 8: mod_base = OTHER; note = 2'-O-methyladenosine-3'-phosphate
  modified_base 9: mod_base = OTHER; note = 2'-deoxy-2'-fluorouridine-3'-phosphate
  modified_base 10: mod_base = OTHER; note = 2'-deoxy-2'-fluoroguanosine-3'-phosphate
  modified_base 11: mod_base = OTHER; note = 2'-deoxy-2'-fluoroguanosine-3'-phosphate
  modified_base 12: mod_base = OTHER; note = 2'-O-methyladenosine-3'-phosphate
  modified_base 13: mod_base = OTHER; note = 2'-O-methylguanosine-3'-phosphate
  modified_base 14: mod_base = OTHER; note = 2'-O-methyluridine-3'-phosphate
  modified_base 15: mod_base = OTHER; note = 2'-O-methyluridine-3'-phosphate
  modified_base 16: mod_base = OTHER; note = 2'-O-methyluridine-3'-phosphate
  modified_base 17: mod_base = OTHER; note = 2'-O-methylguanosine-3'-phosphate
  modified_base 18: mod_base = OTHER; note = 2'-O-methylcytidine-3'-phosphate
  modified_base 19: mod_base = OTHER; note = 2'-O-methylguanosine-3'-phosphorothioate
  modified_base 20: mod_base = OTHER; note = 2'-O-methyluridine-3'-phosphorothioate
  modified_base 21: mod_base = OTHER; note = 2'-O-methyladenosine
gacagctatggagtttgcgta

SEQ ID NO: 11303 - RNA, 21 nt, synthetic construct
  source 1..21: mol_type = other RNA
  modified_base 1: mod_base = OTHER; note = 2'-O-methyladenosine-3'-phosphorothioate
  modified_base 2: mod_base = OTHER; note = 2'-O-methylcytidine-3'-phosphorothioate
  modified_base 3: mod_base = OTHER; note = 2'-O-methyluridine-3'-phosphate
  modified_base 4: mod_base = OTHER; note = 2'-O-methylguanosine-3'-phosphate
  modified_base 5: mod_base = OTHER; note = 2'-O-methyladenosine-3'-phosphate
  modified_base 6: mod_base = OTHER; note = 2'-O-docosanyl-cytidine-3'-phosphate
  modified_base 7: mod_base = OTHER; note = 2'-deoxy-2'-fluoroadenosine-3'-phosphate
  modified_base 8: mod_base = OTHER; note = 2'-O-methylguanosine-3'-phosphate
  modified_base 9: mod_base = OTHER; note = 2'-deoxy-2'-fluorocytidine-3'-phosphate
  modified_base 10: mod_base = OTHER; note = 2'-deoxy-2'-fluorouridine-3'-phosphate
  modified_base 11: mod_base = OTHER; note = 2'-deoxy-2'-fluoroadenosine-3'-phosphate
  modified_base 12: mod_base = OTHER; note = 2'-O-methyluridine-3'-phosphate
  modified_base 13: mod_base = OTHER; note = 2'-O-methylguanosine-3'-phosphate
  modified_base 14: mod_base = OTHER; note = 2'-O-methylguanosine-3'-phosphate
  modified_base 15: mod_base = OTHER; note = 2'-O-methyladenosine-3'-phosphate
  modified_base 16: mod_base = OTHER; note = 2'-O-methylguanosine-3'-phosphate
  modified_base 17: mod_base = OTHER; note = 2'-O-methyluridine-3'-phosphate
  modified_base 18: mod_base = OTHER; note = 2'-O-methyluridine-3'-phosphate
  modified_base 19: mod_base = OTHER; note = 2'-O-methyluridine-3'-phosphorothioate
  modified_base 20: mod_base = OTHER; note = 2'-O-methylguanosine-3'-phosphorothioate
  modified_base 21: mod_base = OTHER; note = 2'-O-methyladenosine
actgacagctatggagtttga

SEQ ID NO: 11304 - RNA, 21 nt, synthetic construct
  source 1..21: mol_type = other RNA
  modified_base 1: mod_base = OTHER; note = 2'-O-methylcytidine-3'-phosphorothioate
  modified_base 2: mod_base = OTHER; note = 2'-O-methyluridine-3'-phosphorothioate
  modified_base 3: mod_base = OTHER; note = 2'-O-methylguanosine-3'-phosphate
  modified_base 4: mod_base = OTHER; note = 2'-O-methyladenosine-3'-phosphate
  modified_base 5: mod_base = OTHER; note = 2'-O-methylcytidine-3'-phosphate
  modified_base 6: mod_base = OTHER; note = 2'-O-docosanyl-adenosine-3'-phosphate
  modified_base 7: mod_base = OTHER; note = 2'-deoxy-2'-fluoroguanosine-3'-phosphate
  modified_base 8: mod_base = OTHER; note = 2'-O-methylcytidine-3'-phosphate
  modified_base 9: mod_base = OTHER; note = 2'-deoxy-2'-fluorouridine-3'-phosphate
  modified_base 10: mod_base = OTHER; note = 2'-deoxy-2'-fluoroadenosine-3'-phosphate
  modified_base 11: mod_base = OTHER; note = 2'-deoxy-2'-fluorouridine-3'-phosphate
  modified_base 12: mod_base = OTHER; note = 2'-O-methylguanosine-3'-phosphate
  modified_base 13: mod_base = OTHER; note = 2'-O-methylguanosine-3'-phosphate
  modified_base 14: mod_base = OTHER; note = 2'-O-methyladenosine-3'-phosphate
  modified_base 15: mod_base = OTHER; note = 2'-O-methylguanosine-3'-phosphate
  modified_base 16: mod_base = OTHER; note = 2'-O-methyluridine-3'-phosphate
  modified_base 17: mod_base = OTHER; note = 2'-O-methyluridine-3'-phosphate
  modified_base 18: mod_base = OTHER; note = 2'-O-methyluridine-3'-phosphate
  modified_base 19: mod_base = OTHER; note = 2'-O-methylguanosine-3'-phosphorothioate
  modified_base 20: mod_base = OTHER; note = 2'-O-methylcytidine-3'-phosphorothioate
  modified_base 21: mod_base = OTHER; note = 2'-O-methyladenosine
ctgacagctatggagtttgca

SEQ ID NO: 11305 - RNA, 21 nt, synthetic construct
  source 1..21: mol_type = other RNA
  modified_base 1: mod_base = OTHER; note = 2'-O-methyluridine-3'-phosphorothioate
  modified_base 2: mod_base = OTHER; note = 2'-O-methylguanosine-3'-phosphorothioate
  modified_base 3: mod_base = OTHER; note = 2'-O-methyladenosine-3'-phosphate
  modified_base 4: mod_base = OTHER; note = 2'-O-methylcytidine-3'-phosphate
  modified_base 5: mod_base = OTHER; note = 2'-O-methyladenosine-3'-phosphate
  modified_base 6: mod_base = OTHER; note = 2'-O-docosanyl-guanosine-3'-phosphate
  modified_base 7: mod_base = OTHER; note = 2'-deoxy-2'-fluorocytidine-3'-phosphate
  modified_base 8: mod_base = OTHER; note = 2'-O-methyluridine-3'-phosphate
  modified_base 9: mod_base = OTHER; note = 2'-deoxy-2'-fluoroadenosine-3'-phosphate
  modified_base 10: mod_base = OTHER; note = 2'-deoxy-2'-fluorouridine-3'-phosphate
  modified_base 11: mod_base = OTHER; note = 2'-deoxy-2'-fluoroguanosine-3'-phosphate
  modified_base 12: mod_base = OTHER; note = 2'-O-methylguanosine-3'-phosphate
  modified_base 13: mod_base = OTHER; note = 2'-O-methyladenosine-3'-phosphate
  modified_base 14: mod_base = OTHER; note = 2'-O-methylguanosine-3'-phosphate
  modified_base 15: mod_base = OTHER; note = 2'-O-methyluridine-3'-phosphate
  modified_base 16: mod_base = OTHER; note = 2'-O-methyluridine-3'-phosphate
  modified_base 17: mod_base = OTHER; note = 2'-O-methyluridine-3'-phosphate
  modified_base 18: mod_base = OTHER; note = 2'-O-methylguanosine-3'-phosphate
  modified_base 19: mod_base = OTHER; note = 2'-O-methylcytidine-3'-phosphorothioate
  modified_base 20: mod_base = OTHER; note = 2'-O-methylguanosine-3'-phosphorothioate
  modified_base 21: mod_base = OTHER; note = 2'-O-methyladenosine
tgacagctatggagtttgcga

SEQ ID NO: 11306 - RNA, 21 nt, synthetic construct
  source 1..21: mol_type = other RNA
  modified_base 1: mod_base = OTHER; note = 2'-O-methyladenosine-3'-phosphorothioate
  modified_base 2: mod_base = OTHER; note = 2'-O-methylcytidine-3'-phosphorothioate
  modified_base 3: mod_base = OTHER; note = 2'-O-methyladenosine-3'-phosphate
  modified_base 4: mod_base = OTHER; note = 2'-O-methylguanosine-3'-phosphate
  modified_base 5: mod_base = OTHER; note = 2'-O-methylcytidine-3'-phosphate
  modified_base 6: mod_base = OTHER; note = 2'-O-docosanyl-uridine-3'-phosphate
  modified_base 7: mod_base = OTHER; note = 2'-deoxy-2'-fluoroadenosine-3'-phosphate
  modified_base 8: mod_base = OTHER; note = 2'-O-methyluridine-3'-phosphate
  modified_base 9: mod_base = OTHER; note = 2'-deoxy-2'-fluoroguanosine-3'-phosphate
  modified_base 10: mod_base = OTHER; note = 2'-deoxy-2'-fluoroguanosine-3'-phosphate
  modified_base 11: mod_base = OTHER; note = 2'-deoxy-2'-fluoroadenosine-3'-phosphate
  modified_base 12: mod_base = OTHER; note = 2'-O-methylguanosine-3'-phosphate
  modified_base 13: mod_base = OTHER; note = 2'-O-methyluridine-3'-phosphate
  modified_base 14: mod_base = OTHER; note = 2'-O-methyluridine-3'-phosphate
  modified_base 15: mod_base = OTHER; note = 2'-O-methyluridine-3'-phosphate
  modified_base 16: mod_base = OTHER; note = 2'-O-methylguanosine-3'-phosphate
  modified_base 17: mod_base = OTHER; note = 2'-O-methylcytidine-3'-phosphate
  modified_base 18: mod_base = OTHER; note = 2'-O-methylguanosine-3'-phosphate
  modified_base 19: mod_base = OTHER; note = 2'-O-methyluridine-3'-phosphorothioate
  modified_base 20: mod_base = OTHER; note = 2'-O-methylguanosine-3'-phosphorothioate
  modified_base 21: mod_base = OTHER; note = 2'-O-methyladenosine
acagctatggagtttgcgtga

SEQ ID NO: 11307 - RNA, 21 nt, synthetic construct
  source 1..21: mol_type = other RNA
  modified_base 1: mod_base = OTHER; note = 2'-O-methylcytidine-3'-phosphorothioate
  modified_base 2: mod_base = OTHER; note = 2'-O-methyladenosine-3'-phosphorothioate
  modified_base 3: mod_base = OTHER; note = 2'-O-methylguanosine-3'-phosphate
  modified_base 4: mod_base = OTHER; note = 2'-O-methylcytidine-3'-phosphate
  modified_base 5: mod_base = OTHER; note = 2'-O-methyluridine-3'-phosphate
  modified_base 6: mod_base = OTHER; note = 2'-O-docosanyl-adenosine-3'-phosphate
  modified_base 7: mod_base = OTHER; note = 2'-deoxy-2'-fluorouridine-3'-phosphate
  modified_base 8: mod_base = OTHER; note = 2'-O-methylguanosine-3'-phosphate
  modified_base 9: mod_base = OTHER; note = 2'-deoxy-2'-fluoroguanosine-3'-phosphate
  modified_base 10: mod_base = OTHER; note = 2'-deoxy-2'-fluoroadenosine-3'-phosphate
  modified_base 11: mod_base = OTHER; note = 2'-deoxy-2'-fluoroguanosine-3'-phosphate
  modified_base 12: mod_base = OTHER; note = 2'-O-methyluridine-3'-phosphate
  modified_base 13: mod_base = OTHER; note = 2'-O-methyluridine-3'-phosphate
  modified_base 14: mod_base = OTHER; note = 2'-O-methyluridine-3'-phosphate
  modified_base 15: mod_base = OTHER; note = 2'-O-methylguanosine-3'-phosphate
  modified_base 16: mod_base = OTHER; note = 2'-O-methylcytidine-3'-phosphate
  modified_base 17: mod_base = OTHER; note = 2'-O-methylguanosine-3'-phosphate
  modified_base 18: mod_base = OTHER; note = 2'-O-methyluridine-3'-phosphate
  modified_base 19: mod_base = OTHER; note = 2'-O-methylguanosine-3'-phosphorothioate
  modified_base 20: mod_base = OTHER; note = 2'-O-methyluridine-3'-phosphorothioate
  modified_base 21: mod_base = OTHER; note = 2'-O-methyladenosine
cagctatggagtttgcgtgta

SEQ ID NO: 11308 - RNA, 21 nt, synthetic construct
  source 1..21: mol_type = other RNA
  modified_base 1: mod_base = OTHER; note = 2'-O-methyladenosine-3'-phosphorothioate
  modified_base 2: mod_base = OTHER; note = 2'-O-methylguanosine-3'-phosphorothioate
  modified_base 3: mod_base = OTHER; note = 2'-O-methylcytidine-3'-phosphate
  modified_base 4: mod_base = OTHER; note = 2'-O-methyluridine-3'-phosphate
  modified_base 5: mod_base = OTHER; note = 2'-O-methyladenosine-3'-phosphate
  modified_base 6: mod_base = OTHER; note = 2'-O-docosanyl-uridine-3'-phosphate
  modified_base 7: mod_base = OTHER; note = 2'-deoxy-2'-fluoroguanosine-3'-phosphate
  modified_base 8: mod_base = OTHER; note = 2'-O-methylguanosine-3'-phosphate
  modified_base 9: mod_base = OTHER; note = 2'-deoxy-2'-fluoroadenosine-3'-phosphate
  modified_base 10: mod_base = OTHER; note = 2'-deoxy-2'-fluoroguanosine-3'-phosphate
  modified_base 11: mod_base = OTHER; note = 2'-deoxy-2'-fluorouridine-3'-phosphate
  modified_base 12: mod_base = OTHER; note = 2'-O-methyluridine-3'-phosphate
  modified_base 13: mod_base = OTHER; note = 2'-O-methyluridine-3'-phosphate
  modified_base 14: mod_base = OTHER; note = 2'-O-methylguanosine-3'-phosphate
  modified_base 15: mod_base = OTHER; note = 2'-O-methylcytidine-3'-phosphate
  modified_base 16: mod_base = OTHER; note = 2'-O-methylguanosine-3'-phosphate
  modified_base 17: mod_base = OTHER; note = 2'-O-methyluridine-3'-phosphate
  modified_base 18: mod_base = OTHER; note = 2'-O-methylguanosine-3'-phosphate
  modified_base 19: mod_base = OTHER; note = 2'-O-methyluridine-3'-phosphorothioate
  modified_base 20: mod_base = OTHER; note = 2'-O-methyladenosine-3'-phosphorothioate
  modified_base 21: mod_base = OTHER; note = 2'-O-methyladenosine
agctatggagtttgcgtgtaa

SEQ ID NO: 11309 - RNA, 21 nt, synthetic construct
  source 1..21: mol_type = other RNA
  modified_base 1: mod_base = OTHER; note = 2'-O-methylguanosine-3'-phosphorothioate
  modified_base 2: mod_base = OTHER; note = 2'-O-methylcytidine-3'-phosphorothioate
  modified_base 3: mod_base = OTHER; note = 2'-O-methyluridine-3'-phosphate
  modified_base 4: mod_base = OTHER; note = 2'-O-methyladenosine-3'-phosphate
  modified_base 5: mod_base = OTHER; note = 2'-O-methyluridine-3'-phosphate
  modified_base 6: mod_base = OTHER; note = 2'-O-docosanyl-guanosine-3'-phosphate
  modified_base 7: mod_base = OTHER; note = 2'-deoxy-2'-fluoroguanosine-3'-phosphate
  modified_base 8: mod_base = OTHER; note = 2'-O-methyladenosine-3'-phosphate
  modified_base 9: mod_base = OTHER; note = 2'-deoxy-2'-fluoroguanosine-3'-phosphate
  modified_base 10: mod_base = OTHER; note = 2'-deoxy-2'-fluorouridine-3'-phosphate
  modified_base 11: mod_base = OTHER; note = 2'-deoxy-2'-fluorouridine-3'-phosphate
  modified_base 12: mod_base = OTHER; note = 2'-O-methyluridine-3'-phosphate
  modified_base 13: mod_base = OTHER; note = 2'-O-methylguanosine-3'-phosphate
  modified_base 14: mod_base = OTHER; note = 2'-O-methylcytidine-3'-phosphate
  modified_base 15: mod_base = OTHER; note = 2'-O-methylguanosine-3'-phosphate
  modified_base 16: mod_base = OTHER; note = 2'-O-methyluridine-3'-phosphate
  modified_base 17: mod_base = OTHER; note = 2'-O-methylguanosine-3'-phosphate
  modified_base 18: mod_base = OTHER; note = 2'-O-methyluridine-3'-phosphate
  modified_base 19: mod_base = OTHER; note = 2'-O-methyladenosine-3'-phosphorothioate
  modified_base 20: mod_base = OTHER; note = 2'-O-methylcytidine-3'-phosphorothioate
  modified_base 21: mod_base = OTHER; note = 2'-O-methyladenosine
gctatggagtttgcgtgtaca

SEQ ID NO: 11310 - RNA, 21 nt, synthetic construct
  source 1..21: mol_type = other RNA
  modified_base 1: mod_base = OTHER; note = 2'-O-methylcytidine-3'-phosphorothioate
  modified_base 2: mod_base = OTHER; note = 2'-O-methyluridine-3'-phosphorothioate
  modified_base 3: mod_base = OTHER; note = 2'-O-methyladenosine-3'-phosphate
  modified_base 4: mod_base = OTHER; note = 2'-O-methyluridine-3'-phosphate
  modified_base 5: mod_base = OTHER; note = 2'-O-methylguanosine-3'-phosphate
  modified_base 6: mod_base = OTHER; note = 2'-O-docosanyl-guanosine-3'-phosphate
  modified_base 7: mod_base = OTHER; note = 2'-deoxy-2'-fluoroadenosine-3'-phosphate
  modified_base 8: mod_base = OTHER; note = 2'-O-methylguanosine-3'-phosphate
  modified_base 9: mod_base = OTHER; note = 2'-deoxy-2'-fluorouridine-3'-phosphate
  modified_base 10: mod_base = OTHER; note = 2'-deoxy-2'-fluorouridine-3'-phosphate
  modified_base 11: mod_base = OTHER; note = 2'-deoxy-2'-fluorouridine-3'-phosphate
  modified_base 12: mod_base = OTHER; note = 2'-O-methylguanosine-3'-phosphate
  modified_base 13: mod_base = OTHER; note = 2'-O-methylcytidine-3'-phosphate
  modified_base 14: mod_base = OTHER; note = 2'-O-methylguanosine-3'-phosphate
  modified_base 15: mod_base = OTHER; note = 2'-O-methyluridine-3'-phosphate
  modified_base 16: mod_base = OTHER; note = 2'-O-methylguanosine-3'-phosphate
  modified_base 17: mod_base = OTHER; note = 2'-O-methyluridine-3'-phosphate
  modified_base 18: mod_base = OTHER; note = 2'-O-methyladenosine-3'-phosphate
  modified_base 19: mod_base = OTHER; note = 2'-O-methylcytidine-3'-phosphorothioate
  modified_base 20: mod_base = OTHER; note = 2'-O-methyluridine-3'-phosphorothioate
  modified_base 21: mod_base = OTHER; note = 2'-O-methyladenosine
ctatggagtttgcgtgtacta

SEQ ID NO: 11311 - RNA, 21 nt, synthetic construct
  source 1..21: mol_type = other RNA
  modified_base 1: mod_base = OTHER; note = 2'-O-methyluridine-3'-phosphorothioate
  modified_base 2: mod_base = OTHER; note = 2'-O-methyladenosine-3'-phosphorothioate
  modified_base 3: mod_base = OTHER; note = 2'-O-methyluridine-3'-phosphate
  modified_base 4: mod_base = OTHER; note = 2'-O-methylguanosine-3'-phosphate
  modified_base 5: mod_base = OTHER; note = 2'-O-methylguanosine-3'-phosphate
  modified_base 6: mod_base = OTHER; note = 2'-O-docosanyl-adenosine-3'-phosphate
  modified_base 7: mod_base = OTHER; note = 2'-deoxy-2'-fluoroguanosine-3'-phosphate
  modified_base 8: mod_base = OTHER; note = 2'-O-methyluridine-3'-phosphate
  modified_base 9: mod_base = OTHER; note = 2'-deoxy-2'-fluorouridine-3'-phosphate
  modified_base 10: mod_base = OTHER; note = 2'-deoxy-2'-fluorouridine-3'-phosphate
  modified_base 11: mod_base = OTHER; note = 2'-deoxy-2'-fluoroguanosine-3'-phosphate
  modified_base 12: mod_base = OTHER; note = 2'-O-methylcytidine-3'-phosphate
  modified_base 13: mod_base = OTHER; note = 2'-O-methylguanosine-3'-phosphate
  modified_base 14: mod_base = OTHER; note = 2'-O-methyluridine-3'-phosphate
  modified_base 15: mod_base = OTHER; note = 2'-O-methylguanosine-3'-phosphate
  modified_base 16: mod_base = OTHER; note = 2'-O-methyluridine-3'-phosphate
  modified_base 17: mod_base = OTHER; note = 2'-O-methyladenosine-3'-phosphate
  modified_base 18: mod_base = OTHER; note = 2'-O-methylcytidine-3'-phosphate
  modified_base 19: mod_base = OTHER; note = 2'-O-methyluridine-3'-phosphorothioate
  modified_base 20: mod_base = OTHER; note = 2'-O-methyluridine-3'-phosphorothioate
  modified_base 21: mod_base = OTHER; note = 2'-O-methyladenosine
tatggagtttgcgtgtactta

SEQ ID NO: 11312 - RNA, 21 nt, synthetic construct
  source 1..21: mol_type = other RNA
  modified_base 1: mod_base = OTHER; note = 2'-O-methyladenosine-3'-phosphorothioate
  modified_base 2: mod_base = OTHER; note = 2'-O-methyluridine-3'-phosphorothioate
  modified_base 3: mod_base = OTHER; note = 2'-O-methylguanosine-3'-phosphate
  modified_base 4: mod_base = OTHER; note = 2'-O-methylguanosine-3'-phosphate
  modified_base 5: mod_base = OTHER; note = 2'-O-methyladenosine-3'-phosphate
  modified_base 6: mod_base = OTHER; note = 2'-O-docosanyl-guanosine-3'-phosphate
  modified_base 7: mod_base = OTHER; note = 2'-deoxy-2'-fluorouridine-3'-phosphate
  modified_base 8: mod_base = OTHER; note = 2'-O-methyluridine-3'-phosphate
  modified_base 9: mod_base = OTHER; note = 2'-deoxy-2'-fluorouridine-3'-phosphate
  modified_base 10: mod_base = OTHER; note = 2'-deoxy-2'-fluoroguanosine-3'-phosphate
  modified_base 11: mod_base = OTHER; note = 2'-deoxy-2'-fluorocytidine-3'-phosphate
  modified_base 12: mod_base = OTHER; note = 2'-O-methylguanosine-3'-phosphate
  modified_base 13: mod_base = OTHER; note = 2'-O-methyluridine-3'-phosphate
  modified_base 14: mod_base = OTHER; note = 2'-O-methylguanosine-3'-phosphate
  modified_base 15: mod_base = OTHER; note = 2'-O-methyluridine-3'-phosphate
  modified_base 16: mod_base = OTHER; note = 2'-O-methyladenosine-3'-phosphate
  modified_base 17: mod_base = OTHER; note = 2'-O-methylcytidine-3'-phosphate
  modified_base 18: mod_base = OTHER; note = 2'-O-methyluridine-3'-phosphate
  modified_base 19: mod_base = OTHER; note = 2'-O-methyluridine-3'-phosphorothioate
  modified_base 20: mod_base = OTHER; note = 2'-O-methylcytidine-3'-phosphorothioate
  modified_base 21: mod_base = OTHER; note = 2'-O-methyladenosine
atggagtttgcgtgtacttca

SEQ ID NO: 11313 - RNA, 21 nt, synthetic construct
  source 1..21: mol_type = other RNA
  modified_base 1: mod_base = OTHER; note = 2'-O-methylcytidine-3'-phosphorothioate
  modified_base 2: mod_base = OTHER; note = 2'-O-methyluridine-3'-phosphorothioate
  modified_base 3: mod_base = OTHER; note = 2'-O-methylcytidine-3'-phosphate
  modified_base 4: mod_base = OTHER; note = 2'-O-methylguanosine-3'-phosphate
  modified_base 5: mod_base = OTHER; note = 2'-O-methyluridine-3'-phosphate
  modified_base 6: mod_base = OTHER; note = 2'-O-docosanyl-uridine-3'-phosphate
  modified_base 7: mod_base = OTHER; note = 2'-deoxy-2'-fluoroadenosine-3'-phosphate
  modified_base 8: mod_base = OTHER; note = 2'-O-methyladenosine-3'-phosphate
  modified_base 9: mod_base = OTHER; note = 2'-deoxy-2'-fluorouridine-3'-phosphate
  modified_base 10: mod_base = OTHER; note = 2'-deoxy-2'-fluoroguanosine-3'-phosphate
  modified_base 11: mod_base = OTHER; note = 2'-deoxy-2'-fluorocytidine-3'-phosphate
  modified_base 12: mod_base = OTHER; note = 2'-O-methyluridine-3'-phosphate
  modified_base 13: mod_base = OTHER; note = 2'-O-methylcytidine-3'-phosphate
  modified_base 14: mod_base = OTHER; note = 2'-O-methyluridine-3'-phosphate
  modified_base 15: mod_base = OTHER; note = 2'-O-methylcytidine-3'-phosphate
  modified_base 16: mod_base = OTHER; note = 2'-O-methyladenosine-3'-phosphate
  modified_base 17: mod_base = OTHER; note = 2'-O-methyluridine-3'-phosphate
  modified_base 18: mod_base = OTHER; note = 2'-O-methylcytidine-3'-phosphate
  modified_base 19: mod_base = OTHER; note = 2'-O-methylcytidine-3'-phosphorothioate
  modified_base 20: mod_base = OTHER; note = 2'-O-methyladenosine-3'-phosphorothioate
  modified_base 21: mod_base = OTHER; note = 2'-O-methyladenosine
ctcgttaatgctctcatccaa

SEQ ID NO: 11314 - RNA, 21 nt, synthetic construct
  source 1..21: mol_type = other RNA
  modified_base 1: mod_base = OTHER; note = 2'-O-methyluridine-3'-phosphorothioate
  modified_base 2: mod_base = OTHER; note = 2'-O-methyluridine-3'-phosphorothioate
  modified_base 3: mod_base = OTHER; note = 2'-O-methyluridine-3'-phosphate
  modified_base 4: mod_base = OTHER; note = 2'-O-methylguanosine-3'-phosphate
  modified_base 5: mod_base = OTHER; note = 2'-O-methylcytidine-3'-phosphate
  modified_base 6: mod_base = OTHER; note = 2'-O-docosanyl-guanosine-3'-phosphate
  modified_base 7: mod_base = OTHER; note = 2'-deoxy-2'-fluorouridine-3'-phosphate
  modified_base 8: mod_base = OTHER; note = 2'-O-methylguanosine-3'-phosphate
  modified_base 9: mod_base = OTHER; note = 2'-deoxy-2'-fluorouridine-3'-phosphate
  modified_base 10: mod_base = OTHER; note = 2'-deoxy-2'-fluoroadenosine-3'-phosphate
  modified_base 11: mod_base = OTHER; note = 2'-deoxy-2'-fluorocytidine-3'-phosphate
  modified_base 12: mod_base = OTHER; note = 2'-O-methyluridine-3'-phosphate
  modified_base 13: mod_base = OTHER; note = 2'-O-methyluridine-3'-phosphate
  modified_base 14: mod_base = OTHER; note = 2'-O-methylcytidine-3'-phosphate
  modified_base 15: mod_base = OTHER; note = 2'-O-methylcytidine-3'-phosphate
  modified_base 16: mod_base = OTHER; note = 2'-O-methyladenosine-3'-phosphate
  modified_base 17: mod_base = OTHER; note = 2'-O-methyluridine-3'-phosphate
  modified_base 18: mod_base = OTHER; note = 2'-O-methyladenosine-3'-phosphate
  modified_base 19: mod_base = OTHER; note = 2'-O-methylcytidine-3'-phosphorothioate
  modified_base 20: mod_base = OTHER; note = 2'-O-methyluridine-3'-phosphorothioate
  modified_base 21: mod_base = OTHER; note = 2'-O-methyladenosine
tttgcgtgtacttccatacta

SEQ ID NO: 11315 - RNA, 21 nt, synthetic construct
  source 1..21: mol_type = other RNA
  modified_base 1: mod_base = OTHER; note = 2'-O-methyluridine-3'-phosphorothioate
  modified_base 2: mod_base = OTHER; note = 2'-O-methylguanosine-3'-phosphorothioate
  modified_base 3: mod_base = OTHER; note = 2'-O-methylcytidine-3'-phosphate
  modified_base 4: mod_base = OTHER; note = 2'-O-methylguanosine-3'-phosphate
  modified_base 5: mod_base = OTHER; note = 2'-O-methyluridine-3'-phosphate
  modified_base 6: mod_base = OTHER; note = 2'-O-docosanyl-guanosine-3'-phosphate
  modified_base 7: mod_base = OTHER; note = 2'-deoxy-2'-fluorouridine-3'-phosphate
  modified_base 8: mod_base = OTHER; note = 2'-O-methyladenosine-3'-phosphate
  modified_base 9: mod_base = OTHER; note = 2'-deoxy-2'-fluorocytidine-3'-phosphate
  modified_base 10: mod_base = OTHER; note = 2'-deoxy-2'-fluorouridine-3'-phosphate
  modified_base 11: mod_base = OTHER; note = 2'-deoxy-2'-fluorouridine-3'-phosphate
  modified_base 12: mod_base = OTHER; note = 2'-O-methylcytidine-3'-phosphate
  modified_base 13: mod_base = OTHER; note = 2'-O-methylcytidine-3'-phosphate
  modified_base 14: mod_base = OTHER; note = 2'-O-methyladenosine-3'-phosphate
  modified_base 15: mod_base = OTHER; note = 2'-O-methyluridine-3'-phosphate
  modified_base 16: mod_base = OTHER; note = 2'-O-methyladenosine-3'-phosphate
  modified_base 17: mod_base = OTHER; note = 2'-O-methylcytidine-3'-phosphate
  modified_base 18: mod_base = OTHER; note = 2'-O-methyluridine-3'-phosphate
  modified_base 19: mod_base = OTHER; note = 2'-O-methylcytidine-3'-phosphorothioate
  modified_base 20: mod_base = OTHER; note = 2'-O-methylguanosine-3'-phosphorothioate
  modified_base 21: mod_base = OTHER; note = 2'-O-methyladenosine
tgcgtgtacttccatactcga

SEQ ID NO: 11316 - RNA, 21 nt, synthetic construct
  source 1..21: mol_type = other RNA
  modified_base 1: mod_base = OTHER; note = 2'-O-methylguanosine-3'-phosphorothioate
  modified_base 2: mod_base = OTHER; note = 2'-O-methylcytidine-3'-phosphorothioate
  modified_base 3: mod_base = OTHER; note = 2'-O-methylguanosine-3'-phosphate
  modified_base 4: mod_base = OTHER; note = 2'-O-methyluridine-3'-phosphate
  modified_base 5: mod_base = OTHER; note = 2'-O-methylguanosine-3'-phosphate
  modified_base 6: mod_base = OTHER; note = 2'-O-docosanyl-uridine-3'-phosphate
  modified_base 7: mod_base = OTHER; note = 2'-deoxy-2'-fluoroadenosine-3'-phosphate
  modified_base 8: mod_base = OTHER; note = 2'-O-methylcytidine-3'-phosphate
  modified_base 9: mod_base = OTHER; note = 2'-deoxy-2'-fluorouridine-3'-phosphate
  modified_base 10: mod_base = OTHER; note = 2'-deoxy-2'-fluorouridine-3'-phosphate
  modified_base 11: mod_base = OTHER; note = 2'-deoxy-2'-fluorocytidine-3'-phosphate
  modified_base 12: mod_base = OTHER; note = 2'-O-methylcytidine-3'-phosphate
  modified_base 13: mod_base = OTHER; note = 2'-O-methyladenosine-3'-phosphate
  modified_base 14: mod_base = OTHER; note = 2'-O-methyluridine-3'-phosphate
  modified_base 15: mod_base = OTHER; note = 2'-O-methyladenosine-3'-phosphate
  modified_base 16: mod_base = OTHER; note = 2'-O-methylcytidine-3'-phosphate
  modified_base 17: mod_base = OTHER; note = 2'-O-methyluridine-3'-phosphate
  modified_base 18: mod_base = OTHER; note = 2'-O-methylcytidine-3'-phosphate
  modified_base 19: mod_base = OTHER; note = 2'-O-methylguanosine-3'-phosphorothioate
  modified_base 20: mod_base = OTHER; note = 2'-O-methyluridine-3'-phosphorothioate
  modified_base 21: mod_base = OTHER; note = 2'-O-methyladenosine
gcgtgtacttccatactcgta

SEQ ID NO: 11317 - RNA, 21 nt, synthetic construct
  source 1..21: mol_type = other RNA
  modified_base 1: mod_base = OTHER; note = 2'-O-methylcytidine-3'-phosphorothioate
  modified_base 2: mod_base = OTHER; note = 2'-O-methylguanosine-3'-phosphorothioate
  modified_base 3: mod_base = OTHER; note = 2'-O-methyluridine-3'-phosphate
  modified_base 4: mod_base = OTHER; note = 2'-O-methylguanosine-3'-phosphate
  modified_base 5: mod_base = OTHER; note = 2'-O-methyluridine-3'-phosphate
  modified_base 6: mod_base = OTHER; note = 2'-O-docosanyl-adenosine-3'-phosphate
  modified_base 7: mod_base = OTHER; note = 2'-deoxy-2'-fluorocytidine-3'-phosphate
  modified_base 8: mod_base = OTHER; note = 2'-O-methyluridine-3'-phosphate
  modified_base 9: mod_base = OTHER; note = 2'-deoxy-2'-fluorouridine-3'-phosphate
  modified_base 10: mod_base = OTHER; note = 2'-deoxy-2'-fluorocytidine-3'-phosphate
  modified_base 11: mod_base = OTHER; note = 2'-deoxy-2'-fluorocytidine-3'-phosphate
  modified_base 12: mod_base = OTHER; note = 2'-O-methyladenosine-3'-phosphate
  modified_base 13: mod_base = OTHER; note = 2'-O-methyluridine-3'-phosphate
  modified_base 14: mod_base = OTHER; note = 2'-O-methyladenosine-3'-phosphate
  modified_base 15: mod_base = OTHER; note = 2'-O-methylcytidine-3'-phosphate
  modified_base 16: mod_base = OTHER; note = 2'-O-methyluridine-3'-phosphate
  modified_base 17: mod_base = OTHER; note = 2'-O-methylcytidine-3'-phosphate
  modified_base 18: mod_base = OTHER; note = 2'-O-methylguanosine-3'-phosphate
  modified_base 19: mod_base = OTHER; note = 2'-O-methyluridine-3'-phosphorothioate
  modified_base 20: mod_base = OTHER; note = 2'-O-methyluridine-3'-phosphorothioate
  modified_base 21: mod_base = OTHER; note = 2'-O-methyladenosine
cgtgtacttccatactcgtta

SEQ ID NO: 11318 - RNA, 21 nt, synthetic construct
  source 1..21: mol_type = other RNA
  modified_base 1: mod_base = OTHER; note = 2'-O-methylguanosine-3'-phosphorothioate
  modified_base 2: mod_base = OTHER; note = 2'-O-methyluridine-3'-phosphorothioate
  modified_base 3: mod_base = OTHER; note = 2'-O-methylguanosine-3'-phosphate
  modified_base 4: mod_base = OTHER; note = 2'-O-methyluridine-3'-phosphate
  modified_base 5: mod_base = OTHER; note = 2'-O-methyladenosine-3'-phosphate
  modified_base 6: mod_base = OTHER; note = 2'-O-docosanyl-cytidine-3'-phosphate
  modified_base 7: mod_base = OTHER; note = 2'-deoxy-2'-fluorouridine-3'-phosphate
  modified_base 8: mod_base = OTHER; note = 2'-O-methyluridine-3'-phosphate
  modified_base 9: mod_base = OTHER; note = 2'-deoxy-2'-fluorocytidine-3'-phosphate
  modified_base 10: mod_base = OTHER; note = 2'-deoxy-2'-fluorocytidine-3'-phosphate
  modified_base 11: mod_base = OTHER; note = 2'-deoxy-2'-fluoroadenosine-3'-phosphate
  modified_base 12: mod_base = OTHER; note = 2'-O-methyluridine-3'-phosphate
  modified_base 13: mod_base = OTHER; note = 2'-O-methyladenosine-3'-phosphate
  modified_base 14: mod_base = OTHER; note = 2'-O-methylcytidine-3'-phosphate
  modified_base 15: mod_base = OTHER; note = 2'-O-methyluridine-3'-phosphate
  modified_base 16: mod_base = OTHER; note = 2'-O-methylcytidine-3'-phosphate
  modified_base 17: mod_base = OTHER; note = 2'-O-methylguanosine-3'-phosphate
  modified_base 18: mod_base = OTHER; note = 2'-O-methyluridine-3'-phosphate
  modified_base 19: mod_base = OTHER; note = 2'-O-methyluridine-3'-phosphorothioate
  modified_base 20: mod_base = OTHER; note = 2'-O-methyladenosine-3'-phosphorothioate
  modified_base 21: mod_base = OTHER; note = 2'-O-methyladenosine
gtgtacttccatactcgttaa

SEQ ID NO: 11319 - RNA, 21 nt, synthetic construct
  source 1..21: mol_type = other RNA
  modified_base 1: mod_base = OTHER; note = 2'-O-methyluridine-3'-phosphorothioate
  modified_base 2: mod_base = OTHER; note = 2'-O-methylguanosine-3'-phosphorothioate
  modified_base 3: mod_base = OTHER; note = 2'-O-methyluridine-3'-phosphate
  modified_base 4: mod_base = OTHER; note = 2'-O-methyladenosine-3'-phosphate
  modified_base 5: mod_base = OTHER; note = 2'-O-methylcytidine-3'-phosphate
  modified_base 6: mod_base = OTHER; note = 2'-O-docosanyl-uridine-3'-phosphate
  modified_base 7: mod_base = OTHER; note = 2'-deoxy-2'-fluorouridine-3'-phosphate
  modified_base 8: mod_base = OTHER; note = 2'-O-methylcytidine-3'-phosphate
  modified_base 9: mod_base = OTHER; note = 2'-deoxy-2'-fluorocytidine-3'-phosphate
  modified_base 10: mod_base = OTHER; note = 2'-deoxy-2'-fluoroadenosine-3'-phosphate
  modified_base 11: mod_base = OTHER; note = 2'-deoxy-2'-fluorouridine-3'-phosphate
  modified_base 12: mod_base = OTHER; note = 2'-O-methyladenosine-3'-phosphate
  modified_base 13: mod_base = OTHER; note = 2'-O-methylcytidine-3'-phosphate
  modified_base 14: mod_base = OTHER; note = 2'-O-methyluridine-3'-phosphate
  modified_base 15: mod_base = OTHER; note = 2'-O-methylcytidine-3'-phosphate
  modified_base 16: mod_base = OTHER; note = 2'-O-methylguanosine-3'-phosphate
  modified_base 17: mod_base = OTHER; note = 2'-O-methyluridine-3'-phosphate
  modified_base 18: mod_base = OTHER; note = 2'-O-methyluridine-3'-phosphate
  modified_base 19: mod_base = OTHER; note = 2'-O-methyladenosine-3'-phosphorothioate
  modified_base 20: mod_base = OTHER; note = 2'-O-methyladenosine-3'-phosphorothioate
  modified_base 21: mod_base = OTHER; note = 2'-O-methyladenosine
tgtacttccatactcgttaaa

SEQ ID NO: 11320 - RNA, 21 nt, synthetic construct
  source 1..21: mol_type = other RNA
  modified_base 1: mod_base = OTHER; note = 2'-O-methylguanosine-3'-phosphorothioate
  modified_base 2: mod_base = OTHER; note = 2'-O-methyluridine-3'-phosphorothioate
  modified_base 3: mod_base = OTHER; note = 2'-O-methyladenosine-3'-phosphate
  modified_base 4: mod_base = OTHER; note = 2'-O-methylcytidine-3'-phosphate
  modified_base 5: mod_base = OTHER; note = 2'-O-methyluridine-3'-phosphate
  modified_base 6: mod_base = OTHER; note = 2'-O-docosanyl-uridine-3'-phosphate
  modified_base 7: mod_base = OTHER; note = 2'-deoxy-2'-fluorocytidine-3'-phosphate
  modified_base 8: mod_base = OTHER; note = 2'-O-methylcytidine-3'-phosphate
  modified_base 9: mod_base = OTHER; note = 2'-deoxy-2'-fluoroadenosine-3'-phosphate
  modified_base 10: mod_base = OTHER; note = 2'-deoxy-2'-fluorouridine-3'-phosphate
  modified_base 11: mod_base = OTHER; note = 2'-deoxy-2'-fluoroadenosine-3'-phosphate
  modified_base 12: mod_base = OTHER; note = 2'-O-methylcytidine-3'-phosphate
  modified_base 13: mod_base = OTHER; note = 2'-O-methyluridine-3'-phosphate
  modified_base 14: mod_base = OTHER; note = 2'-O-methylcytidine-3'-phosphate
  modified_base 15: mod_base = OTHER; note = 2'-O-methylguanosine-3'-phosphate
  modified_base 16: mod_base = OTHER; note = 2'-O-methyluridine-3'-phosphate
  modified_base 17: mod_base = OTHER; note = 2'-O-methyluridine-3'-phosphate
  modified_base 18: mod_base = OTHER; note = 2'-O-methyladenosine-3'-phosphate
  modified_base 19: mod_base = OTHER; note = 2'-O-methyladenosine-3'-phosphorothioate
  modified_base 20: mod_base = OTHER; note = 2'-O-methyluridine-3'-phosphorothioate
  modified_base 21: mod_base = OTHER; note = 2'-O-methyladenosine
gtacttccatactcgttaata

SEQ ID NO: 11321 - RNA, 21 nt, synthetic construct
  source 1..21: mol_type = other RNA
  modified_base 1: mod_base = OTHER; note = 2'-O-methyluridine-3'-phosphorothioate
  modified_base 2: mod_base = OTHER; note = 2'-O-methyladenosine-3'-phosphorothioate
  modified_base 3: mod_base = OTHER; note = 2'-O-methylcytidine-3'-phosphate
  modified_base 4: mod_base = OTHER; note = 2'-O-methyluridine-3'-phosphate
  modified_base 5: mod_base = OTHER; note = 2'-O-methyluridine-3'-phosphate
  modified_base 6: mod_base = OTHER; note = 2'-O-docosanyl-cytidine-3'-phosphate
  modified_base 7: mod_base = OTHER; note = 2'-deoxy-2'-fluorocytidine-3'-phosphate
  modified_base 8: mod_base = OTHER; note = 2'-O-methyladenosine-3'-phosphate
  modified_base 9: mod_base = OTHER; note = 2'-deoxy-2'-fluorouridine-3'-phosphate
  modified_base 10: mod_base = OTHER; note = 2'-deoxy-2'-fluoroadenosine-3'-phosphate
  modified_base 11: mod_base = OTHER; note = 2'-deoxy-2'-fluorocytidine-3'-phosphate
  modified_base 12: mod_base = OTHER; note = 2'-O-methyluridine-3'-phosphate
  modified_base 13: mod_base = OTHER; note = 2'-O-methylcytidine-3'-phosphate
  modified_base 14: mod_base = OTHER; note = 2'-O-methylguanosine-3'-phosphate
  modified_base 15: mod_base = OTHER; note = 2'-O-methyluridine-3'-phosphate
  modified_base 16: mod_base = OTHER; note = 2'-O-methyluridine-3'-phosphate
  modified_base 17: mod_base = OTHER; note = 2'-O-methyladenosine-3'-phosphate
  modified_base 18: mod_base = OTHER; note = 2'-O-methyladenosine-3'-phosphate
  modified_base 19: mod_base = OTHER; note = 2'-O-methyluridine-3'-phosphorothioate
  modified_base 20: mod_base = OTHER; note = 2'-O-methylguanosine-3'-phosphorothioate
  modified_base 21: mod_base = OTHER; note = 2'-O-methyladenosine
tacttccatactcgttaatga

SEQ ID NO: 11322 - RNA, 21 nt, synthetic construct
  source 1..21: mol_type = other RNA
  modified_base 1: mod_base = OTHER; note = 2'-O-methyladenosine-3'-phosphorothioate
  modified_base 2: mod_base = OTHER; note = 2'-O-methylcytidine-3'-phosphorothioate
  modified_base 3: mod_base = OTHER; note = 2'-O-methyluridine-3'-phosphate
  modified_base 4: mod_base = OTHER; note = 2'-O-methyluridine-3'-phosphate
  modified_base 5: mod_base = OTHER; note = 2'-O-methylcytidine-3'-phosphate
  modified_base 6: mod_base = OTHER; note = 2'-O-docosanyl-cytidine-3'-phosphate
  modified_base 7: mod_base = OTHER; note = 2'-deoxy-2'-fluoroadenosine-3'-phosphate
  modified_base 8: mod_base = OTHER; note = 2'-O-methyluridine-3'-phosphate
  modified_base 9: mod_base = OTHER; note = 2'-deoxy-2'-fluoroadenosine-3'-phosphate
  modified_base 10: mod_base = OTHER; note = 2'-deoxy-2'-fluorocytidine-3'-phosphate
  modified_base 11: mod_base = OTHER; note = 2'-deoxy-2'-fluorouridine-3'-phosphate
  modified_base 12: mod_base = OTHER; note = 2'-O-methylcytidine-3'-phosphate
  modified_base 13: mod_base = OTHER; note = 2'-O-methylguanosine-3'-phosphate
  modified_base 14: mod_base = OTHER; note = 2'-O-methyluridine-3'-phosphate
  modified_base 15: mod_base = OTHER; note = 2'-O-methyluridine-3'-phosphate
  modified_base 16: mod_base = OTHER; note = 2'-O-methyladenosine-3'-phosphate
  modified_base 17: mod_base = OTHER; note = 2'-O-methyladenosine-3'-phosphate
  modified_base 18: mod_base = OTHER; note = 2'-O-methyluridine-3'-phosphate
  modified_base 19: mod_base = OTHER; note = 2'-O-methylguanosine-3'-phosphorothioate
  modified_base 20: mod_base = OTHER; note = 2'-O-methylcytidine-3'-phosphorothioate
  modified_base 21: mod_base = OTHER; note = 2'-O-methyladenosine
acttccatactcgttaatgca

SEQ ID NO: 11323 - RNA, 21 nt, synthetic construct
  source 1..21: mol_type = other RNA
  modified_base 1: mod_base = OTHER; note = 2'-O-methylcytidine-3'-phosphorothioate
  modified_base 2: mod_base = OTHER; note = 2'-O-methyluridine-3'-phosphorothioate
  modified_base 3: mod_base = OTHER; note = 2'-O-methyluridine-3'-phosphate
  modified_base 4: mod_base = OTHER; note = 2'-O-methylcytidine-3'-phosphate
  modified_base 5: mod_base = OTHER; note = 2'-O-methylcytidine-3'-phosphate
  modified_base 6: mod_base = OTHER; note = 2'-O-docosanyl-adenosine-3'-phosphate
  modified_base 7: mod_base = OTHER; note = 2'-deoxy-2'-fluorouridine-3'-phosphate
  modified_base 8: mod_base = OTHER; note = 2'-O-methyladenosine-3'-phosphate
  modified_base 9: mod_base = OTHER; note = 2'-deoxy-2'-fluorocytidine-3'-phosphate
  modified_base 10: mod_base = OTHER; note = 2'-deoxy-2'-fluorouridine-3'-phosphate
  modified_base 11: mod_base = OTHER; note = 2'-deoxy-2'-fluorocytidine-3'-phosphate
  modified_base 12: mod_base = OTHER; note = 2'-O-methylguanosine-3'-phosphate
  modified_base 13: mod_base = OTHER; note = 2'-O-methyluridine-3'-phosphate
  modified_base 14: mod_base = OTHER; note = 2'-O-methyluridine-3'-phosphate
  modified_base 15: mod_base = OTHER; note = 2'-O-methyladenosine-3'-phosphate
  modified_base 16: mod_base = OTHER; note = 2'-O-methyladenosine-3'-phosphate
  modified_base 17: mod_base = OTHER; note = 2'-O-methyluridine-3'-phosphate
  modified_base 18: mod_base = OTHER; note = 2'-O-methylguanosine-3'-phosphate
  modified_base 19: mod_base = OTHER; note = 2'-O-methylcytidine-3'-phosphorothioate
  modified_base 20: mod_base = OTHER; note = 2'-O-methyluridine-3'-phosphorothioate
  modified_base 21: mod_base = OTHER; note = 2'-O-methyladenosine
cttccatactcgttaatgcta

SEQ ID NO: 11324 - RNA, 21 nt, synthetic construct
  source 1..21: mol_type = other RNA
  modified_base 1: mod_base = OTHER; note = 2'-O-methyluridine-3'-phosphorothioate
  modified_base 2: mod_base = OTHER; note = 2'-O-methyluridine-3'-phosphorothioate
  modified_base 3: mod_base = OTHER; note = 2'-O-methylcytidine-3'-phosphate
  modified_base 4: mod_base = OTHER; note = 2'-O-methylcytidine-3'-phosphate
  modified_base 5: mod_base = OTHER; note = 2'-O-methyladenosine-3'-phosphate
  modified_base 6: mod_base = OTHER; note = 2'-O-docosanyl-uridine-3'-phosphate
  modified_base 7: mod_base = OTHER; note = 2'-deoxy-2'-fluoroadenosine-3'-phosphate
  modified_base 8: mod_base = OTHER; note = 2'-O-methylcytidine-3'-phosphate
  modified_base 9: mod_base = OTHER; note = 2'-deoxy-2'-fluorouridine-3'-phosphate
  modified_base 10: mod_base = OTHER; note = 2'-deoxy-2'-fluorocytidine-3'-phosphate
  modified_base 11: mod_base = OTHER; note = 2'-deoxy-2'-fluoroguanosine-3'-phosphate
  modified_base 12: mod_base = OTHER; note = 2'-O-methyluridine-3'-phosphate
  modified_base 13: mod_base = OTHER; note = 2'-O-methyluridine-3'-phosphate
  modified_base 14: mod_base = OTHER; note = 2'-O-methyladenosine-3'-phosphate
  modified_base 15: mod_base = OTHER; note = 2'-O-methyladenosine-3'-phosphate
  modified_base 16: mod_base = OTHER; note = 2'-O-methyluridine-3'-phosphate
  modified_base 17: mod_base = OTHER; note = 2'-O-methylguanosine-3'-phosphate
  modified_base 18: mod_base = OTHER; note = 2'-O-methylcytidine-3'-phosphate
  modified_base 19: mod_base = OTHER; note = 2'-O-methyluridine-3'-phosphorothioate
  modified_base 20: mod_base = OTHER; note = 2'-O-methylcytidine-3'-phosphorothioate
  modified_base 21: mod_base = OTHER; note = 2'-O-methyladenosine
ttccatactcgttaatgctca

SEQ ID NO: 11325 - RNA, 21 nt, synthetic construct
  source 1..21: mol_type = other RNA
  modified_base 1: mod_base = OTHER; note = 2'-O-methyluridine-3'-phosphorothioate
  modified_base 2: mod_base = OTHER; note = 2'-O-methylcytidine-3'-phosphorothioate
  modified_base 3: mod_base = OTHER; note = 2'-O-methylcytidine-3'-phosphate
  modified_base 4: mod_base = OTHER; note = 2'-O-methyladenosine-3'-phosphate
  modified_base 5: mod_base = OTHER; note = 2'-O-methyluridine-3'-phosphate
  modified_base 6: mod_base = OTHER; note = 2'-O-docosanyl-adenosine-3'-phosphate
  modified_base 7: mod_base = OTHER; note = 2'-deoxy-2'-fluorocytidine-3'-phosphate
  modified_base 8: mod_base = OTHER; note = 2'-O-methyluridine-3'-phosphate
  modified_base 9: mod_base = OTHER; note = 2'-deoxy-2'-fluorocytidine-3'-phosphate
  modified_base 10: mod_base = OTHER; note = 2'-deoxy-2'-fluoroguanosine-3'-phosphate
  modified_base 11: mod_base = OTHER; note = 2'-deoxy-2'-fluorouridine-3'-phosphate
  modified_base 12: mod_base = OTHER; note = 2'-O-methyluridine-3'-phosphate
  modified_base 13: mod_base = OTHER; note = 2'-O-methyladenosine-3'-phosphate
  modified_base 14: mod_base = OTHER; note = 2'-O-methyladenosine-3'-phosphate
  modified_base 15: mod_base = OTHER; note = 2'-O-methyluridine-3'-phosphate
  modified_base 16: mod_base = OTHER; note = 2'-O-methylguanosine-3'-phosphate
  modified_base 17: mod_base = OTHER; note = 2'-O-methylcytidine-3'-phosphate
  modified_base 18: mod_base = OTHER; note = 2'-O-methyluridine-3'-phosphate
  modified_base 19: mod_base = OTHER; note = 2'-O-methylcytidine-3'-phosphorothioate
  modified_base 20: mod_base = OTHER; note = 2'-O-methyluridine-3'-phosphorothioate
  modified_base 21: mod_base = OTHER; note = 2'-O-methyladenosine
tccatactcgttaatgctcta

SEQ ID NO: 11326 - RNA, 21 nt, synthetic construct
  source 1..21: mol_type = other RNA
  modified_base 1: mod_base = OTHER; note = 2'-O-methylcytidine-3'-phosphorothioate
  modified_base 2: mod_base = OTHER; note = 2'-O-methylcytidine-3'-phosphorothioate
  modified_base 3: mod_base = OTHER; note = 2'-O-methyladenosine-3'-phosphate
  modified_base 4: mod_base = OTHER; note = 2'-O-methyluridine-3'-phosphate
  modified_base 5: mod_base = OTHER; note = 2'-O-methyladenosine-3'-phosphate
  modified_base 6: mod_base = OTHER; note = 2'-O-docosanyl-cytidine-3'-phosphate
  modified_base 7: mod_base = OTHER; note = 2'-deoxy-2'-fluorouridine-3'-phosphate
  modified_base 8: mod_base = OTHER; note = 2'-O-methylcytidine-3'-phosphate
  modified_base 9: mod_base = OTHER; note = 2'-deoxy-2'-fluoroguanosine-3'-phosphate
  modified_base 10: mod_base = OTHER; note = 2'-deoxy-2'-fluorouridine-3'-phosphate
  modified_base 11: mod_base = OTHER; note = 2'-deoxy-2'-fluorouridine-3'-phosphate
  modified_base 12: mod_base = OTHER; note = 2'-O-methyladenosine-3'-phosphate
  modified_base 13: mod_base = OTHER; note = 2'-O-methyladenosine-3'-phosphate
  modified_base 14: mod_base = OTHER; note = 2'-O-methyluridine-3'-phosphate
  modified_base 15: mod_base = OTHER; note = 2'-O-methylguanosine-3'-phosphate
  modified_base 16: mod_base = OTHER; note = 2'-O-methylcytidine-3'-phosphate
  modified_base 17: mod_base = OTHER; note = 2'-O-methyluridine-3'-phosphate
  modified_base 18: mod_base = OTHER; note = 2'-O-methylcytidine-3'-phosphate
  modified_base 19: mod_base = OTHER; note = 2'-O-methyluridine-3'-phosphorothioate
  modified_base 20: mod_base = OTHER; note = 2'-O-methylcytidine-3'-phosphorothioate
  modified_base 21: mod_base = OTHER; note = 2'-O-methyladenosine
ccatactcgttaatgctctca

SEQ ID NO: 11327 - RNA, 21 nt, synthetic construct
  source 1..21: mol_type = other RNA
  modified_base 1: mod_base = OTHER; note = 2'-O-methylcytidine-3'-phosphorothioate
  modified_base 2: mod_base = OTHER; note = 2'-O-methyladenosine-3'-phosphorothioate
  modified_base 3: mod_base = OTHER; note = 2'-O-methyluridine-3'-phosphate
  modified_base 4: mod_base = OTHER; note = 2'-O-methyladenosine-3'-phosphate
  modified_base 5: mod_base = OTHER; note = 2'-O-methylcytidine-3'-phosphate
  modified_base 6: mod_base = OTHER; note = 2'-O-docosanyl-uridine-3'-phosphate
  modified_base 7: mod_base = OTHER; note = 2'-deoxy-2'-fluorocytidine-3'-phosphate
  modified_base 8: mod_base = OTHER; note = 2'-O-methylguanosine-3'-phosphate
  modified_base 9: mod_base = OTHER; note = 2'-deoxy-2'-fluorouridine-3'-phosphate
  modified_base 10: mod_base = OTHER; note = 2'-deoxy-2'-fluorouridine-3'-phosphate
  modified_base 11: mod_base = OTHER; note = 2'-deoxy-2'-fluoroadenosine-3'-phosphate
  modified_base 12: mod_base = OTHER; note = 2'-O-methyladenosine-3'-phosphate
  modified_base 13: mod_base = OTHER; note = 2'-O-methyluridine-3'-phosphate
  modified_base 14: mod_base = OTHER; note = 2'-O-methylguanosine-3'-phosphate
  modified_base 15: mod_base = OTHER; note = 2'-O-methylcytidine-3'-phosphate
  modified_base 16: mod_base = OTHER; note = 2'-O-methyluridine-3'-phosphate
  modified_base 17: mod_base = OTHER; note = 2'-O-methylcytidine-3'-phosphate
  modified_base 18: mod_base = OTHER; note = 2'-O-methyluridine-3'-phosphate
  modified_base 19: mod_base = OTHER; note = 2'-O-methylcytidine-3'-phosphorothioate
  modified_base 20: mod_base = OTHER; note = 2'-O-methyladenosine-3'-phosphorothioate
  modified_base 21: mod_base = OTHER; note = 2'-O-methyladenosine
catactcgttaatgctctcaa

SEQ ID NO: 11328 - RNA, 21 nt, synthetic construct
  source 1..21: mol_type = other RNA
  modified_base 1: mod_base = OTHER; note = 2'-O-methyladenosine-3'-phosphorothioate
  modified_base 2: mod_base = OTHER; note = 2'-O-methyluridine-3'-phosphorothioate
  modified_base 3: mod_base = OTHER; note = 2'-O-methyladenosine-3'-phosphate
  modified_base 4: mod_base = OTHER; note = 2'-O-methylcytidine-3'-phosphate
  modified_base 5: mod_base = OTHER; note = 2'-O-methyluridine-3'-phosphate
  modified_base 6: mod_base = OTHER; note = 2'-O-docosanyl-cytidine-3'-phosphate
  modified_base 7: mod_base = OTHER; note = 2'-deoxy-2'-fluoroguanosine-3'-phosphate
  modified_base 8: mod_base = OTHER; note = 2'-O-methyluridine-3'-phosphate
  modified_base 9: mod_base = OTHER; note = 2'-deoxy-2'-fluorouridine-3'-phosphate
  modified_base 10: mod_base = OTHER; note = 2'-deoxy-2'-fluoroadenosine-3'-phosphate
  modified_base 11: mod_base = OTHER; note = 2'-deoxy-2'-fluoroadenosine-3'-phosphate
  modified_base 12: mod_base = OTHER; note = 2'-O-methyluridine-3'-phosphate
  modified_base 13: mod_base = OTHER; note = 2'-O-methylguanosine-3'-phosphate
  modified_base 14: mod_base = OTHER; note = 2'-O-methylcytidine-3'-phosphate
  modified_base 15: mod_base = OTHER; note = 2'-O-methyluridine-3'-phosphate
  modified_base 16: mod_base = OTHER; note = 2'-O-methylcytidine-3'-phosphate
  modified_base 17: mod_base = OTHER; note = 2'-O-methyluridine-3'-phosphate
  modified_base 18: mod_base = OTHER; note = 2'-O-methylcytidine-3'-phosphate
  modified_base 19: mod_base = OTHER; note = 2'-O-methyladenosine-3'-phosphorothioate
  modified_base 20: mod_base = OTHER; note = 2'-O-methyluridine-3'-phosphorothioate
  modified_base 21: mod_base = OTHER; note = 2'-O-methyladenosine
atactcgttaatgctctcata

SEQ ID NO: 11329 - RNA, 21 nt, synthetic construct
  source 1..21: mol_type = other RNA
  modified_base 1: mod_base = OTHER; note = 2'-O-methyluridine-3'-phosphorothioate
  modified_base 2: mod_base = OTHER; note = 2'-O-methylcytidine-3'-phosphorothioate
  modified_base 3: mod_base = OTHER; note = 2'-O-methylguanosine-3'-phosphate
  modified_base 4: mod_base = OTHER; note = 2'-O-methyluridine-3'-phosphate
  modified_base 5: mod_base = OTHER; note = 2'-O-methyluridine-3'-phosphate
  modified_base 6: mod_base = OTHER; note = 2'-O-docosanyl-adenosine-3'-phosphate
  modified_base 7: mod_base = OTHER; note = 2'-deoxy-2'-fluoroadenosine-3'-phosphate
  modified_base 8: mod_base = OTHER; note = 2'-O-methyluridine-3'-phosphate
  modified_base 9: mod_base = OTHER; note = 2'-deoxy-2'-fluoroguanosine-3'-phosphate
  modified_base 10: mod_base = OTHER; note = 2'-deoxy-2'-fluorocytidine-3'-phosphate
  modified_base 11: mod_base = OTHER; note = 2'-deoxy-2'-fluorouridine-3'-phosphate
  modified_base 12: mod_base = OTHER; note = 2'-O-methylcytidine-3'-phosphate
  modified_base 13: mod_base = OTHER; note = 2'-O-methyluridine-3'-phosphate
  modified_base 14: mod_base = OTHER; note = 2'-O-methylcytidine-3'-phosphate
  modified_base 15: mod_base = OTHER; note = 2'-O-methyladenosine-3'-phosphate
  modified_base 16: mod_base = OTHER; note = 2'-O-methyluridine-3'-phosphate
  modified_base 17: mod_base = OTHER; note = 2'-O-methylcytidine-3'-phosphate
  modified_base 18: mod_base = OTHER; note = 2'-O-methylcytidine-3'-phosphate
  modified_base 19: mod_base = OTHER; note = 2'-O-methyladenosine-3'-phosphorothioate
  modified_base 20: mod_base = OTHER; note = 2'-O-methylcytidine-3'-phosphorothioate
  modified_base 21: mod_base = OTHER; note = 2'-O-methyladenosine
tcgttaatgctctcatccaca

SEQ ID NO: 11330 - RNA, 21 nt, synthetic construct
  source 1..21: mol_type = other RNA
  modified_base 1: mod_base = OTHER; note = 2'-O-methylcytidine-3'-phosphorothioate
  modified_base 2: mod_base = OTHER; note = 2'-O-methylguanosine-3'-phosphorothioate
  modified_base 3: mod_base = OTHER; note = 2'-O-methyluridine-3'-phosphate
  modified_base 4: mod_base = OTHER; note = 2'-O-methyluridine-3'-phosphate
  modified_base 5: mod_base = OTHER; note = 2'-O-methyladenosine-3'-phosphate
  modified_base 6: mod_base = OTHER; note = 2'-O-docosanyl-adenosine-3'-phosphate
  modified_base 7: mod_base = OTHER; note = 2'-deoxy-2'-fluorouridine-3'-phosphate
  modified_base 8: mod_base = OTHER; note = 2'-O-methylguanosine-3'-phosphate
  modified_base 9: mod_base = OTHER; note = 2'-deoxy-2'-fluorocytidine-3'-phosphate
  modified_base 10: mod_base = OTHER; note = 2'-deoxy-2'-fluorouridine-3'-phosphate
  modified_base 11: mod_base = OTHER; note = 2'-deoxy-2'-fluorocytidine-3'-phosphate
  modified_base 12: mod_base = OTHER; note = 2'-O-methyluridine-3'-phosphate
  modified_base 13: mod_base = OTHER; note = 2'-O-methylcytidine-3'-phosphate
  modified_base 14: mod_base = OTHER; note = 2'-O-methyladenosine-3'-phosphate
  modified_base 15: mod_base = OTHER; note = 2'-O-methyluridine-3'-phosphate
  modified_base 16: mod_base = OTHER; note = 2'-O-methylcytidine-3'-phosphate
  modified_base 17: mod_base = OTHER; note = 2'-O-methylcytidine-3'-phosphate
  modified_base 18: mod_base = OTHER; note = 2'-O-methyladenosine-3'-phosphate
  modified_base 19: mod_base = OTHER; note = 2'-O-methylcytidine-3'-phosphorothioate
  modified_base 20: mod_base = OTHER; note = 2'-O-methyluridine-3'-phosphorothioate
  modified_base 21: mod_base = OTHER; note = 2'-O-methyladenosine
cgttaatgctctcatccacta

SEQ ID NO: 11331 - RNA, 21 nt, synthetic construct
  source 1..21: mol_type = other RNA
  modified_base 1: mod_base = OTHER; note = 2'-O-methylguanosine-3'-phosphorothioate
  modified_base 2: mod_base = OTHER; note = 2'-O-methyluridine-3'-phosphorothioate
  modified_base 3: mod_base = OTHER; note = 2'-O-methyluridine-3'-phosphate
  modified_base 4: mod_base = OTHER; note = 2'-O-methyladenosine-3'-phosphate
  modified_base 5: mod_base = OTHER; note = 2'-O-methyladenosine-3'-phosphate
  modified_base 6: mod_base = OTHER; note = 2'-O-docosanyl-uridine-3'-phosphate
  modified_base 7: mod_base = OTHER; note = 2'-deoxy-2'-fluoroguanosine-3'-phosphate
  modified_base 8: mod_base = OTHER; note = 2'-O-methylcytidine-3'-phosphate
  modified_base 9: mod_base = OTHER; note = 2'-deoxy-2'-fluorouridine-3'-phosphate
  modified_base 10: mod_base = OTHER; note = 2'-deoxy-2'-fluorocytidine-3'-phosphate
  modified_base 11: mod_base = OTHER; note = 2'-deoxy-2'-fluorouridine-3'-phosphate
  modified_base 12: mod_base = OTHER; note = 2'-O-methylcytidine-3'-phosphate
  modified_base 13: mod_base = OTHER; note = 2'-O-methyladenosine-3'-phosphate
  modified_base 14: mod_base = OTHER; note = 2'-O-methyluridine-3'-phosphate
  modified_base 15: mod_base = OTHER; note = 2'-O-methylcytidine-3'-phosphate
  modified_base 16: mod_base = OTHER; note = 2'-O-methylcytidine-3'-phosphate
  modified_base 17: mod_base = OTHER; note = 2'-O-methyladenosine-3'-phosphate
  modified_base 18: mod_base = OTHER; note = 2'-O-methylcytidine-3'-phosphate
  modified_base 19: mod_base = OTHER; note = 2'-O-methyluridine-3'-phosphorothioate
  modified_base 20: mod_base = OTHER; note = 2'-O-methyluridine-3'-phosphorothioate
  modified_base 21: mod_base = OTHER; note = 2'-O-methyladenosine
gttaatgctctcatccactta

SEQ ID NO: 11332 - RNA, 21 nt, synthetic construct
  source 1..21: mol_type = other RNA
  modified_base 1: mod_base = OTHER; note = 2'-O-methyluridine-3'-phosphorothioate
  modified_base 2: mod_base = OTHER; note = 2'-O-methyluridine-3'-phosphorothioate
  modified_base 3: mod_base = OTHER; note = 2'-O-methyladenosine-3'-phosphate
  modified_base 4: mod_base = OTHER; note = 2'-O-methyladenosine-3'-phosphate
  modified_base 5: mod_base = OTHER; note = 2'-O-methyluridine-3'-phosphate
  modified_base 6: mod_base = OTHER; note = 2'-O-docosanyl-guanosine-3'-phosphate
  modified_base 7: mod_base = OTHER; note = 2'-deoxy-2'-fluorocytidine-3'-phosphate
  modified_base 8: mod_base = OTHER; note = 2'-O-methyluridine-3'-phosphate
  modified_base 9: mod_base = OTHER; note = 2'-deoxy-2'-fluorocytidine-3'-phosphate
  modified_base 10: mod_base = OTHER; note = 2'-deoxy-2'-fluorouridine-3'-phosphate
  modified_base 11: mod_base = OTHER; note = 2'-deoxy-2'-fluorocytidine-3'-phosphate
  modified_base 12: mod_base = OTHER; note = 2'-O-methyladenosine-3'-phosphate
  modified_base 13: mod_base = OTHER; note = 2'-O-methyluridine-3'-phosphate
  modified_base 14: mod_base = OTHER; note = 2'-O-methylcytidine-3'-phosphate
  modified_base 15: mod_base = OTHER; note = 2'-O-methylcytidine-3'-phosphate
  modified_base 16: mod_base = OTHER; note = 2'-O-methyladenosine-3'-phosphate
  modified_base 17: mod_base = OTHER; note = 2'-O-methylcytidine-3'-phosphate
  modified_base 18: mod_base = OTHER; note = 2'-O-methyluridine-3'-phosphate
  modified_base 19: mod_base = OTHER; note = 2'-O-methyluridine-3'-phosphorothioate
  modified_base 20: mod_base = OTHER; note = 2'-O-methyladenosine-3'-phosphorothioate
  modified_base 21: mod_base = OTHER; note = 2'-O-methyladenosine
ttaatgctctcatccacttaa

SEQ ID NO: 11333 - RNA, 21 nt, synthetic construct
  source 1..21: mol_type = other RNA
  modified_base 1: mod_base = OTHER; note = 2'-O-methyluridine-3'-phosphorothioate
  modified_base 2: mod_base = OTHER; note = 2'-O-methyladenosine-3'-phosphorothioate
  modified_base 3: mod_base = OTHER; note = 2'-O-methyladenosine-3'-phosphate
  modified_base 4: mod_base = OTHER; note = 2'-O-methyluridine-3'-phosphate
  modified_base 5: mod_base = OTHER; note = 2'-O-methylguanosine-3'-phosphate
  modified_base 6: mod_base = OTHER; note = 2'-O-docosanyl-cytidine-3'-phosphate
  modified_base 7: mod_base = OTHER; note = 2'-deoxy-2'-fluorouridine-3'-phosphate
  modified_base 8: mod_base = OTHER; note = 2'-O-methylcytidine-3'-phosphate
  modified_base 9: mod_base = OTHER; note = 2'-deoxy-2'-fluorouridine-3'-phosphate
  modified_base 10: mod_base = OTHER; note = 2'-deoxy-2'-fluorocytidine-3'-phosphate
  modified_base 11: mod_base = OTHER; note = 2'-deoxy-2'-fluoroadenosine-3'-phosphate
  modified_base 12: mod_base = OTHER; note = 2'-O-methyluridine-3'-phosphate
  modified_base 13: mod_base = OTHER; note = 2'-O-methylcytidine-3'-phosphate
  modified_base 14: mod_base = OTHER; note = 2'-O-methylcytidine-3'-phosphate
  modified_base 15: mod_base = OTHER; note = 2'-O-methyladenosine-3'-phosphate
  modified_base 16: mod_base = OTHER; note = 2'-O-methylcytidine-3'-phosphate
  modified_base 17: mod_base = OTHER; note = 2'-O-methyluridine-3'-phosphate
  modified_base 18: mod_base = OTHER; note = 2'-O-methyluridine-3'-phosphate
  modified_base 19: mod_base = OTHER; note = 2'-O-methyladenosine-3'-phosphorothioate
  modified_base 20: mod_base = OTHER; note = 2'-O-methyluridine-3'-phosphorothioate
  modified_base 21: mod_base = OTHER; note = 2'-O-methyladenosine
taatgctctcatccacttata

SEQ ID NO: 11334 - RNA, 21 nt, synthetic construct
  source 1..21: mol_type = other RNA
  modified_base 1: mod_base = OTHER; note = 2'-O-methyladenosine-3'-phosphorothioate
  modified_base 2: mod_base = OTHER; note = 2'-O-methyladenosine-3'-phosphorothioate
  modified_base 3: mod_base = OTHER; note = 2'-O-methyluridine-3'-phosphate
  modified_base 4: mod_base = OTHER; note = 2'-O-methylguanosine-3'-phosphate
  modified_base 5: mod_base = OTHER; note = 2'-O-methylcytidine-3'-phosphate
  modified_base 6: mod_base = OTHER; note = 2'-O-docosanyl-uridine-3'-phosphate
  modified_base 7: mod_base = OTHER; note = 2'-deoxy-2'-fluorocytidine-3'-phosphate
  modified_base 8: mod_base = OTHER; note = 2'-O-methyluridine-3'-phosphate
  modified_base 9: mod_base = OTHER; note = 2'-deoxy-2'-fluorocytidine-3'-phosphate
  modified_base 10: mod_base = OTHER; note = 2'-deoxy-2'-fluoroadenosine-3'-phosphate
  modified_base 11: mod_base = OTHER; note = 2'-deoxy-2'-fluorouridine-3'-phosphate
  modified_base 12: mod_base = OTHER; note = 2'-O-methylcytidine-3'-phosphate
  modified_base 13: mod_base = OTHER; note = 2'-O-methylcytidine-3'-phosphate
  modified_base 14: mod_base = OTHER; note = 2'-O-methyladenosine-3'-phosphate
  modified_base 15: mod_base = OTHER; note = 2'-O-methylcytidine-3'-phosphate
  modified_base 16: mod_base = OTHER; note = 2'-O-methyluridine-3'-phosphate
  modified_base 17: mod_base = OTHER; note = 2'-O-methyluridine-3'-phosphate
  modified_base 18: mod_base = OTHER; note = 2'-O-methyladenosine-3'-phosphate
  modified_base 19: mod_base = OTHER; note = 2'-O-methyluridine-3'-phosphorothioate
  modified_base 20: mod_base = OTHER; note = 2'-O-methyluridine-3'-phosphorothioate
  modified_base 21: mod_base = OTHER; note = 2'-O-methyladenosine
aatgctctcatccacttatta

SEQ ID NO: 11335 - RNA, 21 nt, synthetic construct
  source 1..21: mol_type = other RNA
  modified_base 1: mod_base = OTHER; note = 2'-O-methyladenosine-3'-phosphorothioate
  modified_base 2: mod_base = OTHER; note = 2'-O-methyluridine-3'-phosphorothioate
  modified_base 3: mod_base = OTHER; note = 2'-O-methylguanosine-3'-phosphate
  modified_base 4: mod_base = OTHER; note = 2'-O-methylcytidine-3'-phosphate
  modified_base 5: mod_base = OTHER; note = 2'-O-methyluridine-3'-phosphate
  modified_base 6: mod_base = OTHER; note = 2'-O-docosanyl-cytidine-3'-phosphate
  modified_base 7: mod_base = OTHER; note = 2'-deoxy-2'-fluorouridine-3'-phosphate
  modified_base 8: mod_base = OTHER; note = 2'-O-methylcytidine-3'-phosphate
  modified_base 9: mod_base = OTHER; note = 2'-deoxy-2'-fluoroadenosine-3'-phosphate
  modified_base 10: mod_base = OTHER; note = 2'-deoxy-2'-fluorouridine-3'-phosphate
  modified_base 11: mod_base = OTHER; note = 2'-deoxy-2'-fluorocytidine-3'-phosphate
  modified_base 12: mod_base = OTHER; note = 2'-O-methylcytidine-3'-phosphate
  modified_base 13: mod_base = OTHER; note = 2'-O-methyladenosine-3'-phosphate
  modified_base 14: mod_base = OTHER; note = 2'-O-methylcytidine-3'-phosphate
  modified_base 15: mod_base = OTHER; note = 2'-O-methyluridine-3'-phosphate
  modified_base 16: mod_base = OTHER; note = 2'-O-methyluridine-3'-phosphate
  modified_base 17: mod_base = OTHER; note = 2'-O-methyladenosine-3'-phosphate
  modified_base 18: mod_base = OTHER; note = 2'-O-methyluridine-3'-phosphate
  modified_base 19: mod_base = OTHER; note = 2'-O-methyluridine-3'-phosphorothioate
  modified_base 20: mod_base = OTHER; note = 2'-O-methyladenosine-3'-phosphorothioate
  modified_base 21: mod_base = OTHER; note = 2'-O-methyladenosine
atgctctcatccacttattaa

SEQ ID NO: 11336 - RNA, 21 nt, synthetic construct
  source 1..21: mol_type = other RNA
  modified_base 1: mod_base = OTHER; note = 2'-O-methyluridine-3'-phosphorothioate
  modified_base 2: mod_base = OTHER; note = 2'-O-methylguanosine-3'-phosphorothioate
  modified_base 3: mod_base = OTHER; note = 2'-O-methylcytidine-3'-phosphate
  modified_base 4: mod_base = OTHER; note = 2'-O-methyluridine-3'-phosphate
  modified_base 5: mod_base = OTHER; note = 2'-O-methylcytidine-3'-phosphate
  modified_base 6: mod_base = OTHER; note = 2'-O-docosanyl-uridine-3'-phosphate
  modified_base 7: mod_base = OTHER; note = 2'-deoxy-2'-fluorocytidine-3'-phosphate
  modified_base 8: mod_base = OTHER; note = 2'-O-methyladenosine-3'-phosphate
  modified_base 9: mod_base = OTHER; note = 2'-deoxy-2'-fluorouridine-3'-phosphate
  modified_base 10: mod_base = OTHER; note = 2'-deoxy-2'-fluorocytidine-3'-phosphate
  modified_base 11: mod_base = OTHER; note = 2'-deoxy-2'-fluorocytidine-3'-phosphate
  modified_base 12: mod_base = OTHER; note = 2'-O-methyladenosine-3'-phosphate
  modified_base 13: mod_base = OTHER; note = 2'-O-methylcytidine-3'-phosphate
  modified_base 14: mod_base = OTHER; note = 2'-O-methyluridine-3'-phosphate
  modified_base 15: mod_base = OTHER; note = 2'-O-methyluridine-3'-phosphate
  modified_base 16: mod_base = OTHER; note = 2'-O-methyladenosine-3'-phosphate
  modified_base 17: mod_base = OTHER; note = 2'-O-methyluridine-3'-phosphate
  modified_base 18: mod_base = OTHER; note = 2'-O-methyluridine-3'-phosphate
  modified_base 19: mod_base = OTHER; note = 2'-O-methyladenosine-3'-phosphorothioate
  modified_base 20: mod_base = OTHER; note = 2'-O-methyladenosine-3'-phosphorothioate
  modified_base 21: mod_base = OTHER; note = 2'-O-methyladenosine
tgctctcatccacttattaaa

SEQ ID NO: 11337 - RNA, 21 nt, synthetic construct
  source 1..21: mol_type = other RNA
  modified_base 1: mod_base = OTHER; note = 2'-O-methylguanosine-3'-phosphorothioate
  modified_base 2: mod_base = OTHER; note = 2'-O-methylcytidine-3'-phosphorothioate
  modified_base 3: mod_base = OTHER; note = 2'-O-methyluridine-3'-phosphate
  modified_base 4: mod_base = OTHER; note = 2'-O-methylcytidine-3'-phosphate
  modified_base 5: mod_base = OTHER; note = 2'-O-methyluridine-3'-phosphate
  modified_base 6: mod_base = OTHER; note = 2'-O-docosanyl-cytidine-3'-phosphate
  modified_base 7: mod_base = OTHER; note = 2'-deoxy-2'-fluoroadenosine-3'-phosphate
  modified_base 8: mod_base = OTHER; note = 2'-O-methyluridine-3'-phosphate
  modified_base 9: mod_base = OTHER; note = 2'-deoxy-2'-fluorocytidine-3'-phosphate
  modified_base 10: mod_base = OTHER; note = 2'-deoxy-2'-fluorocytidine-3'-phosphate
  modified_base 11: mod_base = OTHER; note = 2'-deoxy-2'-fluoroadenosine-3'-phosphate
  modified_base 12: mod_base = OTHER; note = 2'-O-methylcytidine-3'-phosphate
  modified_base 13: mod_base = OTHER; note = 2'-O-methyluridine-3'-phosphate
  modified_base 14: mod_base = OTHER; note = 2'-O-methyluridine-3'-phosphate
  modified_base 15: mod_base = OTHER; note = 2'-O-methyladenosine-3'-phosphate
  modified_base 16: mod_base = OTHER; note = 2'-O-methyluridine-3'-phosphate
  modified_base 17: mod_base = OTHER; note = 2'-O-methyluridine-3'-phosphate
  modified_base 18: mod_base = OTHER; note = 2'-O-methyladenosine-3'-phosphate
  modified_base 19: mod_base = OTHER; note = 2'-O-methyladenosine-3'-phosphorothioate
  modified_base 20: mod_base = OTHER; note = 2'-O-methyladenosine-3'-phosphorothioate
  modified_base 21: mod_base = OTHER; note = 2'-O-methyladenosine
gctctcatccacttattaaaa

SEQ ID NO: 11338 - RNA, 21 nt, synthetic construct
  source 1..21: mol_type = other RNA
  modified_base 1: mod_base = OTHER; note = 2'-O-methylcytidine-3'-phosphorothioate
  modified_base 2: mod_base = OTHER; note = 2'-O-methyluridine-3'-phosphorothioate
  modified_base 3: mod_base = OTHER; note = 2'-O-methylcytidine-3'-phosphate
  modified_base 4: mod_base = OTHER; note = 2'-O-methyluridine-3'-phosphate
  modified_base 5: mod_base = OTHER; note = 2'-O-methylcytidine-3'-phosphate
  modified_base 6: mod_base = OTHER; note = 2'-O-docosanyl-adenosine-3'-phosphate
  modified_base 7: mod_base = OTHER; note = 2'-deoxy-2'-fluorouridine-3'-phosphate
  modified_base 8: mod_base = OTHER; note = 2'-O-methylcytidine-3'-phosphate
  modified_base 9: mod_base = OTHER; note = 2'-deoxy-2'-fluorocytidine-3'-phosphate
  modified_base 10: mod_base = OTHER; note = 2'-deoxy-2'-fluoroadenosine-3'-phosphate
  modified_base 11: mod_base = OTHER; note = 2'-deoxy-2'-fluorocytidine-3'-phosphate
  modified_base 12: mod_base = OTHER; note = 2'-O-methyluridine-3'-phosphate
  modified_base 13: mod_base = OTHER; note = 2'-O-methyluridine-3'-phosphate
  modified_base 14: mod_base = OTHER; note = 2'-O-methyladenosine-3'-phosphate
  modified_base 15: mod_base = OTHER; note = 2'-O-methyluridine-3'-phosphate
  modified_base 16: mod_base = OTHER; note = 2'-O-methyluridine-3'-phosphate
  modified_base 17: mod_base = OTHER; note = 2'-O-methyladenosine-3'-phosphate
  modified_base 18: mod_base = OTHER; note = 2'-O-methyladenosine-3'-phosphate
  modified_base 19: mod_base = OTHER; note = 2'-O-methyladenosine-3'-phosphorothioate
  modified_base 20: mod_base = OTHER; note = 2'-O-methyluridine-3'-phosphorothioate
  modified_base 21: mod_base = OTHER; note = 2'-O-methyladenosine
ctctcatccacttattaaata

SEQ ID NO: 11339 - RNA, 21 nt, synthetic construct
  source 1..21: mol_type = other RNA
  modified_base 1: mod_base = OTHER; note = 2'-O-methyluridine-3'-phosphorothioate
  modified_base 2: mod_base = OTHER; note = 2'-O-methylcytidine-3'-phosphorothioate
  modified_base 3: mod_base = OTHER; note = 2'-O-methyluridine-3'-phosphate
  modified_base 4: mod_base = OTHER; note = 2'-O-methylcytidine-3'-phosphate
  modified_base 5: mod_base = OTHER; note = 2'-O-methyladenosine-3'-phosphate
  modified_base 6: mod_base = OTHER; note = 2'-O-docosanyl-uridine-3'-phosphate
  modified_base 7: mod_base = OTHER; note = 2'-deoxy-2'-fluorocytidine-3'-phosphate
  modified_base 8: mod_base = OTHER; note = 2'-O-methylcytidine-3'-phosphate
  modified_base 9: mod_base = OTHER; note = 2'-deoxy-2'-fluoroadenosine-3'-phosphate
  modified_base 10: mod_base = OTHER; note = 2'-deoxy-2'-fluorocytidine-3'-phosphate
  modified_base 11: mod_base = OTHER; note = 2'-deoxy-2'-fluorouridine-3'-phosphate
  modified_base 12: mod_base = OTHER; note = 2'-O-methyluridine-3'-phosphate
  modified_base 13: mod_base = OTHER; note = 2'-O-methyladenosine-3'-phosphate
  modified_base 14: mod_base = OTHER; note = 2'-O-methyluridine-3'-phosphate
  modified_base 15: mod_base = OTHER; note = 2'-O-methyluridine-3'-phosphate
  modified_base 16: mod_base = OTHER; note = 2'-O-methyladenosine-3'-phosphate
  modified_base 17: mod_base = OTHER; note = 2'-O-methyladenosine-3'-phosphate
  modified_base 18: mod_base = OTHER; note = 2'-O-methyladenosine-3'-phosphate
  modified_base 19: mod_base = OTHER; note = 2'-O-methyluridine-3'-phosphorothioate
  modified_base 20: mod_base = OTHER; note = 2'-O-methyladenosine-3'-phosphorothioate
  modified_base 21: mod_base = OTHER; note = 2'-O-methyladenosine
tctcatccacttattaaataa

SEQ ID NO: 11340 - RNA, 21 nt, synthetic construct
  source 1..21: mol_type = other RNA
  modified_base 1: mod_base = OTHER; note = 2'-O-methylcytidine-3'-phosphorothioate
  modified_base 2: mod_base = OTHER; note = 2'-O-methyluridine-3'-phosphorothioate
  modified_base 3: mod_base = OTHER; note = 2'-O-methylcytidine-3'-phosphate
  modified_base 4: mod_base = OTHER; note = 2'-O-methyladenosine-3'-phosphate
  modified_base 5: mod_base = OTHER; note = 2'-O-methyluridine-3'-phosphate
  modified_base 6: mod_base = OTHER; note = 2'-O-docosanyl-cytidine-3'-phosphate
  modified_base 7: mod_base = OTHER; note = 2'-deoxy-2'-fluorocytidine-3'-phosphate
  modified_base 8: mod_base = OTHER; note = 2'-O-methyladenosine-3'-phosphate
  modified_base 9: mod_base = OTHER; note = 2'-deoxy-2'-fluorocytidine-3'-phosphate
  modified_base 10: mod_base = OTHER; note = 2'-deoxy-2'-fluorouridine-3'-phosphate
  modified_base 11: mod_base = OTHER; note = 2'-deoxy-2'-fluorouridine-3'-phosphate
  modified_base 12: mod_base = OTHER; note = 2'-O-methyladenosine-3'-phosphate
  modified_base 13: mod_base = OTHER; note = 2'-O-methyluridine-3'-phosphate
  modified_base 14: mod_base = OTHER; note = 2'-O-methyluridine-3'-phosphate
  modified_base 15: mod_base = OTHER; note = 2'-O-methyladenosine-3'-phosphate
  modified_base 16: mod_base = OTHER; note = 2'-O-methyladenosine-3'-phosphate
  modified_base 17: mod_base = OTHER; note = 2'-O-methyladenosine-3'-phosphate
  modified_base 18: mod_base = OTHER; note = 2'-O-methyluridine-3'-phosphate
  modified_base 19: mod_base = OTHER; note = 2'-O-methyladenosine-3'-phosphorothioate
  modified_base 20: mod_base = OTHER; note = 2'-O-methyladenosine-3'-phosphorothioate
  modified_base 21: mod_base = OTHER; note = 2'-O-methyladenosine
ctcatccacttattaaataaa

SEQ ID NO: 11341 - RNA, 21 nt, synthetic construct
  source 1..21: mol_type = other RNA
  modified_base 1: mod_base = OTHER; note = 2'-O-methyluridine-3'-phosphorothioate
  modified_base 2: mod_base = OTHER; note = 2'-O-methyluridine-3'-phosphorothioate
  modified_base 3: mod_base = OTHER; note = 2'-O-methyladenosine-3'-phosphate
  modified_base 4: mod_base = OTHER; note = 2'-O-methyladenosine-3'-phosphate
  modified_base 5: mod_base = OTHER; note = 2'-O-methyladenosine-3'-phosphate
  modified_base 6: mod_base = OTHER; note = 2'-O-docosanyl-uridine-3'-phosphate
  modified_base 7: mod_base = OTHER; note = 2'-deoxy-2'-fluoroadenosine-3'-phosphate
  modified_base 8: mod_base = OTHER; note = 2'-O-methyladenosine-3'-phosphate
  modified_base 9: mod_base = OTHER; note = 2'-deoxy-2'-fluorouridine-3'-phosphate
  modified_base 10: mod_base = OTHER; note = 2'-deoxy-2'-fluorocytidine-3'-phosphate
  modified_base 11: mod_base = OTHER; note = 2'-deoxy-2'-fluoroadenosine-3'-phosphate
  modified_base 12: mod_base = OTHER; note = 2'-O-methyluridine-3'-phosphate
  modified_base 13: mod_base = OTHER; note = 2'-O-methyladenosine-3'-phosphate
  modified_base 14: mod_base = OTHER; note = 2'-O-methylguanosine-3'-phosphate
  modified_base 15: mod_base = OTHER; note = 2'-O-methyladenosine-3'-phosphate
  modified_base 16: mod_base = OTHER; note = 2'-O-methylguanosine-3'-phosphate
  modified_base 17: mod_base = OTHER; note = 2'-O-methylcytidine-3'-phosphate
  modified_base 18: mod_base = OTHER; note = 2'-O-methyladenosine-3'-phosphate
  modified_base 19: mod_base = OTHER; note = 2'-O-methylcytidine-3'-phosphorothioate
  modified_base 20: mod_base = OTHER; note = 2'-O-methylcytidine-3'-phosphorothioate
  modified_base 21: mod_base = OTHER; note = 2'-O-methyladenosine
ttaaataatcatagagcacca

SEQ ID NO: 11342 - RNA, 21 nt, synthetic construct
  source 1..21: mol_type = other RNA
  modified_base 1: mod_base = OTHER; note = 2'-O-methyluridine-3'-phosphorothioate
  modified_base 2: mod_base = OTHER; note = 2'-O-methyladenosine-3'-phosphorothioate
  modified_base 3: mod_base = OTHER; note = 2'-O-methyladenosine-3'-phosphate
  modified_base 4: mod_base = OTHER; note = 2'-O-methyladenosine-3'-phosphate
  modified_base 5: mod_base = OTHER; note = 2'-O-methyluridine-3'-phosphate
  modified_base 6: mod_base = OTHER; note = 2'-O-docosanyl-adenosine-3'-phosphate
  modified_base 7: mod_base = OTHER; note = 2'-deoxy-2'-fluoroadenosine-3'-phosphate
  modified_base 8: mod_base = OTHER; note = 2'-O-methyluridine-3'-phosphate
  modified_base 9: mod_base = OTHER; note = 2'-deoxy-2'-fluorocytidine-3'-phosphate
  modified_base 10: mod_base = OTHER; note = 2'-deoxy-2'-fluoroadenosine-3'-phosphate
  modified_base 11: mod_base = OTHER; note = 2'-deoxy-2'-fluorouridine-3'-phosphate
  modified_base 12: mod_base = OTHER; note = 2'-O-methyladenosine-3'-phosphate
  modified_base 13: mod_base = OTHER; note = 2'-O-methylguanosine-3'-phosphate
  modified_base 14: mod_base = OTHER; note = 2'-O-methyladenosine-3'-phosphate
  modified_base 15: mod_base = OTHER; note = 2'-O-methylguanosine-3'-phosphate
  modified_base 16: mod_base = OTHER; note = 2'-O-methylcytidine-3'-phosphate
  modified_base 17: mod_base = OTHER; note = 2'-O-methyladenosine-3'-phosphate
  modified_base 18: mod_base = OTHER; note = 2'-O-methylcytidine-3'-phosphate
  modified_base 19: mod_base = OTHER; note = 2'-O-methylcytidine-3'-phosphorothioate
  modified_base 20: mod_base = OTHER; note = 2'-O-methylcytidine-3'-phosphorothioate
  modified_base 21: mod_base = OTHER; note = 2'-O-methyladenosine
taaataatcatagagcaccca

SEQ ID NO: 11343 - RNA, 21 nt, synthetic construct
  source 1..21: mol_type = other RNA
  modified_base 1: mod_base = OTHER; note = 2'-O-methyladenosine-3'-phosphorothioate
  modified_base 2: mod_base = OTHER; note = 2'-O-methyladenosine-3'-phosphorothioate
  modified_base 3: mod_base = OTHER; note = 2'-O-methyladenosine-3'-phosphate
  modified_base 4: mod_base = OTHER; note = 2'-O-methyluridine-3'-phosphate
  modified_base 5: mod_base = OTHER; note = 2'-O-methyladenosine-3'-phosphate
  modified_base 6: mod_base = OTHER; note = 2'-O-docosanyl-adenosine-3'-phosphate
  modified_base 7: mod_base = OTHER; note = 2'-deoxy-2'-fluorouridine-3'-phosphate
  modified_base 8: mod_base = OTHER; note = 2'-O-methylcytidine-3'-phosphate
  modified_base 9: mod_base = OTHER; note = 2'-deoxy-2'-fluoroadenosine-3'-phosphate
  modified_base 10: mod_base = OTHER; note = 2'-deoxy-2'-fluorouridine-3'-phosphate
  modified_base 11: mod_base = OTHER; note = 2'-deoxy-2'-fluoroadenosine-3'-phosphate
  modified_base 12: mod_base = OTHER; note = 2'-O-methylguanosine-3'-phosphate
  modified_base 13: mod_base = OTHER; note = 2'-O-methyladenosine-3'-phosphate
  modified_base 14: mod_base = OTHER; note = 2'-O-methylguanosine-3'-phosphate
  modified_base 15: mod_base = OTHER; note = 2'-O-methylcytidine-3'-phosphate
  modified_base 16: mod_base = OTHER; note = 2'-O-methyladenosine-3'-phosphate
  modified_base 17: mod_base = OTHER; note = 2'-O-methylcytidine-3'-phosphate
  modified_base 18: mod_base = OTHER; note = 2'-O-methylcytidine-3'-phosphate
  modified_base 19: mod_base = OTHER; note = 2'-O-methylcytidine-3'-phosphorothioate
  modified_base 20: mod_base = OTHER; note = 2'-O-methyladenosine-3'-phosphorothioate
  modified_base 21: mod_base = OTHER; note = 2'-O-methyladenosine
aaataatcatagagcacccaa

SEQ ID NO: 11344 - RNA, 21 nt, synthetic construct
  source 1..21: mol_type = other RNA
  modified_base 1: mod_base = OTHER; note = 2'-O-methyladenosine-3'-phosphorothioate
  modified_base 2: mod_base = OTHER; note = 2'-O-methyladenosine-3'-phosphorothioate
  modified_base 3: mod_base = OTHER; note = 2'-O-methyluridine-3'-phosphate
  modified_base 4: mod_base = OTHER; note = 2'-O-methyladenosine-3'-phosphate
  modified_base 5: mod_base = OTHER; note = 2'-O-methyladenosine-3'-phosphate
  modified_base 6: mod_base = OTHER; note = 2'-O-docosanyl-uridine-3'-phosphate
  modified_base 7: mod_base = OTHER; note = 2'-deoxy-2'-fluorocytidine-3'-phosphate
  modified_base 8: mod_base = OTHER; note = 2'-O-methyladenosine-3'-phosphate
  modified_base 9: mod_base = OTHER; note = 2'-deoxy-2'-fluorouridine-3'-phosphate
  modified_base 10: mod_base = OTHER; note = 2'-deoxy-2'-fluoroadenosine-3'-phosphate
  modified_base 11: mod_base = OTHER; note = 2'-deoxy-2'-fluoroguanosine-3'-phosphate
  modified_base 12: mod_base = OTHER; note = 2'-O-methyladenosine-3'-phosphate
  modified_base 13: mod_base = OTHER; note = 2'-O-methylguanosine-3'-phosphate
  modified_base 14: mod_base = OTHER; note = 2'-O-methylcytidine-3'-phosphate
  modified_base 15: mod_base = OTHER; note = 2'-O-methyladenosine-3'-phosphate
  modified_base 16: mod_base = OTHER; note = 2'-O-methylcytidine-3'-phosphate
  modified_base 17: mod_base = OTHER; note = 2'-O-methylcytidine-3'-phosphate
  modified_base 18: mod_base = OTHER; note = 2'-O-methylcytidine-3'-phosphate
  modified_base 19: mod_base = OTHER; note = 2'-O-methyladenosine-3'-phosphorothioate
  modified_base 20: mod_base = OTHER; note = 2'-O-methyluridine-3'-phosphorothioate
  modified_base 21: mod_base = OTHER; note = 2'-O-methyladenosine
aataatcatagagcacccata

SEQ ID NO: 11345 - RNA, 21 nt, synthetic construct
  source 1..21: mol_type = other RNA
  modified_base 1: mod_base = OTHER; note = 2'-O-methyladenosine-3'-phosphorothioate
  modified_base 2: mod_base = OTHER; note = 2'-O-methyluridine-3'-phosphorothioate
  modified_base 3: mod_base = OTHER; note = 2'-O-methyladenosine-3'-phosphate
  modified_base 4: mod_base = OTHER; note = 2'-O-methyladenosine-3'-phosphate
  modified_base 5: mod_base = OTHER; note = 2'-O-methyluridine-3'-phosphate
  modified_base 6: mod_base = OTHER; note = 2'-O-docosanyl-cytidine-3'-phosphate
  modified_base 7: mod_base = OTHER; note = 2'-deoxy-2'-fluoroadenosine-3'-phosphate
  modified_base 8: mod_base = OTHER; note = 2'-O-methyluridine-3'-phosphate
  modified_base 9: mod_base = OTHER; note = 2'-deoxy-2'-fluoroadenosine-3'-phosphate
  modified_base 10: mod_base = OTHER; note = 2'-deoxy-2'-fluoroguanosine-3'-phosphate
  modified_base 11: mod_base = OTHER; note = 2'-deoxy-2'-fluoroadenosine-3'-phosphate
  modified_base 12: mod_base = OTHER; note = 2'-O-methylguanosine-3'-phosphate
  modified_base 13: mod_base = OTHER; note = 2'-O-methylcytidine-3'-phosphate
  modified_base 14: mod_base = OTHER; note = 2'-O-methyladenosine-3'-phosphate
  modified_base 15: mod_base = OTHER; note = 2'-O-methylcytidine-3'-phosphate
  modified_base 16: mod_base = OTHER; note = 2'-O-methylcytidine-3'-phosphate
  modified_base 17: mod_base = OTHER; note = 2'-O-methylcytidine-3'-phosphate
  modified_base 18: mod_base = OTHER; note = 2'-O-methyladenosine-3'-phosphate
  modified_base 19: mod_base = OTHER; note = 2'-O-methyluridine-3'-phosphorothioate
  modified_base 20: mod_base = OTHER; note = 2'-O-methyladenosine-3'-phosphorothioate
  modified_base 21: mod_base = OTHER; note = 2'-O-methyladenosine
ataatcatagagcacccataa

SEQ ID NO: 11346 - RNA, 21 nt, synthetic construct
  source 1..21: mol_type = other RNA
  modified_base 1: mod_base = OTHER; note = 2'-O-methyluridine-3'-phosphorothioate
  modified_base 2: mod_base = OTHER; note = 2'-O-methyladenosine-3'-phosphorothioate
  modified_base 3: mod_base = OTHER; note = 2'-O-methyladenosine-3'-phosphate
  modified_base 4: mod_base = OTHER; note = 2'-O-methyluridine-3'-phosphate
  modified_base 5: mod_base = OTHER; note = 2'-O-methylcytidine-3'-phosphate
  modified_base 6: mod_base = OTHER; note = 2'-O-docosanyl-adenosine-3'-phosphate
  modified_base 7: mod_base = OTHER; note = 2'-deoxy-2'-fluorouridine-3'-phosphate
  modified_base 8: mod_base = OTHER; note = 2'-O-methyladenosine-3'-phosphate
  modified_base 9: mod_base = OTHER; note = 2'-deoxy-2'-fluoroguanosine-3'-phosphate
  modified_base 10: mod_base = OTHER; note = 2'-deoxy-2'-fluoroadenosine-3'-phosphate
  modified_base 11: mod_base = OTHER; note = 2'-deoxy-2'-fluoroguanosine-3'-phosphate
  modified_base 12: mod_base = OTHER; note = 2'-O-methylcytidine-3'-phosphate
  modified_base 13: mod_base = OTHER; note = 2'-O-methyladenosine-3'-phosphate
  modified_base 14: mod_base = OTHER; note = 2'-O-methylcytidine-3'-phosphate
  modified_base 15: mod_base = OTHER; note = 2'-O-methylcytidine-3'-phosphate
  modified_base 16: mod_base = OTHER; note = 2'-O-methylcytidine-3'-phosphate
  modified_base 17: mod_base = OTHER; note = 2'-O-methyladenosine-3'-phosphate
  modified_base 18: mod_base = OTHER; note = 2'-O-methyluridine-3'-phosphate
  modified_base 19: mod_base = OTHER; note = 2'-O-methyladenosine-3'-phosphorothioate
  modified_base 20: mod_base = OTHER; note = 2'-O-methyluridine-3'-phosphorothioate
  modified_base 21: mod_base = OTHER; note = 2'-O-methyladenosine
taatcatagagcacccatata

SEQ ID NO: 11347 - RNA, 21 nt, synthetic construct
  source 1..21: mol_type = other RNA
  modified_base 1: mod_base = OTHER; note = 2'-O-methylguanosine-3'-phosphorothioate
  modified_base 2: mod_base = OTHER; note = 2'-O-methyladenosine-3'-phosphorothioate
  modified_base 3: mod_base = OTHER; note = 2'-O-methylguanosine-3'-phosphate
  modified_base 4: mod_base = OTHER; note = 2'-O-methylcytidine-3'-phosphate
  modified_base 5: mod_base = OTHER; note = 2'-O-methyladenosine-3'-phosphate
  modified_base 6: mod_base = OTHER; note = 2'-O-docosanyl-cytidine-3'-phosphate
  modified_base 7: mod_base = OTHER; note = 2'-deoxy-2'-fluorocytidine-3'-phosphate
  modified_base 8: mod_base = OTHER; note = 2'-O-methylcytidine-3'-phosphate
  modified_base 9: mod_base = OTHER; note = 2'-deoxy-2'-fluoroadenosine-3'-phosphate
  modified_base 10: mod_base = OTHER; note = 2'-deoxy-2'-fluorouridine-3'-phosphate
  modified_base 11: mod_base = OTHER; note = 2'-deoxy-2'-fluoroadenosine-3'-phosphate
  modified_base 12: mod_base = OTHER; note = 2'-O-methyluridine-3'-phosphate
  modified_base 13: mod_base = OTHER; note = 2'-O-methylcytidine-3'-phosphate
  modified_base 14: mod_base = OTHER; note = 2'-O-methyluridine-3'-phosphate
  modified_base 15: mod_base = OTHER; note = 2'-O-methyluridine-3'-phosphate
  modified_base 16: mod_base = OTHER; note = 2'-O-methylguanosine-3'-phosphate
  modified_base 17: mod_base = OTHER; note = 2'-O-methylcytidine-3'-phosphate
  modified_base 18: mod_base = OTHER; note = 2'-O-methyluridine-3'-phosphate
  modified_base 19: mod_base = OTHER; note = 2'-O-methyluridine-3'-phosphorothioate
  modified_base 20: mod_base = OTHER; note = 2'-O-methylguanosine-3'-phosphorothioate
  modified_base 21: mod_base = OTHER; note = 2'-O-methyladenosine
gagcacccatatcttgcttga

SEQ ID NO: 11348 - RNA, 21 nt, synthetic construct
  source 1..21: mol_type = other RNA
  modified_base 1: mod_base = OTHER; note = 2'-O-methyladenosine-3'-phosphorothioate
  modified_base 2: mod_base = OTHER; note = 2'-O-methyluridine-3'-phosphorothioate
  modified_base 3: mod_base = OTHER; note = 2'-O-methyladenosine-3'-phosphate
  modified_base 4: mod_base = OTHER; note = 2'-O-methyluridine-3'-phosphate
  modified_base 5: mod_base = OTHER; note = 2'-O-methylcytidine-3'-phosphate
  modified_base 6: mod_base = OTHER; note = 2'-O-docosanyl-uridine-3'-phosphate
  modified_base 7: mod_base = OTHER; note = 2'-deoxy-2'-fluorouridine-3'-phosphate
  modified_base 8: mod_base = OTHER; note = 2'-O-methylguanosine-3'-phosphate
  modified_base 9: mod_base = OTHER; note = 2'-deoxy-2'-fluorocytidine-3'-phosphate
  modified_base 10: mod_base = OTHER; note = 2'-deoxy-2'-fluorouridine-3'-phosphate
  modified_base 11: mod_base = OTHER; note = 2'-deoxy-2'-fluorouridine-3'-phosphate
  modified_base 12: mod_base = OTHER; note = 2'-O-methylguanosine-3'-phosphate
  modified_base 13: mod_base = OTHER; note = 2'-O-methylcytidine-3'-phosphate
  modified_base 14: mod_base = OTHER; note = 2'-O-methylcytidine-3'-phosphate
  modified_base 15: mod_base = OTHER; note = 2'-O-methyladenosine-3'-phosphate
  modified_base 16: mod_base = OTHER; note = 2'-O-methylcytidine-3'-phosphate
  modified_base 17: mod_base = OTHER; note = 2'-O-methyladenosine-3'-phosphate
  modified_base 18: mod_base = OTHER; note = 2'-O-methyladenosine-3'-phosphate
  modified_base 19: mod_base = OTHER; note = 2'-O-methyluridine-3'-phosphorothioate
  modified_base 20: mod_base = OTHER; note = 2'-O-methyladenosine-3'-phosphorothioate
  modified_base 21: mod_base = OTHER; note = 2'-O-methyladenosine
atatcttgcttgccacaataa

SEQ ID NO: 11349 - RNA, 21 nt, synthetic construct
  source 1..21: mol_type = other RNA
  modified_base 1: mod_base = OTHER; note = 2'-O-methyladenosine-3'-phosphorothioate
  modified_base 2: mod_base = OTHER; note = 2'-O-methyluridine-3'-phosphorothioate
  modified_base 3: mod_base = OTHER; note = 2'-O-methyladenosine-3'-phosphate
  modified_base 4: mod_base = OTHER; note = 2'-O-methylguanosine-3'-phosphate
  modified_base 5: mod_base = OTHER; note = 2'-O-methylguanosine-3'-phosphate
  modified_base 6: mod_base = OTHER; note = 2'-O-docosanyl-uridine-3'-phosphate
  modified_base 7: mod_base = OTHER; note = 2'-deoxy-2'-fluorocytidine-3'-phosphate
  modified_base 8: mod_base = OTHER; note = 2'-O-methylcytidine-3'-phosphate
  modified_base 9: mod_base = OTHER; note = 2'-deoxy-2'-fluorouridine-3'-phosphate
  modified_base 10: mod_base = OTHER; note = 2'-deoxy-2'-fluoroguanosine-3'-phosphate
  modified_base 11: mod_base = OTHER; note = 2'-deoxy-2'-fluorocytidine-3'-phosphate
  modified_base 12: mod_base = OTHER; note = 2'-O-methylcytidine-3'-phosphate
  modified_base 13: mod_base = OTHER; note = 2'-O-methylcytidine-3'-phosphate
  modified_base 14: mod_base = OTHER; note = 2'-O-methyluridine-3'-phosphate
  modified_base 15: mod_base = OTHER; note = 2'-O-methylcytidine-3'-phosphate
  modified_base 16: mod_base = OTHER; note = 2'-O-methyladenosine-3'-phosphate
  modified_base 17: mod_base = OTHER; note = 2'-O-methylguanosine-3'-phosphate
  modified_base 18: mod_base = OTHER; note = 2'-O-methylguanosine-3'-phosphate
  modified_base 19: mod_base = OTHER; note = 2'-O-methylguanosine-3'-phosphorothioate
  modified_base 20: mod_base = OTHER; note = 2'-O-methyladenosine-3'-phosphorothioate
  modified_base 21: mod_base = OTHER; note = 2'-O-methyladenosine
ataggtcctgccctcagggaa

SEQ ID NO: 11350 - RNA, 21 nt, synthetic construct
  source 1..21: mol_type = other RNA
  modified_base 1: mod_base = OTHER; note = 2'-O-methyluridine-3'-phosphorothioate
  modified_base 2: mod_base = OTHER; note = 2'-O-methyladenosine-3'-phosphorothioate
  modified_base 3: mod_base = OTHER; note = 2'-O-methylguanosine-3'-phosphate
  modified_base 4: mod_base = OTHER; note = 2'-O-methylguanosine-3'-phosphate
  modified_base 5: mod_base = OTHER; note = 2'-O-methyluridine-3'-phosphate
  modified_base 6: mod_base = OTHER; note = 2'-O-docosanyl-cytidine-3'-phosphate
  modified_base 7: mod_base = OTHER; note = 2'-deoxy-2'-fluorocytidine-3'-phosphate
  modified_base 8: mod_base = OTHER; note = 2'-O-methyluridine-3'-phosphate
  modified_base 9: mod_base = OTHER; note = 2'-deoxy-2'-fluoroguanosine-3'-phosphate
  modified_base 10: mod_base = OTHER; note = 2'-deoxy-2'-fluorocytidine-3'-phosphate
  modified_base 11: mod_base = OTHER; note = 2'-deoxy-2'-fluorocytidine-3'-phosphate
  modified_base 12: mod_base = OTHER; note = 2'-O-methylcytidine-3'-phosphate
  modified_base 13: mod_base = OTHER; note = 2'-O-methyluridine-3'-phosphate
  modified_base 14: mod_base = OTHER; note = 2'-O-methylcytidine-3'-phosphate
  modified_base 15: mod_base = OTHER; note = 2'-O-methyladenosine-3'-phosphate
  modified_base 16: mod_base = OTHER; note = 2'-O-methylguanosine-3'-phosphate
  modified_base 17: mod_base = OTHER; note = 2'-O-methylguanosine-3'-phosphate
  modified_base 18: mod_base = OTHER; note = 2'-O-methylguanosine-3'-phosphate
  modified_base 19: mod_base = OTHER; note = 2'-O-methyladenosine-3'-phosphorothioate
  modified_base 20: mod_base = OTHER; note = 2'-O-methyluridine-3'-phosphorothioate
  modified_base 21: mod_base = OTHER; note = 2'-O-methyladenosine
taggtcctgccctcagggata

SEQ ID NO: 11351 - RNA, 21 nt, synthetic construct
  source 1..21: mol_type = other RNA
  modified_base 1: mod_base = OTHER; note = 2'-O-methyladenosine-3'-phosphorothioate
  modified_base 2: mod_base = OTHER; note = 2'-O-methylguanosine-3'-phosphorothioate
  modified_base 3: mod_base = OTHER; note = 2'-O-methylguanosine-3'-phosphate
  modified_base 4: mod_base = OTHER; note = 2'-O-methyluridine-3'-phosphate
  modified_base 5: mod_base = OTHER; note = 2'-O-methylcytidine-3'-phosphate
  modified_base 6: mod_base = OTHER; note = 2'-O-docosanyl-cytidine-3'-phosphate
  modified_base 7: mod_base = OTHER; note = 2'-deoxy-2'-fluorouridine-3'-phosphate
  modified_base 8: mod_base = OTHER; note = 2'-O-methylguanosine-3'-phosphate
  modified_base 9: mod_base = OTHER; note = 2'-deoxy-2'-fluorocytidine-3'-phosphate
  modified_base 10: mod_base = OTHER; note = 2'-deoxy-2'-fluorocytidine-3'-phosphate
  modified_base 11: mod_base = OTHER; note = 2'-deoxy-2'-fluorocytidine-3'-phosphate
  modified_base 12: mod_base = OTHER; note = 2'-O-methyluridine-3'-phosphate
  modified_base 13: mod_base = OTHER; note = 2'-O-methylcytidine-3'-phosphate
  modified_base 14: mod_base = OTHER; note = 2'-O-methyladenosine-3'-phosphate
  modified_base 15: mod_base = OTHER; note = 2'-O-methylguanosine-3'-phosphate
  modified_base 16: mod_base = OTHER; note = 2'-O-methylguanosine-3'-phosphate
  modified_base 17: mod_base = OTHER; note = 2'-O-methylguanosine-3'-phosphate
  modified_base 18: mod_base = OTHER; note = 2'-O-methyladenosine-3'-phosphate
  modified_base 19: mod_base = OTHER; note = 2'-O-methyluridine-3'-phosphorothioate
  modified_base 20: mod_base = OTHER; note = 2'-O-methyluridine-3'-phosphorothioate
  modified_base 21: mod_base = OTHER; note = 2'-O-methyladenosine
aggtcctgccctcagggatta

SEQ ID NO: 11352 - RNA, 21 nt, synthetic construct
  source 1..21: mol_type = other RNA
  modified_base 1: mod_base = OTHER; note = 2'-O-methylguanosine-3'-phosphorothioate
  modified_base 2: mod_base = OTHER; note = 2'-O-methylguanosine-3'-phosphorothioate
  modified_base 3: mod_base = OTHER; note = 2'-O-methyluridine-3'-phosphate
  modified_base 4: mod_base = OTHER; note = 2'-O-methylcytidine-3'-phosphate
  modified_base 5: mod_base = OTHER; note = 2'-O-methylcytidine-3'-phosphate
  modified_base 6: mod_base = OTHER; note = 2'-O-docosanyl-uridine-3'-phosphate
  modified_base 7: mod_base = OTHER; note = 2'-deoxy-2'-fluoroguanosine-3'-phosphate
  modified_base 8: mod_base = OTHER; note = 2'-O-methylcytidine-3'-phosphate
  modified_base 9: mod_base = OTHER; note = 2'-deoxy-2'-fluorocytidine-3'-phosphate
  modified_base 10: mod_base = OTHER; note = 2'-deoxy-2'-fluorocytidine-3'-phosphate
  modified_base 11: mod_base = OTHER; note = 2'-deoxy-2'-fluorouridine-3'-phosphate
  modified_base 12: mod_base = OTHER; note = 2'-O-methylcytidine-3'-phosphate
  modified_base 13: mod_base = OTHER; note = 2'-O-methyladenosine-3'-phosphate
  modified_base 14: mod_base = OTHER; note = 2'-O-methylguanosine-3'-phosphate
  modified_base 15: mod_base = OTHER; note = 2'-O-methylguanosine-3'-phosphate
  modified_base 16: mod_base = OTHER; note = 2'-O-methylguanosine-3'-phosphate
  modified_base 17: mod_base = OTHER; note = 2'-O-methyladenosine-3'-phosphate
  modified_base 18: mod_base = OTHER; note = 2'-O-methyluridine-3'-phosphate
  modified_base 19: mod_base = OTHER; note = 2'-O-methyluridine-3'-phosphorothioate
  modified_base 20: mod_base = OTHER; note = 2'-O-methyluridine-3'-phosphorothioate
  modified_base 21: mod_base = OTHER; note = 2'-O-methyladenosine
ggtcctgccctcagggattta

SEQ ID NO: 11353 - RNA, 21 nt, synthetic construct
  source 1..21: mol_type = other RNA
  modified_base 1: mod_base = OTHER; note = 2'-O-methylguanosine-3'-phosphorothioate
  modified_base 2: mod_base = OTHER; note = 2'-O-methyluridine-3'-phosphorothioate
  modified_base 3: mod_base = OTHER; note = 2'-O-methylcytidine-3'-phosphate
  modified_base 4: mod_base = OTHER; note = 2'-O-methylcytidine-3'-phosphate
  modified_base 5: mod_base = OTHER; note = 2'-O-methyluridine-3'-phosphate
  modified_base 6: mod_base = OTHER; note = 2'-O-docosanyl-guanosine-3'-phosphate
  modified_base 7: mod_base = OTHER; note = 2'-deoxy-2'-fluorocytidine-3'-phosphate
  modified_base 8: mod_base = OTHER; note = 2'-O-methylcytidine-3'-phosphate
  modified_base 9: mod_base = OTHER; note = 2'-deoxy-2'-fluorocytidine-3'-phosphate
  modified_base 10: mod_base = OTHER; note = 2'-deoxy-2'-fluorouridine-3'-phosphate
  modified_base 11: mod_base = OTHER; note = 2'-deoxy-2'-fluorocytidine-3'-phosphate
  modified_base 12: mod_base = OTHER; note = 2'-O-methyladenosine-3'-phosphate
  modified_base 13: mod_base = OTHER; note = 2'-O-methylguanosine-3'-phosphate
  modified_base 14: mod_base = OTHER; note = 2'-O-methylguanosine-3'-phosphate
  modified_base 15: mod_base = OTHER; note = 2'-O-methylguanosine-3'-phosphate
  modified_base 16: mod_base = OTHER; note = 2'-O-methyladenosine-3'-phosphate
  modified_base 17: mod_base = OTHER; note = 2'-O-methyluridine-3'-phosphate
  modified_base 18: mod_base = OTHER; note = 2'-O-methyluridine-3'-phosphate
  modified_base 19: mod_base = OTHER; note = 2'-O-methyluridine-3'-phosphorothioate
  modified_base 20: mod_base = OTHER; note = 2'-O-methyluridine-3'-phosphorothioate
  modified_base 21: mod_base = OTHER; note = 2'-O-methyladenosine
gtcctgccctcagggatttta

SEQ ID NO: 11354 - RNA, 21 nt, synthetic construct
  source 1..21: mol_type = other RNA
  modified_base 1: mod_base = OTHER; note = 2'-O-methyluridine-3'-phosphorothioate
  modified_base 2: mod_base = OTHER; note = 2'-O-methylcytidine-3'-phosphorothioate
  modified_base 3: mod_base = OTHER; note = 2'-O-methylcytidine-3'-phosphate
  modified_base 4: mod_base = OTHER; note = 2'-O-methyluridine-3'-phosphate
  modified_base 5: mod_base = OTHER; note = 2'-O-methylguanosine-3'-phosphate
  modified_base 6: mod_base = OTHER; note = 2'-O-docosanyl-cytidine-3'-phosphate
  modified_base 7: mod_base = OTHER; note = 2'-deoxy-2'-fluorocytidine-3'-phosphate
  modified_base 8: mod_base = OTHER; note = 2'-O-methylcytidine-3'-phosphate
  modified_base 9: mod_base = OTHER; note = 2'-deoxy-2'-fluorouridine-3'-phosphate
  modified_base 10: mod_base = OTHER; note = 2'-deoxy-2'-fluorocytidine-3'-phosphate
  modified_base 11: mod_base = OTHER; note = 2'-deoxy-2'-fluoroadenosine-3'-phosphate
  modified_base 12: mod_base = OTHER; note = 2'-O-methylguanosine-3'-phosphate
  modified_base 13: mod_base = OTHER; note = 2'-O-methylguanosine-3'-phosphate
  modified_base 14: mod_base = OTHER; note = 2'-O-methylguanosine-3'-phosphate
  modified_base 15: mod_base = OTHER; note = 2'-O-methyladenosine-3'-phosphate
  modified_base 16: mod_base = OTHER; note = 2'-O-methyluridine-3'-phosphate
  modified_base 17: mod_base = OTHER; note = 2'-O-methyluridine-3'-phosphate
  modified_base 18: mod_base = OTHER; note = 2'-O-methyluridine-3'-phosphate
  modified_base 19: mod_base = OTHER; note = 2'-O-methyluridine-3'-phosphorothioate
  modified_base 20: mod_base = OTHER; note = 2'-O-methyladenosine-3'-phosphorothioate
  modified_base 21: mod_base = OTHER; note = 2'-O-methyladenosine
tcctgccctcagggattttaa

SEQ ID NO: 11355 - RNA, 21 nt, synthetic construct
  source 1..21: mol_type = other RNA
  modified_base 1: mod_base = OTHER; note = 2'-O-methylcytidine-3'-phosphorothioate
  modified_base 2: mod_base = OTHER; note = 2'-O-methylcytidine-3'-phosphorothioate
  modified_base 3: mod_base = OTHER; note = 2'-O-methyluridine-3'-phosphate
  modified_base 4: mod_base = OTHER; note = 2'-O-methylguanosine-3'-phosphate
  modified_base 5: mod_base = OTHER; note = 2'-O-methylcytidine-3'-phosphate
  modified_base 6: mod_base = OTHER; note = 2'-O-docosanyl-cytidine-3'-phosphate
  modified_base 7: mod_base = OTHER; note = 2'-deoxy-2'-fluorocytidine-3'-phosphate
  modified_base 8: mod_base = OTHER; note = 2'-O-methyluridine-3'-phosphate
  modified_base 9: mod_base = OTHER; note = 2'-deoxy-2'-fluorocytidine-3'-phosphate
  modified_base 10: mod_base = OTHER; note = 2'-deoxy-2'-fluoroadenosine-3'-phosphate
  modified_base 11: mod_base = OTHER; note = 2'-deoxy-2'-fluoroguanosine-3'-phosphate
  modified_base 12: mod_base = OTHER; note = 2'-O-methylguanosine-3'-phosphate
  modified_base 13: mod_base = OTHER; note = 2'-O-methylguanosine-3'-phosphate
  modified_base 14: mod_base = OTHER; note = 2'-O-methyladenosine-3'-phosphate
  modified_base 15: mod_base = OTHER; note = 2'-O-methyluridine-3'-phosphate
  modified_base 16: mod_base = OTHER; note = 2'-O-methyluridine-3'-phosphate
  modified_base 17: mod_base = OTHER; note = 2'-O-methyluridine-3'-phosphate
  modified_base 18: mod_base = OTHER; note = 2'-O-methyluridine-3'-phosphate
  modified_base 19: mod_base = OTHER; note = 2'-O-methyladenosine-3'-phosphorothioate
  modified_base 20: mod_base = OTHER; note = 2'-O-methyladenosine-3'-phosphorothioate
  modified_base 21: mod_base = OTHER; note = 2'-O-methyladenosine
cctgccctcagggattttaaa

SEQ ID NO: 11356 - RNA, 21 nt, synthetic construct
  source 1..21: mol_type = other RNA
  modified_base 1: mod_base = OTHER; note = 2'-O-methylcytidine-3'-phosphorothioate
  modified_base 2: mod_base = OTHER; note = 2'-O-methyluridine-3'-phosphorothioate
  modified_base 3: mod_base = OTHER; note = 2'-O-methylguanosine-3'-phosphate
  modified_base 4: mod_base = OTHER; note = 2'-O-methylcytidine-3'-phosphate
  modified_base 5: mod_base = OTHER; note = 2'-O-methylcytidine-3'-phosphate
  modified_base 6: mod_base = OTHER; note = 2'-O-docosanyl-cytidine-3'-phosphate
  modified_base 7: mod_base = OTHER; note = 2'-deoxy-2'-fluorouridine-3'-phosphate
  modified_base 8: mod_base = OTHER; note = 2'-O-methylcytidine-3'-phosphate
  modified_base 9: mod_base = OTHER; note = 2'-deoxy-2'-fluoroadenosine-3'-phosphate
  modified_base 10: mod_base = OTHER; note = 2'-deoxy-2'-fluoroguanosine-3'-phosphate
  modified_base 11: mod_base = OTHER; note = 2'-deoxy-2'-fluoroguanosine-3'-phosphate
  modified_base 12: mod_base = OTHER; note = 2'-O-methylguanosine-3'-phosphate
  modified_base 13: mod_base = OTHER; note = 2'-O-methyladenosine-3'-phosphate
  modified_base 14: mod_base = OTHER; note = 2'-O-methyluridine-3'-phosphate
  modified_base 15: mod_base = OTHER; note = 2'-O-methyluridine-3'-phosphate
  modified_base 16: mod_base = OTHER; note = 2'-O-methyluridine-3'-phosphate
  modified_base 17: mod_base = OTHER; note = 2'-O-methyluridine-3'-phosphate
  modified_base 18: mod_base = OTHER; note = 2'-O-methyladenosine-3'-phosphate
  modified_base 19: mod_base = OTHER; note = 2'-O-methyladenosine-3'-phosphorothioate
  modified_base 20: mod_base = OTHER; note = 2'-O-methyladenosine-3'-phosphorothioate
  modified_base 21: mod_base = OTHER; note = 2'-O-methyladenosine
ctgccctcagggattttaaaa

SEQ ID NO: 11357 - RNA, 21 nt, synthetic construct
  source 1..21: mol_type = other RNA
  modified_base 1: mod_base = OTHER; note = 2'-O-methyluridine-3'-phosphorothioate
  modified_base 2: mod_base = OTHER; note = 2'-O-methylguanosine-3'-phosphorothioate
  modified_base 3: mod_base = OTHER; note = 2'-O-methylcytidine-3'-phosphate
  modified_base 4: mod_base = OTHER; note = 2'-O-methylcytidine-3'-phosphate
  modified_base 5: mod_base = OTHER; note = 2'-O-methylcytidine-3'-phosphate
  modified_base 6: mod_base = OTHER; note = 2'-O-docosanyl-uridine-3'-phosphate
  modified_base 7: mod_base = OTHER; note = 2'-deoxy-2'-fluorocytidine-3'-phosphate
  modified_base 8: mod_base = OTHER; note = 2'-O-methyladenosine-3'-phosphate
  modified_base 9: mod_base = OTHER; note = 2'-deoxy-2'-fluoroguanosine-3'-phosphate
  modified_base 10: mod_base = OTHER; note = 2'-deoxy-2'-fluoroguanosine-3'-phosphate
  modified_base 11: mod_base = OTHER; note = 2'-deoxy-2'-fluoroguanosine-3'-phosphate
  modified_base 12: mod_base = OTHER; note = 2'-O-methyladenosine-3'-phosphate
  modified_base 13: mod_base = OTHER; note = 2'-O-methyluridine-3'-phosphate
  modified_base 14: mod_base = OTHER; note = 2'-O-methyluridine-3'-phosphate
  modified_base 15: mod_base = OTHER; note = 2'-O-methyluridine-3'-phosphate
  modified_base 16: mod_base = OTHER; note = 2'-O-methyluridine-3'-phosphate
  modified_base 17: mod_base = OTHER; note = 2'-O-methyladenosine-3'-phosphate
  modified_base 18: mod_base = OTHER; note = 2'-O-methyladenosine-3'-phosphate
  modified_base 19: mod_base = OTHER; note = 2'-O-methyladenosine-3'-phosphorothioate
  modified_base 20: mod_base = OTHER; note = 2'-O-methylguanosine-3'-phosphorothioate
  modified_base 21: mod_base = OTHER; note = 2'-O-methyladenosine
tgccctcagggattttaaaga

SEQ ID NO: 11358 - RNA, 21 nt, synthetic construct
  source 1..21: mol_type = other RNA
  modified_base 1: mod_base = OTHER; note = 2'-O-methylguanosine-3'-phosphorothioate
  modified_base 2: mod_base = OTHER; note = 2'-O-methylcytidine-3'-phosphorothioate
  modified_base 3: mod_base = OTHER; note = 2'-O-methylcytidine-3'-phosphate
  modified_base 4: mod_base = OTHER; note = 2'-O-methylcytidine-3'-phosphate
  modified_base 5: mod_base = OTHER; note = 2'-O-methyluridine-3'-phosphate
  modified_base 6: mod_base = OTHER; note = 2'-O-docosanyl-cytidine-3'-phosphate
  modified_base 7: mod_base = OTHER; note = 2'-deoxy-2'-fluoroadenosine-3'-phosphate
  modified_base 8: mod_base = OTHER; note = 2'-O-methylguanosine-3'-phosphate
  modified_base 9: mod_base = OTHER; note = 2'-deoxy-2'-fluoroguanosine-3'-phosphate
  modified_base 10: mod_base = OTHER; note = 2'-deoxy-2'-fluoroguanosine-3'-phosphate
  modified_base 11: mod_base = OTHER; note = 2'-deoxy-2'-fluoroadenosine-3'-phosphate
  modified_base 12: mod_base = OTHER; note = 2'-O-methyluridine-3'-phosphate
  modified_base 13: mod_base = OTHER; note = 2'-O-methyluridine-3'-phosphate
  modified_base 14: mod_base = OTHER; note = 2'-O-methyluridine-3'-phosphate
  modified_base 15: mod_base = OTHER; note = 2'-O-methyluridine-3'-phosphate
  modified_base 16: mod_base = OTHER; note = 2'-O-methyladenosine-3'-phosphate
  modified_base 17: mod_base = OTHER; note = 2'-O-methyladenosine-3'-phosphate
  modified_base 18: mod_base = OTHER; note = 2'-O-methyladenosine-3'-phosphate
  modified_base 19: mod_base = OTHER; note = 2'-O-methylguanosine-3'-phosphorothioate
  modified_base 20: mod_base = OTHER; note = 2'-O-methyluridine-3'-phosphorothioate
  modified_base 21: mod_base = OTHER; note = 2'-O-methyladenosine
gccctcagggattttaaagta

SEQ ID NO: 11359 - RNA, 21 nt, synthetic construct
  source 1..21: mol_type = other RNA
  modified_base 1: mod_base = OTHER; note = 2'-O-methylcytidine-3'-phosphorothioate
  modified_base 2: mod_base = OTHER; note = 2'-O-methylcytidine-3'-phosphorothioate
  modified_base 3: mod_base = OTHER; note = 2'-O-methylcytidine-3'-phosphate
  modified_base 4: mod_base = OTHER; note = 2'-O-methyluridine-3'-phosphate
  modified_base 5: mod_base = OTHER; note = 2'-O-methylcytidine-3'-phosphate
  modified_base 6: mod_base = OTHER; note = 2'-O-docosanyl-adenosine-3'-phosphate
  modified_base 7: mod_base = OTHER; note = 2'-deoxy-2'-fluoroguanosine-3'-phosphate
  modified_base 8: mod_base = OTHER; note = 2'-O-methylguanosine-3'-phosphate
  modified_base 9: mod_base = OTHER; note = 2'-deoxy-2'-fluoroguanosine-3'-phosphate
  modified_base 10: mod_base = OTHER; note = 2'-deoxy-2'-fluoroadenosine-3'-phosphate
  modified_base 11: mod_base = OTHER; note = 2'-deoxy-2'-fluorouridine-3'-phosphate
  modified_base 12: mod_base = OTHER; note = 2'-O-methyluridine-3'-phosphate
  modified_base 13: mod_base = OTHER; note = 2'-O-methyluridine-3'-phosphate
  modified_base 14: mod_base = OTHER; note = 2'-O-methyluridine-3'-phosphate
  modified_base 15: mod_base = OTHER; note = 2'-O-methyladenosine-3'-phosphate
  modified_base 16: mod_base = OTHER; note = 2'-O-methyladenosine-3'-phosphate
  modified_base 17: mod_base = OTHER; note = 2'-O-methyladenosine-3'-phosphate
  modified_base 18: mod_base = OTHER; note = 2'-O-methylguanosine-3'-phosphate
  modified_base 19: mod_base = OTHER; note = 2'-O-methyluridine-3'-phosphorothioate
  modified_base 20: mod_base = OTHER; note = 2'-O-methylcytidine-3'-phosphorothioate
  modified_base 21: mod_base = OTHER; note = 2'-O-methyladenosine
ccctcagggattttaaagtca

SEQ ID NO: 11360 - RNA, 21 nt, synthetic construct
  source 1..21: mol_type = other RNA
  modified_base 1: mod_base = OTHER; note = 2'-O-methyladenosine-3'-phosphorothioate
  modified_base 2: mod_base = OTHER; note = 2'-O-methylguanosine-3'-phosphorothioate
  modified_base 3: mod_base = OTHER; note = 2'-O-methylguanosine-3'-phosphate
  modified_base 4: mod_base = OTHER; note = 2'-O-methylguanosine-3'-phosphate
  modified_base 5: mod_base = OTHER; note = 2'-O-methyladenosine-3'-phosphate
  modified_base 6: mod_base = OTHER; note = 2'-O-docosanyl-uridine-3'-phosphate
  modified_base 7: mod_base = OTHER; note = 2'-deoxy-2'-fluorouridine-3'-phosphate
  modified_base 8: mod_base = OTHER; note = 2'-O-methyluridine-3'-phosphate
  modified_base 9: mod_base = OTHER; note = 2'-deoxy-2'-fluorouridine-3'-phosphate
  modified_base 10: mod_base = OTHER; note = 2'-deoxy-2'-fluoroadenosine-3'-phosphate
  modified_base 11: mod_base = OTHER; note = 2'-deoxy-2'-fluoroadenosine-3'-phosphate
  modified_base 12: mod_base = OTHER; note = 2'-O-methyladenosine-3'-phosphate
  modified_base 13: mod_base = OTHER; note = 2'-O-methylguanosine-3'-phosphate
  modified_base 14: mod_base = OTHER; note = 2'-O-methyluridine-3'-phosphate
  modified_base 15: mod_base = OTHER; note = 2'-O-methylcytidine-3'-phosphate
  modified_base 16: mod_base = OTHER; note = 2'-O-methyluridine-3'-phosphate
  modified_base 17: mod_base = OTHER; note = 2'-O-methyladenosine-3'-phosphate
  modified_base 18: mod_base = OTHER; note = 2'-O-methyladenosine-3'-phosphate
  modified_base 19: mod_base = OTHER; note = 2'-O-methyluridine-3'-phosphorothioate
  modified_base 20: mod_base = OTHER; note = 2'-O-methyluridine-3'-phosphorothioate
  modified_base 21: mod_base = OTHER; note = 2'-O-methyladenosine
agggattttaaagtctaatta

SEQ ID NO: 11361 - RNA, 21 nt, synthetic construct
  source 1..21: mol_type = other RNA
  modified_base 1: mod_base = OTHER; note = 2'-O-methylguanosine-3'-phosphorothioate
  modified_base 2: mod_base = OTHER; note = 2'-O-methylguanosine-3'-phosphorothioate
  modified_base 3: mod_base = OTHER; note = 2'-O-methylguanosine-3'-phosphate
  modified_base 4: mod_base = OTHER; note = 2'-O-methyladenosine-3'-phosphate
  modified_base 5: mod_base = OTHER; note = 2'-O-methyluridine-3'-phosphate
  modified_base 6: mod_base = OTHER; note = 2'-O-docosanyl-uridine-3'-phosphate
  modified_base 7: mod_base = OTHER; note = 2'-deoxy-2'-fluorouridine-3'-phosphate
  modified_base 8: mod_base = OTHER; note = 2'-O-methyluridine-3'-phosphate
  modified_base 9: mod_base = OTHER; note = 2'-deoxy-2'-fluoroadenosine-3'-phosphate
  modified_base 10: mod_base = OTHER; note = 2'-deoxy-2'-fluoroadenosine-3'-phosphate
  modified_base 11: mod_base = OTHER; note = 2'-deoxy-2'-fluoroadenosine-3'-phosphate
  modified_base 12: mod_base = OTHER; note = 2'-O-methylguanosine-3'-phosphate
  modified_base 13: mod_base = OTHER; note = 2'-O-methyluridine-3'-phosphate
  modified_base 14: mod_base = OTHER; note = 2'-O-methylcytidine-3'-phosphate
  modified_base 15: mod_base = OTHER; note = 2'-O-methyluridine-3'-phosphate
  modified_base 16: mod_base = OTHER; note = 2'-O-methyladenosine-3'-phosphate
  modified_base 17: mod_base = OTHER; note = 2'-O-methyladenosine-3'-phosphate
  modified_base 18: mod_base = OTHER; note = 2'-O-methyluridine-3'-phosphate
  modified_base 19: mod_base = OTHER; note = 2'-O-methyluridine-3'-phosphorothioate
  modified_base 20: mod_base = OTHER; note = 2'-O-methyluridine-3'-phosphorothioate
  modified_base 21: mod_base = OTHER; note = 2'-O-methyladenosine
gggattttaaagtctaattta

SEQ ID NO: 11362 - RNA, 21 nt, synthetic construct
  source 1..21: mol_type = other RNA
  modified_base 1: mod_base = OTHER; note = 2'-O-methyluridine-3'-phosphorothioate
  modified_base 2: mod_base = OTHER; note = 2'-O-methyluridine-3'-phosphorothioate
  modified_base 3: mod_base = OTHER; note = 2'-O-methylguanosine-3'-phosphate
  modified_base 4: mod_base = OTHER; note = 2'-O-methyladenosine-3'-phosphate
  modified_base 5: mod_base = OTHER; note = 2'-O-methylcytidine-3'-phosphate
  modified_base 6: mod_base = OTHER; note = 2'-O-docosanyl-adenosine-3'-phosphate
  modified_base 7: mod_base = OTHER; note = 2'-deoxy-2'-fluoroguanosine-3'-phosphate
  modified_base 8: mod_base = OTHER; note = 2'-O-methyladenosine-3'-phosphate
  modified_base 9: mod_base = OTHER; note = 2'-deoxy-2'-fluorouridine-3'-phosphate
  modified_base 10: mod_base = OTHER; note = 2'-deoxy-2'-fluoroadenosine-3'-phosphate
  modified_base 11: mod_base = OTHER; note = 2'-deoxy-2'-fluoroadenosine-3'-phosphate
  modified_base 12: mod_base = OTHER; note = 2'-O-methyladenosine-3'-phosphate
  modified_base 13: mod_base = OTHER; note = 2'-O-methyladenosine-3'-phosphate
  modified_base 14: mod_base = OTHER; note = 2'-O-methyluridine-3'-phosphate
  modified_base 15: mod_base = OTHER; note = 2'-O-methyladenosine-3'-phosphate
  modified_base 16: mod_base = OTHER; note = 2'-O-methylcytidine-3'-phosphate
  modified_base 17: mod_base = OTHER; note = 2'-O-methylguanosine-3'-phosphate
  modified_base 18: mod_base = OTHER; note = 2'-O-methyladenosine-3'-phosphate
  modified_base 19: mod_base = OTHER; note = 2'-O-methyladenosine-3'-phosphorothioate
  modified_base 20: mod_base = OTHER; note = 2'-O-methylguanosine-3'-phosphorothioate
  modified_base 21: mod_base = OTHER; note = 2'-O-methyladenosine
ttgacagataaaatacgaaga

SEQ ID NO: 11363 - RNA, 21 nt, synthetic construct
  source 1..21: mol_type = other RNA
  modified_base 1: mod_base = OTHER; note = 2'-O-methylguanosine-3'-phosphorothioate
  modified_base 2: mod_base = OTHER; note = 2'-O-methyladenosine-3'-phosphorothioate
  modified_base 3: mod_base = OTHER; note = 2'-O-methyladenosine-3'-phosphate
  modified_base 4: mod_base = OTHER; note = 2'-O-methylguanosine-3'-phosphate
  modified_base 5: mod_base = OTHER; note = 2'-O-methyladenosine-3'-phosphate
  modified_base 6: mod_base = OTHER; note = 2'-O-docosanyl-guanosine-3'-phosphate
  modified_base 7: mod_base = OTHER; note = 2'-deoxy-2'-fluoroadenosine-3'-phosphate
  modified_base 8: mod_base = OTHER; note = 2'-O-methyluridine-3'-phosphate
  modified_base 9: mod_base = OTHER; note = 2'-deoxy-2'-fluorouridine-3'-phosphate
  modified_base 10: mod_base = OTHER; note = 2'-deoxy-2'-fluoroadenosine-3'-phosphate
  modified_base 11: mod_base = OTHER; note = 2'-deoxy-2'-fluoroadenosine-3'-phosphate
  modified_base 12: mod_base = OTHER; note = 2'-O-methyladenosine-3'-phosphate
  modified_base 13: mod_base = OTHER; note = 2'-O-methyluridine-3'-phosphate
  modified_base 14: mod_base = OTHER; note = 2'-O-methyluridine-3'-phosphate
  modified_base 15: mod_base = OTHER; note = 2'-O-methylguanosine-3'-phosphate
  modified_base 16: mod_base = OTHER; note = 2'-O-methyladenosine-3'-phosphate
  modified_base 17: mod_base = OTHER; note = 2'-O-methylcytidine-3'-phosphate
  modified_base 18: mod_base = OTHER; note = 2'-O-methyladenosine-3'-phosphate
  modified_base 19: mod_base = OTHER; note = 2'-O-methylguanosine-3'-phosphorothioate
  modified_base 20: mod_base = OTHER; note = 2'-O-methyladenosine-3'-phosphorothioate
  modified_base 21: mod_base = OTHER; note = 2'-O-methyladenosine
gaagagattaaattgacagaa

SEQ ID NO: 11364 - RNA, 21 nt, synthetic construct
  source 1..21: mol_type = other RNA
  modified_base 1: mod_base = OTHER; note = 2'-O-methyladenosine-3'-phosphorothioate
  modified_base 2: mod_base = OTHER; note = 2'-O-methyladenosine-3'-phosphorothioate
  modified_base 3: mod_base = OTHER; note = 2'-O-methylguanosine-3'-phosphate
  modified_base 4: mod_base = OTHER; note = 2'-O-methyladenosine-3'-phosphate
  modified_base 5: mod_base = OTHER; note = 2'-O-methylguanosine-3'-phosphate
  modified_base 6: mod_base = OTHER; note = 2'-O-docosanyl-adenosine-3'-phosphate
  modified_base 7: mod_base = OTHER; note = 2'-deoxy-2'-fluorouridine-3'-phosphate
  modified_base 8: mod_base = OTHER; note = 2'-O-methyluridine-3'-phosphate
  modified_base 9: mod_base = OTHER; note = 2'-deoxy-2'-fluoroadenosine-3'-phosphate
  modified_base 10: mod_base = OTHER; note = 2'-deoxy-2'-fluoroadenosine-3'-phosphate
  modified_base 11: mod_base = OTHER; note = 2'-deoxy-2'-fluoroadenosine-3'-phosphate
  modified_base 12: mod_base = OTHER; note = 2'-O-methyluridine-3'-phosphate
  modified_base 13: mod_base = OTHER; note = 2'-O-methyluridine-3'-phosphate
  modified_base 14: mod_base = OTHER; note = 2'-O-methylguanosine-3'-phosphate
  modified_base 15: mod_base = OTHER; note = 2'-O-methyladenosine-3'-phosphate
  modified_base 16: mod_base = OTHER; note = 2'-O-methylcytidine-3'-phosphate
  modified_base 17: mod_base = OTHER; note = 2'-O-methyladenosine-3'-phosphate
  modified_base 18: mod_base = OTHER; note = 2'-O-methylguanosine-3'-phosphate
  modified_base 19: mod_base = OTHER; note = 2'-O-methyladenosine-3'-phosphorothioate
  modified_base 20: mod_base = OTHER; note = 2'-O-methyluridine-3'-phosphorothioate
  modified_base 21: mod_base = OTHER; note = 2'-O-methyladenosine
aagagattaaattgacagata

SEQ ID NO: 11365 - RNA, 21 nt, synthetic construct
  source 1..21: mol_type = other RNA
  modified_base 1: mod_base = OTHER; note = 2'-O-methyladenosine-3'-phosphorothioate
  modified_base 2: mod_base = OTHER; note = 2'-O-methylguanosine-3'-phosphorothioate
  modified_base 3: mod_base = OTHER; note = 2'-O-methyladenosine-3'-phosphate
  modified_base 4: mod_base = OTHER; note = 2'-O-methylguanosine-3'-phosphate
  modified_base 5: mod_base = OTHER; note = 2'-O-methyladenosine-3'-phosphate
  modified_base 6: mod_base = OTHER; note = 2'-O-docosanyl-uridine-3'-phosphate
  modified_base 7: mod_base = OTHER; note = 2'-deoxy-2'-fluorouridine-3'-phosphate
  modified_base 8: mod_base = OTHER; note = 2'-O-methyladenosine-3'-phosphate
  modified_base 9: mod_base = OTHER; note = 2'-deoxy-2'-fluoroadenosine-3'-phosphate
  modified_base 10: mod_base = OTHER; note = 2'-deoxy-2'-fluoroadenosine-3'-phosphate
  modified_base 11: mod_base = OTHER; note = 2'-deoxy-2'-fluorouridine-3'-phosphate
  modified_base 12: mod_base = OTHER; note = 2'-O-methyluridine-3'-phosphate
  modified_base 13: mod_base = OTHER; note = 2'-O-methylguanosine-3'-phosphate
  modified_base 14: mod_base = OTHER; note = 2'-O-methyladenosine-3'-phosphate
  modified_base 15: mod_base = OTHER; note = 2'-O-methylcytidine-3'-phosphate
  modified_base 16: mod_base = OTHER; note = 2'-O-methyladenosine-3'-phosphate
  modified_base 17: mod_base = OTHER; note = 2'-O-methylguanosine-3'-phosphate
  modified_base 18: mod_base = OTHER; note = 2'-O-methyladenosine-3'-phosphate
  modified_base 19: mod_base = OTHER; note = 2'-O-methyluridine-3'-phosphorothioate
  modified_base 20: mod_base = OTHER; note = 2'-O-methyladenosine-3'-phosphorothioate
  modified_base 21: mod_base = OTHER; note = 2'-O-methyladenosine
agagattaaattgacagataa

SEQ ID NO: 11366 - RNA, 21 nt, synthetic construct
  source 1..21: mol_type = other RNA
  modified_base 1: mod_base = OTHER; note = 2'-O-methyluridine-3'-phosphorothioate
  modified_base 2: mod_base = OTHER; note = 2'-O-methylguanosine-3'-phosphorothioate
  modified_base 3: mod_base = OTHER; note = 2'-O-methyladenosine-3'-phosphate
  modified_base 4: mod_base = OTHER; note = 2'-O-methylcytidine-3'-phosphate
  modified_base 5: mod_base = OTHER; note = 2'-O-methyladenosine-3'-phosphate
  modified_base 6: mod_base = OTHER; note = 2'-O-docosanyl-guanosine-3'-phosphate
  modified_base 7: mod_base = OTHER; note = 2'-deoxy-2'-fluoroadenosine-3'-phosphate
  modified_base 8: mod_base = OTHER; note = 2'-O-methyluridine-3'-phosphate
  modified_base 9: mod_base = OTHER; note = 2'-deoxy-2'-fluoroadenosine-3'-phosphate
  modified_base 10: mod_base = OTHER; note = 2'-deoxy-2'-fluoroadenosine-3'-phosphate
  modified_base 11: mod_base = OTHER; note = 2'-deoxy-2'-fluoroadenosine-3'-phosphate
  modified_base 12: mod_base = OTHER; note = 2'-O-methyladenosine-3'-phosphate
  modified_base 13: mod_base = OTHER; note = 2'-O-methyluridine-3'-phosphate
  modified_base 14: mod_base = OTHER; note = 2'-O-methyladenosine-3'-phosphate
  modified_base 15: mod_base = OTHER; note = 2'-O-methylcytidine-3'-phosphate
  modified_base 16: mod_base = OTHER; note = 2'-O-methylguanosine-3'-phosphate
  modified_base 17: mod_base = OTHER; note = 2'-O-methyladenosine-3'-phosphate
  modified_base 18: mod_base = OTHER; note = 2'-O-methyladenosine-3'-phosphate
  modified_base 19: mod_base = OTHER; note = 2'-O-methylguanosine-3'-phosphorothioate
  modified_base 20: mod_base = OTHER; note = 2'-O-methyluridine-3'-phosphorothioate
  modified_base 21: mod_base = OTHER; note = 2'-O-methyladenosine
tgacagataaaatacgaagta

SEQ ID NO: 11367 - RNA, 21 nt, synthetic construct
  source 1..21: mol_type = other RNA
  modified_base 1: mod_base = OTHER; note = 2'-O-methylguanosine-3'-phosphorothioate
  modified_base 2: mod_base = OTHER; note = 2'-O-methyladenosine-3'-phosphorothioate
  modified_base 3: mod_base = OTHER; note = 2'-O-methylcytidine-3'-phosphate
  modified_base 4: mod_base = OTHER; note = 2'-O-methyladenosine-3'-phosphate
  modified_base 5: mod_base = OTHER; note = 2'-O-methylguanosine-3'-phosphate
  modified_base 6: mod_base = OTHER; note = 2'-O-docosanyl-adenosine-3'-phosphate
  modified_base 7: mod_base = OTHER; note = 2'-deoxy-2'-fluorouridine-3'-phosphate
  modified_base 8: mod_base = OTHER; note = 2'-O-methyladenosine-3'-phosphate
  modified_base 9: mod_base = OTHER; note = 2'-deoxy-2'-fluoroadenosine-3'-phosphate
  modified_base 10: mod_base = OTHER; note = 2'-deoxy-2'-fluoroadenosine-3'-phosphate
  modified_base 11: mod_base = OTHER; note = 2'-deoxy-2'-fluoroadenosine-3'-phosphate
  modified_base 12: mod_base = OTHER; note = 2'-O-methyluridine-3'-phosphate
  modified_base 13: mod_base = OTHER; note = 2'-O-methyladenosine-3'-phosphate
  modified_base 14: mod_base = OTHER; note = 2'-O-methylcytidine-3'-phosphate
  modified_base 15: mod_base = OTHER; note = 2'-O-methylguanosine-3'-phosphate
  modified_base 16: mod_base = OTHER; note = 2'-O-methyladenosine-3'-phosphate
  modified_base 17: mod_base = OTHER; note = 2'-O-methyladenosine-3'-phosphate
  modified_base 18: mod_base = OTHER; note = 2'-O-methylguanosine-3'-phosphate
  modified_base 19: mod_base = OTHER; note = 2'-O-methyluridine-3'-phosphorothioate
  modified_base 20: mod_base = OTHER; note = 2'-O-methylguanosine-3'-phosphorothioate
  modified_base 21: mod_base = OTHER; note = 2'-O-methyladenosine
gacagataaaatacgaagtga

SEQ ID NO: 11368 - RNA, 21 nt, synthetic construct
  source 1..21: mol_type = other RNA
  modified_base 1: mod_base = OTHER; note = 2'-O-methyladenosine-3'-phosphorothioate
  modified_base 2: mod_base = OTHER; note = 2'-O-methylcytidine-3'-phosphorothioate
  modified_base 3: mod_base = OTHER; note = 2'-O-methyladenosine-3'-phosphate
  modified_base 4: mod_base = OTHER; note = 2'-O-methylguanosine-3'-phosphate
  modified_base 5: mod_base = OTHER; note = 2'-O-methyladenosine-3'-phosphate
  modified_base 6: mod_base = OTHER; note = 2'-O-docosanyl-uridine-3'-phosphate
  modified_base 7: mod_base = OTHER; note = 2'-deoxy-2'-fluoroadenosine-3'-phosphate
  modified_base 8: mod_base = OTHER; note = 2'-O-methyladenosine-3'-phosphate
  modified_base 9: mod_base = OTHER; note = 2'-deoxy-2'-fluoroadenosine-3'-phosphate
  modified_base 10: mod_base = OTHER; note = 2'-deoxy-2'-fluoroadenosine-3'-phosphate
  modified_base 11: mod_base = OTHER; note = 2'-deoxy-2'-fluorouridine-3'-phosphate
  modified_base 12: mod_base = OTHER; note = 2'-O-methyladenosine-3'-phosphate
  modified_base 13: mod_base = OTHER; note = 2'-O-methylcytidine-3'-phosphate
  modified_base 14: mod_base = OTHER; note = 2'-O-methylguanosine-3'-phosphate
  modified_base 15: mod_base = OTHER; note = 2'-O-methyladenosine-3'-phosphate
  modified_base 16: mod_base = OTHER; note = 2'-O-methyladenosine-3'-phosphate
  modified_base 17: mod_base = OTHER; note = 2'-O-methylguanosine-3'-phosphate
  modified_base 18: mod_base = OTHER; note = 2'-O-methyluridine-3'-phosphate
  modified_base 19: mod_base = OTHER; note = 2'-O-methylguanosine-3'-phosphorothioate
  modified_base 20: mod_base = OTHER; note = 2'-O-methylguanosine-3'-phosphorothioate
  modified_base 21: mod_base = OTHER; note = 2'-O-methyladenosine
acagataaaatacgaagtgga

SEQ ID NO: 11369 - RNA, 21 nt, synthetic construct
  source 1..21: mol_type = other RNA
  modified_base 1: mod_base = OTHER; note = 2'-O-methylguanosine-3'-phosphorothioate
  modified_base 2: mod_base = OTHER; note = 2'-O-methyladenosine-3'-phosphorothioate
  modified_base 3: mod_base = OTHER; note = 2'-O-methyladenosine-3'-phosphate
  modified_base 4: mod_base = OTHER; note = 2'-O-methylguanosine-3'-phosphate
  modified_base 5: mod_base = OTHER; note = 2'-O-methyluridine-3'-phosphate
  modified_base 6: mod_base = OTHER; note = 2'-O-docosanyl-guanosine-3'-phosphate
  modified_base 7: mod_base = OTHER; note = 2'-deoxy-2'-fluoroguanosine-3'-phosphate
  modified_base 8: mod_base = OTHER; note = 2'-O-methylguanosine-3'-phosphate
  modified_base 9: mod_base = OTHER; note = 2'-deoxy-2'-fluoroadenosine-3'-phosphate
  modified_base 10: mod_base = OTHER; note = 2'-deoxy-2'-fluorouridine-3'-phosphate
  modified_base 11: mod_base = OTHER; note = 2'-deoxy-2'-fluoroguanosine-3'-phosphate
  modified_base 12: mod_base = OTHER; note = 2'-O-methyluridine-3'-phosphate
  modified_base 13: mod_base = OTHER; note = 2'-O-methylcytidine-3'-phosphate
  modified_base 14: mod_base = OTHER; note = 2'-O-methyluridine-3'-phosphate
  modified_base 15: mod_base = OTHER; note = 2'-O-methyluridine-3'-phosphate
  modified_base 16: mod_base = OTHER; note = 2'-O-methylguanosine-3'-phosphate
  modified_base 17: mod_base = OTHER; note = 2'-O-methyladenosine-3'-phosphate
  modified_base 18: mod_base = OTHER; note = 2'-O-methylguanosine-3'-phosphate
  modified_base 19: mod_base = OTHER; note = 2'-O-methyluridine-3'-phosphorothioate
  modified_base 20: mod_base = OTHER; note = 2'-O-methyluridine-3'-phosphorothioate
  modified_base 21: mod_base = OTHER; note = 2'-O-methyladenosine
gaagtgggatgtcttgagtta

SEQ ID NO: 11370 - RNA, 21 nt, synthetic construct
  source 1..21: mol_type = other RNA
  modified_base 1: mod_base = OTHER; note = 2'-O-methyladenosine-3'-phosphorothioate
  modified_base 2: mod_base = OTHER; note = 2'-O-methylguanosine-3'-phosphorothioate
  modified_base 3: mod_base = OTHER; note = 2'-O-methyluridine-3'-phosphate
  modified_base 4: mod_base = OTHER; note = 2'-O-methylguanosine-3'-phosphate
  modified_base 5: mod_base = OTHER; note = 2'-O-methylguanosine-3'-phosphate
  modified_base 6: mod_base = OTHER; note = 2'-O-docosanyl-guanosine-3'-phosphate
  modified_base 7: mod_base = OTHER; note = 2'-deoxy-2'-fluoroadenosine-3'-phosphate
  modified_base 8: mod_base = OTHER; note = 2'-O-methyluridine-3'-phosphate
  modified_base 9: mod_base = OTHER; note = 2'-deoxy-2'-fluoroguanosine-3'-phosphate
  modified_base 10: mod_base = OTHER; note = 2'-deoxy-2'-fluorouridine-3'-phosphate
  modified_base 11: mod_base = OTHER; note = 2'-deoxy-2'-fluorocytidine-3'-phosphate
  modified_base 12: mod_base = OTHER; note = 2'-O-methyluridine-3'-phosphate
  modified_base 13: mod_base = OTHER; note = 2'-O-methyluridine-3'-phosphate
  modified_base 14: mod_base = OTHER; note = 2'-O-methylguanosine-3'-phosphate
  modified_base 15: mod_base = OTHER; note = 2'-O-methyladenosine-3'-phosphate
  modified_base 16: mod_base = OTHER; note = 2'-O-methylguanosine-3'-phosphate
  modified_base 17: mod_base = OTHER; note = 2'-O-methyluridine-3'-phosphate
  modified_base 18: mod_base = OTHER; note = 2'-O-methyluridine-3'-phosphate
  modified_base 19: mod_base = OTHER; note = 2'-O-methylcytidine-3'-phosphorothioate
  modified_base 20: mod_base = OTHER; note = 2'-O-methyluridine-3'-phosphorothioate
  modified_base 21: mod_base = OTHER; note = 2'-O-methyladenosine
agtgggatgtcttgagttcta

SEQ ID NO: 11371 - RNA, 21 nt, synthetic construct
  source 1..21: mol_type = other RNA
  modified_base 1: mod_base = OTHER; note = 2'-O-methylguanosine-3'-phosphorothioate
  modified_base 2: mod_base = OTHER; note = 2'-O-methyladenosine-3'-phosphorothioate
  modified_base 3: mod_base = OTHER; note = 2'-O-methyluridine-3'-phosphate
  modified_base 4: mod_base = OTHER; note = 2'-O-methylguanosine-3'-phosphate
  modified_base 5: mod_base = OTHER; note = 2'-O-methyluridine-3'-phosphate
  modified_base 6: mod_base = OTHER; note = 2'-O-docosanyl-cytidine-3'-phosphate
  modified_base 7: mod_base = OTHER; note = 2'-deoxy-2'-fluorouridine-3'-phosphate
  modified_base 8: mod_base = OTHER; note = 2'-O-methyluridine-3'-phosphate
  modified_base 9: mod_base = OTHER; note = 2'-deoxy-2'-fluoroguanosine-3'-phosphate
  modified_base 10: mod_base = OTHER; note = 2'-deoxy-2'-fluoroadenosine-3'-phosphate
  modified_base 11: mod_base = OTHER; note = 2'-deoxy-2'-fluoroguanosine-3'-phosphate
  modified_base 12: mod_base = OTHER; note = 2'-O-methyluridine-3'-phosphate
  modified_base 13: mod_base = OTHER; note = 2'-O-methyluridine-3'-phosphate
  modified_base 14: mod_base = OTHER; note = 2'-O-methylcytidine-3'-phosphate
  modified_base 15: mod_base = OTHER; note = 2'-O-methyluridine-3'-phosphate
  modified_base 16: mod_base = OTHER; note = 2'-O-methylguanosine-3'-phosphate
  modified_base 17: mod_base = OTHER; note = 2'-O-methylcytidine-3'-phosphate
  modified_base 18: mod_base = OTHER; note = 2'-O-methyladenosine-3'-phosphate
  modified_base 19: mod_base = OTHER; note = 2'-O-methyluridine-3'-phosphorothioate
  modified_base 20: mod_base = OTHER; note = 2'-O-methylguanosine-3'-phosphorothioate
  modified_base 21: mod_base = OTHER; note = 2'-O-methyladenosine
gatgtcttgagttctgcatga

SEQ ID NO: 11372 - RNA, 21 nt, synthetic construct
  source 1..21: mol_type = other RNA
  modified_base 1: mod_base = OTHER; note = 2'-O-methyladenosine-3'-phosphorothioate
  modified_base 2: mod_base = OTHER; note = 2'-O-methylguanosine-3'-phosphorothioate
  modified_base 3: mod_base = OTHER; note = 2'-O-methyluridine-3'-phosphate
  modified_base 4: mod_base = OTHER; note = 2'-O-methylguanosine-3'-phosphate
  modified_base 5: mod_base = OTHER; note = 2'-O-methylguanosine-3'-phosphate
  modified_base 6: mod_base = OTHER; note = 2'-O-docosanyl-guanosine-3'-phosphate
  modified_base 7: mod_base = OTHER; note = 2'-deoxy-2'-fluorouridine-3'-phosphate
  modified_base 8: mod_base = OTHER; note = 2'-O-methyluridine-3'-phosphate
  modified_base 9: mod_base = OTHER; note = 2'-deoxy-2'-fluorouridine-3'-phosphate
  modified_base 10: mod_base = OTHER; note = 2'-deoxy-2'-fluorocytidine-3'-phosphate
  modified_base 11: mod_base = OTHER; note = 2'-deoxy-2'-fluorouridine-3'-phosphate
  modified_base 12: mod_base = OTHER; note = 2'-O-methyladenosine-3'-phosphate
  modified_base 13: mod_base = OTHER; note = 2'-O-methylguanosine-3'-phosphate
  modified_base 14: mod_base = OTHER; note = 2'-O-methylguanosine-3'-phosphate
  modified_base 15: mod_base = OTHER; note = 2'-O-methyladenosine-3'-phosphate
  modified_base 16: mod_base = OTHER; note = 2'-O-methyluridine-3'-phosphate
  modified_base 17: mod_base = OTHER; note = 2'-O-methyladenosine-3'-phosphate
  modified_base 18: mod_base = OTHER; note = 2'-O-methylguanosine-3'-phosphate
  modified_base 19: mod_base = OTHER; note = 2'-O-methylguanosine-3'-phosphorothioate
  modified_base 20: mod_base = OTHER; note = 2'-O-methyluridine-3'-phosphorothioate
  modified_base 21: mod_base = OTHER; note = 2'-O-methyladenosine
agtgggtttctaggataggta

SEQ ID NO: 11373 - RNA, 21 nt, synthetic construct
  source 1..21: mol_type = other RNA
  modified_base 1: mod_base = OTHER; note = 2'-O-methylguanosine-3'-phosphorothioate
  modified_base 2: mod_base = OTHER; note = 2'-O-methyluridine-3'-phosphorothioate
  modified_base 3: mod_base = OTHER; note = 2'-O-methylguanosine-3'-phosphate
  modified_base 4: mod_base = OTHER; note = 2'-O-methylguanosine-3'-phosphate
  modified_base 5: mod_base = OTHER; note = 2'-O-methylguanosine-3'-phosphate
  modified_base 6: mod_base = OTHER; note = 2'-O-docosanyl-uridine-3'-phosphate
  modified_base 7: mod_base = OTHER; note = 2'-deoxy-2'-fluorouridine-3'-phosphate
  modified_base 8: mod_base = OTHER; note = 2'-O-methyluridine-3'-phosphate
  modified_base 9: mod_base = OTHER; note = 2'-deoxy-2'-fluorocytidine-3'-phosphate
  modified_base 10: mod_base = OTHER; note = 2'-deoxy-2'-fluorouridine-3'-phosphate
  modified_base 11: mod_base = OTHER; note = 2'-deoxy-2'-fluoroadenosine-3'-phosphate
  modified_base 12: mod_base = OTHER; note = 2'-O-methylguanosine-3'-phosphate
  modified_base 13: mod_base = OTHER; note = 2'-O-methylguanosine-3'-phosphate
  modified_base 14: mod_base = OTHER; note = 2'-O-methyladenosine-3'-phosphate
  modified_base 15: mod_base = OTHER; note = 2'-O-methyluridine-3'-phosphate
  modified_base 16: mod_base = OTHER; note = 2'-O-methyladenosine-3'-phosphate
  modified_base 17: mod_base = OTHER; note = 2'-O-methylguanosine-3'-phosphate
  modified_base 18: mod_base = OTHER; note = 2'-O-methylguanosine-3'-phosphate
  modified_base 19: mod_base = OTHER; note = 2'-O-methyluridine-3'-phosphorothioate
  modified_base 20: mod_base = OTHER; note = 2'-O-methylcytidine-3'-phosphorothioate
  modified_base 21: mod_base = OTHER; note = 2'-O-methyladenosine
gtgggtttctaggataggtca

SEQ ID NO: 11374 - RNA, 21 nt, synthetic construct
  source 1..21: mol_type = other RNA
  modified_base 1: mod_base = OTHER; note = 2'-O-methyluridine-3'-phosphorothioate
  modified_base 2: mod_base = OTHER; note = 2'-O-methylguanosine-3'-phosphorothioate
  modified_base 3: mod_base = OTHER; note = 2'-O-methylguanosine-3'-phosphate
  modified_base 4: mod_base = OTHER; note = 2'-O-methylguanosine-3'-phosphate
  modified_base 5: mod_base = OTHER; note = 2'-O-methyluridine-3'-phosphate
  modified_base 6: mod_base = OTHER; note = 2'-O-docosanyl-uridine-3'-phosphate
  modified_base 7: mod_base = OTHER; note = 2'-deoxy-2'-fluorouridine-3'-phosphate
  modified_base 8: mod_base = OTHER; note = 2'-O-methylcytidine-3'-phosphate
  modified_base 9: mod_base = OTHER; note = 2'-deoxy-2'-fluorouridine-3'-phosphate
  modified_base 10: mod_base = OTHER; note = 2'-deoxy-2'-fluoroadenosine-3'-phosphate
  modified_base 11: mod_base = OTHER; note = 2'-deoxy-2'-fluoroguanosine-3'-phosphate
  modified_base 12: mod_base = OTHER; note = 2'-O-methylguanosine-3'-phosphate
  modified_base 13: mod_base = OTHER; note = 2'-O-methyladenosine-3'-phosphate
  modified_base 14: mod_base = OTHER; note = 2'-O-methyluridine-3'-phosphate
  modified_base 15: mod_base = OTHER; note = 2'-O-methyladenosine-3'-phosphate
  modified_base 16: mod_base = OTHER; note = 2'-O-methylguanosine-3'-phosphate
  modified_base 17: mod_base = OTHER; note = 2'-O-methylguanosine-3'-phosphate
  modified_base 18: mod_base = OTHER; note = 2'-O-methyluridine-3'-phosphate
  modified_base 19: mod_base = OTHER; note = 2'-O-methylcytidine-3'-phosphorothioate
  modified_base 20: mod_base = OTHER; note = 2'-O-methyluridine-3'-phosphorothioate
  modified_base 21: mod_base = OTHER; note = 2'-O-methyladenosine
tgggtttctaggataggtcta

SEQ ID NO: 11375 - RNA, 21 nt, synthetic construct
  source 1..21: mol_type = other RNA
  modified_base 1: mod_base = OTHER; note = 2'-O-methylguanosine-3'-phosphorothioate
  modified_base 2: mod_base = OTHER; note = 2'-O-methylguanosine-3'-phosphorothioate
  modified_base 3: mod_base = OTHER; note = 2'-O-methylguanosine-3'-phosphate
  modified_base 4: mod_base = OTHER; note = 2'-O-methyluridine-3'-phosphate
  modified_base 5: mod_base = OTHER; note = 2'-O-methyluridine-3'-phosphate
  modified_base 6: mod_base = OTHER; note = 2'-O-docosanyl-uridine-3'-phosphate
  modified_base 7: mod_base = OTHER; note = 2'-deoxy-2'-fluorocytidine-3'-phosphate
  modified_base 8: mod_base = OTHER; note = 2'-O-methyluridine-3'-phosphate
  modified_base 9: mod_base = OTHER; note = 2'-deoxy-2'-fluoroadenosine-3'-phosphate
  modified_base 10: mod_base = OTHER; note = 2'-deoxy-2'-fluoroguanosine-3'-phosphate
  modified_base 11: mod_base = OTHER; note = 2'-deoxy-2'-fluoroguanosine-3'-phosphate
  modified_base 12: mod_base = OTHER; note = 2'-O-methyladenosine-3'-phosphate
  modified_base 13: mod_base = OTHER; note = 2'-O-methyluridine-3'-phosphate
  modified_base 14: mod_base = OTHER; note = 2'-O-methyladenosine-3'-phosphate
  modified_base 15: mod_base = OTHER; note = 2'-O-methylguanosine-3'-phosphate
  modified_base 16: mod_base = OTHER; note = 2'-O-methylguanosine-3'-phosphate
  modified_base 17: mod_base = OTHER; note = 2'-O-methyluridine-3'-phosphate
  modified_base 18: mod_base = OTHER; note = 2'-O-methylcytidine-3'-phosphate
  modified_base 19: mod_base = OTHER; note = 2'-O-methyluridine-3'-phosphorothioate
  modified_base 20: mod_base = OTHER; note = 2'-O-methylguanosine-3'-phosphorothioate
  modified_base 21: mod_base = OTHER; note = 2'-O-methyladenosine
gggtttctaggataggtctga

SEQ ID NO: 11376 - RNA, 21 nt, synthetic construct
  source 1..21: mol_type = other RNA
  modified_base 1: mod_base = OTHER; note = 2'-O-methylguanosine-3'-phosphorothioate
  modified_base 2: mod_base = OTHER; note = 2'-O-methylguanosine-3'-phosphorothioate
  modified_base 3: mod_base = OTHER; note = 2'-O-methyluridine-3'-phosphate
  modified_base 4: mod_base = OTHER; note = 2'-O-methyluridine-3'-phosphate
  modified_base 5: mod_base = OTHER; note = 2'-O-methyluridine-3'-phosphate
  modified_base 6: mod_base = OTHER; note = 2'-O-docosanyl-cytidine-3'-phosphate
  modified_base 7: mod_base = OTHER; note = 2'-deoxy-2'-fluorouridine-3'-phosphate
  modified_base 8: mod_base = OTHER; note = 2'-O-methyladenosine-3'-phosphate
  modified_base 9: mod_base = OTHER; note = 2'-deoxy-2'-fluoroguanosine-3'-phosphate
  modified_base 10: mod_base = OTHER; note = 2'-deoxy-2'-fluoroguanosine-3'-phosphate
  modified_base 11: mod_base = OTHER; note = 2'-deoxy-2'-fluoroadenosine-3'-phosphate
  modified_base 12: mod_base = OTHER; note = 2'-O-methyluridine-3'-phosphate
  modified_base 13: mod_base = OTHER; note = 2'-O-methyladenosine-3'-phosphate
  modified_base 14: mod_base = OTHER; note = 2'-O-methylguanosine-3'-phosphate
  modified_base 15: mod_base = OTHER; note = 2'-O-methylguanosine-3'-phosphate
  modified_base 16: mod_base = OTHER; note = 2'-O-methyluridine-3'-phosphate
  modified_base 17: mod_base = OTHER; note = 2'-O-methylcytidine-3'-phosphate
  modified_base 18: mod_base = OTHER; note = 2'-O-methyluridine-3'-phosphate
  modified_base 19: mod_base = OTHER; note = 2'-O-methylguanosine-3'-phosphorothioate
  modified_base 20: mod_base = OTHER; note = 2'-O-methyladenosine-3'-phosphorothioate
  modified_base 21: mod_base = OTHER; note = 2'-O-methyladenosine
ggtttctaggataggtctgaa

SEQ ID NO: 11377 - RNA, 21 nt, synthetic construct
  source 1..21: mol_type = other RNA
  modified_base 1: mod_base = OTHER; note = 2'-O-methylguanosine-3'-phosphorothioate
  modified_base 2: mod_base = OTHER; note = 2'-O-methyluridine-3'-phosphorothioate
  modified_base 3: mod_base = OTHER; note = 2'-O-methyluridine-3'-phosphate
  modified_base 4: mod_base = OTHER; note = 2'-O-methyluridine-3'-phosphate
  modified_base 5: mod_base = OTHER; note = 2'-O-methylcytidine-3'-phosphate
  modified_base 6: mod_base = OTHER; note = 2'-O-docosanyl-uridine-3'-phosphate
  modified_base 7: mod_base = OTHER; note = 2'-deoxy-2'-fluoroadenosine-3'-phosphate
  modified_base 8: mod_base = OTHER; note = 2'-O-methylguanosine-3'-phosphate
  modified_base 9: mod_base = OTHER; note = 2'-deoxy-2'-fluoroguanosine-3'-phosphate
  modified_base 10: mod_base = OTHER; note = 2'-deoxy-2'-fluoroadenosine-3'-phosphate
  modified_base 11: mod_base = OTHER; note = 2'-deoxy-2'-fluorouridine-3'-phosphate
  modified_base 12: mod_base = OTHER; note = 2'-O-methyladenosine-3'-phosphate
  modified_base 13: mod_base = OTHER; note = 2'-O-methylguanosine-3'-phosphate
  modified_base 14: mod_base = OTHER; note = 2'-O-methylguanosine-3'-phosphate
  modified_base 15: mod_base = OTHER; note = 2'-O-methyluridine-3'-phosphate
  modified_base 16: mod_base = OTHER; note = 2'-O-methylcytidine-3'-phosphate
  modified_base 17: mod_base = OTHER; note = 2'-O-methyluridine-3'-phosphate
  modified_base 18: mod_base = OTHER; note = 2'-O-methylguanosine-3'-phosphate
  modified_base 19: mod_base = OTHER; note = 2'-O-methyladenosine-3'-phosphorothioate
  modified_base 20: mod_base = OTHER; note = 2'-O-methyladenosine-3'-phosphorothioate
  modified_base 21: mod_base = OTHER; note = 2'-O-methyladenosine
gtttctaggataggtctgaaa

SEQ ID NO: 11378 - RNA, 21 nt, synthetic construct
  source 1..21: mol_type = other RNA
  modified_base 1: mod_base = OTHER; note = 2'-O-methyluridine-3'-phosphorothioate
  modified_base 2: mod_base = OTHER; note = 2'-O-methyluridine-3'-phosphorothioate
  modified_base 3: mod_base = OTHER; note = 2'-O-methyluridine-3'-phosphate
  modified_base 4: mod_base = OTHER; note = 2'-O-methylcytidine-3'-phosphate
  modified_base 5: mod_base = OTHER; note = 2'-O-methyluridine-3'-phosphate
  modified_base 6: mod_base = OTHER; note = 2'-O-docosanyl-adenosine-3'-phosphate
  modified_base 7: mod_base = OTHER; note = 2'-deoxy-2'-fluoroguanosine-3'-phosphate
  modified_base 8: mod_base = OTHER; note = 2'-O-methylguanosine-3'-phosphate
  modified_base 9: mod_base = OTHER; note = 2'-deoxy-2'-fluoroadenosine-3'-phosphate
  modified_base 10: mod_base = OTHER; note = 2'-deoxy-2'-fluorouridine-3'-phosphate
  modified_base 11: mod_base = OTHER; note = 2'-deoxy-2'-fluoroadenosine-3'-phosphate
  modified_base 12: mod_base = OTHER; note = 2'-O-methylguanosine-3'-phosphate
  modified_base 13: mod_base = OTHER; note = 2'-O-methylguanosine-3'-phosphate
  modified_base 14: mod_base = OTHER; note = 2'-O-methyluridine-3'-phosphate
  modified_base 15: mod_base = OTHER; note = 2'-O-methylcytidine-3'-phosphate
  modified_base 16: mod_base = OTHER; note = 2'-O-methyluridine-3'-phosphate
  modified_base 17: mod_base = OTHER; note = 2'-O-methylguanosine-3'-phosphate
  modified_base 18: mod_base = OTHER; note = 2'-O-methyladenosine-3'-phosphate
  modified_base 19: mod_base = OTHER; note = 2'-O-methyladenosine-3'-phosphorothioate
  modified_base 20: mod_base = OTHER; note = 2'-O-methyladenosine-3'-phosphorothioate
  modified_base 21: mod_base = OTHER; note = 2'-O-methyladenosine
tttctaggataggtctgaaaa

SEQ ID NO: 11379 - RNA, 21 nt, synthetic construct
  source 1..21: mol_type = other RNA
  modified_base 1: mod_base = OTHER; note = 2'-O-methyluridine-3'-phosphorothioate
  modified_base 2: mod_base = OTHER; note = 2'-O-methyluridine-3'-phosphorothioate
  modified_base 3: mod_base = OTHER; note = 2'-O-methylcytidine-3'-phosphate
  modified_base 4: mod_base = OTHER; note = 2'-O-methyluridine-3'-phosphate
  modified_base 5: mod_base = OTHER; note = 2'-O-methyladenosine-3'-phosphate
  modified_base 6: mod_base = OTHER; note = 2'-O-docosanyl-guanosine-3'-phosphate
  modified_base 7: mod_base = OTHER; note = 2'-deoxy-2'-fluoroguanosine-3'-phosphate
  modified_base 8: mod_base = OTHER; note = 2'-O-methyladenosine-3'-phosphate
  modified_base 9: mod_base = OTHER; note = 2'-deoxy-2'-fluorouridine-3'-phosphate
  modified_base 10: mod_base = OTHER; note = 2'-deoxy-2'-fluoroadenosine-3'-phosphate
  modified_base 11: mod_base = OTHER; note = 2'-deoxy-2'-fluoroguanosine-3'-phosphate
  modified_base 12: mod_base = OTHER; note = 2'-O-methylguanosine-3'-phosphate
  modified_base 13: mod_base = OTHER; note = 2'-O-methyluridine-3'-phosphate
  modified_base 14: mod_base = OTHER; note = 2'-O-methylcytidine-3'-phosphate
  modified_base 15: mod_base = OTHER; note = 2'-O-methyluridine-3'-phosphate
  modified_base 16: mod_base = OTHER; note = 2'-O-methylguanosine-3'-phosphate
  modified_base 17: mod_base = OTHER; note = 2'-O-methyladenosine-3'-phosphate
  modified_base 18: mod_base = OTHER; note = 2'-O-methyladenosine-3'-phosphate
  modified_base 19: mod_base = OTHER; note = 2'-O-methyladenosine-3'-phosphorothioate
  modified_base 20: mod_base = OTHER; note = 2'-O-methyladenosine-3'-phosphorothioate
  modified_base 21: mod_base = OTHER; note = 2'-O-methyladenosine
ttctaggataggtctgaaaaa

SEQ ID NO: 11380 - RNA, 21 nt, synthetic construct
  source 1..21: mol_type = other RNA
  modified_base 1: mod_base = OTHER; note = 2'-O-methyluridine-3'-phosphorothioate
  modified_base 2: mod_base = OTHER; note = 2'-O-methylcytidine-3'-phosphorothioate
  modified_base 3: mod_base = OTHER; note = 2'-O-methyluridine-3'-phosphate
  modified_base 4: mod_base = OTHER; note = 2'-O-methyladenosine-3'-phosphate
  modified_base 5: mod_base = OTHER; note = 2'-O-methylguanosine-3'-phosphate
  modified_base 6: mod_base = OTHER; note = 2'-O-docosanyl-guanosine-3'-phosphate
  modified_base 7: mod_base = OTHER; note = 2'-deoxy-2'-fluoroadenosine-3'-phosphate
  modified_base 8: mod_base = OTHER; note = 2'-O-methyluridine-3'-phosphate
  modified_base 9: mod_base = OTHER; note = 2'-deoxy-2'-fluoroadenosine-3'-phosphate
  modified_base 10: mod_base = OTHER; note = 2'-deoxy-2'-fluoroguanosine-3'-phosphate
  modified_base 11: mod_base = OTHER; note = 2'-deoxy-2'-fluoroguanosine-3'-phosphate
  modified_base 12: mod_base = OTHER; note = 2'-O-methyluridine-3'-phosphate
  modified_base 13: mod_base = OTHER; note = 2'-O-methylcytidine-3'-phosphate
  modified_base 14: mod_base = OTHER; note = 2'-O-methyluridine-3'-phosphate
  modified_base 15: mod_base = OTHER; note = 2'-O-methylguanosine-3'-phosphate
  modified_base 16: mod_base = OTHER; note = 2'-O-methyladenosine-3'-phosphate
  modified_base 17: mod_base = OTHER; note = 2'-O-methyladenosine-3'-phosphate
  modified_base 18: mod_base = OTHER; note = 2'-O-methyladenosine-3'-phosphate
  modified_base 19: mod_base = OTHER; note = 2'-O-methyladenosine-3'-phosphorothioate
  modified_base 20: mod_base = OTHER; note = 2'-O-methyluridine-3'-phosphorothioate
  modified_base 21: mod_base = OTHER; note = 2'-O-methyladenosine
tctaggataggtctgaaaata

SEQ ID NO: 11381 - RNA, 21 nt, synthetic construct
  source 1..21: mol_type = other RNA
  modified_base 1: mod_base = OTHER; note = 2'-O-methylcytidine-3'-phosphorothioate
  modified_base 2: mod_base = OTHER; note = 2'-O-methyluridine-3'-phosphorothioate
  modified_base 3: mod_base = OTHER; note = 2'-O-methyladenosine-3'-phosphate
  modified_base 4: mod_base = OTHER; note = 2'-O-methylguanosine-3'-phosphate
  modified_base 5: mod_base = OTHER; note = 2'-O-methylguanosine-3'-phosphate
  modified_base 6: mod_base = OTHER; note = 2'-O-docosanyl-adenosine-3'-phosphate
  modified_base 7: mod_base = OTHER; note = 2'-deoxy-2'-fluorouridine-3'-phosphate
  modified_base 8: mod_base = OTHER; note = 2'-O-methyladenosine-3'-phosphate
  modified_base 9: mod_base = OTHER; note = 2'-deoxy-2'-fluoroguanosine-3'-phosphate
  modified_base 10: mod_base = OTHER; note = 2'-deoxy-2'-fluoroguanosine-3'-phosphate
  modified_base 11: mod_base = OTHER; note = 2'-deoxy-2'-fluorouridine-3'-phosphate
  modified_base 12: mod_base = OTHER; note = 2'-O-methylcytidine-3'-phosphate
  modified_base 13: mod_base = OTHER; note = 2'-O-methyluridine-3'-phosphate
  modified_base 14: mod_base = OTHER; note = 2'-O-methylguanosine-3'-phosphate
  modified_base 15: mod_base = OTHER; note = 2'-O-methyladenosine-3'-phosphate
  modified_base 16: mod_base = OTHER; note = 2'-O-methyladenosine-3'-phosphate
  modified_base 17: mod_base = OTHER; note = 2'-O-methyladenosine-3'-phosphate
  modified_base 18: mod_base = OTHER; note = 2'-O-methyladenosine-3'-phosphate
  modified_base 19: mod_base = OTHER; note = 2'-O-methyluridine-3'-phosphorothioate
  modified_base 20: mod_base = OTHER; note = 2'-O-methyluridine-3'-phosphorothioate
  modified_base 21: mod_base = OTHER; note = 2'-O-methyladenosine
ctaggataggtctgaaaatta

SEQ ID NO: 11382 - RNA, 21 nt, synthetic construct
  source 1..21: mol_type = other RNA
  modified_base 1: mod_base = OTHER; note = 2'-O-methyluridine-3'-phosphorothioate
  modified_base 2: mod_base = OTHER; note = 2'-O-methyladenosine-3'-phosphorothioate
  modified_base 3: mod_base = OTHER; note = 2'-O-methylguanosine-3'-phosphate
  modified_base 4: mod_base = OTHER; note = 2'-O-methylguanosine-3'-phosphate
  modified_base 5: mod_base = OTHER; note = 2'-O-methyladenosine-3'-phosphate
  modified_base 6: mod_base = OTHER; note = 2'-O-docosanyl-uridine-3'-phosphate
  modified_base 7: mod_base = OTHER; note = 2'-deoxy-2'-fluoroadenosine-3'-phosphate
  modified_base 8: mod_base = OTHER; note = 2'-O-methylguanosine-3'-phosphate
  modified_base 9: mod_base = OTHER; note = 2'-deoxy-2'-fluoroguanosine-3'-phosphate
  modified_base 10: mod_base = OTHER; note = 2'-deoxy-2'-fluorouridine-3'-phosphate
  modified_base 11: mod_base = OTHER; note = 2'-deoxy-2'-fluorocytidine-3'-phosphate
  modified_base 12: mod_base = OTHER; note = 2'-O-methyluridine-3'-phosphate
  modified_base 13: mod_base = OTHER; note = 2'-O-methylguanosine-3'-phosphate
  modified_base 14: mod_base = OTHER; note = 2'-O-methyladenosine-3'-phosphate
  modified_base 15: mod_base = OTHER; note = 2'-O-methyladenosine-3'-phosphate
  modified_base 16: mod_base = OTHER; note = 2'-O-methyladenosine-3'-phosphate
  modified_base 17: mod_base = OTHER; note = 2'-O-methyladenosine-3'-phosphate
  modified_base 18: mod_base = OTHER; note = 2'-O-methyluridine-3'-phosphate
  modified_base 19: mod_base = OTHER; note = 2'-O-methyluridine-3'-phosphorothioate
  modified_base 20: mod_base = OTHER; note = 2'-O-methylguanosine-3'-phosphorothioate
  modified_base 21: mod_base = OTHER; note = 2'-O-methyladenosine
taggataggtctgaaaattga

SEQ ID NO: 11383 - RNA, 21 nt, synthetic construct
  source 1..21: mol_type = other RNA
  modified_base 1: mod_base = OTHER; note = 2'-O-methylcytidine-3'-phosphorothioate
  modified_base 2: mod_base = OTHER; note = 2'-O-methyluridine-3'-phosphorothioate
  modified_base 3: mod_base = OTHER; note = 2'-O-methylguanosine-3'-phosphate
  modified_base 4: mod_base = OTHER; note = 2'-O-methyladenosine-3'-phosphate
  modified_base 5: mod_base = OTHER; note = 2'-O-methyladenosine-3'-phosphate
  modified_base 6: mod_base = OTHER; note = 2'-O-docosanyl-adenosine-3'-phosphate
  modified_base 7: mod_base = OTHER; note = 2'-deoxy-2'-fluoroadenosine-3'-phosphate
  modified_base 8: mod_base = OTHER; note = 2'-O-methyluridine-3'-phosphate
  modified_base 9: mod_base = OTHER; note = 2'-deoxy-2'-fluorouridine-3'-phosphate
  modified_base 10: mod_base = OTHER; note = 2'-deoxy-2'-fluoroguanosine-3'-phosphate
  modified_base 11: mod_base = OTHER; note = 2'-deoxy-2'-fluorocytidine-3'-phosphate
  modified_base 12: mod_base = OTHER; note = 2'-O-methyluridine-3'-phosphate
  modified_base 13: mod_base = OTHER; note = 2'-O-methyluridine-3'-phosphate
  modified_base 14: mod_base = OTHER; note = 2'-O-methyluridine-3'-phosphate
  modified_base 15: mod_base = OTHER; note = 2'-O-methylcytidine-3'-phosphate
  modified_base 16: mod_base = OTHER; note = 2'-O-methyladenosine-3'-phosphate
  modified_base 17: mod_base = OTHER; note = 2'-O-methyluridine-3'-phosphate
  modified_base 18: mod_base = OTHER; note = 2'-O-methyluridine-3'-phosphate
  modified_base 19: mod_base = OTHER; note = 2'-O-methyluridine-3'-phosphorothioate
  modified_base 20: mod_base = OTHER; note = 2'-O-methylguanosine-3'-phosphorothioate
  modified_base 21: mod_base = OTHER; note = 2'-O-methyladenosine
ctgaaaattgctttcatttga

SEQ ID NO: 11384 - RNA, 21 nt, synthetic construct
  source 1..21: mol_type = other RNA
  modified_base 1: mod_base = OTHER; note = 2'-O-methyladenosine-3'-phosphorothioate
  modified_base 2: mod_base = OTHER; note = 2'-O-methyluridine-3'-phosphorothioate
  modified_base 3: mod_base = OTHER; note = 2'-O-methyluridine-3'-phosphate
  modified_base 4: mod_base = OTHER; note = 2'-O-methylguanosine-3'-phosphate
  modified_base 5: mod_base = OTHER; note = 2'-O-methylcytidine-3'-phosphate
  modified_base 6: mod_base = OTHER; note = 2'-O-docosanyl-uridine-3'-phosphate
  modified_base 7: mod_base = OTHER; note = 2'-deoxy-2'-fluorouridine-3'-phosphate
  modified_base 8: mod_base = OTHER; note = 2'-O-methyluridine-3'-phosphate
  modified_base 9: mod_base = OTHER; note = 2'-deoxy-2'-fluorocytidine-3'-phosphate
  modified_base 10: mod_base = OTHER; note = 2'-deoxy-2'-fluoroadenosine-3'-phosphate
  modified_base 11: mod_base = OTHER; note = 2'-deoxy-2'-fluorouridine-3'-phosphate
  modified_base 12: mod_base = OTHER; note = 2'-O-methyluridine-3'-phosphate
  modified_base 13: mod_base = OTHER; note = 2'-O-methyluridine-3'-phosphate
  modified_base 14: mod_base = OTHER; note = 2'-O-methylguanosine-3'-phosphate
  modified_base 15: mod_base = OTHER; note = 2'-O-methylcytidine-3'-phosphate
  modified_base 16: mod_base = OTHER; note = 2'-O-methyladenosine-3'-phosphate
  modified_base 17: mod_base = OTHER; note = 2'-O-methyladenosine-3'-phosphate
  modified_base 18: mod_base = OTHER; note = 2'-O-methylcytidine-3'-phosphate
  modified_base 19: mod_base = OTHER; note = 2'-O-methyladenosine-3'-phosphorothioate
  modified_base 20: mod_base = OTHER; note = 2'-O-methylcytidine-3'-phosphorothioate
  modified_base 21: mod_base = OTHER; note = 2'-O-methyladenosine
attgctttcatttgcaacaca

SEQ ID NO: 11385 - RNA, 21 nt, synthetic construct
  source 1..21: mol_type = other RNA
  modified_base 1: mod_base = OTHER; note = 2'-O-methyluridine-3'-phosphorothioate
  modified_base 2: mod_base = OTHER; note = 2'-O-methyluridine-3'-phosphorothioate
  modified_base 3: mod_base = OTHER; note = 2'-O-methylguanosine-3'-phosphate
  modified_base 4: mod_base = OTHER; note = 2'-O-methylcytidine-3'-phosphate
  modified_base 5: mod_base = OTHER; note = 2'-O-methyluridine-3'-phosphate
  modified_base 6: mod_base = OTHER; note = 2'-O-docosanyl-uridine-3'-phosphate
  modified_base 7: mod_base = OTHER; note = 2'-deoxy-2'-fluorouridine-3'-phosphate
  modified_base 8: mod_base = OTHER; note = 2'-O-methylcytidine-3'-phosphate
  modified_base 9: mod_base = OTHER; note = 2'-deoxy-2'-fluoroadenosine-3'-phosphate
  modified_base 10: mod_base = OTHER; note = 2'-deoxy-2'-fluorouridine-3'-phosphate
  modified_base 11: mod_base = OTHER; note = 2'-deoxy-2'-fluorouridine-3'-phosphate
  modified_base 12: mod_base = OTHER; note = 2'-O-methyluridine-3'-phosphate
  modified_base 13: mod_base = OTHER; note = 2'-O-methylguanosine-3'-phosphate
  modified_base 14: mod_base = OTHER; note = 2'-O-methylcytidine-3'-phosphate
  modified_base 15: mod_base = OTHER; note = 2'-O-methyladenosine-3'-phosphate
  modified_base 16: mod_base = OTHER; note = 2'-O-methyladenosine-3'-phosphate
  modified_base 17: mod_base = OTHER; note = 2'-O-methylcytidine-3'-phosphate
  modified_base 18: mod_base = OTHER; note = 2'-O-methyladenosine-3'-phosphate
  modified_base 19: mod_base = OTHER; note = 2'-O-methylcytidine-3'-phosphorothioate
  modified_base 20: mod_base = OTHER; note = 2'-O-methyladenosine-3'-phosphorothioate
  modified_base 21: mod_base = OTHER; note = 2'-O-methyladenosine
ttgctttcatttgcaacacaa

SEQ ID NO: 11386 - RNA, 21 nt, synthetic construct
  source 1..21: mol_type = other RNA
  modified_base 1: mod_base = OTHER; note = 2'-O-methyluridine-3'-phosphorothioate
  modified_base 2: mod_base = OTHER; note = 2'-O-methylguanosine-3'-phosphorothioate
  modified_base 3: mod_base = OTHER; note = 2'-O-methylcytidine-3'-phosphate
  modified_base 4: mod_base = OTHER; note = 2'-O-methyluridine-3'-phosphate
  modified_base 5: mod_base = OTHER; note = 2'-O-methyluridine-3'-phosphate
  modified_base 6: mod_base = OTHER; note = 2'-O-docosanyl-uridine-3'-phosphate
  modified_base 7: mod_base = OTHER; note = 2'-deoxy-2'-fluorocytidine-3'-phosphate
  modified_base 8: mod_base = OTHER; note = 2'-O-methyladenosine-3'-phosphate
  modified_base 9: mod_base = OTHER; note = 2'-deoxy-2'-fluorouridine-3'-phosphate
  modified_base 10: mod_base = OTHER; note = 2'-deoxy-2'-fluorouridine-3'-phosphate
  modified_base 11: mod_base = OTHER; note = 2'-deoxy-2'-fluorouridine-3'-phosphate
  modified_base 12: mod_base = OTHER; note = 2'-O-methylguanosine-3'-phosphate
  modified_base 13: mod_base = OTHER; note = 2'-O-methylcytidine-3'-phosphate
  modified_base 14: mod_base = OTHER; note = 2'-O-methyladenosine-3'-phosphate
  modified_base 15: mod_base = OTHER; note = 2'-O-methyladenosine-3'-phosphate
  modified_base 16: mod_base = OTHER; note = 2'-O-methylcytidine-3'-phosphate
  modified_base 17: mod_base = OTHER; note = 2'-O-methyladenosine-3'-phosphate
  modified_base 18: mod_base = OTHER; note = 2'-O-methylcytidine-3'-phosphate
  modified_base 19: mod_base = OTHER; note = 2'-O-methyladenosine-3'-phosphorothioate
  modified_base 20: mod_base = OTHER; note = 2'-O-methyluridine-3'-phosphorothioate
  modified_base 21: mod_base = OTHER; note = 2'-O-methyladenosine
tgctttcatttgcaacacata

SEQ ID NO: 11387 - RNA, 21 nt, synthetic construct
  source 1..21: mol_type = other RNA
  modified_base 1: mod_base = OTHER; note = 2'-O-methylguanosine-3'-phosphorothioate
  modified_base 2: mod_base = OTHER; note = 2'-O-methylcytidine-3'-phosphorothioate
  modified_base 3: mod_base = OTHER; note = 2'-O-methyluridine-3'-phosphate
  modified_base 4: mod_base = OTHER; note = 2'-O-methyluridine-3'-phosphate
  modified_base 5: mod_base = OTHER; note = 2'-O-methyluridine-3'-phosphate
  modified_base 6: mod_base = OTHER; note = 2'-O-docosanyl-cytidine-3'-phosphate
  modified_base 7: mod_base = OTHER; note = 2'-deoxy-2'-fluoroadenosine-3'-phosphate
  modified_base 8: mod_base = OTHER; note = 2'-O-methyluridine-3'-phosphate
  modified_base 9: mod_base = OTHER; note = 2'-deoxy-2'-fluorouridine-3'-phosphate
  modified_base 10: mod_base = OTHER; note = 2'-deoxy-2'-fluorouridine-3'-phosphate
  modified_base 11: mod_base = OTHER; note = 2'-deoxy-2'-fluoroguanosine-3'-phosphate
  modified_base 12: mod_base = OTHER; note = 2'-O-methylcytidine-3'-phosphate
  modified_base 13: mod_base = OTHER; note = 2'-O-methyladenosine-3'-phosphate
  modified_base 14: mod_base = OTHER; note = 2'-O-methyladenosine-3'-phosphate
  modified_base 15: mod_base = OTHER; note = 2'-O-methylcytidine-3'-phosphate
  modified_base 16: mod_base = OTHER; note = 2'-O-methyladenosine-3'-phosphate
  modified_base 17: mod_base = OTHER; note = 2'-O-methylcytidine-3'-phosphate
  modified_base 18: mod_base = OTHER; note = 2'-O-methyladenosine-3'-phosphate
  modified_base 19: mod_base = OTHER; note = 2'-O-methyluridine-3'-phosphorothioate
  modified_base 20: mod_base = OTHER; note = 2'-O-methyluridine-3'-phosphorothioate
  modified_base 21: mod_base = OTHER; note = 2'-O-methyladenosine
gctttcatttgcaacacatta

SEQ ID NO: 11388 - RNA, 21 nt, synthetic construct
  source 1..21: mol_type = other RNA
  modified_base 1: mod_base = OTHER; note = 2'-O-methylcytidine-3'-phosphorothioate
  modified_base 2: mod_base = OTHER; note = 2'-O-methyluridine-3'-phosphorothioate
  modified_base 3: mod_base = OTHER; note = 2'-O-methyluridine-3'-phosphate
  modified_base 4: mod_base = OTHER; note = 2'-O-methyluridine-3'-phosphate
  modified_base 5: mod_base = OTHER; note = 2'-O-methylcytidine-3'-phosphate
  modified_base 6: mod_base = OTHER; note = 2'-O-docosanyl-adenosine-3'-phosphate
  modified_base 7: mod_base = OTHER; note = 2'-deoxy-2'-fluorouridine-3'-phosphate
  modified_base 8: mod_base = OTHER; note = 2'-O-methyluridine-3'-phosphate
  modified_base 9: mod_base = OTHER; note = 2'-deoxy-2'-fluorouridine-3'-phosphate
  modified_base 10: mod_base = OTHER; note = 2'-deoxy-2'-fluoroguanosine-3'-phosphate
  modified_base 11: mod_base = OTHER; note = 2'-deoxy-2'-fluorocytidine-3'-phosphate
  modified_base 12: mod_base = OTHER; note = 2'-O-methyladenosine-3'-phosphate
  modified_base 13: mod_base = OTHER; note = 2'-O-methyladenosine-3'-phosphate
  modified_base 14: mod_base = OTHER; note = 2'-O-methylcytidine-3'-phosphate
  modified_base 15: mod_base = OTHER; note = 2'-O-methyladenosine-3'-phosphate
  modified_base 16: mod_base = OTHER; note = 2'-O-methylcytidine-3'-phosphate
  modified_base 17: mod_base = OTHER; note = 2'-O-methyladenosine-3'-phosphate
  modified_base 18: mod_base = OTHER; note = 2'-O-methyluridine-3'-phosphate
  modified_base 19: mod_base = OTHER; note = 2'-O-methyluridine-3'-phosphorothioate
  modified_base 20: mod_base = OTHER; note = 2'-O-methyluridine-3'-phosphorothioate
  modified_base 21: mod_base = OTHER; note = 2'-O-methyladenosine
ctttcatttgcaacacattta

SEQ ID NO: 11389 - RNA, 21 nt, synthetic construct
  source 1..21: mol_type = other RNA
  modified_base 1: mod_base = OTHER; note = 2'-O-methylguanosine-3'-phosphorothioate
  modified_base 2: mod_base = OTHER; note = 2'-O-methyladenosine-3'-phosphorothioate
  modified_base 3: mod_base = OTHER; note = 2'-O-methylcytidine-3'-phosphate
  modified_base 4: mod_base = OTHER; note = 2'-O-methyladenosine-3'-phosphate
  modified_base 5: mod_base = OTHER; note = 2'-O-methyladenosine-3'-phosphate
  modified_base 6: mod_base = OTHER; note = 2'-O-docosanyl-uridine-3'-phosphate
  modified_base 7: mod_base = OTHER; note = 2'-deoxy-2'-fluorocytidine-3'-phosphate
  modified_base 8: mod_base = OTHER; note = 2'-O-methyluridine-3'-phosphate
  modified_base 9: mod_base = OTHER; note = 2'-deoxy-2'-fluoroadenosine-3'-phosphate
  modified_base 10: mod_base = OTHER; note = 2'-deoxy-2'-fluoroadenosine-3'-phosphate
  modified_base 11: mod_base = OTHER; note = 2'-deoxy-2'-fluoroadenosine-3'-phosphate
  modified_base 12: mod_base = OTHER; note = 2'-O-methyluridine-3'-phosphate
  modified_base 13: mod_base = OTHER; note = 2'-O-methyladenosine-3'-phosphate
  modified_base 14: mod_base = OTHER; note = 2'-O-methyluridine-3'-phosphate
  modified_base 15: mod_base = OTHER; note = 2'-O-methyladenosine-3'-phosphate
  modified_base 16: mod_base = OTHER; note = 2'-O-methyluridine-3'-phosphate
  modified_base 17: mod_base = OTHER; note = 2'-O-methylcytidine-3'-phosphate
  modified_base 18: mod_base = OTHER; note = 2'-O-methyladenosine-3'-phosphate
  modified_base 19: mod_base = OTHER; note = 2'-O-methyluridine-3'-phosphorothioate
  modified_base 20: mod_base = OTHER; note = 2'-O-methylcytidine-3'-phosphorothioate
  modified_base 21: mod_base = OTHER; note = 2'-O-methyladenosine
gacaatctaaatatatcatca

SEQ ID NO: 11390 - RNA, 21 nt, synthetic construct
  source 1..21: mol_type = other RNA
  modified_base 1: mod_base = OTHER; note = 2'-O-methyladenosine-3'-phosphorothioate
  modified_base 2: mod_base = OTHER; note = 2'-O-methylguanosine-3'-phosphorothioate
  modified_base 3: mod_base = OTHER; note = 2'-O-methyladenosine-3'-phosphate
  modified_base 4: mod_base = OTHER; note = 2'-O-methyladenosine-3'-phosphate
  modified_base 5: mod_base = OTHER; note = 2'-O-methyladenosine-3'-phosphate
  modified_base 6: mod_base = OTHER; note = 2'-O-docosanyl-guanosine-3'-phosphate
  modified_base 7: mod_base = OTHER; note = 2'-deoxy-2'-fluorouridine-3'-phosphate
  modified_base 8: mod_base = OTHER; note = 2'-O-methyladenosine-3'-phosphate
  modified_base 9: mod_base = OTHER; note = 2'-deoxy-2'-fluoroguanosine-3'-phosphate
  modified_base 10: mod_base = OTHER; note = 2'-deoxy-2'-fluorocytidine-3'-phosphate
  modified_base 11: mod_base = OTHER; note = 2'-deoxy-2'-fluorouridine-3'-phosphate
  modified_base 12: mod_base = OTHER; note = 2'-O-methyluridine-3'-phosphate
  modified_base 13: mod_base = OTHER; note = 2'-O-methyluridine-3'-phosphate
  modified_base 14: mod_base = OTHER; note = 2'-O-methyladenosine-3'-phosphate
  modified_base 15: mod_base = OTHER; note = 2'-O-methyluridine-3'-phosphate
  modified_base 16: mod_base = OTHER; note = 2'-O-methyluridine-3'-phosphate
  modified_base 17: mod_base = OTHER; note = 2'-O-methyluridine-3'-phosphate
  modified_base 18: mod_base = OTHER; note = 2'-O-methylguanosine-3'-phosphate
  modified_base 19: mod_base = OTHER; note = 2'-O-methylguanosine-3'-phosphorothioate
  modified_base 20: mod_base = OTHER; note = 2'-O-methyladenosine-3'-phosphorothioate
  modified_base 21: mod_base = OTHER; note = 2'-O-methyladenosine
agaaagtagctttatttggaa

SEQ ID NO: 11391 - RNA, 21 nt, synthetic construct
  source 1..21: mol_type = other RNA
  modified_base 1: mod_base = OTHER; note = 2'-O-methyladenosine-3'-phosphorothioate
  modified_base 2: mod_base = OTHER; note = 2'-O-methyladenosine-3'-phosphorothioate
  modified_base 3: mod_base = OTHER; note = 2'-O-methylguanosine-3'-phosphate
  modified_base 4: mod_base = OTHER; note = 2'-O-methyluridine-3'-phosphate
  modified_base 5: mod_base = OTHER; note = 2'-O-methyladenosine-3'-phosphate
  modified_base 6: mod_base = OTHER; note = 2'-O-docosanyl-guanosine-3'-phosphate
  modified_base 7: mod_base = OTHER; note = 2'-deoxy-2'-fluorocytidine-3'-phosphate
  modified_base 8: mod_base = OTHER; note = 2'-O-methyluridine-3'-phosphate
  modified_base 9: mod_base = OTHER; note = 2'-deoxy-2'-fluorouridine-3'-phosphate
  modified_base 10: mod_base = OTHER; note = 2'-deoxy-2'-fluorouridine-3'-phosphate
  modified_base 11: mod_base = OTHER; note = 2'-deoxy-2'-fluoroadenosine-3'-phosphate
  modified_base 12: mod_base = OTHER; note = 2'-O-methyluridine-3'-phosphate
  modified_base 13: mod_base = OTHER; note = 2'-O-methyluridine-3'-phosphate
  modified_base 14: mod_base = OTHER; note = 2'-O-methyluridine-3'-phosphate
  modified_base 15: mod_base = OTHER; note = 2'-O-methylguanosine-3'-phosphate
  modified_base 16: mod_base = OTHER; note = 2'-O-methylguanosine-3'-phosphate
  modified_base 17: mod_base = OTHER; note = 2'-O-methyladenosine-3'-phosphate
  modified_base 18: mod_base = OTHER; note = 2'-O-methyluridine-3'-phosphate
  modified_base 19: mod_base = OTHER; note = 2'-O-methyladenosine-3'-phosphorothioate
  modified_base 20: mod_base = OTHER; note = 2'-O-methyluridine-3'-phosphorothioate
  modified_base 21: mod_base = OTHER; note = 2'-O-methyladenosine
aagtagctttatttggatata

SEQ ID NO: 11392 - RNA, 21 nt, synthetic construct
  source 1..21: mol_type = other RNA
  modified_base 1: mod_base = OTHER; note = 2'-O-methylcytidine-3'-phosphorothioate
  modified_base 2: mod_base = OTHER; note = 2'-O-methyladenosine-3'-phosphorothioate
  modified_base 3: mod_base = OTHER; note = 2'-O-methyladenosine-3'-phosphate
  modified_base 4: mod_base = OTHER; note = 2'-O-methyluridine-3'-phosphate
  modified_base 5: mod_base = OTHER; note = 2'-O-methylcytidine-3'-phosphate
  modified_base 6: mod_base = OTHER; note = 2'-O-docosanyl-uridine-3'-phosphate
  modified_base 7: mod_base = OTHER; note = 2'-deoxy-2'-fluoroadenosine-3'-phosphate
  modified_base 8: mod_base = OTHER; note = 2'-O-methyladenosine-3'-phosphate
  modified_base 9: mod_base = OTHER; note = 2'-deoxy-2'-fluoroadenosine-3'-phosphate
  modified_base 10: mod_base = OTHER; note = 2'-deoxy-2'-fluorouridine-3'-phosphate
  modified_base 11: mod_base = OTHER; note = 2'-deoxy-2'-fluoroadenosine-3'-phosphate
  modified_base 12: mod_base = OTHER; note = 2'-O-methyluridine-3'-phosphate
  modified_base 13: mod_base = OTHER; note = 2'-O-methyladenosine-3'-phosphate
  modified_base 14: mod_base = OTHER; note = 2'-O-methyluridine-3'-phosphate
  modified_base 15: mod_base = OTHER; note = 2'-O-methylcytidine-3'-phosphate
  modified_base 16: mod_base = OTHER; note = 2'-O-methyladenosine-3'-phosphate
  modified_base 17: mod_base = OTHER; note = 2'-O-methyluridine-3'-phosphate
  modified_base 18: mod_base = OTHER; note = 2'-O-methylcytidine-3'-phosphate
  modified_base 19: mod_base = OTHER; note = 2'-O-methyladenosine-3'-phosphorothioate
  modified_base 20: mod_base = OTHER; note = 2'-O-methylguanosine-3'-phosphorothioate
  modified_base 21: mod_base = OTHER; note = 2'-O-methyladenosine
caatctaaatatatcatcaga

SEQ ID NO: 11393 - RNA, 21 nt, synthetic construct
  source 1..21: mol_type = other RNA
  modified_base 1: mod_base = OTHER; note = 2'-O-methyladenosine-3'-phosphorothioate
  modified_base 2: mod_base = OTHER; note = 2'-O-methyladenosine-3'-phosphorothioate
  modified_base 3: mod_base = OTHER; note = 2'-O-methylguanosine-3'-phosphate
  modified_base 4: mod_base = OTHER; note = 2'-O-methyluridine-3'-phosphate
  modified_base 5: mod_base = OTHER; note = 2'-O-methylguanosine-3'-phosphate
  modified_base 6: mod_base = OTHER; note = 2'-O-docosanyl-cytidine-3'-phosphate
  modified_base 7: mod_base = OTHER; note = 2'-deoxy-2'-fluorocytidine-3'-phosphate
  modified_base 8: mod_base = OTHER; note = 2'-O-methyluridine-3'-phosphate
  modified_base 9: mod_base = OTHER; note = 2'-deoxy-2'-fluoroadenosine-3'-phosphate
  modified_base 10: mod_base = OTHER; note = 2'-deoxy-2'-fluorouridine-3'-phosphate
  modified_base 11: mod_base = OTHER; note = 2'-deoxy-2'-fluoroguanosine-3'-phosphate
  modified_base 12: mod_base = OTHER; note = 2'-O-methyluridine-3'-phosphate
  modified_base 13: mod_base = OTHER; note = 2'-O-methylguanosine-3'-phosphate
  modified_base 14: mod_base = OTHER; note = 2'-O-methyladenosine-3'-phosphate
  modified_base 15: mod_base = OTHER; note = 2'-O-methyladenosine-3'-phosphate
  modified_base 16: mod_base = OTHER; note = 2'-O-methylguanosine-3'-phosphate
  modified_base 17: mod_base = OTHER; note = 2'-O-methyluridine-3'-phosphate
  modified_base 18: mod_base = OTHER; note = 2'-O-methylguanosine-3'-phosphate
  modified_base 19: mod_base = OTHER; note = 2'-O-methyladenosine-3'-phosphorothioate
  modified_base 20: mod_base = OTHER; note = 2'-O-methyluridine-3'-phosphorothioate
  modified_base 21: mod_base = OTHER; note = 2'-O-methyladenosine
aagtgcctatgtgaagtgata

SEQ ID NO: 11394 - RNA, 21 nt, synthetic construct
  source 1..21: mol_type = other RNA
  modified_base 1: mod_base = OTHER; note = 2'-O-methyluridine-3'-phosphorothioate
  modified_base 2: mod_base = OTHER; note = 2'-O-methylcytidine-3'-phosphorothioate
  modified_base 3: mod_base = OTHER; note = 2'-O-methyladenosine-3'-phosphate
  modified_base 4: mod_base = OTHER; note = 2'-O-methyluridine-3'-phosphate
  modified_base 5: mod_base = OTHER; note = 2'-O-methylcytidine-3'-phosphate
  modified_base 6: mod_base = OTHER; note = 2'-O-docosanyl-adenosine-3'-phosphate
  modified_base 7: mod_base = OTHER; note = 2'-deoxy-2'-fluoroguanosine-3'-phosphate
  modified_base 8: mod_base = OTHER; note = 2'-O-methyluridine-3'-phosphate
  modified_base 9: mod_base = OTHER; note = 2'-deoxy-2'-fluorouridine-3'-phosphate
  modified_base 10: mod_base = OTHER; note = 2'-deoxy-2'-fluorouridine-3'-phosphate
  modified_base 11: mod_base = OTHER; note = 2'-deoxy-2'-fluorouridine-3'-phosphate
  modified_base 12: mod_base = OTHER; note = 2'-O-methyluridine-3'-phosphate
  modified_base 13: mod_base = OTHER; note = 2'-O-methyladenosine-3'-phosphate
  modified_base 14: mod_base = OTHER; note = 2'-O-methyladenosine-3'-phosphate
  modified_base 15: mod_base = OTHER; note = 2'-O-methyladenosine-3'-phosphate
  modified_base 16: mod_base = OTHER; note = 2'-O-methyladenosine-3'-phosphate
  modified_base 17: mod_base = OTHER; note = 2'-O-methylguanosine-3'-phosphate
  modified_base 18: mod_base = OTHER; note = 2'-O-methyluridine-3'-phosphate
  modified_base 19: mod_base = OTHER; note = 2'-O-methylguanosine-3'-phosphorothioate
  modified_base 20: mod_base = OTHER; note = 2'-O-methylcytidine-3'-phosphorothioate
  modified_base 21: mod_base = OTHER; note = 2'-O-methyladenosine
tcatcagtttttaaaagtgca

SEQ ID NO: 11395 - RNA, 21 nt, synthetic construct
  source 1..21: mol_type = other RNA
  modified_base 1: mod_base = OTHER; note = 2'-O-methylcytidine-3'-phosphorothioate
  modified_base 2: mod_base = OTHER; note = 2'-O-methyladenosine-3'-phosphorothioate
  modified_base 3: mod_base = OTHER; note = 2'-O-methyluridine-3'-phosphate
  modified_base 4: mod_base = OTHER; note = 2'-O-methylcytidine-3'-phosphate
  modified_base 5: mod_base = OTHER; note = 2'-O-methyladenosine-3'-phosphate
  modified_base 6: mod_base = OTHER; note = 2'-O-docosanyl-guanosine-3'-phosphate
  modified_base 7: mod_base = OTHER; note = 2'-deoxy-2'-fluorouridine-3'-phosphate
  modified_base 8: mod_base = OTHER; note = 2'-O-methyluridine-3'-phosphate
  modified_base 9: mod_base = OTHER; note = 2'-deoxy-2'-fluorouridine-3'-phosphate
  modified_base 10: mod_base = OTHER; note = 2'-deoxy-2'-fluorouridine-3'-phosphate
  modified_base 11: mod_base = OTHER; note = 2'-deoxy-2'-fluorouridine-3'-phosphate
  modified_base 12: mod_base = OTHER; note = 2'-O-methyladenosine-3'-phosphate
  modified_base 13: mod_base = OTHER; note = 2'-O-methyladenosine-3'-phosphate
  modified_base 14: mod_base = OTHER; note = 2'-O-methyladenosine-3'-phosphate
  modified_base 15: mod_base = OTHER; note = 2'-O-methyladenosine-3'-phosphate
  modified_base 16: mod_base = OTHER; note = 2'-O-methylguanosine-3'-phosphate
  modified_base 17: mod_base = OTHER; note = 2'-O-methyluridine-3'-phosphate
  modified_base 18: mod_base = OTHER; note = 2'-O-methylguanosine-3'-phosphate
  modified_base 19: mod_base = OTHER; note = 2'-O-methylcytidine-3'-phosphorothioate
  modified_base 20: mod_base = OTHER; note = 2'-O-methylcytidine-3'-phosphorothioate
  modified_base 21: mod_base = OTHER; note = 2'-O-methyladenosine
catcagtttttaaaagtgcca

SEQ ID NO: 11396 - RNA, 21 nt, synthetic construct
  source 1..21: mol_type = other RNA
  modified_base 1: mod_base = OTHER; note = 2'-O-methyladenosine-3'-phosphorothioate
  modified_base 2: mod_base = OTHER; note = 2'-O-methyluridine-3'-phosphorothioate
  modified_base 3: mod_base = OTHER; note = 2'-O-methylcytidine-3'-phosphate
  modified_base 4: mod_base = OTHER; note = 2'-O-methyladenosine-3'-phosphate
  modified_base 5: mod_base = OTHER; note = 2'-O-methylguanosine-3'-phosphate
  modified_base 6: mod_base = OTHER; note = 2'-O-docosanyl-uridine-3'-phosphate
  modified_base 7: mod_base = OTHER; note = 2'-deoxy-2'-fluorouridine-3'-phosphate
  modified_base 8: mod_base = OTHER; note = 2'-O-methyluridine-3'-phosphate
  modified_base 9: mod_base = OTHER; note = 2'-deoxy-2'-fluorouridine-3'-phosphate
  modified_base 10: mod_base = OTHER; note = 2'-deoxy-2'-fluorouridine-3'-phosphate
  modified_base 11: mod_base = OTHER; note = 2'-deoxy-2'-fluoroadenosine-3'-phosphate
  modified_base 12: mod_base = OTHER; note = 2'-O-methyladenosine-3'-phosphate
  modified_base 13: mod_base = OTHER; note = 2'-O-methyladenosine-3'-phosphate
  modified_base 14: mod_base = OTHER; note = 2'-O-methyladenosine-3'-phosphate
  modified_base 15: mod_base = OTHER; note = 2'-O-methylguanosine-3'-phosphate
  modified_base 16: mod_base = OTHER; note = 2'-O-methyluridine-3'-phosphate
  modified_base 17: mod_base = OTHER; note = 2'-O-methylguanosine-3'-phosphate
  modified_base 18: mod_base = OTHER; note = 2'-O-methylcytidine-3'-phosphate
  modified_base 19: mod_base = OTHER; note = 2'-O-methylcytidine-3'-phosphorothioate
  modified_base 20: mod_base = OTHER; note = 2'-O-methyluridine-3'-phosphorothioate
  modified_base 21: mod_base = OTHER; note = 2'-O-methyladenosine
atcagtttttaaaagtgccta

SEQ ID NO: 11397 - RNA, 21 nt, synthetic construct
  source 1..21: mol_type = other RNA
  modified_base 1: mod_base = OTHER; note = 2'-O-methyluridine-3'-phosphorothioate
  modified_base 2: mod_base = OTHER; note = 2'-O-methylcytidine-3'-phosphorothioate
  modified_base 3: mod_base = OTHER; note = 2'-O-methyladenosine-3'-phosphate
  modified_base 4: mod_base = OTHER; note = 2'-O-methylguanosine-3'-phosphate
  modified_base 5: mod_base = OTHER; note = 2'-O-methyluridine-3'-phosphate
  modified_base 6: mod_base = OTHER; note = 2'-O-docosanyl-uridine-3'-phosphate
  modified_base 7: mod_base = OTHER; note = 2'-deoxy-2'-fluorouridine-3'-phosphate
  modified_base 8: mod_base = OTHER; note = 2'-O-methyluridine-3'-phosphate
  modified_base 9: mod_base = OTHER; note = 2'-deoxy-2'-fluorouridine-3'-phosphate
  modified_base 10: mod_base = OTHER; note = 2'-deoxy-2'-fluoroadenosine-3'-phosphate
  modified_base 11: mod_base = OTHER; note = 2'-deoxy-2'-fluoroadenosine-3'-phosphate
  modified_base 12: mod_base = OTHER; note = 2'-O-methyladenosine-3'-phosphate
  modified_base 13: mod_base = OTHER; note = 2'-O-methyladenosine-3'-phosphate
  modified_base 14: mod_base = OTHER; note = 2'-O-methylguanosine-3'-phosphate
  modified_base 15: mod_base = OTHER; note = 2'-O-methyluridine-3'-phosphate
  modified_base 16: mod_base = OTHER; note = 2'-O-methylguanosine-3'-phosphate
  modified_base 17: mod_base = OTHER; note = 2'-O-methylcytidine-3'-phosphate
  modified_base 18: mod_base = OTHER; note = 2'-O-methylcytidine-3'-phosphate
  modified_base 19: mod_base = OTHER; note = 2'-O-methyluridine-3'-phosphorothioate
  modified_base 20: mod_base = OTHER; note = 2'-O-methyladenosine-3'-phosphorothioate
  modified_base 21: mod_base = OTHER; note = 2'-O-methyladenosine
tcagtttttaaaagtgcctaa

SEQ ID NO: 11398 - RNA, 21 nt, synthetic construct
  source 1..21: mol_type = other RNA
  modified_base 1: mod_base = OTHER; note = 2'-O-methylcytidine-3'-phosphorothioate
  modified_base 2: mod_base = OTHER; note = 2'-O-methyladenosine-3'-phosphorothioate
  modified_base 3: mod_base = OTHER; note = 2'-O-methylguanosine-3'-phosphate
  modified_base 4: mod_base = OTHER; note = 2'-O-methyluridine-3'-phosphate
  modified_base 5: mod_base = OTHER; note = 2'-O-methyluridine-3'-phosphate
  modified_base 6: mod_base = OTHER; note = 2'-O-docosanyl-uridine-3'-phosphate
  modified_base 7: mod_base = OTHER; note = 2'-deoxy-2'-fluorouridine-3'-phosphate
  modified_base 8: mod_base = OTHER; note = 2'-O-methyluridine-3'-phosphate
  modified_base 9: mod_base = OTHER; note = 2'-deoxy-2'-fluoroadenosine-3'-phosphate
  modified_base 10: mod_base = OTHER; note = 2'-deoxy-2'-fluoroadenosine-3'-phosphate
  modified_base 11: mod_base = OTHER; note = 2'-deoxy-2'-fluoroadenosine-3'-phosphate
  modified_base 12: mod_base = OTHER; note = 2'-O-methyladenosine-3'-phosphate
  modified_base 13: mod_base = OTHER; note = 2'-O-methylguanosine-3'-phosphate
  modified_base 14: mod_base = OTHER; note = 2'-O-methyluridine-3'-phosphate
  modified_base 15: mod_base = OTHER; note = 2'-O-methylguanosine-3'-phosphate
  modified_base 16: mod_base = OTHER; note = 2'-O-methylcytidine-3'-phosphate
  modified_base 17: mod_base = OTHER; note = 2'-O-methylcytidine-3'-phosphate
  modified_base 18: mod_base = OTHER; note = 2'-O-methyluridine-3'-phosphate
  modified_base 19: mod_base = OTHER; note = 2'-O-methyladenosine-3'-phosphorothioate
  modified_base 20: mod_base = OTHER; note = 2'-O-methyluridine-3'-phosphorothioate
  modified_base 21: mod_base = OTHER; note = 2'-O-methyladenosine
cagtttttaaaagtgcctata

SEQ ID NO: 11399 - RNA, 21 nt, synthetic construct
  source 1..21: mol_type = other RNA
  modified_base 1: mod_base = OTHER; note = 2'-O-methyladenosine-3'-phosphorothioate
  modified_base 2: mod_base = OTHER; note = 2'-O-methylguanosine-3'-phosphorothioate
  modified_base 3: mod_base = OTHER; note = 2'-O-methyluridine-3'-phosphate
  modified_base 4: mod_base = OTHER; note = 2'-O-methyluridine-3'-phosphate
  modified_base 5: mod_base = OTHER; note = 2'-O-methyluridine-3'-phosphate
  modified_base 6: mod_base = OTHER; note = 2'-O-docosanyl-uridine-3'-phosphate
  modified_base 7: mod_base = OTHER; note = 2'-deoxy-2'-fluorouridine-3'-phosphate
  modified_base 8: mod_base = OTHER; note = 2'-O-methyladenosine-3'-phosphate
  modified_base 9: mod_base = OTHER; note = 2'-deoxy-2'-fluoroadenosine-3'-phosphate
  modified_base 10: mod_base = OTHER; note = 2'-deoxy-2'-fluoroadenosine-3'-phosphate
  modified_base 11: mod_base = OTHER; note = 2'-deoxy-2'-fluoroadenosine-3'-phosphate
  modified_base 12: mod_base = OTHER; note = 2'-O-methylguanosine-3'-phosphate
  modified_base 13: mod_base = OTHER; note = 2'-O-methyluridine-3'-phosphate
  modified_base 14: mod_base = OTHER; note = 2'-O-methylguanosine-3'-phosphate
  modified_base 15: mod_base = OTHER; note = 2'-O-methylcytidine-3'-phosphate
  modified_base 16: mod_base = OTHER; note = 2'-O-methylcytidine-3'-phosphate
  modified_base 17: mod_base = OTHER; note = 2'-O-methyluridine-3'-phosphate
  modified_base 18: mod_base = OTHER; note = 2'-O-methyladenosine-3'-phosphate
  modified_base 19: mod_base = OTHER; note = 2'-O-methyluridine-3'-phosphorothioate
  modified_base 20: mod_base = OTHER; note = 2'-O-methylguanosine-3'-phosphorothioate
  modified_base 21: mod_base = OTHER; note = 2'-O-methyladenosine
agtttttaaaagtgcctatga

SEQ ID NO: 11400 - RNA, 21 nt, synthetic construct
  source 1..21: mol_type = other RNA
  modified_base 1: mod_base = OTHER; note = 2'-O-methylguanosine-3'-phosphorothioate
  modified_base 2: mod_base = OTHER; note = 2'-O-methyluridine-3'-phosphorothioate
  modified_base 3: mod_base = OTHER; note = 2'-O-methyluridine-3'-phosphate
  modified_base 4: mod_base = OTHER; note = 2'-O-methyluridine-3'-phosphate
  modified_base 5: mod_base = OTHER; note = 2'-O-methyluridine-3'-phosphate
  modified_base 6: mod_base = OTHER; note = 2'-O-docosanyl-uridine-3'-phosphate
  modified_base 7: mod_base = OTHER; note = 2'-deoxy-2'-fluoroadenosine-3'-phosphate
  modified_base 8: mod_base = OTHER; note = 2'-O-methyladenosine-3'-phosphate
  modified_base 9: mod_base = OTHER; note = 2'-deoxy-2'-fluoroadenosine-3'-phosphate
  modified_base 10: mod_base = OTHER; note = 2'-deoxy-2'-fluoroadenosine-3'-phosphate
  modified_base 11: mod_base = OTHER; note = 2'-deoxy-2'-fluoroguanosine-3'-phosphate
  modified_base 12: mod_base = OTHER; note = 2'-O-methyluridine-3'-phosphate
  modified_base 13: mod_base = OTHER; note = 2'-O-methylguanosine-3'-phosphate
  modified_base 14: mod_base = OTHER; note = 2'-O-methylcytidine-3'-phosphate
  modified_base 15: mod_base = OTHER; note = 2'-O-methylcytidine-3'-phosphate
  modified_base 16: mod_base = OTHER; note = 2'-O-methyluridine-3'-phosphate
  modified_base 17: mod_base = OTHER; note = 2'-O-methyladenosine-3'-phosphate
  modified_base 18: mod_base = OTHER; note = 2'-O-methyluridine-3'-phosphate
  modified_base 19: mod_base = OTHER; note = 2'-O-methylguanosine-3'-phosphorothioate
  modified_base 20: mod_base = OTHER; note = 2'-O-methyluridine-3'-phosphorothioate
  modified_base 21: mod_base = OTHER; note = 2'-O-methyladenosine
gtttttaaaagtgcctatgta

SEQ ID NO: 11401 - RNA, 21 nt, synthetic construct
  source 1..21: mol_type = other RNA
  modified_base 1: mod_base = OTHER; note = 2'-O-methyluridine-3'-phosphorothioate
  modified_base 2: mod_base = OTHER; note = 2'-O-methyluridine-3'-phosphorothioate
  modified_base 3: mod_base = OTHER; note = 2'-O-methyluridine-3'-phosphate
  modified_base 4: mod_base = OTHER; note = 2'-O-methyluridine-3'-phosphate
  modified_base 5: mod_base = OTHER; note = 2'-O-methyluridine-3'-phosphate
  modified_base 6: mod_base = OTHER; note = 2'-O-docosanyl-adenosine-3'-phosphate
  modified_base 7: mod_base = OTHER; note = 2'-deoxy-2'-fluoroadenosine-3'-phosphate
  modified_base 8: mod_base = OTHER; note = 2'-O-methyladenosine-3'-phosphate
  modified_base 9: mod_base = OTHER; note = 2'-deoxy-2'-fluoroadenosine-3'-phosphate
  modified_base 10: mod_base = OTHER; note = 2'-deoxy-2'-fluoroguanosine-3'-phosphate
  modified_base 11: mod_base = OTHER; note = 2'-deoxy-2'-fluorouridine-3'-phosphate
  modified_base 12: mod_base = OTHER; note = 2'-O-methylguanosine-3'-phosphate
  modified_base 13: mod_base = OTHER; note = 2'-O-methylcytidine-3'-phosphate
  modified_base 14: mod_base = OTHER; note = 2'-O-methylcytidine-3'-phosphate
  modified_base 15: mod_base = OTHER; note = 2'-O-methyluridine-3'-phosphate
  modified_base 16: mod_base = OTHER; note = 2'-O-methyladenosine-3'-phosphate
  modified_base 17: mod_base = OTHER; note = 2'-O-methyluridine-3'-phosphate
  modified_base 18: mod_base = OTHER; note = 2'-O-methylguanosine-3'-phosphate
  modified_base 19: mod_base = OTHER; note = 2'-O-methyluridine-3'-phosphorothioate
  modified_base 20: mod_base = OTHER; note = 2'-O-methylguanosine-3'-phosphorothioate
  modified_base 21: mod_base = OTHER; note = 2'-O-methyladenosine
tttttaaaagtgcctatgtga

SEQ ID NO: 11402 - RNA, 21 nt, synthetic construct
  source 1..21: mol_type = other RNA
  modified_base 1: mod_base = OTHER; note = 2'-O-methyladenosine-3'-phosphorothioate
  modified_base 2: mod_base = OTHER; note = 2'-O-methylguanosine-3'-phosphorothioate
  modified_base 3: mod_base = OTHER; note = 2'-O-methyluridine-3'-phosphate
  modified_base 4: mod_base = OTHER; note = 2'-O-methylguanosine-3'-phosphate
  modified_base 5: mod_base = OTHER; note = 2'-O-methylcytidine-3'-phosphate
  modified_base 6: mod_base = OTHER; note = 2'-O-docosanyl-cytidine-3'-phosphate
  modified_base 7: mod_base = OTHER; note = 2'-deoxy-2'-fluorouridine-3'-phosphate
  modified_base 8: mod_base = OTHER; note = 2'-O-methyladenosine-3'-phosphate
  modified_base 9: mod_base = OTHER; note = 2'-deoxy-2'-fluorouridine-3'-phosphate
  modified_base 10: mod_base = OTHER; note = 2'-deoxy-2'-fluoroguanosine-3'-phosphate
  modified_base 11: mod_base = OTHER; note = 2'-deoxy-2'-fluorouridine-3'-phosphate
  modified_base 12: mod_base = OTHER; note = 2'-O-methylguanosine-3'-phosphate
  modified_base 13: mod_base = OTHER; note = 2'-O-methyladenosine-3'-phosphate
  modified_base 14: mod_base = OTHER; note = 2'-O-methyladenosine-3'-phosphate
  modified_base 15: mod_base = OTHER; note = 2'-O-methylguanosine-3'-phosphate
  modified_base 16: mod_base = OTHER; note = 2'-O-methyluridine-3'-phosphate
  modified_base 17: mod_base = OTHER; note = 2'-O-methylguanosine-3'-phosphate
  modified_base 18: mod_base = OTHER; note = 2'-O-methyladenosine-3'-phosphate
  modified_base 19: mod_base = OTHER; note = 2'-O-methyluridine-3'-phosphorothioate
  modified_base 20: mod_base = OTHER; note = 2'-O-methyluridine-3'-phosphorothioate
  modified_base 21: mod_base = OTHER; note = 2'-O-methyladenosine
agtgcctatgtgaagtgatta

SEQ ID NO: 11403 - RNA, 21 nt, synthetic construct
  source 1..21: mol_type = other RNA
  modified_base 1: mod_base = OTHER; note = 2'-O-methylguanosine-3'-phosphorothioate
  modified_base 2: mod_base = OTHER; note = 2'-O-methyluridine-3'-phosphorothioate
  modified_base 3: mod_base = OTHER; note = 2'-O-methylguanosine-3'-phosphate
  modified_base 4: mod_base = OTHER; note = 2'-O-methylcytidine-3'-phosphate
  modified_base 5: mod_base = OTHER; note = 2'-O-methylcytidine-3'-phosphate
  modified_base 6: mod_base = OTHER; note = 2'-O-docosanyl-uridine-3'-phosphate
  modified_base 7: mod_base = OTHER; note = 2'-deoxy-2'-fluoroadenosine-3'-phosphate
  modified_base 8: mod_base = OTHER; note = 2'-O-methyluridine-3'-phosphate
  modified_base 9: mod_base = OTHER; note = 2'-deoxy-2'-fluoroguanosine-3'-phosphate
  modified_base 10: mod_base = OTHER; note = 2'-deoxy-2'-fluorouridine-3'-phosphate
  modified_base 11: mod_base = OTHER; note = 2'-deoxy-2'-fluoroguanosine-3'-phosphate
  modified_base 12: mod_base = OTHER; note = 2'-O-methyladenosine-3'-phosphate
  modified_base 13: mod_base = OTHER; note = 2'-O-methyladenosine-3'-phosphate
  modified_base 14: mod_base = OTHER; note = 2'-O-methylguanosine-3'-phosphate
  modified_base 15: mod_base = OTHER; note = 2'-O-methyluridine-3'-phosphate
  modified_base 16: mod_base = OTHER; note = 2'-O-methylguanosine-3'-phosphate
  modified_base 17: mod_base = OTHER; note = 2'-O-methyladenosine-3'-phosphate
  modified_base 18: mod_base = OTHER; note = 2'-O-methyluridine-3'-phosphate
  modified_base 19: mod_base = OTHER; note = 2'-O-methyluridine-3'-phosphorothioate
  modified_base 20: mod_base = OTHER; note = 2'-O-methyluridine-3'-phosphorothioate
  modified_base 21: mod_base = OTHER; note = 2'-O-methyladenosine
gtgcctatgtgaagtgattta

SEQ ID NO: 11404 - RNA, 21 nt, synthetic construct
  source 1..21: mol_type = other RNA
  modified_base 1: mod_base = OTHER; note = 2'-O-methyluridine-3'-phosphorothioate
  modified_base 2: mod_base = OTHER; note = 2'-O-methylguanosine-3'-phosphorothioate
  modified_base 3: mod_base = OTHER; note = 2'-O-methylcytidine-3'-phosphate
  modified_base 4: mod_base = OTHER; note = 2'-O-methylcytidine-3'-phosphate
  modified_base 5: mod_base = OTHER; note = 2'-O-methyluridine-3'-phosphate
  modified_base 6: mod_base = OTHER; note = 2'-O-docosanyl-adenosine-3'-phosphate
  modified_base 7: mod_base = OTHER; note = 2'-deoxy-2'-fluorouridine-3'-phosphate
  modified_base 8: mod_base = OTHER; note = 2'-O-methylguanosine-3'-phosphate
  modified_base 9: mod_base = OTHER; note = 2'-deoxy-2'-fluorouridine-3'-phosphate
  modified_base 10: mod_base = OTHER; note = 2'-deoxy-2'-fluoroguanosine-3'-phosphate
  modified_base 11: mod_base = OTHER; note = 2'-deoxy-2'-fluoroadenosine-3'-phosphate
  modified_base 12: mod_base = OTHER; note = 2'-O-methyladenosine-3'-phosphate
  modified_base 13: mod_base = OTHER; note = 2'-O-methylguanosine-3'-phosphate
  modified_base 14: mod_base = OTHER; note = 2'-O-methyluridine-3'-phosphate
  modified_base 15: mod_base = OTHER; note = 2'-O-methylguanosine-3'-phosphate
  modified_base 16: mod_base = OTHER; note = 2'-O-methyladenosine-3'-phosphate
  modified_base 17: mod_base = OTHER; note = 2'-O-methyluridine-3'-phosphate
  modified_base 18: mod_base = OTHER; note = 2'-O-methyluridine-3'-phosphate
  modified_base 19: mod_base = OTHER; note = 2'-O-methyluridine-3'-phosphorothioate
  modified_base 20: mod_base = OTHER; note = 2'-O-methyluridine-3'-phosphorothioate
  modified_base 21: mod_base = OTHER; note = 2'-O-methyladenosine
tgcctatgtgaagtgatttta

SEQ ID NO: 11405 - RNA, 21 nt, synthetic construct
  source 1..21: mol_type = other RNA
  modified_base 1: mod_base = OTHER; note = 2'-O-methylguanosine-3'-phosphorothioate
  modified_base 2: mod_base = OTHER; note = 2'-O-methylcytidine-3'-phosphorothioate
  modified_base 3: mod_base = OTHER; note = 2'-O-methylcytidine-3'-phosphate
  modified_base 4: mod_base = OTHER; note = 2'-O-methyluridine-3'-phosphate
  modified_base 5: mod_base = OTHER; note = 2'-O-methyladenosine-3'-phosphate
  modified_base 6: mod_base = OTHER; note = 2'-O-docosanyl-uridine-3'-phosphate
  modified_base 7: mod_base = OTHER; note = 2'-deoxy-2'-fluoroguanosine-3'-phosphate
  modified_base 8: mod_base = OTHER; note = 2'-O-methyluridine-3'-phosphate
  modified_base 9: mod_base = OTHER; note = 2'-deoxy-2'-fluoroguanosine-3'-phosphate
  modified_base 10: mod_base = OTHER; note = 2'-deoxy-2'-fluoroadenosine-3'-phosphate
  modified_base 11: mod_base = OTHER; note = 2'-deoxy-2'-fluoroadenosine-3'-phosphate
  modified_base 12: mod_base = OTHER; note = 2'-O-methylguanosine-3'-phosphate
  modified_base 13: mod_base = OTHER; note = 2'-O-methyluridine-3'-phosphate
  modified_base 14: mod_base = OTHER; note = 2'-O-methylguanosine-3'-phosphate
  modified_base 15: mod_base = OTHER; note = 2'-O-methyladenosine-3'-phosphate
  modified_base 16: mod_base = OTHER; note = 2'-O-methyluridine-3'-phosphate
  modified_base 17: mod_base = OTHER; note = 2'-O-methyluridine-3'-phosphate
  modified_base 18: mod_base = OTHER; note = 2'-O-methyluridine-3'-phosphate
  modified_base 19: mod_base = OTHER; note = 2'-O-methyluridine-3'-phosphorothioate
  modified_base 20: mod_base = OTHER; note = 2'-O-methyluridine-3'-phosphorothioate
  modified_base 21: mod_base = OTHER; note = 2'-O-methyladenosine
gcctatgtgaagtgattttta

SEQ ID NO: 11406 - RNA, 21 nt, synthetic construct
  source 1..21: mol_type = other RNA
  modified_base 1: mod_base = OTHER; note = 2'-O-methylcytidine-3'-phosphorothioate
  modified_base 2: mod_base = OTHER; note = 2'-O-methylcytidine-3'-phosphorothioate
  modified_base 3: mod_base = OTHER; note = 2'-O-methyluridine-3'-phosphate
  modified_base 4: mod_base = OTHER; note = 2'-O-methyladenosine-3'-phosphate
  modified_base 5: mod_base = OTHER; note = 2'-O-methyluridine-3'-phosphate
  modified_base 6: mod_base = OTHER; note = 2'-O-docosanyl-guanosine-3'-phosphate
  modified_base 7: mod_base = OTHER; note = 2'-deoxy-2'-fluorouridine-3'-phosphate
  modified_base 8: mod_base = OTHER; note = 2'-O-methylguanosine-3'-phosphate
  modified_base 9: mod_base = OTHER; note = 2'-deoxy-2'-fluoroadenosine-3'-phosphate
  modified_base 10: mod_base = OTHER; note = 2'-deoxy-2'-fluoroadenosine-3'-phosphate
  modified_base 11: mod_base = OTHER; note = 2'-deoxy-2'-fluoroguanosine-3'-phosphate
  modified_base 12: mod_base = OTHER; note = 2'-O-methyluridine-3'-phosphate
  modified_base 13: mod_base = OTHER; note = 2'-O-methylguanosine-3'-phosphate
  modified_base 14: mod_base = OTHER; note = 2'-O-methyladenosine-3'-phosphate
  modified_base 15: mod_base = OTHER; note = 2'-O-methyluridine-3'-phosphate
  modified_base 16: mod_base = OTHER; note = 2'-O-methyluridine-3'-phosphate
  modified_base 17: mod_base = OTHER; note = 2'-O-methyluridine-3'-phosphate
  modified_base 18: mod_base = OTHER; note = 2'-O-methyluridine-3'-phosphate
  modified_base 19: mod_base = OTHER; note = 2'-O-methyluridine-3'-phosphorothioate
  modified_base 20: mod_base = OTHER; note = 2'-O-methyladenosine-3'-phosphorothioate
  modified_base 21: mod_base = OTHER; note = 2'-O-methyladenosine
cctatgtgaagtgatttttaa

SEQ ID NO: 11407 - RNA, 21 nt, synthetic construct
  source 1..21: mol_type = other RNA
  modified_base 1: mod_base = OTHER; note = 2'-O-methylcytidine-3'-phosphorothioate
  modified_base 2: mod_base = OTHER; note = 2'-O-methyluridine-3'-phosphorothioate
  modified_base 3: mod_base = OTHER; note = 2'-O-methyladenosine-3'-phosphate
  modified_base 4: mod_base = OTHER; note = 2'-O-methyluridine-3'-phosphate
  modified_base 5: mod_base = OTHER; note = 2'-O-methylguanosine-3'-phosphate
  modified_base 6: mod_base = OTHER; note = 2'-O-docosanyl-uridine-3'-phosphate
  modified_base 7: mod_base = OTHER; note = 2'-deoxy-2'-fluoroguanosine-3'-phosphate
  modified_base 8: mod_base = OTHER; note = 2'-O-methyladenosine-3'-phosphate
  modified_base 9: mod_base = OTHER; note = 2'-deoxy-2'-fluoroadenosine-3'-phosphate
  modified_base 10: mod_base = OTHER; note = 2'-deoxy-2'-fluoroguanosine-3'-phosphate
  modified_base 11: mod_base = OTHER; note = 2'-deoxy-2'-fluorouridine-3'-phosphate
  modified_base 12: mod_base = OTHER; note = 2'-O-methylguanosine-3'-phosphate
  modified_base 13: mod_base = OTHER; note = 2'-O-methyladenosine-3'-phosphate
  modified_base 14: mod_base = OTHER; note = 2'-O-methyluridine-3'-phosphate
  modified_base 15: mod_base = OTHER; note = 2'-O-methyluridine-3'-phosphate
  modified_base 16: mod_base = OTHER; note = 2'-O-methyluridine-3'-phosphate
  modified_base 17: mod_base = OTHER; note = 2'-O-methyluridine-3'-phosphate
  modified_base 18: mod_base = OTHER; note = 2'-O-methyluridine-3'-phosphate
  modified_base 19: mod_base = OTHER; note = 2'-O-methyladenosine-3'-phosphorothioate
  modified_base 20: mod_base = OTHER; note = 2'-O-methyladenosine-3'-phosphorothioate
  modified_base 21: mod_base = OTHER; note = 2'-O-methyladenosine
ctatgtgaagtgatttttaaa

SEQ ID NO: 11408 - RNA, 21 nt, synthetic construct
  source 1..21: mol_type = other RNA
  modified_base 1: mod_base = OTHER; note = 2'-O-methyluridine-3'-phosphorothioate
  modified_base 2: mod_base = OTHER; note = 2'-O-methyladenosine-3'-phosphorothioate
  modified_base 3: mod_base = OTHER; note = 2'-O-methyluridine-3'-phosphate
  modified_base 4: mod_base = OTHER; note = 2'-O-methylguanosine-3'-phosphate
  modified_base 5: mod_base = OTHER; note = 2'-O-methyluridine-3'-phosphate
  modified_base 6: mod_base = OTHER; note = 2'-O-docosanyl-guanosine-3'-phosphate
  modified_base 7: mod_base = OTHER; note = 2'-deoxy-2'-fluoroadenosine-3'-phosphate
  modified_base 8: mod_base = OTHER; note = 2'-O-methyladenosine-3'-phosphate
  modified_base 9: mod_base = OTHER; note = 2'-deoxy-2'-fluoroguanosine-3'-phosphate
  modified_base 10: mod_base = OTHER; note = 2'-deoxy-2'-fluorouridine-3'-phosphate
  modified_base 11: mod_base = OTHER; note = 2'-deoxy-2'-fluoroguanosine-3'-phosphate
  modified_base 12: mod_base = OTHER; note = 2'-O-methyladenosine-3'-phosphate
  modified_base 13: mod_base = OTHER; note = 2'-O-methyluridine-3'-phosphate
  modified_base 14: mod_base = OTHER; note = 2'-O-methyluridine-3'-phosphate
  modified_base 15: mod_base = OTHER; note = 2'-O-methyluridine-3'-phosphate
  modified_base 16: mod_base = OTHER; note = 2'-O-methyluridine-3'-phosphate
  modified_base 17: mod_base = OTHER; note = 2'-O-methyluridine-3'-phosphate
  modified_base 18: mod_base = OTHER; note = 2'-O-methyladenosine-3'-phosphate
  modified_base 19: mod_base = OTHER; note = 2'-O-methyladenosine-3'-phosphorothioate
  modified_base 20: mod_base = OTHER; note = 2'-O-methyladenosine-3'-phosphorothioate
  modified_base 21: mod_base = OTHER; note = 2'-O-methyladenosine
tatgtgaagtgatttttaaaa

SEQ ID NO: 11409 - RNA, 21 nt, synthetic construct
  source 1..21: mol_type = other RNA
  modified_base 1: mod_base = OTHER; note = 2'-O-methylguanosine-3'-phosphorothioate
  modified_base 2: mod_base = OTHER; note = 2'-O-methyladenosine-3'-phosphorothioate
  modified_base 3: mod_base = OTHER; note = 2'-O-methyladenosine-3'-phosphate
  modified_base 4: mod_base = OTHER; note = 2'-O-methylguanosine-3'-phosphate
  modified_base 5: mod_base = OTHER; note = 2'-O-methyluridine-3'-phosphate
  modified_base 6: mod_base = OTHER; note = 2'-O-docosanyl-guanosine-3'-phosphate
  modified_base 7: mod_base = OTHER; note = 2'-deoxy-2'-fluoroadenosine-3'-phosphate
  modified_base 8: mod_base = OTHER; note = 2'-O-methyluridine-3'-phosphate
  modified_base 9: mod_base = OTHER; note = 2'-deoxy-2'-fluorouridine-3'-phosphate
  modified_base 10: mod_base = OTHER; note = 2'-deoxy-2'-fluorouridine-3'-phosphate
  modified_base 11: mod_base = OTHER; note = 2'-deoxy-2'-fluorouridine-3'-phosphate
  modified_base 12: mod_base = OTHER; note = 2'-O-methyluridine-3'-phosphate
  modified_base 13: mod_base = OTHER; note = 2'-O-methyladenosine-3'-phosphate
  modified_base 14: mod_base = OTHER; note = 2'-O-methyladenosine-3'-phosphate
  modified_base 15: mod_base = OTHER; note = 2'-O-methyladenosine-3'-phosphate
  modified_base 16: mod_base = OTHER; note = 2'-O-methyladenosine-3'-phosphate
  modified_base 17: mod_base = OTHER; note = 2'-O-methyladenosine-3'-phosphate
  modified_base 18: mod_base = OTHER; note = 2'-O-methylguanosine-3'-phosphate
  modified_base 19: mod_base = OTHER; note = 2'-O-methyladenosine-3'-phosphorothioate
  modified_base 20: mod_base = OTHER; note = 2'-O-methylguanosine-3'-phosphorothioate
  modified_base 21: mod_base = OTHER; note = 2'-O-methyladenosine
gaagtgatttttaaaaagaga

SEQ ID NO: 11410 - RNA, 21 nt, synthetic construct
  source 1..21: mol_type = other RNA
  modified_base 1: mod_base = OTHER; note = 2'-O-methyladenosine-3'-phosphorothioate
  modified_base 2: mod_base = OTHER; note = 2'-O-methyladenosine-3'-phosphorothioate
  modified_base 3: mod_base = OTHER; note = 2'-O-methylguanosine-3'-phosphate
  modified_base 4: mod_base = OTHER; note = 2'-O-methyluridine-3'-phosphate
  modified_base 5: mod_base = OTHER; note = 2'-O-methylguanosine-3'-phosphate
  modified_base 6: mod_base = OTHER; note = 2'-O-docosanyl-adenosine-3'-phosphate
  modified_base 7: mod_base = OTHER; note = 2'-deoxy-2'-fluorouridine-3'-phosphate
  modified_base 8: mod_base = OTHER; note = 2'-O-methyluridine-3'-phosphate
  modified_base 9: mod_base = OTHER; note = 2'-deoxy-2'-fluorouridine-3'-phosphate
  modified_base 10: mod_base = OTHER; note = 2'-deoxy-2'-fluorouridine-3'-phosphate
  modified_base 11: mod_base = OTHER; note = 2'-deoxy-2'-fluorouridine-3'-phosphate
  modified_base 12: mod_base = OTHER; note = 2'-O-methyladenosine-3'-phosphate
  modified_base 13: mod_base = OTHER; note = 2'-O-methyladenosine-3'-phosphate
  modified_base 14: mod_base = OTHER; note = 2'-O-methyladenosine-3'-phosphate
  modified_base 15: mod_base = OTHER; note = 2'-O-methyladenosine-3'-phosphate
  modified_base 16: mod_base = OTHER; note = 2'-O-methyladenosine-3'-phosphate
  modified_base 17: mod_base = OTHER; note = 2'-O-methylguanosine-3'-phosphate
  modified_base 18: mod_base = OTHER; note = 2'-O-methyladenosine-3'-phosphate
  modified_base 19: mod_base = OTHER; note = 2'-O-methylguanosine-3'-phosphorothioate
  modified_base 20: mod_base = OTHER; note = 2'-O-methylcytidine-3'-phosphorothioate
  modified_base 21: mod_base = OTHER; note = 2'-O-methyladenosine
aagtgatttttaaaaagagca

SEQ ID NO: 11411 - RNA, 21 nt, synthetic construct
  source 1..21: mol_type = other RNA
  modified_base 1: mod_base = OTHER; note = 2'-O-methyluridine-3'-phosphorothioate
  modified_base 2: mod_base = OTHER; note = 2'-O-methylguanosine-3'-phosphorothioate
  modified_base 3: mod_base = OTHER; note = 2'-O-methyladenosine-3'-phosphate
  modified_base 4: mod_base = OTHER; note = 2'-O-methyluridine-3'-phosphate
  modified_base 5: mod_base = OTHER; note = 2'-O-methyluridine-3'-phosphate
  modified_base 6: mod_base = OTHER; note = 2'-O-docosanyl-uridine-3'-phosphate
  modified_base 7: mod_base = OTHER; note = 2'-deoxy-2'-fluorouridine-3'-phosphate
  modified_base 8: mod_base = OTHER; note = 2'-O-methyluridine-3'-phosphate
  modified_base 9: mod_base = OTHER; note = 2'-deoxy-2'-fluoroadenosine-3'-phosphate
  modified_base 10: mod_base = OTHER; note = 2'-deoxy-2'-fluoroadenosine-3'-phosphate
  modified_base 11: mod_base = OTHER; note = 2'-deoxy-2'-fluoroadenosine-3'-phosphate
  modified_base 12: mod_base = OTHER; note = 2'-O-methyladenosine-3'-phosphate
  modified_base 13: mod_base = OTHER; note = 2'-O-methyladenosine-3'-phosphate
  modified_base 14: mod_base = OTHER; note = 2'-O-methylguanosine-3'-phosphate
  modified_base 15: mod_base = OTHER; note = 2'-O-methyladenosine-3'-phosphate
  modified_base 16: mod_base = OTHER; note = 2'-O-methylguanosine-3'-phosphate
  modified_base 17: mod_base = OTHER; note = 2'-O-methylcytidine-3'-phosphate
  modified_base 18: mod_base = OTHER; note = 2'-O-methylcytidine-3'-phosphate
  modified_base 19: mod_base = OTHER; note = 2'-O-methyluridine-3'-phosphorothioate
  modified_base 20: mod_base = OTHER; note = 2'-O-methyladenosine-3'-phosphorothioate
  modified_base 21: mod_base = OTHER; note = 2'-O-methyladenosine
tgatttttaaaaagagcctaa

SEQ ID NO: 11412 - RNA, 21 nt, synthetic construct
  source 1..21: mol_type = other RNA
  modified_base 1: mod_base = OTHER; note = 2'-O-methylguanosine-3'-phosphorothioate
  modified_base 2: mod_base = OTHER; note = 2'-O-methyladenosine-3'-phosphorothioate
  modified_base 3: mod_base = OTHER; note = 2'-O-methyluridine-3'-phosphate
  modified_base 4: mod_base = OTHER; note = 2'-O-methyluridine-3'-phosphate
  modified_base 5: mod_base = OTHER; note = 2'-O-methyluridine-3'-phosphate
  modified_base 6: mod_base = OTHER; note = 2'-O-docosanyl-uridine-3'-phosphate
  modified_base 7: mod_base = OTHER; note = 2'-deoxy-2'-fluorouridine-3'-phosphate
  modified_base 8: mod_base = OTHER; note = 2'-O-methyladenosine-3'-phosphate
  modified_base 9: mod_base = OTHER; note = 2'-deoxy-2'-fluoroadenosine-3'-phosphate
  modified_base 10: mod_base = OTHER; note = 2'-deoxy-2'-fluoroadenosine-3'-phosphate
  modified_base 11: mod_base = OTHER; note = 2'-deoxy-2'-fluoroadenosine-3'-phosphate
  modified_base 12: mod_base = OTHER; note = 2'-O-methyladenosine-3'-phosphate
  modified_base 13: mod_base = OTHER; note = 2'-O-methylguanosine-3'-phosphate
  modified_base 14: mod_base = OTHER; note = 2'-O-methyladenosine-3'-phosphate
  modified_base 15: mod_base = OTHER; note = 2'-O-methylguanosine-3'-phosphate
  modified_base 16: mod_base = OTHER; note = 2'-O-methylcytidine-3'-phosphate
  modified_base 17: mod_base = OTHER; note = 2'-O-methylcytidine-3'-phosphate
  modified_base 18: mod_base = OTHER; note = 2'-O-methyluridine-3'-phosphate
  modified_base 19: mod_base = OTHER; note = 2'-O-methyladenosine-3'-phosphorothioate
  modified_base 20: mod_base = OTHER; note = 2'-O-methyluridine-3'-phosphorothioate
  modified_base 21: mod_base = OTHER; note = 2'-O-methyladenosine
gatttttaaaaagagcctata

SEQ ID NO: 11413 - RNA, 21 nt, synthetic construct
  source 1..21: mol_type = other RNA
  modified_base 1: mod_base = OTHER; note = 2'-O-methyladenosine-3'-phosphorothioate
  modified_base 2: mod_base = OTHER; note = 2'-O-methyluridine-3'-phosphorothioate
  modified_base 3: mod_base = OTHER; note = 2'-O-methyluridine-3'-phosphate
  modified_base 4: mod_base = OTHER; note = 2'-O-methyluridine-3'-phosphate
  modified_base 5: mod_base = OTHER; note = 2'-O-methyluridine-3'-phosphate
  modified_base 6: mod_base = OTHER; note = 2'-O-docosanyl-uridine-3'-phosphate
  modified_base 7: mod_base = OTHER; note = 2'-deoxy-2'-fluoroadenosine-3'-phosphate
  modified_base 8: mod_base = OTHER; note = 2'-O-methyladenosine-3'-phosphate
  modified_base 9: mod_base = OTHER; note = 2'-deoxy-2'-fluoroadenosine-3'-phosphate
  modified_base 10: mod_base = OTHER; note = 2'-deoxy-2'-fluoroadenosine-3'-phosphate
  modified_base 11: mod_base = OTHER; note = 2'-deoxy-2'-fluoroadenosine-3'-phosphate
  modified_base 12: mod_base = OTHER; note = 2'-O-methylguanosine-3'-phosphate
  modified_base 13: mod_base = OTHER; note = 2'-O-methyladenosine-3'-phosphate
  modified_base 14: mod_base = OTHER; note = 2'-O-methylguanosine-3'-phosphate
  modified_base 15: mod_base = OTHER; note = 2'-O-methylcytidine-3'-phosphate
  modified_base 16: mod_base = OTHER; note = 2'-O-methylcytidine-3'-phosphate
  modified_base 17: mod_base = OTHER; note = 2'-O-methyluridine-3'-phosphate
  modified_base 18: mod_base = OTHER; note = 2'-O-methyladenosine-3'-phosphate
  modified_base 19: mod_base = OTHER; note = 2'-O-methyluridine-3'-phosphorothioate
  modified_base 20: mod_base = OTHER; note = 2'-O-methylguanosine-3'-phosphorothioate
  modified_base 21: mod_base = OTHER; note = 2'-O-methyladenosine
atttttaaaaagagcctatga

SEQ ID NO: 11414 - RNA, 21 nt, synthetic construct
  source 1..21: mol_type = other RNA
  modified_base 1: mod_base = OTHER; note = 2'-O-methyluridine-3'-phosphorothioate
  modified_base 2: mod_base = OTHER; note = 2'-O-methyluridine-3'-phosphorothioate
  modified_base 3: mod_base = OTHER; note = 2'-O-methyluridine-3'-phosphate
  modified_base 4: mod_base = OTHER; note = 2'-O-methyluridine-3'-phosphate
  modified_base 5: mod_base = OTHER; note = 2'-O-methyluridine-3'-phosphate
  modified_base 6: mod_base = OTHER; note = 2'-O-docosanyl-adenosine-3'-phosphate
  modified_base 7: mod_base = OTHER; note = 2'-deoxy-2'-fluoroadenosine-3'-phosphate
  modified_base 8: mod_base = OTHER; note = 2'-O-methyladenosine-3'-phosphate
  modified_base 9: mod_base = OTHER; note = 2'-deoxy-2'-fluoroadenosine-3'-phosphate
  modified_base 10: mod_base = OTHER; note = 2'-deoxy-2'-fluoroadenosine-3'-phosphate
  modified_base 11: mod_base = OTHER; note = 2'-deoxy-2'-fluoroguanosine-3'-phosphate
  modified_base 12: mod_base = OTHER; note = 2'-O-methyladenosine-3'-phosphate
  modified_base 13: mod_base = OTHER; note = 2'-O-methylguanosine-3'-phosphate
  modified_base 14: mod_base = OTHER; note = 2'-O-methylcytidine-3'-phosphate
  modified_base 15: mod_base = OTHER; note = 2'-O-methylcytidine-3'-phosphate
  modified_base 16: mod_base = OTHER; note = 2'-O-methyluridine-3'-phosphate
  modified_base 17: mod_base = OTHER; note = 2'-O-methyladenosine-3'-phosphate
  modified_base 18: mod_base = OTHER; note = 2'-O-methyluridine-3'-phosphate
  modified_base 19: mod_base = OTHER; note = 2'-O-methylguanosine-3'-phosphorothioate
  modified_base 20: mod_base = OTHER; note = 2'-O-methyluridine-3'-phosphorothioate
  modified_base 21: mod_base = OTHER; note = 2'-O-methyladenosine
tttttaaaaagagcctatgta

SEQ ID NO: 11415 - RNA, 21 nt, synthetic construct
  source 1..21: mol_type = other RNA
  modified_base 1: mod_base = OTHER; note = 2'-O-methyluridine-3'-phosphorothioate
  modified_base 2: mod_base = OTHER; note = 2'-O-methyluridine-3'-phosphorothioate
  modified_base 3: mod_base = OTHER; note = 2'-O-methyluridine-3'-phosphate
  modified_base 4: mod_base = OTHER; note = 2'-O-methyluridine-3'-phosphate
  modified_base 5: mod_base = OTHER; note = 2'-O-methyladenosine-3'-phosphate
  modified_base 6: mod_base = OTHER; note = 2'-O-docosanyl-adenosine-3'-phosphate
  modified_base 7: mod_base = OTHER; note = 2'-deoxy-2'-fluoroadenosine-3'-phosphate
  modified_base 8: mod_base = OTHER; note = 2'-O-methyladenosine-3'-phosphate
  modified_base 9: mod_base = OTHER; note = 2'-deoxy-2'-fluoroadenosine-3'-phosphate
  modified_base 10: mod_base = OTHER; note = 2'-deoxy-2'-fluoroguanosine-3'-phosphate
  modified_base 11: mod_base = OTHER; note = 2'-deoxy-2'-fluoroadenosine-3'-phosphate
  modified_base 12: mod_base = OTHER; note = 2'-O-methylguanosine-3'-phosphate
  modified_base 13: mod_base = OTHER; note = 2'-O-methylcytidine-3'-phosphate
  modified_base 14: mod_base = OTHER; note = 2'-O-methylcytidine-3'-phosphate
  modified_base 15: mod_base = OTHER; note = 2'-O-methyluridine-3'-phosphate
  modified_base 16: mod_base = OTHER; note = 2'-O-methyladenosine-3'-phosphate
  modified_base 17: mod_base = OTHER; note = 2'-O-methyluridine-3'-phosphate
  modified_base 18: mod_base = OTHER; note = 2'-O-methylguanosine-3'-phosphate
  modified_base 19: mod_base = OTHER; note = 2'-O-methyluridine-3'-phosphorothioate
  modified_base 20: mod_base = OTHER; note = 2'-O-methylguanosine-3'-phosphorothioate
  modified_base 21: mod_base = OTHER; note = 2'-O-methyladenosine
ttttaaaaagagcctatgtga

SEQ ID NO: 11416 - RNA, 21 nt, synthetic construct
  source 1..21: mol_type = other RNA
  modified_base 1: mod_base = OTHER; note = 2'-O-methyluridine-3'-phosphorothioate
  modified_base 2: mod_base = OTHER; note = 2'-O-methyluridine-3'-phosphorothioate
  modified_base 3: mod_base = OTHER; note = 2'-O-methyluridine-3'-phosphate
  modified_base 4: mod_base = OTHER; note = 2'-O-methyladenosine-3'-phosphate
  modified_base 5: mod_base = OTHER; note = 2'-O-methyladenosine-3'-phosphate
  modified_base 6: mod_base = OTHER; note = 2'-O-docosanyl-adenosine-3'-phosphate
  modified_base 7: mod_base = OTHER; note = 2'-deoxy-2'-fluoroadenosine-3'-phosphate
  modified_base 8: mod_base = OTHER; note = 2'-O-methyladenosine-3'-phosphate
  modified_base 9: mod_base = OTHER; note = 2'-deoxy-2'-fluoroguanosine-3'-phosphate
  modified_base 10: mod_base = OTHER; note = 2'-deoxy-2'-fluoroadenosine-3'-phosphate
  modified_base 11: mod_base = OTHER; note = 2'-deoxy-2'-fluoroguanosine-3'-phosphate
  modified_base 12: mod_base = OTHER; note = 2'-O-methylcytidine-3'-phosphate
  modified_base 13: mod_base = OTHER; note = 2'-O-methylcytidine-3'-phosphate
  modified_base 14: mod_base = OTHER; note = 2'-O-methyluridine-3'-phosphate
  modified_base 15: mod_base = OTHER; note = 2'-O-methyladenosine-3'-phosphate
  modified_base 16: mod_base = OTHER; note = 2'-O-methyluridine-3'-phosphate
  modified_base 17: mod_base = OTHER; note = 2'-O-methylguanosine-3'-phosphate
  modified_base 18: mod_base = OTHER; note = 2'-O-methyluridine-3'-phosphate
  modified_base 19: mod_base = OTHER; note = 2'-O-methylguanosine-3'-phosphorothioate
  modified_base 20: mod_base = OTHER; note = 2'-O-methyladenosine-3'-phosphorothioate
  modified_base 21: mod_base = OTHER; note = 2'-O-methyladenosine
tttaaaaagagcctatgtgaa

SEQ ID NO: 11417 - RNA, 21 nt, synthetic construct
  source 1..21: mol_type = other RNA
  modified_base 1: mod_base = OTHER; note = 2'-O-methyluridine-3'-phosphorothioate
  modified_base 2: mod_base = OTHER; note = 2'-O-methyluridine-3'-phosphorothioate
  modified_base 3: mod_base = OTHER; note = 2'-O-methyladenosine-3'-phosphate
  modified_base 4: mod_base = OTHER; note = 2'-O-methyladenosine-3'-phosphate
  modified_base 5: mod_base = OTHER; note = 2'-O-methyladenosine-3'-phosphate
  modified_base 6: mod_base = OTHER; note = 2'-O-docosanyl-adenosine-3'-phosphate
  modified_base 7: mod_base = OTHER; note = 2'-deoxy-2'-fluoroadenosine-3'-phosphate
  modified_base 8: mod_base = OTHER; note = 2'-O-methylguanosine-3'-phosphate
  modified_base 9: mod_base = OTHER; note = 2'-deoxy-2'-fluoroadenosine-3'-phosphate
  modified_base 10: mod_base = OTHER; note = 2'-deoxy-2'-fluoroguanosine-3'-phosphate
  modified_base 11: mod_base = OTHER; note = 2'-deoxy-2'-fluorocytidine-3'-phosphate
  modified_base 12: mod_base = OTHER; note = 2'-O-methylcytidine-3'-phosphate
  modified_base 13: mod_base = OTHER; note = 2'-O-methyluridine-3'-phosphate
  modified_base 14: mod_base = OTHER; note = 2'-O-methyladenosine-3'-phosphate
  modified_base 15: mod_base = OTHER; note = 2'-O-methyluridine-3'-phosphate
  modified_base 16: mod_base = OTHER; note = 2'-O-methylguanosine-3'-phosphate
  modified_base 17: mod_base = OTHER; note = 2'-O-methyluridine-3'-phosphate
  modified_base 18: mod_base = OTHER; note = 2'-O-methylguanosine-3'-phosphate
  modified_base 19: mod_base = OTHER; note = 2'-O-methyladenosine-3'-phosphorothioate
  modified_base 20: mod_base = OTHER; note = 2'-O-methyladenosine-3'-phosphorothioate
  modified_base 21: mod_base = OTHER; note = 2'-O-methyladenosine
ttaaaaagagcctatgtgaaa

SEQ ID NO: 11418 - RNA, 21 nt, synthetic construct
  source 1..21: mol_type = other RNA
  modified_base 1: mod_base = OTHER; note = 2'-O-methyluridine-3'-phosphorothioate
  modified_base 2: mod_base = OTHER; note = 2'-O-methyladenosine-3'-phosphorothioate
  modified_base 3: mod_base = OTHER; note = 2'-O-methyladenosine-3'-phosphate
  modified_base 4: mod_base = OTHER; note = 2'-O-methyladenosine-3'-phosphate
  modified_base 5: mod_base = OTHER; note = 2'-O-methyladenosine-3'-phosphate
  modified_base 6: mod_base = OTHER; note = 2'-O-docosanyl-adenosine-3'-phosphate
  modified_base 7: mod_base = OTHER; note = 2'-deoxy-2'-fluoroguanosine-3'-phosphate
  modified_base 8: mod_base = OTHER; note = 2'-O-methyladenosine-3'-phosphate
  modified_base 9: mod_base = OTHER; note = 2'-deoxy-2'-fluoroguanosine-3'-phosphate
  modified_base 10: mod_base = OTHER; note = 2'-deoxy-2'-fluorocytidine-3'-phosphate
  modified_base 11: mod_base = OTHER; note = 2'-deoxy-2'-fluorocytidine-3'-phosphate
  modified_base 12: mod_base = OTHER; note = 2'-O-methyluridine-3'-phosphate
  modified_base 13: mod_base = OTHER; note = 2'-O-methyladenosine-3'-phosphate
  modified_base 14: mod_base = OTHER; note = 2'-O-methyluridine-3'-phosphate
  modified_base 15: mod_base = OTHER; note = 2'-O-methylguanosine-3'-phosphate
  modified_base 16: mod_base = OTHER; note = 2'-O-methyluridine-3'-phosphate
  modified_base 17: mod_base = OTHER; note = 2'-O-methylguanosine-3'-phosphate
  modified_base 18: mod_base = OTHER; note = 2'-O-methyladenosine-3'-phosphate
  modified_base 19: mod_base = OTHER; note = 2'-O-methyladenosine-3'-phosphorothioate
  modified_base 20: mod_base = OTHER; note = 2'-O-methylguanosine-3'-phosphorothioate
  modified_base 21: mod_base = OTHER; note = 2'-O-methyladenosine
taaaaagagcctatgtgaaga

SEQ ID NO: 11419 - RNA, 21 nt, synthetic construct
  source 1..21: mol_type = other RNA
  modified_base 1: mod_base = OTHER; note = 2'-O-methyladenosine-3'-phosphorothioate
  modified_base 2: mod_base = OTHER; note = 2'-O-methyladenosine-3'-phosphorothioate
  modified_base 3: mod_base = OTHER; note = 2'-O-methyladenosine-3'-phosphate
  modified_base 4: mod_base = OTHER; note = 2'-O-methyladenosine-3'-phosphate
  modified_base 5: mod_base = OTHER; note = 2'-O-methyladenosine-3'-phosphate
  modified_base 6: mod_base = OTHER; note = 2'-O-docosanyl-guanosine-3'-phosphate
  modified_base 7: mod_base = OTHER; note = 2'-deoxy-2'-fluoroadenosine-3'-phosphate
  modified_base 8: mod_base = OTHER; note = 2'-O-methylguanosine-3'-phosphate
  modified_base 9: mod_base = OTHER; note = 2'-deoxy-2'-fluorocytidine-3'-phosphate
  modified_base 10: mod_base = OTHER; note = 2'-deoxy-2'-fluorocytidine-3'-phosphate
  modified_base 11: mod_base = OTHER; note = 2'-deoxy-2'-fluorouridine-3'-phosphate
  modified_base 12: mod_base = OTHER; note = 2'-O-methyladenosine-3'-phosphate
  modified_base 13: mod_base = OTHER; note = 2'-O-methyluridine-3'-phosphate
  modified_base 14: mod_base = OTHER; note = 2'-O-methylguanosine-3'-phosphate
  modified_base 15: mod_base = OTHER; note = 2'-O-methyluridine-3'-phosphate
  modified_base 16: mod_base = OTHER; note = 2'-O-methylguanosine-3'-phosphate
  modified_base 17: mod_base = OTHER; note = 2'-O-methyladenosine-3'-phosphate
  modified_base 18: mod_base = OTHER; note = 2'-O-methyladenosine-3'-phosphate
  modified_base 19: mod_base = OTHER; note = 2'-O-methylguanosine-3'-phosphorothioate
  modified_base 20: mod_base = OTHER; note = 2'-O-methylguanosine-3'-phosphorothioate
  modified_base 21: mod_base = OTHER; note = 2'-O-methyladenosine
aaaaagagcctatgtgaagga

SEQ ID NO: 11420 - RNA, 21 nt, synthetic construct
  source 1..21: mol_type = other RNA
  modified_base 1: mod_base = OTHER; note = 2'-O-methylguanosine-3'-phosphorothioate
  modified_base 2: mod_base = OTHER; note = 2'-O-methyluridine-3'-phosphorothioate
  modified_base 3: mod_base = OTHER; note = 2'-O-methyladenosine-3'-phosphate
  modified_base 4: mod_base = OTHER; note = 2'-O-methyladenosine-3'-phosphate
  modified_base 5: mod_base = OTHER; note = 2'-O-methyluridine-3'-phosphate
  modified_base 6: mod_base = OTHER; note = 2'-O-docosanyl-cytidine-3'-phosphate
  modified_base 7: mod_base = OTHER; note = 2'-deoxy-2'-fluorouridine-3'-phosphate
  modified_base 8: mod_base = OTHER; note = 2'-O-methyluridine-3'-phosphate
  modified_base 9: mod_base = OTHER; note = 2'-deoxy-2'-fluoroguanosine-3'-phosphate
  modified_base 10: mod_base = OTHER; note = 2'-deoxy-2'-fluorocytidine-3'-phosphate
  modified_base 11: mod_base = OTHER; note = 2'-deoxy-2'-fluorouridine-3'-phosphate
  modified_base 12: mod_base = OTHER; note = 2'-O-methyluridine-3'-phosphate
  modified_base 13: mod_base = OTHER; note = 2'-O-methylguanosine-3'-phosphate
  modified_base 14: mod_base = OTHER; note = 2'-O-methyluridine-3'-phosphate
  modified_base 15: mod_base = OTHER; note = 2'-O-methyluridine-3'-phosphate
  modified_base 16: mod_base = OTHER; note = 2'-O-methylcytidine-3'-phosphate
  modified_base 17: mod_base = OTHER; note = 2'-O-methyluridine-3'-phosphate
  modified_base 18: mod_base = OTHER; note = 2'-O-methyluridine-3'-phosphate
  modified_base 19: mod_base = OTHER; note = 2'-O-methylguanosine-3'-phosphorothioate
  modified_base 20: mod_base = OTHER; note = 2'-O-methyluridine-3'-phosphorothioate
  modified_base 21: mod_base = OTHER; note = 2'-O-methyladenosine
gtaatcttgcttgttcttgta

SEQ ID NO: 11421 - RNA, 21 nt, synthetic construct
  source 1..21: mol_type = other RNA
  modified_base 1: mod_base = OTHER; note = 2'-O-methyluridine-3'-phosphorothioate
  modified_base 2: mod_base = OTHER; note = 2'-O-methyladenosine-3'-phosphorothioate
  modified_base 3: mod_base = OTHER; note = 2'-O-methyladenosine-3'-phosphate
  modified_base 4: mod_base = OTHER; note = 2'-O-methyluridine-3'-phosphate
  modified_base 5: mod_base = OTHER; note = 2'-O-methylcytidine-3'-phosphate
  modified_base 6: mod_base = OTHER; note = 2'-O-docosanyl-uridine-3'-phosphate
  modified_base 7: mod_base = OTHER; note = 2'-deoxy-2'-fluorouridine-3'-phosphate
  modified_base 8: mod_base = OTHER; note = 2'-O-methylguanosine-3'-phosphate
  modified_base 9: mod_base = OTHER; note = 2'-deoxy-2'-fluorocytidine-3'-phosphate
  modified_base 10: mod_base = OTHER; note = 2'-deoxy-2'-fluorouridine-3'-phosphate
  modified_base 11: mod_base = OTHER; note = 2'-deoxy-2'-fluorouridine-3'-phosphate
  modified_base 12: mod_base = OTHER; note = 2'-O-methylguanosine-3'-phosphate
  modified_base 13: mod_base = OTHER; note = 2'-O-methyluridine-3'-phosphate
  modified_base 14: mod_base = OTHER; note = 2'-O-methyluridine-3'-phosphate
  modified_base 15: mod_base = OTHER; note = 2'-O-methylcytidine-3'-phosphate
  modified_base 16: mod_base = OTHER; note = 2'-O-methyluridine-3'-phosphate
  modified_base 17: mod_base = OTHER; note = 2'-O-methyluridine-3'-phosphate
  modified_base 18: mod_base = OTHER; note = 2'-O-methylguanosine-3'-phosphate
  modified_base 19: mod_base = OTHER; note = 2'-O-methyluridine-3'-phosphorothioate
  modified_base 20: mod_base = OTHER; note = 2'-O-methyluridine-3'-phosphorothioate
  modified_base 21: mod_base = OTHER; note = 2'-O-methyladenosine
taatcttgcttgttcttgtta

SEQ ID NO: 11422 - RNA, 21 nt, synthetic construct
  source 1..21: mol_type = other RNA
  modified_base 1: mod_base = OTHER; note = 2'-O-methyladenosine-3'-phosphorothioate
  modified_base 2: mod_base = OTHER; note = 2'-O-methyladenosine-3'-phosphorothioate
  modified_base 3: mod_base = OTHER; note = 2'-O-methyluridine-3'-phosphate
  modified_base 4: mod_base = OTHER; note = 2'-O-methylcytidine-3'-phosphate
  modified_base 5: mod_base = OTHER; note = 2'-O-methyluridine-3'-phosphate
  modified_base 6: mod_base = OTHER; note = 2'-O-docosanyl-uridine-3'-phosphate
  modified_base 7: mod_base = OTHER; note = 2'-deoxy-2'-fluoroguanosine-3'-phosphate
  modified_base 8: mod_base = OTHER; note = 2'-O-methylcytidine-3'-phosphate
  modified_base 9: mod_base = OTHER; note = 2'-deoxy-2'-fluorouridine-3'-phosphate
  modified_base 10: mod_base = OTHER; note = 2'-deoxy-2'-fluorouridine-3'-phosphate
  modified_base 11: mod_base = OTHER; note = 2'-deoxy-2'-fluoroguanosine-3'-phosphate
  modified_base 12: mod_base = OTHER; note = 2'-O-methyluridine-3'-phosphate
  modified_base 13: mod_base = OTHER; note = 2'-O-methyluridine-3'-phosphate
  modified_base 14: mod_base = OTHER; note = 2'-O-methylcytidine-3'-phosphate
  modified_base 15: mod_base = OTHER; note = 2'-O-methyluridine-3'-phosphate
  modified_base 16: mod_base = OTHER; note = 2'-O-methyluridine-3'-phosphate
  modified_base 17: mod_base = OTHER; note = 2'-O-methylguanosine-3'-phosphate
  modified_base 18: mod_base = OTHER; note = 2'-O-methyluridine-3'-phosphate
  modified_base 19: mod_base = OTHER; note = 2'-O-methyluridine-3'-phosphorothioate
  modified_base 20: mod_base = OTHER; note = 2'-O-methyladenosine-3'-phosphorothioate
  modified_base 21: mod_base = OTHER; note = 2'-O-methyladenosine
aatcttgcttgttcttgttaa

SEQ ID NO: 11423 - RNA, 21 nt, synthetic construct
  source 1..21: mol_type = other RNA
  modified_base 1: mod_base = OTHER; note = 2'-O-methyladenosine-3'-phosphorothioate
  modified_base 2: mod_base = OTHER; note = 2'-O-methyluridine-3'-phosphorothioate
  modified_base 3: mod_base = OTHER; note = 2'-O-methylcytidine-3'-phosphate
  modified_base 4: mod_base = OTHER; note = 2'-O-methyluridine-3'-phosphate
  modified_base 5: mod_base = OTHER; note = 2'-O-methyluridine-3'-phosphate
  modified_base 6: mod_base = OTHER; note = 2'-O-docosanyl-guanosine-3'-phosphate
  modified_base 7: mod_base = OTHER; note = 2'-deoxy-2'-fluorocytidine-3'-phosphate
  modified_base 8: mod_base = OTHER; note = 2'-O-methyluridine-3'-phosphate
  modified_base 9: mod_base = OTHER; note = 2'-deoxy-2'-fluorouridine-3'-phosphate
  modified_base 10: mod_base = OTHER; note = 2'-deoxy-2'-fluoroguanosine-3'-phosphate
  modified_base 11: mod_base = OTHER; note = 2'-deoxy-2'-fluorouridine-3'-phosphate
  modified_base 12: mod_base = OTHER; note = 2'-O-methyluridine-3'-phosphate
  modified_base 13: mod_base = OTHER; note = 2'-O-methylcytidine-3'-phosphate
  modified_base 14: mod_base = OTHER; note = 2'-O-methyluridine-3'-phosphate
  modified_base 15: mod_base = OTHER; note = 2'-O-methyluridine-3'-phosphate
  modified_base 16: mod_base = OTHER; note = 2'-O-methylguanosine-3'-phosphate
  modified_base 17: mod_base = OTHER; note = 2'-O-methyluridine-3'-phosphate
  modified_base 18: mod_base = OTHER; note = 2'-O-methyluridine-3'-phosphate
  modified_base 19: mod_base = OTHER; note = 2'-O-methyladenosine-3'-phosphorothioate
  modified_base 20: mod_base = OTHER; note = 2'-O-methylcytidine-3'-phosphorothioate
  modified_base 21: mod_base = OTHER; note = 2'-O-methyladenosine
atcttgcttgttcttgttaca

SEQ ID NO: 11424 - RNA, 21 nt, synthetic construct
  source 1..21: mol_type = other RNA
  modified_base 1: mod_base = OTHER; note = 2'-O-methyluridine-3'-phosphorothioate
  modified_base 2: mod_base = OTHER; note = 2'-O-methylcytidine-3'-phosphorothioate
  modified_base 3: mod_base = OTHER; note = 2'-O-methyluridine-3'-phosphate
  modified_base 4: mod_base = OTHER; note = 2'-O-methyluridine-3'-phosphate
  modified_base 5: mod_base = OTHER; note = 2'-O-methylguanosine-3'-phosphate
  modified_base 6: mod_base = OTHER; note = 2'-O-docosanyl-cytidine-3'-phosphate
  modified_base 7: mod_base = OTHER; note = 2'-deoxy-2'-fluorouridine-3'-phosphate
  modified_base 8: mod_base = OTHER; note = 2'-O-methyluridine-3'-phosphate
  modified_base 9: mod_base = OTHER; note = 2'-deoxy-2'-fluoroguanosine-3'-phosphate
  modified_base 10: mod_base = OTHER; note = 2'-deoxy-2'-fluorouridine-3'-phosphate
  modified_base 11: mod_base = OTHER; note = 2'-deoxy-2'-fluorouridine-3'-phosphate
  modified_base 12: mod_base = OTHER; note = 2'-O-methylcytidine-3'-phosphate
  modified_base 13: mod_base = OTHER; note = 2'-O-methyluridine-3'-phosphate
  modified_base 14: mod_base = OTHER; note = 2'-O-methyluridine-3'-phosphate
  modified_base 15: mod_base = OTHER; note = 2'-O-methylguanosine-3'-phosphate
  modified_base 16: mod_base = OTHER; note = 2'-O-methyluridine-3'-phosphate
  modified_base 17: mod_base = OTHER; note = 2'-O-methyluridine-3'-phosphate
  modified_base 18: mod_base = OTHER; note = 2'-O-methyladenosine-3'-phosphate
  modified_base 19: mod_base = OTHER; note = 2'-O-methylcytidine-3'-phosphorothioate
  modified_base 20: mod_base = OTHER; note = 2'-O-methyluridine-3'-phosphorothioate
  modified_base 21: mod_base = OTHER; note = 2'-O-methyladenosine
tcttgcttgttcttgttacta

SEQ ID NO: 11425 - RNA, 21 nt, synthetic construct
  source 1..21: mol_type = other RNA
  modified_base 1: mod_base = OTHER; note = 2'-O-methylcytidine-3'-phosphorothioate
  modified_base 2: mod_base = OTHER; note = 2'-O-methyluridine-3'-phosphorothioate
  modified_base 3: mod_base = OTHER; note = 2'-O-methyluridine-3'-phosphate
  modified_base 4: mod_base = OTHER; note = 2'-O-methylguanosine-3'-phosphate
  modified_base 5: mod_base = OTHER; note = 2'-O-methylcytidine-3'-phosphate
  modified_base 6: mod_base = OTHER; note = 2'-O-docosanyl-uridine-3'-phosphate
  modified_base 7: mod_base = OTHER; note = 2'-deoxy-2'-fluorouridine-3'-phosphate
  modified_base 8: mod_base = OTHER; note = 2'-O-methylguanosine-3'-phosphate
  modified_base 9: mod_base = OTHER; note = 2'-deoxy-2'-fluorouridine-3'-phosphate
  modified_base 10: mod_base = OTHER; note = 2'-deoxy-2'-fluorouridine-3'-phosphate
  modified_base 11: mod_base = OTHER; note = 2'-deoxy-2'-fluorocytidine-3'-phosphate
  modified_base 12: mod_base = OTHER; note = 2'-O-methyluridine-3'-phosphate
  modified_base 13: mod_base = OTHER; note = 2'-O-methyluridine-3'-phosphate
  modified_base 14: mod_base = OTHER; note = 2'-O-methylguanosine-3'-phosphate
  modified_base 15: mod_base = OTHER; note = 2'-O-methyluridine-3'-phosphate
  modified_base 16: mod_base = OTHER; note = 2'-O-methyluridine-3'-phosphate
  modified_base 17: mod_base = OTHER; note = 2'-O-methyladenosine-3'-phosphate
  modified_base 18: mod_base = OTHER; note = 2'-O-methylcytidine-3'-phosphate
  modified_base 19: mod_base = OTHER; note = 2'-O-methyluridine-3'-phosphorothioate
  modified_base 20: mod_base = OTHER; note = 2'-O-methyladenosine-3'-phosphorothioate
  modified_base 21: mod_base = OTHER; note = 2'-O-methyladenosine
cttgcttgttcttgttactaa

SEQ ID NO: 11426 - RNA, 21 nt, synthetic construct
  source 1..21: mol_type = other RNA
  modified_base 1: mod_base = OTHER; note = 2'-O-methyluridine-3'-phosphorothioate
  modified_base 2: mod_base = OTHER; note = 2'-O-methyluridine-3'-phosphorothioate
  modified_base 3: mod_base = OTHER; note = 2'-O-methylguanosine-3'-phosphate
  modified_base 4: mod_base = OTHER; note = 2'-O-methylcytidine-3'-phosphate
  modified_base 5: mod_base = OTHER; note = 2'-O-methyluridine-3'-phosphate
  modified_base 6: mod_base = OTHER; note = 2'-O-docosanyl-uridine-3'-phosphate
  modified_base 7: mod_base = OTHER; note = 2'-deoxy-2'-fluoroguanosine-3'-phosphate
  modified_base 8: mod_base = OTHER; note = 2'-O-methyluridine-3'-phosphate
  modified_base 9: mod_base = OTHER; note = 2'-deoxy-2'-fluorouridine-3'-phosphate
  modified_base 10: mod_base = OTHER; note = 2'-deoxy-2'-fluorocytidine-3'-phosphate
  modified_base 11: mod_base = OTHER; note = 2'-deoxy-2'-fluorouridine-3'-phosphate
  modified_base 12: mod_base = OTHER; note = 2'-O-methyluridine-3'-phosphate
  modified_base 13: mod_base = OTHER; note = 2'-O-methylguanosine-3'-phosphate
  modified_base 14: mod_base = OTHER; note = 2'-O-methyluridine-3'-phosphate
  modified_base 15: mod_base = OTHER; note = 2'-O-methyluridine-3'-phosphate
  modified_base 16: mod_base = OTHER; note = 2'-O-methyladenosine-3'-phosphate
  modified_base 17: mod_base = OTHER; note = 2'-O-methylcytidine-3'-phosphate
  modified_base 18: mod_base = OTHER; note = 2'-O-methyluridine-3'-phosphate
  modified_base 19: mod_base = OTHER; note = 2'-O-methyladenosine-3'-phosphorothioate
  modified_base 20: mod_base = OTHER; note = 2'-O-methyladenosine-3'-phosphorothioate
  modified_base 21: mod_base = OTHER; note = 2'-O-methyladenosine
ttgcttgttcttgttactaaa

SEQ ID NO: 11427 - RNA, 21 nt, synthetic construct
  source 1..21: mol_type = other RNA
  modified_base 1: mod_base = OTHER; note = 2'-O-methyluridine-3'-phosphorothioate
  modified_base 2: mod_base = OTHER; note = 2'-O-methylguanosine-3'-phosphorothioate
  modified_base 3: mod_base = OTHER; note = 2'-O-methylcytidine-3'-phosphate
  modified_base 4: mod_base = OTHER; note = 2'-O-methyluridine-3'-phosphate
  modified_base 5: mod_base = OTHER; note = 2'-O-methyluridine-3'-phosphate
  modified_base 6: mod_base = OTHER; note = 2'-O-docosanyl-guanosine-3'-phosphate
  modified_base 7: mod_base = OTHER; note = 2'-deoxy-2'-fluorouridine-3'-phosphate
  modified_base 8: mod_base = OTHER; note = 2'-O-methyluridine-3'-phosphate
  modified_base 9: mod_base = OTHER; note = 2'-deoxy-2'-fluorocytidine-3'-phosphate
  modified_base 10: mod_base = OTHER; note = 2'-deoxy-2'-fluorouridine-3'-phosphate
  modified_base 11: mod_base = OTHER; note = 2'-deoxy-2'-fluorouridine-3'-phosphate
  modified_base 12: mod_base = OTHER; note = 2'-O-methylguanosine-3'-phosphate
  modified_base 13: mod_base = OTHER; note = 2'-O-methyluridine-3'-phosphate
  modified_base 14: mod_base = OTHER; note = 2'-O-methyluridine-3'-phosphate
  modified_base 15: mod_base = OTHER; note = 2'-O-methyladenosine-3'-phosphate
  modified_base 16: mod_base = OTHER; note = 2'-O-methylcytidine-3'-phosphate
  modified_base 17: mod_base = OTHER; note = 2'-O-methyluridine-3'-phosphate
  modified_base 18: mod_base = OTHER; note = 2'-O-methyladenosine-3'-phosphate
  modified_base 19: mod_base = OTHER; note = 2'-O-methyladenosine-3'-phosphorothioate
  modified_base 20: mod_base = OTHER; note = 2'-O-methyluridine-3'-phosphorothioate
  modified_base 21: mod_base = OTHER; note = 2'-O-methyladenosine
tgcttgttcttgttactaata

SEQ ID NO: 11428 - RNA, 21 nt, synthetic construct
  source 1..21: mol_type = other RNA
  modified_base 1: mod_base = OTHER; note = 2'-O-methylguanosine-3'-phosphorothioate
  modified_base 2: mod_base = OTHER; note = 2'-O-methylcytidine-3'-phosphorothioate
  modified_base 3: mod_base = OTHER; note = 2'-O-methyluridine-3'-phosphate
  modified_base 4: mod_base = OTHER; note = 2'-O-methyluridine-3'-phosphate
  modified_base 5: mod_base = OTHER; note = 2'-O-methylguanosine-3'-phosphate
  modified_base 6: mod_base = OTHER; note = 2'-O-docosanyl-uridine-3'-phosphate
  modified_base 7: mod_base = OTHER; note = 2'-deoxy-2'-fluorouridine-3'-phosphate
  modified_base 8: mod_base = OTHER; note = 2'-O-methylcytidine-3'-phosphate
  modified_base 9: mod_base = OTHER; note = 2'-deoxy-2'-fluorouridine-3'-phosphate
  modified_base 10: mod_base = OTHER; note = 2'-deoxy-2'-fluorouridine-3'-phosphate
  modified_base 11: mod_base = OTHER; note = 2'-deoxy-2'-fluoroguanosine-3'-phosphate
  modified_base 12: mod_base = OTHER; note = 2'-O-methyluridine-3'-phosphate
  modified_base 13: mod_base = OTHER; note = 2'-O-methyluridine-3'-phosphate
  modified_base 14: mod_base = OTHER; note = 2'-O-methyladenosine-3'-phosphate
  modified_base 15: mod_base = OTHER; note = 2'-O-methylcytidine-3'-phosphate
  modified_base 16: mod_base = OTHER; note = 2'-O-methyluridine-3'-phosphate
  modified_base 17: mod_base = OTHER; note = 2'-O-methyladenosine-3'-phosphate
  modified_base 18: mod_base = OTHER; note = 2'-O-methyladenosine-3'-phosphate
  modified_base 19: mod_base = OTHER; note = 2'-O-methyluridine-3'-phosphorothioate
  modified_base 20: mod_base = OTHER; note = 2'-O-methyluridine-3'-phosphorothioate
  modified_base 21: mod_base = OTHER; note = 2'-O-methyladenosine
gcttgttcttgttactaatta

SEQ ID NO: 11429 - RNA, 21 nt, synthetic construct
  source 1..21: mol_type = other RNA
  modified_base 1: mod_base = OTHER; note = 2'-O-methylcytidine-3'-phosphorothioate
  modified_base 2: mod_base = OTHER; note = 2'-O-methyluridine-3'-phosphorothioate
  modified_base 3: mod_base = OTHER; note = 2'-O-methyluridine-3'-phosphate
  modified_base 4: mod_base = OTHER; note = 2'-O-methylguanosine-3'-phosphate
  modified_base 5: mod_base = OTHER; note = 2'-O-methyluridine-3'-phosphate
  modified_base 6: mod_base = OTHER; note = 2'-O-docosanyl-uridine-3'-phosphate
  modified_base 7: mod_base = OTHER; note = 2'-deoxy-2'-fluorocytidine-3'-phosphate
  modified_base 8: mod_base = OTHER; note = 2'-O-methyluridine-3'-phosphate
  modified_base 9: mod_base = OTHER; note = 2'-deoxy-2'-fluorouridine-3'-phosphate
  modified_base 10: mod_base = OTHER; note = 2'-deoxy-2'-fluoroguanosine-3'-phosphate
  modified_base 11: mod_base = OTHER; note = 2'-deoxy-2'-fluorouridine-3'-phosphate
  modified_base 12: mod_base = OTHER; note = 2'-O-methyluridine-3'-phosphate
  modified_base 13: mod_base = OTHER; note = 2'-O-methyladenosine-3'-phosphate
  modified_base 14: mod_base = OTHER; note = 2'-O-methylcytidine-3'-phosphate
  modified_base 15: mod_base = OTHER; note = 2'-O-methyluridine-3'-phosphate
  modified_base 16: mod_base = OTHER; note = 2'-O-methyladenosine-3'-phosphate
  modified_base 17: mod_base = OTHER; note = 2'-O-methyladenosine-3'-phosphate
  modified_base 18: mod_base = OTHER; note = 2'-O-methyluridine-3'-phosphate
  modified_base 19: mod_base = OTHER; note = 2'-O-methyluridine-3'-phosphorothioate
  modified_base 20: mod_base = OTHER; note = 2'-O-methyluridine-3'-phosphorothioate
  modified_base 21: mod_base = OTHER; note = 2'-O-methyladenosine
cttgttcttgttactaattta

SEQ ID NO: 11430 - RNA, 21 nt, synthetic construct
  source 1..21: mol_type = other RNA
  modified_base 1: mod_base = OTHER; note = 2'-O-methyluridine-3'-phosphorothioate
  modified_base 2: mod_base = OTHER; note = 2'-O-methyluridine-3'-phosphorothioate
  modified_base 3: mod_base = OTHER; note = 2'-O-methylguanosine-3'-phosphate
  modified_base 4: mod_base = OTHER; note = 2'-O-methyluridine-3'-phosphate
  modified_base 5: mod_base = OTHER; note = 2'-O-methyluridine-3'-phosphate
  modified_base 6: mod_base = OTHER; note = 2'-O-docosanyl-cytidine-3'-phosphate
  modified_base 7: mod_base = OTHER; note = 2'-deoxy-2'-fluorouridine-3'-phosphate
  modified_base 8: mod_base = OTHER; note = 2'-O-methyluridine-3'-phosphate
  modified_base 9: mod_base = OTHER; note = 2'-deoxy-2'-fluoroguanosine-3'-phosphate
  modified_base 10: mod_base = OTHER; note = 2'-deoxy-2'-fluorouridine-3'-phosphate
  modified_base 11: mod_base = OTHER; note = 2'-deoxy-2'-fluorouridine-3'-phosphate
  modified_base 12: mod_base = OTHER; note = 2'-O-methyladenosine-3'-phosphate
  modified_base 13: mod_base = OTHER; note = 2'-O-methylcytidine-3'-phosphate
  modified_base 14: mod_base = OTHER; note = 2'-O-methyluridine-3'-phosphate
  modified_base 15: mod_base = OTHER; note = 2'-O-methyladenosine-3'-phosphate
  modified_base 16: mod_base = OTHER; note = 2'-O-methyladenosine-3'-phosphate
  modified_base 17: mod_base = OTHER; note = 2'-O-methyluridine-3'-phosphate
  modified_base 18: mod_base = OTHER; note = 2'-O-methyluridine-3'-phosphate
  modified_base 19: mod_base = OTHER; note = 2'-O-methyluridine-3'-phosphorothioate
  modified_base 20: mod_base = OTHER; note = 2'-O-methylcytidine-3'-phosphorothioate
  modified_base 21: mod_base = OTHER; note = 2'-O-methyladenosine
ttgttcttgttactaatttca

SEQ ID NO: 11431 - RNA, 21 nt, synthetic construct
  source 1..21: mol_type = other RNA
  modified_base 1: mod_base = OTHER; note = 2'-O-methyluridine-3'-phosphorothioate
  modified_base 2: mod_base = OTHER; note = 2'-O-methylcytidine-3'-phosphorothioate
  modified_base 3: mod_base = OTHER; note = 2'-O-methyluridine-3'-phosphate
  modified_base 4: mod_base = OTHER; note = 2'-O-methylguanosine-3'-phosphate
  modified_base 5: mod_base = OTHER; note = 2'-O-methylcytidine-3'-phosphate
  modified_base 6: mod_base = OTHER; note = 2'-O-docosanyl-adenosine-3'-phosphate
  modified_base 7: mod_base = OTHER; note = 2'-deoxy-2'-fluorouridine-3'-phosphate
  modified_base 8: mod_base = OTHER; note = 2'-O-methyladenosine-3'-phosphate
  modified_base 9: mod_base = OTHER; note = 2'-deoxy-2'-fluorouridine-3'-phosphate
  modified_base 10: mod_base = OTHER; note = 2'-deoxy-2'-fluoroadenosine-3'-phosphate
  modified_base 11: mod_base = OTHER; note = 2'-deoxy-2'-fluorouridine-3'-phosphate
  modified_base 12: mod_base = OTHER; note = 2'-O-methyladenosine-3'-phosphate
  modified_base 13: mod_base = OTHER; note = 2'-O-methyladenosine-3'-phosphate
  modified_base 14: mod_base = OTHER; note = 2'-O-methylguanosine-3'-phosphate
  modified_base 15: mod_base = OTHER; note = 2'-O-methyladenosine-3'-phosphate
  modified_base 16: mod_base = OTHER; note = 2'-O-methyladenosine-3'-phosphate
  modified_base 17: mod_base = OTHER; note = 2'-O-methylcytidine-3'-phosphate
  modified_base 18: mod_base = OTHER; note = 2'-O-methylguanosine-3'-phosphate
  modified_base 19: mod_base = OTHER; note = 2'-O-methyladenosine-3'-phosphorothioate
  modified_base 20: mod_base = OTHER; note = 2'-O-methyladenosine-3'-phosphorothioate
  modified_base 21: mod_base = OTHER; note = 2'-O-methyladenosine
tctgcatatataagaacgaaa

SEQ ID NO: 11432 - RNA, 21 nt, synthetic construct
  source 1..21: mol_type = other RNA
  modified_base 1: mod_base = OTHER; note = 2'-O-methyladenosine-3'-phosphorothioate
  modified_base 2: mod_base = OTHER; note = 2'-O-methylguanosine-3'-phosphorothioate
  modified_base 3: mod_base = OTHER; note = 2'-O-methyladenosine-3'-phosphate
  modified_base 4: mod_base = OTHER; note = 2'-O-methyladenosine-3'-phosphate
  modified_base 5: mod_base = OTHER; note = 2'-O-methyluridine-3'-phosphate
  modified_base 6: mod_base = OTHER; note = 2'-O-docosanyl-guanosine-3'-phosphate
  modified_base 7: mod_base = OTHER; note = 2'-deoxy-2'-fluoroadenosine-3'-phosphate
  modified_base 8: mod_base = OTHER; note = 2'-O-methyluridine-3'-phosphate
  modified_base 9: mod_base = OTHER; note = 2'-deoxy-2'-fluoroadenosine-3'-phosphate
  modified_base 10: mod_base = OTHER; note = 2'-deoxy-2'-fluorouridine-3'-phosphate
  modified_base 11: mod_base = OTHER; note = 2'-deoxy-2'-fluorouridine-3'-phosphate
  modified_base 12: mod_base = OTHER; note = 2'-O-methyluridine-3'-phosphate
  modified_base 13: mod_base = OTHER; note = 2'-O-methylcytidine-3'-phosphate
  modified_base 14: mod_base = OTHER; note = 2'-O-methylcytidine-3'-phosphate
  modified_base 15: mod_base = OTHER; note = 2'-O-methyluridine-3'-phosphate
  modified_base 16: mod_base = OTHER; note = 2'-O-methylguanosine-3'-phosphate
  modified_base 17: mod_base = OTHER; note = 2'-O-methyluridine-3'-phosphate
  modified_base 18: mod_base = OTHER; note = 2'-O-methyluridine-3'-phosphate
  modified_base 19: mod_base = OTHER; note = 2'-O-methyluridine-3'-phosphorothioate
  modified_base 20: mod_base = OTHER; note = 2'-O-methyluridine-3'-phosphorothioate
  modified_base 21: mod_base = OTHER; note = 2'-O-methyladenosine
agaatgatatttcctgtttta

SEQ ID NO: 11433 - RNA, 21 nt, synthetic construct
  source 1..21: mol_type = other RNA
  modified_base 1: mod_base = OTHER; note = 2'-O-methyluridine-3'-phosphorothioate
  modified_base 2: mod_base = OTHER; note = 2'-O-methyluridine-3'-phosphorothioate
  modified_base 3: mod_base = OTHER; note = 2'-O-methylguanosine-3'-phosphate
  modified_base 4: mod_base = OTHER; note = 2'-O-methyluridine-3'-phosphate
  modified_base 5: mod_base = OTHER; note = 2'-O-methyladenosine-3'-phosphate
  modified_base 6: mod_base = OTHER; note = 2'-O-docosanyl-cytidine-3'-phosphate
  modified_base 7: mod_base = OTHER; note = 2'-deoxy-2'-fluoroguanosine-3'-phosphate
  modified_base 8: mod_base = OTHER; note = 2'-O-methyluridine-3'-phosphate
  modified_base 9: mod_base = OTHER; note = 2'-deoxy-2'-fluoroguanosine-3'-phosphate
  modified_base 10: mod_base = OTHER; note = 2'-deoxy-2'-fluorocytidine-3'-phosphate
  modified_base 11: mod_base = OTHER; note = 2'-deoxy-2'-fluorocytidine-3'-phosphate
  modified_base 12: mod_base = OTHER; note = 2'-O-methyluridine-3'-phosphate
  modified_base 13: mod_base = OTHER; note = 2'-O-methylcytidine-3'-phosphate
  modified_base 14: mod_base = OTHER; note = 2'-O-methyladenosine-3'-phosphate
  modified_base 15: mod_base = OTHER; note = 2'-O-methyladenosine-3'-phosphate
  modified_base 16: mod_base = OTHER; note = 2'-O-methyladenosine-3'-phosphate
  modified_base 17: mod_base = OTHER; note = 2'-O-methyluridine-3'-phosphate
  modified_base 18: mod_base = OTHER; note = 2'-O-methyladenosine-3'-phosphate
  modified_base 19: mod_base = OTHER; note = 2'-O-methyladenosine-3'-phosphorothioate
  modified_base 20: mod_base = OTHER; note = 2'-O-methyladenosine-3'-phosphorothioate
  modified_base 21: mod_base = OTHER; note = 2'-O-methyladenosine
ttgtacgtgcctcaaataaaa

SEQ ID NO: 11434 - RNA, 21 nt, synthetic construct
  source 1..21: mol_type = other RNA
  modified_base 1: mod_base = OTHER; note = 2'-O-methyluridine-3'-phosphorothioate
  modified_base 2: mod_base = OTHER; note = 2'-O-methylguanosine-3'-phosphorothioate
  modified_base 3: mod_base = OTHER; note = 2'-O-methylcytidine-3'-phosphate
  modified_base 4: mod_base = OTHER; note = 2'-O-methylcytidine-3'-phosphate
  modified_base 5: mod_base = OTHER; note = 2'-O-methyluridine-3'-phosphate
  modified_base 6: mod_base = OTHER; note = 2'-O-docosanyl-cytidine-3'-phosphate
  modified_base 7: mod_base = OTHER; note = 2'-deoxy-2'-fluoroadenosine-3'-phosphate
  modified_base 8: mod_base = OTHER; note = 2'-O-methyladenosine-3'-phosphate
  modified_base 9: mod_base = OTHER; note = 2'-deoxy-2'-fluoroadenosine-3'-phosphate
  modified_base 10: mod_base = OTHER; note = 2'-deoxy-2'-fluorouridine-3'-phosphate
  modified_base 11: mod_base = OTHER; note = 2'-deoxy-2'-fluoroadenosine-3'-phosphate
  modified_base 12: mod_base = OTHER; note = 2'-O-methyladenosine-3'-phosphate
  modified_base 13: mod_base = OTHER; note = 2'-O-methyladenosine-3'-phosphate
  modified_base 14: mod_base = OTHER; note = 2'-O-methylcytidine-3'-phosphate
  modified_base 15: mod_base = OTHER; note = 2'-O-methyladenosine-3'-phosphate
  modified_base 16: mod_base = OTHER; note = 2'-O-methyladenosine-3'-phosphate
  modified_base 17: mod_base = OTHER; note = 2'-O-methylguanosine-3'-phosphate
  modified_base 18: mod_base = OTHER; note = 2'-O-methyladenosine-3'-phosphate
  modified_base 19: mod_base = OTHER; note = 2'-O-methyladenosine-3'-phosphorothioate
  modified_base 20: mod_base = OTHER; note = 2'-O-methyluridine-3'-phosphorothioate
  modified_base 21: mod_base = OTHER; note = 2'-O-methyladenosine
tgcctcaaataaacaagaata

SEQ ID NO: 11435 - RNA, 21 nt, synthetic construct
  source 1..21: mol_type = other RNA
  modified_base 1: mod_base = OTHER; note = 2'-O-methylguanosine-3'-phosphorothioate
  modified_base 2: mod_base = OTHER; note = 2'-O-methylcytidine-3'-phosphorothioate
  modified_base 3: mod_base = OTHER; note = 2'-O-methylcytidine-3'-phosphate
  modified_base 4: mod_base = OTHER; note = 2'-O-methyluridine-3'-phosphate
  modified_base 5: mod_base = OTHER; note = 2'-O-methylcytidine-3'-phosphate
  modified_base 6: mod_base = OTHER; note = 2'-O-docosanyl-adenosine-3'-phosphate
  modified_base 7: mod_base = OTHER; note = 2'-deoxy-2'-fluoroadenosine-3'-phosphate
  modified_base 8: mod_base = OTHER; note = 2'-O-methyladenosine-3'-phosphate
  modified_base 9: mod_base = OTHER; note = 2'-deoxy-2'-fluorouridine-3'-phosphate
  modified_base 10: mod_base = OTHER; note = 2'-deoxy-2'-fluoroadenosine-3'-phosphate
  modified_base 11: mod_base = OTHER; note = 2'-deoxy-2'-fluoroadenosine-3'-phosphate
  modified_base 12: mod_base = OTHER; note = 2'-O-methyladenosine-3'-phosphate
  modified_base 13: mod_base = OTHER; note = 2'-O-methylcytidine-3'-phosphate
  modified_base 14: mod_base = OTHER; note = 2'-O-methyladenosine-3'-phosphate
  modified_base 15: mod_base = OTHER; note = 2'-O-methyladenosine-3'-phosphate
  modified_base 16: mod_base = OTHER; note = 2'-O-methylguanosine-3'-phosphate
  modified_base 17: mod_base = OTHER; note = 2'-O-methyladenosine-3'-phosphate
  modified_base 18: mod_base = OTHER; note = 2'-O-methyladenosine-3'-phosphate
  modified_base 19: mod_base = OTHER; note = 2'-O-methyluridine-3'-phosphorothioate
  modified_base 20: mod_base = OTHER; note = 2'-O-methylguanosine-3'-phosphorothioate
  modified_base 21: mod_base = OTHER; note = 2'-O-methyladenosine
gcctcaaataaacaagaatga

SEQ ID NO: 11436 - RNA, 21 nt, synthetic construct
  source 1..21: mol_type = other RNA
  modified_base 1: mod_base = OTHER; note = 2'-O-methylcytidine-3'-phosphorothioate
  modified_base 2: mod_base = OTHER; note = 2'-O-methylcytidine-3'-phosphorothioate
  modified_base 3: mod_base = OTHER; note = 2'-O-methyluridine-3'-phosphate
  modified_base 4: mod_base = OTHER; note = 2'-O-methylcytidine-3'-phosphate
  modified_base 5: mod_base = OTHER; note = 2'-O-methyladenosine-3'-phosphate
  modified_base 6: mod_base = OTHER; note = 2'-O-docosanyl-adenosine-3'-phosphate
  modified_base 7: mod_base = OTHER; note = 2'-deoxy-2'-fluoroadenosine-3'-phosphate
  modified_base 8: mod_base = OTHER; note = 2'-O-methyluridine-3'-phosphate
  modified_base 9: mod_base = OTHER; note = 2'-deoxy-2'-fluoroadenosine-3'-phosphate
  modified_base 10: mod_base = OTHER; note = 2'-deoxy-2'-fluoroadenosine-3'-phosphate
  modified_base 11: mod_base = OTHER; note = 2'-deoxy-2'-fluoroadenosine-3'-phosphate
  modified_base 12: mod_base = OTHER; note = 2'-O-methylcytidine-3'-phosphate
  modified_base 13: mod_base = OTHER; note = 2'-O-methyladenosine-3'-phosphate
  modified_base 14: mod_base = OTHER; note = 2'-O-methyladenosine-3'-phosphate
  modified_base 15: mod_base = OTHER; note = 2'-O-methylguanosine-3'-phosphate
  modified_base 16: mod_base = OTHER; note = 2'-O-methyladenosine-3'-phosphate
  modified_base 17: mod_base = OTHER; note = 2'-O-methyladenosine-3'-phosphate
  modified_base 18: mod_base = OTHER; note = 2'-O-methyluridine-3'-phosphate
  modified_base 19: mod_base = OTHER; note = 2'-O-methylguanosine-3'-phosphorothioate
  modified_base 20: mod_base = OTHER; note = 2'-O-methyladenosine-3'-phosphorothioate
  modified_base 21: mod_base = OTHER; note = 2'-O-methyladenosine
cctcaaataaacaagaatgaa

SEQ ID NO: 11437 - RNA, 21 nt, synthetic construct
  source 1..21: mol_type = other RNA
  modified_base 1: mod_base = OTHER; note = 2'-O-methylcytidine-3'-phosphorothioate
  modified_base 2: mod_base = OTHER; note = 2'-O-methyluridine-3'-phosphorothioate
  modified_base 3: mod_base = OTHER; note = 2'-O-methylcytidine-3'-phosphate
  modified_base 4: mod_base = OTHER; note = 2'-O-methyladenosine-3'-phosphate
  modified_base 5: mod_base = OTHER; note = 2'-O-methyladenosine-3'-phosphate
  modified_base 6: mod_base = OTHER; note = 2'-O-docosanyl-adenosine-3'-phosphate
  modified_base 7: mod_base = OTHER; note = 2'-deoxy-2'-fluorouridine-3'-phosphate
  modified_base 8: mod_base = OTHER; note = 2'-O-methyladenosine-3'-phosphate
  modified_base 9: mod_base = OTHER; note = 2'-deoxy-2'-fluoroadenosine-3'-phosphate
  modified_base 10: mod_base = OTHER; note = 2'-deoxy-2'-fluoroadenosine-3'-phosphate
  modified_base 11: mod_base = OTHER; note = 2'-deoxy-2'-fluorocytidine-3'-phosphate
  modified_base 12: mod_base = OTHER; note = 2'-O-methyladenosine-3'-phosphate
  modified_base 13: mod_base = OTHER; note = 2'-O-methyladenosine-3'-phosphate
  modified_base 14: mod_base = OTHER; note = 2'-O-methylguanosine-3'-phosphate
  modified_base 15: mod_base = OTHER; note = 2'-O-methyladenosine-3'-phosphate
  modified_base 16: mod_base = OTHER; note = 2'-O-methyladenosine-3'-phosphate
  modified_base 17: mod_base = OTHER; note = 2'-O-methyluridine-3'-phosphate
  modified_base 18: mod_base = OTHER; note = 2'-O-methylguanosine-3'-phosphate
  modified_base 19: mod_base = OTHER; note = 2'-O-methyladenosine-3'-phosphorothioate
  modified_base 20: mod_base = OTHER; note = 2'-O-methyluridine-3'-phosphorothioate
  modified_base 21: mod_base = OTHER; note = 2'-O-methyladenosine
ctcaaataaacaagaatgata

SEQ ID NO: 11438 - RNA, 21 nt, synthetic construct
  source 1..21: mol_type = other RNA
  modified_base 1: mod_base = OTHER; note = 2'-O-methyluridine-3'-phosphorothioate
  modified_base 2: mod_base = OTHER; note = 2'-O-methylcytidine-3'-phosphorothioate
  modified_base 3: mod_base = OTHER; note = 2'-O-methyladenosine-3'-phosphate
  modified_base 4: mod_base = OTHER; note = 2'-O-methyladenosine-3'-phosphate
  modified_base 5: mod_base = OTHER; note = 2'-O-methyladenosine-3'-phosphate
  modified_base 6: mod_base = OTHER; note = 2'-O-docosanyl-uridine-3'-phosphate
  modified_base 7: mod_base = OTHER; note = 2'-deoxy-2'-fluoroadenosine-3'-phosphate
  modified_base 8: mod_base = OTHER; note = 2'-O-methyladenosine-3'-phosphate
  modified_base 9: mod_base = OTHER; note = 2'-deoxy-2'-fluoroadenosine-3'-phosphate
  modified_base 10: mod_base = OTHER; note = 2'-deoxy-2'-fluorocytidine-3'-phosphate
  modified_base 11: mod_base = OTHER; note = 2'-deoxy-2'-fluoroadenosine-3'-phosphate
  modified_base 12: mod_base = OTHER; note = 2'-O-methyladenosine-3'-phosphate
  modified_base 13: mod_base = OTHER; note = 2'-O-methylguanosine-3'-phosphate
  modified_base 14: mod_base = OTHER; note = 2'-O-methyladenosine-3'-phosphate
  modified_base 15: mod_base = OTHER; note = 2'-O-methyladenosine-3'-phosphate
  modified_base 16: mod_base = OTHER; note = 2'-O-methyluridine-3'-phosphate
  modified_base 17: mod_base = OTHER; note = 2'-O-methylguanosine-3'-phosphate
  modified_base 18: mod_base = OTHER; note = 2'-O-methyladenosine-3'-phosphate
  modified_base 19: mod_base = OTHER; note = 2'-O-methyluridine-3'-phosphorothioate
  modified_base 20: mod_base = OTHER; note = 2'-O-methyladenosine-3'-phosphorothioate
  modified_base 21: mod_base = OTHER; note = 2'-O-methyladenosine
tcaaataaacaagaatgataa

SEQ ID NO: 11439 - RNA, 21 nt, synthetic construct
  source 1..21: mol_type = other RNA
  modified_base 1: mod_base = OTHER; note = 2'-O-methyladenosine-3'-phosphorothioate
  modified_base 2: mod_base = OTHER; note = 2'-O-methyladenosine-3'-phosphorothioate
  modified_base 3: mod_base = OTHER; note = 2'-O-methylcytidine-3'-phosphate
  modified_base 4: mod_base = OTHER; note = 2'-O-methyladenosine-3'-phosphate
  modified_base 5: mod_base = OTHER; note = 2'-O-methyladenosine-3'-phosphate
  modified_base 6: mod_base = OTHER; note = 2'-O-docosanyl-guanosine-3'-phosphate
  modified_base 7: mod_base = OTHER; note = 2'-deoxy-2'-fluoroadenosine-3'-phosphate
  modified_base 8: mod_base = OTHER; note = 2'-O-methyladenosine-3'-phosphate
  modified_base 9: mod_base = OTHER; note = 2'-deoxy-2'-fluorouridine-3'-phosphate
  modified_base 10: mod_base = OTHER; note = 2'-deoxy-2'-fluoroguanosine-3'-phosphate
  modified_base 11: mod_base = OTHER; note = 2'-deoxy-2'-fluoroadenosine-3'-phosphate
  modified_base 12: mod_base = OTHER; note = 2'-O-methyluridine-3'-phosphate
  modified_base 13: mod_base = OTHER; note = 2'-O-methyladenosine-3'-phosphate
  modified_base 14: mod_base = OTHER; note = 2'-O-methyluridine-3'-phosphate
  modified_base 15: mod_base = OTHER; note = 2'-O-methyluridine-3'-phosphate
  modified_base 16: mod_base = OTHER; note = 2'-O-methyluridine-3'-phosphate
  modified_base 17: mod_base = OTHER; note = 2'-O-methylcytidine-3'-phosphate
  modified_base 18: mod_base = OTHER; note = 2'-O-methylcytidine-3'-phosphate
  modified_base 19: mod_base = OTHER; note = 2'-O-methyluridine-3'-phosphorothioate
  modified_base 20: mod_base = OTHER; note = 2'-O-methylguanosine-3'-phosphorothioate
  modified_base 21: mod_base = OTHER; note = 2'-O-methyladenosine
aacaagaatgatatttcctga

SEQ ID NO: 11440 - RNA, 21 nt, synthetic construct
  source 1..21: mol_type = other RNA
  modified_base 1: mod_base = OTHER; note = 2'-O-methyladenosine-3'-phosphorothioate
  modified_base 2: mod_base = OTHER; note = 2'-O-methylcytidine-3'-phosphorothioate
  modified_base 3: mod_base = OTHER; note = 2'-O-methyladenosine-3'-phosphate
  modified_base 4: mod_base = OTHER; note = 2'-O-methyladenosine-3'-phosphate
  modified_base 5: mod_base = OTHER; note = 2'-O-methylguanosine-3'-phosphate
  modified_base 6: mod_base = OTHER; note = 2'-O-docosanyl-adenosine-3'-phosphate
  modified_base 7: mod_base = OTHER; note = 2'-deoxy-2'-fluoroadenosine-3'-phosphate
  modified_base 8: mod_base = OTHER; note = 2'-O-methyluridine-3'-phosphate
  modified_base 9: mod_base = OTHER; note = 2'-deoxy-2'-fluoroguanosine-3'-phosphate
  modified_base 10: mod_base = OTHER; note = 2'-deoxy-2'-fluoroadenosine-3'-phosphate
  modified_base 11: mod_base = OTHER; note = 2'-deoxy-2'-fluorouridine-3'-phosphate
  modified_base 12: mod_base = OTHER; note = 2'-O-methyladenosine-3'-phosphate
  modified_base 13: mod_base = OTHER; note = 2'-O-methyluridine-3'-phosphate
  modified_base 14: mod_base = OTHER; note = 2'-O-methyluridine-3'-phosphate
  modified_base 15: mod_base = OTHER; note = 2'-O-methyluridine-3'-phosphate
  modified_base 16: mod_base = OTHER; note = 2'-O-methylcytidine-3'-phosphate
  modified_base 17: mod_base = OTHER; note = 2'-O-methylcytidine-3'-phosphate
  modified_base 18: mod_base = OTHER; note = 2'-O-methyluridine-3'-phosphate
  modified_base 19: mod_base = OTHER; note = 2'-O-methylguanosine-3'-phosphorothioate
  modified_base 20: mod_base = OTHER; note = 2'-O-methyluridine-3'-phosphorothioate
  modified_base 21: mod_base = OTHER; note = 2'-O-methyladenosine
acaagaatgatatttcctgta

SEQ ID NO: 11441 - RNA, 21 nt, synthetic construct
  source 1..21: mol_type = other RNA
  modified_base 1: mod_base = OTHER; note = 2'-O-methylcytidine-3'-phosphorothioate
  modified_base 2: mod_base = OTHER; note = 2'-O-methyladenosine-3'-phosphorothioate
  modified_base 3: mod_base = OTHER; note = 2'-O-methyladenosine-3'-phosphate
  modified_base 4: mod_base = OTHER; note = 2'-O-methylguanosine-3'-phosphate
  modified_base 5: mod_base = OTHER; note = 2'-O-methyladenosine-3'-phosphate
  modified_base 6: mod_base = OTHER; note = 2'-O-docosanyl-adenosine-3'-phosphate
  modified_base 7: mod_base = OTHER; note = 2'-deoxy-2'-fluorouridine-3'-phosphate
  modified_base 8: mod_base = OTHER; note = 2'-O-methylguanosine-3'-phosphate
  modified_base 9: mod_base = OTHER; note = 2'-deoxy-2'-fluoroadenosine-3'-phosphate
  modified_base 10: mod_base = OTHER; note = 2'-deoxy-2'-fluorouridine-3'-phosphate
  modified_base 11: mod_base = OTHER; note = 2'-deoxy-2'-fluoroadenosine-3'-phosphate
  modified_base 12: mod_base = OTHER; note = 2'-O-methyluridine-3'-phosphate
  modified_base 13: mod_base = OTHER; note = 2'-O-methyluridine-3'-phosphate
  modified_base 14: mod_base = OTHER; note = 2'-O-methyluridine-3'-phosphate
  modified_base 15: mod_base = OTHER; note = 2'-O-methylcytidine-3'-phosphate
  modified_base 16: mod_base = OTHER; note = 2'-O-methylcytidine-3'-phosphate
  modified_base 17: mod_base = OTHER; note = 2'-O-methyluridine-3'-phosphate
  modified_base 18: mod_base = OTHER; note = 2'-O-methylguanosine-3'-phosphate
  modified_base 19: mod_base = OTHER; note = 2'-O-methyluridine-3'-phosphorothioate
  modified_base 20: mod_base = OTHER; note = 2'-O-methyluridine-3'-phosphorothioate
  modified_base 21: mod_base = OTHER; note = 2'-O-methyladenosine
caagaatgatatttcctgtta

SEQ ID NO: 11442 - RNA, 21 nt, synthetic construct
  source 1..21: mol_type = other RNA
  modified_base 1: mod_base = OTHER; note = 2'-O-methyladenosine-3'-phosphorothioate
  modified_base 2: mod_base = OTHER; note = 2'-O-methyladenosine-3'-phosphorothioate
  modified_base 3: mod_base = OTHER; note = 2'-O-methylguanosine-3'-phosphate
  modified_base 4: mod_base = OTHER; note = 2'-O-methyladenosine-3'-phosphate
  modified_base 5: mod_base = OTHER; note = 2'-O-methyladenosine-3'-phosphate
  modified_base 6: mod_base = OTHER; note = 2'-O-docosanyl-uridine-3'-phosphate
  modified_base 7: mod_base = OTHER; note = 2'-deoxy-2'-fluoroguanosine-3'-phosphate
  modified_base 8: mod_base = OTHER; note = 2'-O-methyladenosine-3'-phosphate
  modified_base 9: mod_base = OTHER; note = 2'-deoxy-2'-fluorouridine-3'-phosphate
  modified_base 10: mod_base = OTHER; note = 2'-deoxy-2'-fluoroadenosine-3'-phosphate
  modified_base 11: mod_base = OTHER; note = 2'-deoxy-2'-fluorouridine-3'-phosphate
  modified_base 12: mod_base = OTHER; note = 2'-O-methyluridine-3'-phosphate
  modified_base 13: mod_base = OTHER; note = 2'-O-methyluridine-3'-phosphate
  modified_base 14: mod_base = OTHER; note = 2'-O-methylcytidine-3'-phosphate
  modified_base 15: mod_base = OTHER; note = 2'-O-methylcytidine-3'-phosphate
  modified_base 16: mod_base = OTHER; note = 2'-O-methyluridine-3'-phosphate
  modified_base 17: mod_base = OTHER; note = 2'-O-methylguanosine-3'-phosphate
  modified_base 18: mod_base = OTHER; note = 2'-O-methyluridine-3'-phosphate
  modified_base 19: mod_base = OTHER; note = 2'-O-methyluridine-3'-phosphorothioate
  modified_base 20: mod_base = OTHER; note = 2'-O-methyluridine-3'-phosphorothioate
  modified_base 21: mod_base = OTHER; note = 2'-O-methyladenosine
aagaatgatatttcctgttta

SEQ ID NO: 11443 - RNA, 21 nt, synthetic construct
  source 1..21: mol_type = other RNA
  modified_base 1: mod_base = OTHER; note = 2'-O-methylguanosine-3'-phosphorothioate
  modified_base 2: mod_base = OTHER; note = 2'-O-methyluridine-3'-phosphorothioate
  modified_base 3: mod_base = OTHER; note = 2'-O-methyluridine-3'-phosphate
  modified_base 4: mod_base = OTHER; note = 2'-O-methylguanosine-3'-phosphate
  modified_base 5: mod_base = OTHER; note = 2'-O-methylguanosine-3'-phosphate
  modified_base 6: mod_base = OTHER; note = 2'-O-docosanyl-guanosine-3'-phosphate
  modified_base 7: mod_base = OTHER; note = 2'-deoxy-2'-fluorouridine-3'-phosphate
  modified_base 8: mod_base = OTHER; note = 2'-O-methyladenosine-3'-phosphate
  modified_base 9: mod_base = OTHER; note = 2'-deoxy-2'-fluoroadenosine-3'-phosphate
  modified_base 10: mod_base = OTHER; note = 2'-deoxy-2'-fluoroadenosine-3'-phosphate
  modified_base 11: mod_base = OTHER; note = 2'-deoxy-2'-fluorouridine-3'-phosphate
  modified_base 12: mod_base = OTHER; note = 2'-O-methyladenosine-3'-phosphate
  modified_base 13: mod_base = OTHER; note = 2'-O-methyluridine-3'-phosphate
  modified_base 14: mod_base = OTHER; note = 2'-O-methylguanosine-3'-phosphate
  modified_base 15: mod_base = OTHER; note = 2'-O-methylcytidine-3'-phosphate
  modified_base 16: mod_base = OTHER; note = 2'-O-methyluridine-3'-phosphate
  modified_base 17: mod_base = OTHER; note = 2'-O-methyluridine-3'-phosphate
  modified_base 18: mod_base = OTHER; note = 2'-O-methyladenosine-3'-phosphate
  modified_base 19: mod_base = OTHER; note = 2'-O-methyluridine-3'-phosphorothioate
  modified_base 20: mod_base = OTHER; note = 2'-O-methyluridine-3'-phosphorothioate
  modified_base 21: mod_base = OTHER; note = 2'-O-methyladenosine
gttgggtaaatatgcttatta

SEQ ID NO: 11444 - RNA, 21 nt, synthetic construct
  source 1..21: mol_type = other RNA
  modified_base 1: mod_base = OTHER; note = 2'-O-methyladenosine-3'-phosphorothioate
  modified_base 2: mod_base = OTHER; note = 2'-O-methylcytidine-3'-phosphorothioate
  modified_base 3: mod_base = OTHER; note = 2'-O-methyluridine-3'-phosphate
  modified_base 4: mod_base = OTHER; note = 2'-O-methyluridine-3'-phosphate
  modified_base 5: mod_base = OTHER; note = 2'-O-methyladenosine-3'-phosphate
  modified_base 6: mod_base = OTHER; note = 2'-O-docosanyl-uridine-3'-phosphate
  modified_base 7: mod_base = OTHER; note = 2'-deoxy-2'-fluoroguanosine-3'-phosphate
  modified_base 8: mod_base = OTHER; note = 2'-O-methyluridine-3'-phosphate
  modified_base 9: mod_base = OTHER; note = 2'-deoxy-2'-fluorouridine-3'-phosphate
  modified_base 10: mod_base = OTHER; note = 2'-deoxy-2'-fluoroguanosine-3'-phosphate
  modified_base 11: mod_base = OTHER; note = 2'-deoxy-2'-fluoroguanosine-3'-phosphate
  modified_base 12: mod_base = OTHER; note = 2'-O-methylguanosine-3'-phosphate
  modified_base 13: mod_base = OTHER; note = 2'-O-methyluridine-3'-phosphate
  modified_base 14: mod_base = OTHER; note = 2'-O-methyladenosine-3'-phosphate
  modified_base 15: mod_base = OTHER; note = 2'-O-methyladenosine-3'-phosphate
  modified_base 16: mod_base = OTHER; note = 2'-O-methyladenosine-3'-phosphate
  modified_base 17: mod_base = OTHER; note = 2'-O-methyluridine-3'-phosphate
  modified_base 18: mod_base = OTHER; note = 2'-O-methyladenosine-3'-phosphate
  modified_base 19: mod_base = OTHER; note = 2'-O-methyluridine-3'-phosphorothioate
  modified_base 20: mod_base = OTHER; note = 2'-O-methylguanosine-3'-phosphorothioate
  modified_base 21: mod_base = OTHER; note = 2'-O-methyladenosine
acttatgttgggtaaatatga

SEQ ID NO: 11445 - RNA, 21 nt, synthetic construct
  source 1..21: mol_type = other RNA
  modified_base 1: mod_base = OTHER; note = 2'-O-methylcytidine-3'-phosphorothioate
  modified_base 2: mod_base = OTHER; note = 2'-O-methyluridine-3'-phosphorothioate
  modified_base 3: mod_base = OTHER; note = 2'-O-methyluridine-3'-phosphate
  modified_base 4: mod_base = OTHER; note = 2'-O-methyladenosine-3'-phosphate
  modified_base 5: mod_base = OTHER; note = 2'-O-methyluridine-3'-phosphate
  modified_base 6: mod_base = OTHER; note = 2'-O-docosanyl-guanosine-3'-phosphate
  modified_base 7: mod_base = OTHER; note = 2'-deoxy-2'-fluorouridine-3'-phosphate
  modified_base 8: mod_base = OTHER; note = 2'-O-methyluridine-3'-phosphate
  modified_base 9: mod_base = OTHER; note = 2'-deoxy-2'-fluoroguanosine-3'-phosphate
  modified_base 10: mod_base = OTHER; note = 2'-deoxy-2'-fluoroguanosine-3'-phosphate
  modified_base 11: mod_base = OTHER; note = 2'-deoxy-2'-fluoroguanosine-3'-phosphate
  modified_base 12: mod_base = OTHER; note = 2'-O-methyluridine-3'-phosphate
  modified_base 13: mod_base = OTHER; note = 2'-O-methyladenosine-3'-phosphate
  modified_base 14: mod_base = OTHER; note = 2'-O-methyladenosine-3'-phosphate
  modified_base 15: mod_base = OTHER; note = 2'-O-methyladenosine-3'-phosphate
  modified_base 16: mod_base = OTHER; note = 2'-O-methyluridine-3'-phosphate
  modified_base 17: mod_base = OTHER; note = 2'-O-methyladenosine-3'-phosphate
  modified_base 18: mod_base = OTHER; note = 2'-O-methyluridine-3'-phosphate
  modified_base 19: mod_base = OTHER; note = 2'-O-methylguanosine-3'-phosphorothioate
  modified_base 20: mod_base = OTHER; note = 2'-O-methylcytidine-3'-phosphorothioate
  modified_base 21: mod_base = OTHER; note = 2'-O-methyladenosine
cttatgttgggtaaatatgca

SEQ ID NO: 11446 - RNA, 21 nt, synthetic construct
  source 1..21: mol_type = other RNA
  modified_base 1: mod_base = OTHER; note = 2'-O-methyluridine-3'-phosphorothioate
  modified_base 2: mod_base = OTHER; note = 2'-O-methyluridine-3'-phosphorothioate
  modified_base 3: mod_base = OTHER; note = 2'-O-methyladenosine-3'-phosphate
  modified_base 4: mod_base = OTHER; note = 2'-O-methyluridine-3'-phosphate
  modified_base 5: mod_base = OTHER; note = 2'-O-methylguanosine-3'-phosphate
  modified_base 6: mod_base = OTHER; note = 2'-O-docosanyl-uridine-3'-phosphate
  modified_base 7: mod_base = OTHER; note = 2'-deoxy-2'-fluorouridine-3'-phosphate
  modified_base 8: mod_base = OTHER; note = 2'-O-methylguanosine-3'-phosphate
  modified_base 9: mod_base = OTHER; note = 2'-deoxy-2'-fluoroguanosine-3'-phosphate
  modified_base 10: mod_base = OTHER; note = 2'-deoxy-2'-fluoroguanosine-3'-phosphate
  modified_base 11: mod_base = OTHER; note = 2'-deoxy-2'-fluorouridine-3'-phosphate
  modified_base 12: mod_base = OTHER; note = 2'-O-methyladenosine-3'-phosphate
  modified_base 13: mod_base = OTHER; note = 2'-O-methyladenosine-3'-phosphate
  modified_base 14: mod_base = OTHER; note = 2'-O-methyladenosine-3'-phosphate
  modified_base 15: mod_base = OTHER; note = 2'-O-methyluridine-3'-phosphate
  modified_base 16: mod_base = OTHER; note = 2'-O-methyladenosine-3'-phosphate
  modified_base 17: mod_base = OTHER; note = 2'-O-methyluridine-3'-phosphate
  modified_base 18: mod_base = OTHER; note = 2'-O-methylguanosine-3'-phosphate
  modified_base 19: mod_base = OTHER; note = 2'-O-methylcytidine-3'-phosphorothioate
  modified_base 20: mod_base = OTHER; note = 2'-O-methyluridine-3'-phosphorothioate
  modified_base 21: mod_base = OTHER; note = 2'-O-methyladenosine
ttatgttgggtaaatatgcta

SEQ ID NO: 11447 - RNA, 21 nt, synthetic construct
  source 1..21: mol_type = other RNA
  modified_base 1: mod_base = OTHER; note = 2'-O-methyluridine-3'-phosphorothioate
  modified_base 2: mod_base = OTHER; note = 2'-O-methyladenosine-3'-phosphorothioate
  modified_base 3: mod_base = OTHER; note = 2'-O-methyluridine-3'-phosphate
  modified_base 4: mod_base = OTHER; note = 2'-O-methylguanosine-3'-phosphate
  modified_base 5: mod_base = OTHER; note = 2'-O-methyluridine-3'-phosphate
  modified_base 6: mod_base = OTHER; note = 2'-O-docosanyl-uridine-3'-phosphate
  modified_base 7: mod_base = OTHER; note = 2'-deoxy-2'-fluoroguanosine-3'-phosphate
  modified_base 8: mod_base = OTHER; note = 2'-O-methylguanosine-3'-phosphate
  modified_base 9: mod_base = OTHER; note = 2'-deoxy-2'-fluoroguanosine-3'-phosphate
  modified_base 10: mod_base = OTHER; note = 2'-deoxy-2'-fluorouridine-3'-phosphate
  modified_base 11: mod_base = OTHER; note = 2'-deoxy-2'-fluoroadenosine-3'-phosphate
  modified_base 12: mod_base = OTHER; note = 2'-O-methyladenosine-3'-phosphate
  modified_base 13: mod_base = OTHER; note = 2'-O-methyladenosine-3'-phosphate
  modified_base 14: mod_base = OTHER; note = 2'-O-methyluridine-3'-phosphate
  modified_base 15: mod_base = OTHER; note = 2'-O-methyladenosine-3'-phosphate
  modified_base 16: mod_base = OTHER; note = 2'-O-methyluridine-3'-phosphate
  modified_base 17: mod_base = OTHER; note = 2'-O-methylguanosine-3'-phosphate
  modified_base 18: mod_base = OTHER; note = 2'-O-methylcytidine-3'-phosphate
  modified_base 19: mod_base = OTHER; note = 2'-O-methyluridine-3'-phosphorothioate
  modified_base 20: mod_base = OTHER; note = 2'-O-methyluridine-3'-phosphorothioate
  modified_base 21: mod_base = OTHER; note = 2'-O-methyladenosine
tatgttgggtaaatatgctta

SEQ ID NO: 11448 - RNA, 21 nt, synthetic construct
  source 1..21: mol_type = other RNA
  modified_base 1: mod_base = OTHER; note = 2'-O-methyladenosine-3'-phosphorothioate
  modified_base 2: mod_base = OTHER; note = 2'-O-methyluridine-3'-phosphorothioate
  modified_base 3: mod_base = OTHER; note = 2'-O-methylguanosine-3'-phosphate
  modified_base 4: mod_base = OTHER; note = 2'-O-methyluridine-3'-phosphate
  modified_base 5: mod_base = OTHER; note = 2'-O-methyluridine-3'-phosphate
  modified_base 6: mod_base = OTHER; note = 2'-O-docosanyl-guanosine-3'-phosphate
  modified_base 7: mod_base = OTHER; note = 2'-deoxy-2'-fluoroguanosine-3'-phosphate
  modified_base 8: mod_base = OTHER; note = 2'-O-methylguanosine-3'-phosphate
  modified_base 9: mod_base = OTHER; note = 2'-deoxy-2'-fluorouridine-3'-phosphate
  modified_base 10: mod_base = OTHER; note = 2'-deoxy-2'-fluoroadenosine-3'-phosphate
  modified_base 11: mod_base = OTHER; note = 2'-deoxy-2'-fluoroadenosine-3'-phosphate
  modified_base 12: mod_base = OTHER; note = 2'-O-methyladenosine-3'-phosphate
  modified_base 13: mod_base = OTHER; note = 2'-O-methyluridine-3'-phosphate
  modified_base 14: mod_base = OTHER; note = 2'-O-methyladenosine-3'-phosphate
  modified_base 15: mod_base = OTHER; note = 2'-O-methyluridine-3'-phosphate
  modified_base 16: mod_base = OTHER; note = 2'-O-methylguanosine-3'-phosphate
  modified_base 17: mod_base = OTHER; note = 2'-O-methylcytidine-3'-phosphate
  modified_base 18: mod_base = OTHER; note = 2'-O-methyluridine-3'-phosphate
  modified_base 19: mod_base = OTHER; note = 2'-O-methyluridine-3'-phosphorothioate
  modified_base 20: mod_base = OTHER; note = 2'-O-methyladenosine-3'-phosphorothioate
  modified_base 21: mod_base = OTHER; note = 2'-O-methyladenosine
atgttgggtaaatatgcttaa

SEQ ID NO: 11449 - RNA, 21 nt, synthetic construct
  source 1..21: mol_type = other RNA
  modified_base 1: mod_base = OTHER; note = 2'-O-methyluridine-3'-phosphorothioate
  modified_base 2: mod_base = OTHER; note = 2'-O-methylguanosine-3'-phosphorothioate
  modified_base 3: mod_base = OTHER; note = 2'-O-methyluridine-3'-phosphate
  modified_base 4: mod_base = OTHER; note = 2'-O-methyluridine-3'-phosphate
  modified_base 5: mod_base = OTHER; note = 2'-O-methylguanosine-3'-phosphate
  modified_base 6: mod_base = OTHER; note = 2'-O-docosanyl-guanosine-3'-phosphate
  modified_base 7: mod_base = OTHER; note = 2'-deoxy-2'-fluoroguanosine-3'-phosphate
  modified_base 8: mod_base = OTHER; note = 2'-O-methyluridine-3'-phosphate
  modified_base 9: mod_base = OTHER; note = 2'-deoxy-2'-fluoroadenosine-3'-phosphate
  modified_base 10: mod_base = OTHER; note = 2'-deoxy-2'-fluoroadenosine-3'-phosphate
  modified_base 11: mod_base = OTHER; note = 2'-deoxy-2'-fluoroadenosine-3'-phosphate
  modified_base 12: mod_base = OTHER; note = 2'-O-methyluridine-3'-phosphate
  modified_base 13: mod_base = OTHER; note = 2'-O-methyladenosine-3'-phosphate
  modified_base 14: mod_base = OTHER; note = 2'-O-methyluridine-3'-phosphate
  modified_base 15: mod_base = OTHER; note = 2'-O-methylguanosine-3'-phosphate
  modified_base 16: mod_base = OTHER; note = 2'-O-methylcytidine-3'-phosphate
  modified_base 17: mod_base = OTHER; note = 2'-O-methyluridine-3'-phosphate
  modified_base 18: mod_base = OTHER; note = 2'-O-methyluridine-3'-phosphate
  modified_base 19: mod_base = OTHER; note = 2'-O-methyladenosine-3'-phosphorothioate
  modified_base 20: mod_base = OTHER; note = 2'-O-methyluridine-3'-phosphorothioate
  modified_base 21: mod_base = OTHER; note = 2'-O-methyladenosine
tgttgggtaaatatgcttata

SEQ ID NO: 11450 - RNA, 21 nt, synthetic construct
  source 1..21: mol_type = other RNA
  modified_base 1: mod_base = OTHER; note = 2'-O-methyluridine-3'-phosphorothioate
  modified_base 2: mod_base = OTHER; note = 2'-O-methyluridine-3'-phosphorothioate
  modified_base 3: mod_base = OTHER; note = 2'-O-methylguanosine-3'-phosphate
  modified_base 4: mod_base = OTHER; note = 2'-O-methylguanosine-3'-phosphate
  modified_base 5: mod_base = OTHER; note = 2'-O-methyluridine-3'-phosphate
  modified_base 6: mod_base = OTHER; note = 2'-O-docosanyl-uridine-3'-phosphate
  modified_base 7: mod_base = OTHER; note = 2'-deoxy-2'-fluorocytidine-3'-phosphate
  modified_base 8: mod_base = OTHER; note = 2'-O-methyladenosine-3'-phosphate
  modified_base 9: mod_base = OTHER; note = 2'-deoxy-2'-fluoroadenosine-3'-phosphate
  modified_base 10: mod_base = OTHER; note = 2'-deoxy-2'-fluorocytidine-3'-phosphate
  modified_base 11: mod_base = OTHER; note = 2'-deoxy-2'-fluorouridine-3'-phosphate
  modified_base 12: mod_base = OTHER; note = 2'-O-methyluridine-3'-phosphate
  modified_base 13: mod_base = OTHER; note = 2'-O-methyluridine-3'-phosphate
  modified_base 14: mod_base = OTHER; note = 2'-O-methylcytidine-3'-phosphate
  modified_base 15: mod_base = OTHER; note = 2'-O-methyladenosine-3'-phosphate
  modified_base 16: mod_base = OTHER; note = 2'-O-methylcytidine-3'-phosphate
  modified_base 17: mod_base = OTHER; note = 2'-O-methyluridine-3'-phosphate
  modified_base 18: mod_base = OTHER; note = 2'-O-methylcytidine-3'-phosphate
  modified_base 19: mod_base = OTHER; note = 2'-O-methyluridine-3'-phosphorothioate
  modified_base 20: mod_base = OTHER; note = 2'-O-methylguanosine-3'-phosphorothioate
  modified_base 21: mod_base = OTHER; note = 2'-O-methyladenosine
ttggttcaactttcactctga

SEQ ID NO: 11451 - RNA, 21 nt, synthetic construct
  source 1..21: mol_type = other RNA
  modified_base 1: mod_base = OTHER; note = 2'-O-methyladenosine-3'-phosphorothioate
  modified_base 2: mod_base = OTHER; note = 2'-O-methyladenosine-3'-phosphorothioate
  modified_base 3: mod_base = OTHER; note = 2'-O-methylcytidine-3'-phosphate
  modified_base 4: mod_base = OTHER; note = 2'-O-methyluridine-3'-phosphate
  modified_base 5: mod_base = OTHER; note = 2'-O-methyluridine-3'-phosphate
  modified_base 6: mod_base = OTHER; note = 2'-O-docosanyl-uridine-3'-phosphate
  modified_base 7: mod_base = OTHER; note = 2'-deoxy-2'-fluorocytidine-3'-phosphate
  modified_base 8: mod_base = OTHER; note = 2'-O-methyladenosine-3'-phosphate
  modified_base 9: mod_base = OTHER; note = 2'-deoxy-2'-fluorocytidine-3'-phosphate
  modified_base 10: mod_base = OTHER; note = 2'-deoxy-2'-fluorouridine-3'-phosphate
  modified_base 11: mod_base = OTHER; note = 2'-deoxy-2'-fluorocytidine-3'-phosphate
  modified_base 12: mod_base = OTHER; note = 2'-O-methyluridine-3'-phosphate
  modified_base 13: mod_base = OTHER; note = 2'-O-methylguanosine-3'-phosphate
  modified_base 14: mod_base = OTHER; note = 2'-O-methyladenosine-3'-phosphate
  modified_base 15: mod_base = OTHER; note = 2'-O-methyladenosine-3'-phosphate
  modified_base 16: mod_base = OTHER; note = 2'-O-methylguanosine-3'-phosphate
  modified_base 17: mod_base = OTHER; note = 2'-O-methyladenosine-3'-phosphate
  modified_base 18: mod_base = OTHER; note = 2'-O-methyladenosine-3'-phosphate
  modified_base 19: mod_base = OTHER; note = 2'-O-methyladenosine-3'-phosphorothioate
  modified_base 20: mod_base = OTHER; note = 2'-O-methyluridine-3'-phosphorothioate
  modified_base 21: mod_base = OTHER; note = 2'-O-methyladenosine
aactttcactctgaagaaata

SEQ ID NO: 11452 - RNA, 21 nt, synthetic construct
  source 1..21: mol_type = other RNA
  modified_base 1: mod_base = OTHER; note = 2'-O-methylcytidine-3'-phosphorothioate
  modified_base 2: mod_base = OTHER; note = 2'-O-methyluridine-3'-phosphorothioate
  modified_base 3: mod_base = OTHER; note = 2'-O-methylcytidine-3'-phosphate
  modified_base 4: mod_base = OTHER; note = 2'-O-methyluridine-3'-phosphate
  modified_base 5: mod_base = OTHER; note = 2'-O-methylguanosine-3'-phosphate
  modified_base 6: mod_base = OTHER; note = 2'-O-docosanyl-adenosine-3'-phosphate
  modified_base 7: mod_base = OTHER; note = 2'-deoxy-2'-fluoroadenosine-3'-phosphate
  modified_base 8: mod_base = OTHER; note = 2'-O-methylguanosine-3'-phosphate
  modified_base 9: mod_base = OTHER; note = 2'-deoxy-2'-fluoroadenosine-3'-phosphate
  modified_base 10: mod_base = OTHER; note = 2'-deoxy-2'-fluoroadenosine-3'-phosphate
  modified_base 11: mod_base = OTHER; note = 2'-deoxy-2'-fluoroadenosine-3'-phosphate
  modified_base 12: mod_base = OTHER; note = 2'-O-methyluridine-3'-phosphate
  modified_base 13: mod_base = OTHER; note = 2'-O-methylcytidine-3'-phosphate
  modified_base 14: mod_base = OTHER; note = 2'-O-methylcytidine-3'-phosphate
  modified_base 15: mod_base = OTHER; note = 2'-O-methylguanosine-3'-phosphate
  modified_base 16: mod_base = OTHER; note = 2'-O-methyluridine-3'-phosphate
  modified_base 17: mod_base = OTHER; note = 2'-O-methyladenosine-3'-phosphate
  modified_base 18: mod_base = OTHER; note = 2'-O-methyluridine-3'-phosphate
  modified_base 19: mod_base = OTHER; note = 2'-O-methylguanosine-3'-phosphorothioate
  modified_base 20: mod_base = OTHER; note = 2'-O-methyluridine-3'-phosphorothioate
  modified_base 21: mod_base = OTHER; note = 2'-O-methyladenosine
ctctgaagaaatccgtatgta

SEQ ID NO: 11453 - RNA, 21 nt, synthetic construct
  source 1..21: mol_type = other RNA
  modified_base 1: mod_base = OTHER; note = 2'-O-methylcytidine-3'-phosphorothioate
  modified_base 2: mod_base = OTHER; note = 2'-O-methyluridine-3'-phosphorothioate
  modified_base 3: mod_base = OTHER; note = 2'-O-methylguanosine-3'-phosphate
  modified_base 4: mod_base = OTHER; note = 2'-O-methyladenosine-3'-phosphate
  modified_base 5: mod_base = OTHER; note = 2'-O-methyladenosine-3'-phosphate
  modified_base 6: mod_base = OTHER; note = 2'-O-docosanyl-guanosine-3'-phosphate
  modified_base 7: mod_base = OTHER; note = 2'-deoxy-2'-fluoroadenosine-3'-phosphate
  modified_base 8: mod_base = OTHER; note = 2'-O-methyladenosine-3'-phosphate
  modified_base 9: mod_base = OTHER; note = 2'-deoxy-2'-fluoroadenosine-3'-phosphate
  modified_base 10: mod_base = OTHER; note = 2'-deoxy-2'-fluorouridine-3'-phosphate
  modified_base 11: mod_base = OTHER; note = 2'-deoxy-2'-fluorocytidine-3'-phosphate
  modified_base 12: mod_base = OTHER; note = 2'-O-methylcytidine-3'-phosphate
  modified_base 13: mod_base = OTHER; note = 2'-O-methylguanosine-3'-phosphate
  modified_base 14: mod_base = OTHER; note = 2'-O-methyluridine-3'-phosphate
  modified_base 15: mod_base = OTHER; note = 2'-O-methyladenosine-3'-phosphate
  modified_base 16: mod_base = OTHER; note = 2'-O-methyluridine-3'-phosphate
  modified_base 17: mod_base = OTHER; note = 2'-O-methylguanosine-3'-phosphate
  modified_base 18: mod_base = OTHER; note = 2'-O-methyluridine-3'-phosphate
  modified_base 19: mod_base = OTHER; note = 2'-O-methyluridine-3'-phosphorothioate
  modified_base 20: mod_base = OTHER; note = 2'-O-methyladenosine-3'-phosphorothioate
  modified_base 21: mod_base = OTHER; note = 2'-O-methyladenosine
ctgaagaaatccgtatgttaa

SEQ ID NO: 11454 - RNA, 21 nt, synthetic construct
  source 1..21: mol_type = other RNA
  modified_base 1: mod_base = OTHER; note = 2'-O-methylguanosine-3'-phosphorothioate
  modified_base 2: mod_base = OTHER; note = 2'-O-methyluridine-3'-phosphorothioate
  modified_base 3: mod_base = OTHER; note = 2'-O-methylguanosine-3'-phosphate
  modified_base 4: mod_base = OTHER; note = 2'-O-methyluridine-3'-phosphate
  modified_base 5: mod_base = OTHER; note = 2'-O-methyluridine-3'-phosphate
  modified_base 6: mod_base = OTHER; note = 2'-O-docosanyl-guanosine-3'-phosphate
  modified_base 7: mod_base = OTHER; note = 2'-deoxy-2'-fluorouridine-3'-phosphate
  modified_base 8: mod_base = OTHER; note = 2'-O-methyluridine-3'-phosphate
  modified_base 9: mod_base = OTHER; note = 2'-deoxy-2'-fluorouridine-3'-phosphate
  modified_base 10: mod_base = OTHER; note = 2'-deoxy-2'-fluoroadenosine-3'-phosphate
  modified_base 11: mod_base = OTHER; note = 2'-deoxy-2'-fluoroadenosine-3'-phosphate
  modified_base 12: mod_base = OTHER; note = 2'-O-methylcytidine-3'-phosphate
  modified_base 13: mod_base = OTHER; note = 2'-O-methyluridine-3'-phosphate
  modified_base 14: mod_base = OTHER; note = 2'-O-methyladenosine-3'-phosphate
  modified_base 15: mod_base = OTHER; note = 2'-O-methyluridine-3'-phosphate
  modified_base 16: mod_base = OTHER; note = 2'-O-methylguanosine-3'-phosphate
  modified_base 17: mod_base = OTHER; note = 2'-O-methyladenosine-3'-phosphate
  modified_base 18: mod_base = OTHER; note = 2'-O-methylcytidine-3'-phosphate
  modified_base 19: mod_base = OTHER; note = 2'-O-methyluridine-3'-phosphorothioate
  modified_base 20: mod_base = OTHER; note = 2'-O-methylcytidine-3'-phosphorothioate
  modified_base 21: mod_base = OTHER; note = 2'-O-methyladenosine
gtgttgtttaactatgactca

SEQ ID NO: 11455 - RNA, 21 nt, synthetic construct
  source 1..21: mol_type = other RNA
  modified_base 1: mod_base = OTHER; note = 2'-O-methyluridine-3'-phosphorothioate
  modified_base 2: mod_base = OTHER; note = 2'-O-methyladenosine-3'-phosphorothioate
  modified_base 3: mod_base = OTHER; note = 2'-O-methyladenosine-3'-phosphate
  modified_base 4: mod_base = OTHER; note = 2'-O-methylcytidine-3'-phosphate
  modified_base 5: mod_base = OTHER; note = 2'-O-methyluridine-3'-phosphate
  modified_base 6: mod_base = OTHER; note = 2'-O-docosanyl-guanosine-3'-phosphate
  modified_base 7: mod_base = OTHER; note = 2'-deoxy-2'-fluoroadenosine-3'-phosphate
  modified_base 8: mod_base = OTHER; note = 2'-O-methylguanosine-3'-phosphate
  modified_base 9: mod_base = OTHER; note = 2'-deoxy-2'-fluorouridine-3'-phosphate
  modified_base 10: mod_base = OTHER; note = 2'-deoxy-2'-fluoroadenosine-3'-phosphate
  modified_base 11: mod_base = OTHER; note = 2'-deoxy-2'-fluoroguanosine-3'-phosphate
  modified_base 12: mod_base = OTHER; note = 2'-O-methyluridine-3'-phosphate
  modified_base 13: mod_base = OTHER; note = 2'-O-methylcytidine-3'-phosphate
  modified_base 14: mod_base = OTHER; note = 2'-O-methyluridine-3'-phosphate
  modified_base 15: mod_base = OTHER; note = 2'-O-methyluridine-3'-phosphate
  modified_base 16: mod_base = OTHER; note = 2'-O-methyladenosine-3'-phosphate
  modified_base 17: mod_base = OTHER; note = 2'-O-methyluridine-3'-phosphate
  modified_base 18: mod_base = OTHER; note = 2'-O-methyladenosine-3'-phosphate
  modified_base 19: mod_base = OTHER; note = 2'-O-methyluridine-3'-phosphorothioate
  modified_base 20: mod_base = OTHER; note = 2'-O-methyluridine-3'-phosphorothioate
  modified_base 21: mod_base = OTHER; note = 2'-O-methyladenosine
taactgagtagtcttatatta

SEQ ID NO: 11456 - RNA, 21 nt, synthetic construct
  source 1..21: mol_type = other RNA
  modified_base 1: mod_base = OTHER; note = 2'-O-methyluridine-3'-phosphorothioate
  modified_base 2: mod_base = OTHER; note = 2'-O-methylguanosine-3'-phosphorothioate
  modified_base 3: mod_base = OTHER; note = 2'-O-methyladenosine-3'-phosphate
  modified_base 4: mod_base = OTHER; note = 2'-O-methylcytidine-3'-phosphate
  modified_base 5: mod_base = OTHER; note = 2'-O-methyluridine-3'-phosphate
  modified_base 6: mod_base = OTHER; note = 2'-O-docosanyl-cytidine-3'-phosphate
  modified_base 7: mod_base = OTHER; note = 2'-deoxy-2'-fluorocytidine-3'-phosphate
  modified_base 8: mod_base = OTHER; note = 2'-O-methyluridine-3'-phosphate
  modified_base 9: mod_base = OTHER; note = 2'-deoxy-2'-fluoroadenosine-3'-phosphate
  modified_base 10: mod_base = OTHER; note = 2'-deoxy-2'-fluoroadenosine-3'-phosphate
  modified_base 11: mod_base = OTHER; note = 2'-deoxy-2'-fluorocytidine-3'-phosphate
  modified_base 12: mod_base = OTHER; note = 2'-O-methyluridine-3'-phosphate
  modified_base 13: mod_base = OTHER; note = 2'-O-methylguanosine-3'-phosphate
  modified_base 14: mod_base = OTHER; note = 2'-O-methyladenosine-3'-phosphate
  modified_base 15: mod_base = OTHER; note = 2'-O-methylguanosine-3'-phosphate
  modified_base 16: mod_base = OTHER; note = 2'-O-methyluridine-3'-phosphate
  modified_base 17: mod_base = OTHER; note = 2'-O-methyladenosine-3'-phosphate
  modified_base 18: mod_base = OTHER; note = 2'-O-methylguanosine-3'-phosphate
  modified_base 19: mod_base = OTHER; note = 2'-O-methyluridine-3'-phosphorothioate
  modified_base 20: mod_base = OTHER; note = 2'-O-methylcytidine-3'-phosphorothioate
  modified_base 21: mod_base = OTHER; note = 2'-O-methyladenosine
tgactcctaactgagtagtca

SEQ ID NO: 11457 - RNA, 21 nt, synthetic construct
  source 1..21: mol_type = other RNA
  modified_base 1: mod_base = OTHER; note = 2'-O-methylguanosine-3'-phosphorothioate
  modified_base 2: mod_base = OTHER; note = 2'-O-methyladenosine-3'-phosphorothioate
  modified_base 3: mod_base = OTHER; note = 2'-O-methylcytidine-3'-phosphate
  modified_base 4: mod_base = OTHER; note = 2'-O-methyluridine-3'-phosphate
  modified_base 5: mod_base = OTHER; note = 2'-O-methylcytidine-3'-phosphate
  modified_base 6: mod_base = OTHER; note = 2'-O-docosanyl-cytidine-3'-phosphate
  modified_base 7: mod_base = OTHER; note = 2'-deoxy-2'-fluorouridine-3'-phosphate
  modified_base 8: mod_base = OTHER; note = 2'-O-methyladenosine-3'-phosphate
  modified_base 9: mod_base = OTHER; note = 2'-deoxy-2'-fluoroadenosine-3'-phosphate
  modified_base 10: mod_base = OTHER; note = 2'-deoxy-2'-fluorocytidine-3'-phosphate
  modified_base 11: mod_base = OTHER; note = 2'-deoxy-2'-fluorouridine-3'-phosphate
  modified_base 12: mod_base = OTHER; note = 2'-O-methylguanosine-3'-phosphate
  modified_base 13: mod_base = OTHER; note = 2'-O-methyladenosine-3'-phosphate
  modified_base 14: mod_base = OTHER; note = 2'-O-methylguanosine-3'-phosphate
  modified_base 15: mod_base = OTHER; note = 2'-O-methyluridine-3'-phosphate
  modified_base 16: mod_base = OTHER; note = 2'-O-methyladenosine-3'-phosphate
  modified_base 17: mod_base = OTHER; note = 2'-O-methylguanosine-3'-phosphate
  modified_base 18: mod_base = OTHER; note = 2'-O-methyluridine-3'-phosphate
  modified_base 19: mod_base = OTHER; note = 2'-O-methylcytidine-3'-phosphorothioate
  modified_base 20: mod_base = OTHER; note = 2'-O-methyluridine-3'-phosphorothioate
  modified_base 21: mod_base = OTHER; note = 2'-O-methyladenosine
gactcctaactgagtagtcta

SEQ ID NO: 11458 - RNA, 21 nt, synthetic construct
  source 1..21: mol_type = other RNA
  modified_base 1: mod_base = OTHER; note = 2'-O-methyladenosine-3'-phosphorothioate
  modified_base 2: mod_base = OTHER; note = 2'-O-methylcytidine-3'-phosphorothioate
  modified_base 3: mod_base = OTHER; note = 2'-O-methyluridine-3'-phosphate
  modified_base 4: mod_base = OTHER; note = 2'-O-methylcytidine-3'-phosphate
  modified_base 5: mod_base = OTHER; note = 2'-O-methylcytidine-3'-phosphate
  modified_base 6: mod_base = OTHER; note = 2'-O-docosanyl-uridine-3'-phosphate
  modified_base 7: mod_base = OTHER; note = 2'-deoxy-2'-fluoroadenosine-3'-phosphate
  modified_base 8: mod_base = OTHER; note = 2'-O-methyladenosine-3'-phosphate
  modified_base 9: mod_base = OTHER; note = 2'-deoxy-2'-fluorocytidine-3'-phosphate
  modified_base 10: mod_base = OTHER; note = 2'-deoxy-2'-fluorouridine-3'-phosphate
  modified_base 11: mod_base = OTHER; note = 2'-deoxy-2'-fluoroguanosine-3'-phosphate
  modified_base 12: mod_base = OTHER; note = 2'-O-methyladenosine-3'-phosphate
  modified_base 13: mod_base = OTHER; note = 2'-O-methylguanosine-3'-phosphate
  modified_base 14: mod_base = OTHER; note = 2'-O-methyluridine-3'-phosphate
  modified_base 15: mod_base = OTHER; note = 2'-O-methyladenosine-3'-phosphate
  modified_base 16: mod_base = OTHER; note = 2'-O-methylguanosine-3'-phosphate
  modified_base 17: mod_base = OTHER; note = 2'-O-methyluridine-3'-phosphate
  modified_base 18: mod_base = OTHER; note = 2'-O-methylcytidine-3'-phosphate
  modified_base 19: mod_base = OTHER; note = 2'-O-methyluridine-3'-phosphorothioate
  modified_base 20: mod_base = OTHER; note = 2'-O-methyluridine-3'-phosphorothioate
  modified_base 21: mod_base = OTHER; note = 2'-O-methyladenosine
actcctaactgagtagtctta

SEQ ID NO: 11459 - RNA, 21 nt, synthetic construct
  source 1..21: mol_type = other RNA
  modified_base 1: mod_base = OTHER; note = 2'-O-methylcytidine-3'-phosphorothioate
  modified_base 2: mod_base = OTHER; note = 2'-O-methyluridine-3'-phosphorothioate
  modified_base 3: mod_base = OTHER; note = 2'-O-methylcytidine-3'-phosphate
  modified_base 4: mod_base = OTHER; note = 2'-O-methylcytidine-3'-phosphate
  modified_base 5: mod_base = OTHER; note = 2'-O-methyluridine-3'-phosphate
  modified_base 6: mod_base = OTHER; note = 2'-O-docosanyl-adenosine-3'-phosphate
  modified_base 7: mod_base = OTHER; note = 2'-deoxy-2'-fluoroadenosine-3'-phosphate
  modified_base 8: mod_base = OTHER; note = 2'-O-methylcytidine-3'-phosphate
  modified_base 9: mod_base = OTHER; note = 2'-deoxy-2'-fluorouridine-3'-phosphate
  modified_base 10: mod_base = OTHER; note = 2'-deoxy-2'-fluoroguanosine-3'-phosphate
  modified_base 11: mod_base = OTHER; note = 2'-deoxy-2'-fluoroadenosine-3'-phosphate
  modified_base 12: mod_base = OTHER; note = 2'-O-methylguanosine-3'-phosphate
  modified_base 13: mod_base = OTHER; note = 2'-O-methyluridine-3'-phosphate
  modified_base 14: mod_base = OTHER; note = 2'-O-methyladenosine-3'-phosphate
  modified_base 15: mod_base = OTHER; note = 2'-O-methylguanosine-3'-phosphate
  modified_base 16: mod_base = OTHER; note = 2'-O-methyluridine-3'-phosphate
  modified_base 17: mod_base = OTHER; note = 2'-O-methylcytidine-3'-phosphate
  modified_base 18: mod_base = OTHER; note = 2'-O-methyluridine-3'-phosphate
  modified_base 19: mod_base = OTHER; note = 2'-O-methyluridine-3'-phosphorothioate
  modified_base 20: mod_base = OTHER; note = 2'-O-methyladenosine-3'-phosphorothioate
  modified_base 21: mod_base = OTHER; note = 2'-O-methyladenosine
ctcctaactgagtagtcttaa

SEQ ID NO: 11460 - RNA, 21 nt, synthetic construct
  source 1..21: mol_type = other RNA
  modified_base 1: mod_base = OTHER; note = 2'-O-methyluridine-3'-phosphorothioate
  modified_base 2: mod_base = OTHER; note = 2'-O-methylcytidine-3'-phosphorothioate
  modified_base 3: mod_base = OTHER; note = 2'-O-methylcytidine-3'-phosphate
  modified_base 4: mod_base = OTHER; note = 2'-O-methyluridine-3'-phosphate
  modified_base 5: mod_base = OTHER; note = 2'-O-methyladenosine-3'-phosphate
  modified_base 6: mod_base = OTHER; note = 2'-O-docosanyl-adenosine-3'-phosphate
  modified_base 7: mod_base = OTHER; note = 2'-deoxy-2'-fluorocytidine-3'-phosphate
  modified_base 8: mod_base = OTHER; note = 2'-O-methyluridine-3'-phosphate
  modified_base 9: mod_base = OTHER; note = 2'-deoxy-2'-fluoroguanosine-3'-phosphate
  modified_base 10: mod_base = OTHER; note = 2'-deoxy-2'-fluoroadenosine-3'-phosphate
  modified_base 11: mod_base = OTHER; note = 2'-deoxy-2'-fluoroguanosine-3'-phosphate
  modified_base 12: mod_base = OTHER; note = 2'-O-methyluridine-3'-phosphate
  modified_base 13: mod_base = OTHER; note = 2'-O-methyladenosine-3'-phosphate
  modified_base 14: mod_base = OTHER; note = 2'-O-methylguanosine-3'-phosphate
  modified_base 15: mod_base = OTHER; note = 2'-O-methyluridine-3'-phosphate
  modified_base 16: mod_base = OTHER; note = 2'-O-methylcytidine-3'-phosphate
  modified_base 17: mod_base = OTHER; note = 2'-O-methyluridine-3'-phosphate
  modified_base 18: mod_base = OTHER; note = 2'-O-methyluridine-3'-phosphate
  modified_base 19: mod_base = OTHER; note = 2'-O-methyladenosine-3'-phosphorothioate
  modified_base 20: mod_base = OTHER; note = 2'-O-methyluridine-3'-phosphorothioate
  modified_base 21: mod_base = OTHER; note = 2'-O-methyladenosine
tcctaactgagtagtcttata

SEQ ID NO: 11461 - RNA, 21 nt, synthetic construct
  source 1..21: mol_type = other RNA
  modified_base 1: mod_base = OTHER; note = 2'-O-methylcytidine-3'-phosphorothioate
  modified_base 2: mod_base = OTHER; note = 2'-O-methylcytidine-3'-phosphorothioate
  modified_base 3: mod_base = OTHER; note = 2'-O-methyluridine-3'-phosphate
  modified_base 4: mod_base = OTHER; note = 2'-O-methyladenosine-3'-phosphate
  modified_base 5: mod_base = OTHER; note = 2'-O-methyladenosine-3'-phosphate
  modified_base 6: mod_base = OTHER; note = 2'-O-docosanyl-cytidine-3'-phosphate
  modified_base 7: mod_base = OTHER; note = 2'-deoxy-2'-fluorouridine-3'-phosphate
  modified_base 8: mod_base = OTHER; note = 2'-O-methylguanosine-3'-phosphate
  modified_base 9: mod_base = OTHER; note = 2'-deoxy-2'-fluoroadenosine-3'-phosphate
  modified_base 10: mod_base = OTHER; note = 2'-deoxy-2'-fluoroguanosine-3'-phosphate
  modified_base 11: mod_base = OTHER; note = 2'-deoxy-2'-fluorouridine-3'-phosphate
  modified_base 12: mod_base = OTHER; note = 2'-O-methyladenosine-3'-phosphate
  modified_base 13: mod_base = OTHER; note = 2'-O-methylguanosine-3'-phosphate
  modified_base 14: mod_base = OTHER; note = 2'-O-methyluridine-3'-phosphate
  modified_base 15: mod_base = OTHER; note = 2'-O-methylcytidine-3'-phosphate
  modified_base 16: mod_base = OTHER; note = 2'-O-methyluridine-3'-phosphate
  modified_base 17: mod_base = OTHER; note = 2'-O-methyluridine-3'-phosphate
  modified_base 18: mod_base = OTHER; note = 2'-O-methyladenosine-3'-phosphate
  modified_base 19: mod_base = OTHER; note = 2'-O-methyluridine-3'-phosphorothioate
  modified_base 20: mod_base = OTHER; note = 2'-O-methyladenosine-3'-phosphorothioate
  modified_base 21: mod_base = OTHER; note = 2'-O-methyladenosine
cctaactgagtagtcttataa

SEQ ID NO: 11462 - RNA, 21 nt, synthetic construct
  source 1..21: mol_type = other RNA
  modified_base 1: mod_base = OTHER; note = 2'-O-methylcytidine-3'-phosphorothioate
  modified_base 2: mod_base = OTHER; note = 2'-O-methyluridine-3'-phosphorothioate
  modified_base 3: mod_base = OTHER; note = 2'-O-methyladenosine-3'-phosphate
  modified_base 4: mod_base = OTHER; note = 2'-O-methyladenosine-3'-phosphate
  modified_base 5: mod_base = OTHER; note = 2'-O-methylcytidine-3'-phosphate
  modified_base 6: mod_base = OTHER; note = 2'-O-docosanyl-uridine-3'-phosphate
  modified_base 7: mod_base = OTHER; note = 2'-deoxy-2'-fluoroguanosine-3'-phosphate
  modified_base 8: mod_base = OTHER; note = 2'-O-methyladenosine-3'-phosphate
  modified_base 9: mod_base = OTHER; note = 2'-deoxy-2'-fluoroguanosine-3'-phosphate
  modified_base 10: mod_base = OTHER; note = 2'-deoxy-2'-fluorouridine-3'-phosphate
  modified_base 11: mod_base = OTHER; note = 2'-deoxy-2'-fluoroadenosine-3'-phosphate
  modified_base 12: mod_base = OTHER; note = 2'-O-methylguanosine-3'-phosphate
  modified_base 13: mod_base = OTHER; note = 2'-O-methyluridine-3'-phosphate
  modified_base 14: mod_base = OTHER; note = 2'-O-methylcytidine-3'-phosphate
  modified_base 15: mod_base = OTHER; note = 2'-O-methyluridine-3'-phosphate
  modified_base 16: mod_base = OTHER; note = 2'-O-methyluridine-3'-phosphate
  modified_base 17: mod_base = OTHER; note = 2'-O-methyladenosine-3'-phosphate
  modified_base 18: mod_base = OTHER; note = 2'-O-methyluridine-3'-phosphate
  modified_base 19: mod_base = OTHER; note = 2'-O-methyladenosine-3'-phosphorothioate
  modified_base 20: mod_base = OTHER; note = 2'-O-methyluridine-3'-phosphorothioate
  modified_base 21: mod_base = OTHER; note = 2'-O-methyladenosine
ctaactgagtagtcttatata

SEQ ID NO: 11463 - RNA, 21 nt, synthetic construct
  source 1..21: mol_type = other RNA
  modified_base 1: mod_base = OTHER; note = 2'-O-methyladenosine-3'-phosphorothioate
  modified_base 2: mod_base = OTHER; note = 2'-O-methyladenosine-3'-phosphorothioate
  modified_base 3: mod_base = OTHER; note = 2'-O-methylcytidine-3'-phosphate
  modified_base 4: mod_base = OTHER; note = 2'-O-methyluridine-3'-phosphate
  modified_base 5: mod_base = OTHER; note = 2'-O-methylguanosine-3'-phosphate
  modified_base 6: mod_base = OTHER; note = 2'-O-docosanyl-adenosine-3'-phosphate
  modified_base 7: mod_base = OTHER; note = 2'-deoxy-2'-fluoroguanosine-3'-phosphate
  modified_base 8: mod_base = OTHER; note = 2'-O-methyluridine-3'-phosphate
  modified_base 9: mod_base = OTHER; note = 2'-deoxy-2'-fluoroadenosine-3'-phosphate
  modified_base 10: mod_base = OTHER; note = 2'-deoxy-2'-fluoroguanosine-3'-phosphate
  modified_base 11: mod_base = OTHER; note = 2'-deoxy-2'-fluorouridine-3'-phosphate
  modified_base 12: mod_base = OTHER; note = 2'-O-methylcytidine-3'-phosphate
  modified_base 13: mod_base = OTHER; note = 2'-O-methyluridine-3'-phosphate
  modified_base 14: mod_base = OTHER; note = 2'-O-methyluridine-3'-phosphate
  modified_base 15: mod_base = OTHER; note = 2'-O-methyladenosine-3'-phosphate
  modified_base 16: mod_base = OTHER; note = 2'-O-methyluridine-3'-phosphate
  modified_base 17: mod_base = OTHER; note = 2'-O-methyladenosine-3'-phosphate
  modified_base 18: mod_base = OTHER; note = 2'-O-methyluridine-3'-phosphate
  modified_base 19: mod_base = OTHER; note = 2'-O-methyluridine-3'-phosphorothioate
  modified_base 20: mod_base = OTHER; note = 2'-O-methyluridine-3'-phosphorothioate
  modified_base 21: mod_base = OTHER; note = 2'-O-methyladenosine
aactgagtagtcttatattta

SEQ ID NO: 11464 - RNA, 21 nt, synthetic construct
  source 1..21: mol_type = other RNA
  modified_base 1: mod_base = OTHER; note = 2'-O-methyladenosine-3'-phosphorothioate
  modified_base 2: mod_base = OTHER; note = 2'-O-methylcytidine-3'-phosphorothioate
  modified_base 3: mod_base = OTHER; note = 2'-O-methyluridine-3'-phosphate
  modified_base 4: mod_base = OTHER; note = 2'-O-methylguanosine-3'-phosphate
  modified_base 5: mod_base = OTHER; note = 2'-O-methyladenosine-3'-phosphate
  modified_base 6: mod_base = OTHER; note = 2'-O-docosanyl-guanosine-3'-phosphate
  modified_base 7: mod_base = OTHER; note = 2'-deoxy-2'-fluorouridine-3'-phosphate
  modified_base 8: mod_base = OTHER; note = 2'-O-methyladenosine-3'-phosphate
  modified_base 9: mod_base = OTHER; note = 2'-deoxy-2'-fluoroguanosine-3'-phosphate
  modified_base 10: mod_base = OTHER; note = 2'-deoxy-2'-fluorouridine-3'-phosphate
  modified_base 11: mod_base = OTHER; note = 2'-deoxy-2'-fluorocytidine-3'-phosphate
  modified_base 12: mod_base = OTHER; note = 2'-O-methyluridine-3'-phosphate
  modified_base 13: mod_base = OTHER; note = 2'-O-methyluridine-3'-phosphate
  modified_base 14: mod_base = OTHER; note = 2'-O-methyladenosine-3'-phosphate
  modified_base 15: mod_base = OTHER; note = 2'-O-methyluridine-3'-phosphate
  modified_base 16: mod_base = OTHER; note = 2'-O-methyladenosine-3'-phosphate
  modified_base 17: mod_base = OTHER; note = 2'-O-methyluridine-3'-phosphate
  modified_base 18: mod_base = OTHER; note = 2'-O-methyluridine-3'-phosphate
  modified_base 19: mod_base = OTHER; note = 2'-O-methyluridine-3'-phosphorothioate
  modified_base 20: mod_base = OTHER; note = 2'-O-methylcytidine-3'-phosphorothioate
  modified_base 21: mod_base = OTHER; note = 2'-O-methyladenosine
actgagtagtcttatatttca

SEQ ID NO: 11465 - RNA, 21 nt, synthetic construct
  source 1..21: mol_type = other RNA
  modified_base 1: mod_base = OTHER; note = 2'-O-methylcytidine-3'-phosphorothioate
  modified_base 2: mod_base = OTHER; note = 2'-O-methyluridine-3'-phosphorothioate
  modified_base 3: mod_base = OTHER; note = 2'-O-methylguanosine-3'-phosphate
  modified_base 4: mod_base = OTHER; note = 2'-O-methyladenosine-3'-phosphate
  modified_base 5: mod_base = OTHER; note = 2'-O-methylguanosine-3'-phosphate
  modified_base 6: mod_base = OTHER; note = 2'-O-docosanyl-uridine-3'-phosphate
  modified_base 7: mod_base = OTHER; note = 2'-deoxy-2'-fluoroadenosine-3'-phosphate
  modified_base 8: mod_base = OTHER; note = 2'-O-methylguanosine-3'-phosphate
  modified_base 9: mod_base = OTHER; note = 2'-deoxy-2'-fluorouridine-3'-phosphate
  modified_base 10: mod_base = OTHER; note = 2'-deoxy-2'-fluorocytidine-3'-phosphate
  modified_base 11: mod_base = OTHER; note = 2'-deoxy-2'-fluorouridine-3'-phosphate
  modified_base 12: mod_base = OTHER; note = 2'-O-methyluridine-3'-phosphate
  modified_base 13: mod_base = OTHER; note = 2'-O-methyladenosine-3'-phosphate
  modified_base 14: mod_base = OTHER; note = 2'-O-methyluridine-3'-phosphate
  modified_base 15: mod_base = OTHER; note = 2'-O-methyladenosine-3'-phosphate
  modified_base 16: mod_base = OTHER; note = 2'-O-methyluridine-3'-phosphate
  modified_base 17: mod_base = OTHER; note = 2'-O-methyluridine-3'-phosphate
  modified_base 18: mod_base = OTHER; note = 2'-O-methyluridine-3'-phosphate
  modified_base 19: mod_base = OTHER; note = 2'-O-methylcytidine-3'-phosphorothioate
  modified_base 20: mod_base = OTHER; note = 2'-O-methyladenosine-3'-phosphorothioate
  modified_base 21: mod_base = OTHER; note = 2'-O-methyladenosine
ctgagtagtcttatatttcaa

SEQ ID NO: 11466 - RNA, 21 nt, synthetic construct
  source 1..21: mol_type = other RNA
  modified_base 1: mod_base = OTHER; note = 2'-O-methyluridine-3'-phosphorothioate
  modified_base 2: mod_base = OTHER; note = 2'-O-methylguanosine-3'-phosphorothioate
  modified_base 3: mod_base = OTHER; note = 2'-O-methyladenosine-3'-phosphate
  modified_base 4: mod_base = OTHER; note = 2'-O-methylguanosine-3'-phosphate
  modified_base 5: mod_base = OTHER; note = 2'-O-methyluridine-3'-phosphate
  modified_base 6: mod_base = OTHER; note = 2'-O-docosanyl-adenosine-3'-phosphate
  modified_base 7: mod_base = OTHER; note = 2'-deoxy-2'-fluoroguanosine-3'-phosphate
  modified_base 8: mod_base = OTHER; note = 2'-O-methyluridine-3'-phosphate
  modified_base 9: mod_base = OTHER; note = 2'-deoxy-2'-fluorocytidine-3'-phosphate
  modified_base 10: mod_base = OTHER; note = 2'-deoxy-2'-fluorouridine-3'-phosphate
  modified_base 11: mod_base = OTHER; note = 2'-deoxy-2'-fluorouridine-3'-phosphate
  modified_base 12: mod_base = OTHER; note = 2'-O-methyladenosine-3'-phosphate
  modified_base 13: mod_base = OTHER; note = 2'-O-methyluridine-3'-phosphate
  modified_base 14: mod_base = OTHER; note = 2'-O-methyladenosine-3'-phosphate
  modified_base 15: mod_base = OTHER; note = 2'-O-methyluridine-3'-phosphate
  modified_base 16: mod_base = OTHER; note = 2'-O-methyluridine-3'-phosphate
  modified_base 17: mod_base = OTHER; note = 2'-O-methyluridine-3'-phosphate
  modified_base 18: mod_base = OTHER; note = 2'-O-methylcytidine-3'-phosphate
  modified_base 19: mod_base = OTHER; note = 2'-O-methyladenosine-3'-phosphorothioate
  modified_base 20: mod_base = OTHER; note = 2'-O-methyladenosine-3'-phosphorothioate
  modified_base 21: mod_base = OTHER; note = 2'-O-methyladenosine
tgagtagtcttatatttcaaa

SEQ ID NO: 11467 - RNA, 21 nt, synthetic construct
  source 1..21: mol_type = other RNA
  modified_base 1: mod_base = OTHER; note = 2'-O-methylguanosine-3'-phosphorothioate
  modified_base 2: mod_base = OTHER; note = 2'-O-methyladenosine-3'-phosphorothioate
  modified_base 3: mod_base = OTHER; note = 2'-O-methylguanosine-3'-phosphate
  modified_base 4: mod_base = OTHER; note = 2'-O-methyluridine-3'-phosphate
  modified_base 5: mod_base = OTHER; note = 2'-O-methyladenosine-3'-phosphate
  modified_base 6: mod_base = OTHER; note = 2'-O-docosanyl-guanosine-3'-phosphate
  modified_base 7: mod_base = OTHER; note = 2'-deoxy-2'-fluorouridine-3'-phosphate
  modified_base 8: mod_base = OTHER; note = 2'-O-methylcytidine-3'-phosphate
  modified_base 9: mod_base = OTHER; note = 2'-deoxy-2'-fluorouridine-3'-phosphate
  modified_base 10: mod_base = OTHER; note = 2'-deoxy-2'-fluorouridine-3'-phosphate
  modified_base 11: mod_base = OTHER; note = 2'-deoxy-2'-fluoroadenosine-3'-phosphate
  modified_base 12: mod_base = OTHER; note = 2'-O-methyluridine-3'-phosphate
  modified_base 13: mod_base = OTHER; note = 2'-O-methyladenosine-3'-phosphate
  modified_base 14: mod_base = OTHER; note = 2'-O-methyluridine-3'-phosphate
  modified_base 15: mod_base = OTHER; note = 2'-O-methyluridine-3'-phosphate
  modified_base 16: mod_base = OTHER; note = 2'-O-methyluridine-3'-phosphate
  modified_base 17: mod_base = OTHER; note = 2'-O-methylcytidine-3'-phosphate
  modified_base 18: mod_base = OTHER; note = 2'-O-methyladenosine-3'-phosphate
  modified_base 19: mod_base = OTHER; note = 2'-O-methyladenosine-3'-phosphorothioate
  modified_base 20: mod_base = OTHER; note = 2'-O-methyluridine-3'-phosphorothioate
  modified_base 21: mod_base = OTHER; note = 2'-O-methyladenosine
gagtagtcttatatttcaata

SEQ ID NO: 11468 - RNA, 21 nt, synthetic construct
  source 1..21: mol_type = other RNA
  modified_base 1: mod_base = OTHER; note = 2'-O-methylcytidine-3'-phosphorothioate
  modified_base 2: mod_base = OTHER; note = 2'-O-methyluridine-3'-phosphorothioate
  modified_base 3: mod_base = OTHER; note = 2'-O-methyluridine-3'-phosphate
  modified_base 4: mod_base = OTHER; note = 2'-O-methyluridine-3'-phosphate
  modified_base 5: mod_base = OTHER; note = 2'-O-methyladenosine-3'-phosphate
  modified_base 6: mod_base = OTHER; note = 2'-O-docosanyl-cytidine-3'-phosphate
  modified_base 7: mod_base = OTHER; note = 2'-deoxy-2'-fluorouridine-3'-phosphate
  modified_base 8: mod_base = OTHER; note = 2'-O-methylcytidine-3'-phosphate
  modified_base 9: mod_base = OTHER; note = 2'-deoxy-2'-fluorouridine-3'-phosphate
  modified_base 10: mod_base = OTHER; note = 2'-deoxy-2'-fluorouridine-3'-phosphate
  modified_base 11: mod_base = OTHER; note = 2'-deoxy-2'-fluoroadenosine-3'-phosphate
  modified_base 12: mod_base = OTHER; note = 2'-O-methyladenosine-3'-phosphate
  modified_base 13: mod_base = OTHER; note = 2'-O-methylcytidine-3'-phosphate
  modified_base 14: mod_base = OTHER; note = 2'-O-methyladenosine-3'-phosphate
  modified_base 15: mod_base = OTHER; note = 2'-O-methylguanosine-3'-phosphate
  modified_base 16: mod_base = OTHER; note = 2'-O-methylguanosine-3'-phosphate
  modified_base 17: mod_base = OTHER; note = 2'-O-methyladenosine-3'-phosphate
  modified_base 18: mod_base = OTHER; note = 2'-O-methyluridine-3'-phosphate
  modified_base 19: mod_base = OTHER; note = 2'-O-methyluridine-3'-phosphorothioate
  modified_base 20: mod_base = OTHER; note = 2'-O-methyladenosine-3'-phosphorothioate
  modified_base 21: mod_base = OTHER; note = 2'-O-methyladenosine
ctttactcttaacaggattaa

SEQ ID NO: 11469 - RNA, 21 nt, synthetic construct
  source 1..21: mol_type = other RNA
  modified_base 1: mod_base = OTHER; note = 2'-O-methyluridine-3'-phosphorothioate
  modified_base 2: mod_base = OTHER; note = 2'-O-methyluridine-3'-phosphorothioate
  modified_base 3: mod_base = OTHER; note = 2'-O-methylcytidine-3'-phosphate
  modified_base 4: mod_base = OTHER; note = 2'-O-methylcytidine-3'-phosphate
  modified_base 5: mod_base = OTHER; note = 2'-O-methyluridine-3'-phosphate
  modified_base 6: mod_base = OTHER; note = 2'-O-docosanyl-uridine-3'-phosphate
  modified_base 7: mod_base = OTHER; note = 2'-deoxy-2'-fluorouridine-3'-phosphate
  modified_base 8: mod_base = OTHER; note = 2'-O-methyladenosine-3'-phosphate
  modified_base 9: mod_base = OTHER; note = 2'-deoxy-2'-fluorocytidine-3'-phosphate
  modified_base 10: mod_base = OTHER; note = 2'-deoxy-2'-fluorouridine-3'-phosphate
  modified_base 11: mod_base = OTHER; note = 2'-deoxy-2'-fluorocytidine-3'-phosphate
  modified_base 12: mod_base = OTHER; note = 2'-O-methyluridine-3'-phosphate
  modified_base 13: mod_base = OTHER; note = 2'-O-methyluridine-3'-phosphate
  modified_base 14: mod_base = OTHER; note = 2'-O-methyladenosine-3'-phosphate
  modified_base 15: mod_base = OTHER; note = 2'-O-methyladenosine-3'-phosphate
  modified_base 16: mod_base = OTHER; note = 2'-O-methylcytidine-3'-phosphate
  modified_base 17: mod_base = OTHER; note = 2'-O-methyladenosine-3'-phosphate
  modified_base 18: mod_base = OTHER; note = 2'-O-methylguanosine-3'-phosphate
  modified_base 19: mod_base = OTHER; note = 2'-O-methylguanosine-3'-phosphorothioate
  modified_base 20: mod_base = OTHER; note = 2'-O-methyladenosine-3'-phosphorothioate
  modified_base 21: mod_base = OTHER; note = 2'-O-methyladenosine
ttcctttactcttaacaggaa

SEQ ID NO: 11470 - RNA, 21 nt, synthetic construct
  source 1..21: mol_type = other RNA
  modified_base 1: mod_base = OTHER; note = 2'-O-methyluridine-3'-phosphorothioate
  modified_base 2: mod_base = OTHER; note = 2'-O-methylcytidine-3'-phosphorothioate
  modified_base 3: mod_base = OTHER; note = 2'-O-methylcytidine-3'-phosphate
  modified_base 4: mod_base = OTHER; note = 2'-O-methyluridine-3'-phosphate
  modified_base 5: mod_base = OTHER; note = 2'-O-methyluridine-3'-phosphate
  modified_base 6: mod_base = OTHER; note = 2'-O-docosanyl-uridine-3'-phosphate
  modified_base 7: mod_base = OTHER; note = 2'-deoxy-2'-fluoroadenosine-3'-phosphate
  modified_base 8: mod_base = OTHER; note = 2'-O-methylcytidine-3'-phosphate
  modified_base 9: mod_base = OTHER; note = 2'-deoxy-2'-fluorouridine-3'-phosphate
  modified_base 10: mod_base = OTHER; note = 2'-deoxy-2'-fluorocytidine-3'-phosphate
  modified_base 11: mod_base = OTHER; note = 2'-deoxy-2'-fluorouridine-3'-phosphate
  modified_base 12: mod_base = OTHER; note = 2'-O-methyluridine-3'-phosphate
  modified_base 13: mod_base = OTHER; note = 2'-O-methyladenosine-3'-phosphate
  modified_base 14: mod_base = OTHER; note = 2'-O-methyladenosine-3'-phosphate
  modified_base 15: mod_base = OTHER; note = 2'-O-methylcytidine-3'-phosphate
  modified_base 16: mod_base = OTHER; note = 2'-O-methyladenosine-3'-phosphate
  modified_base 17: mod_base = OTHER; note = 2'-O-methylguanosine-3'-phosphate
  modified_base 18: mod_base = OTHER; note = 2'-O-methylguanosine-3'-phosphate
  modified_base 19: mod_base = OTHER; note = 2'-O-methyladenosine-3'-phosphorothioate
  modified_base 20: mod_base = OTHER; note = 2'-O-methyluridine-3'-phosphorothioate
  modified_base 21: mod_base = OTHER; note = 2'-O-methyladenosine
tcctttactcttaacaggata

SEQ ID NO: 11471 - RNA, 21 nt, synthetic construct
  source 1..21: mol_type = other RNA
  modified_base 1: mod_base = OTHER; note = 2'-O-methylcytidine-3'-phosphorothioate
  modified_base 2: mod_base = OTHER; note = 2'-O-methylcytidine-3'-phosphorothioate
  modified_base 3: mod_base = OTHER; note = 2'-O-methyluridine-3'-phosphate
  modified_base 4: mod_base = OTHER; note = 2'-O-methyluridine-3'-phosphate
  modified_base 5: mod_base = OTHER; note = 2'-O-methyluridine-3'-phosphate
  modified_base 6: mod_base = OTHER; note = 2'-O-docosanyl-adenosine-3'-phosphate
  modified_base 7: mod_base = OTHER; note = 2'-deoxy-2'-fluorocytidine-3'-phosphate
  modified_base 8: mod_base = OTHER; note = 2'-O-methyluridine-3'-phosphate
  modified_base 9: mod_base = OTHER; note = 2'-deoxy-2'-fluorocytidine-3'-phosphate
  modified_base 10: mod_base = OTHER; note = 2'-deoxy-2'-fluorouridine-3'-phosphate
  modified_base 11: mod_base = OTHER; note = 2'-deoxy-2'-fluorouridine-3'-phosphate
  modified_base 12: mod_base = OTHER; note = 2'-O-methyladenosine-3'-phosphate
  modified_base 13: mod_base = OTHER; note = 2'-O-methyladenosine-3'-phosphate
  modified_base 14: mod_base = OTHER; note = 2'-O-methylcytidine-3'-phosphate
  modified_base 15: mod_base = OTHER; note = 2'-O-methyladenosine-3'-phosphate
  modified_base 16: mod_base = OTHER; note = 2'-O-methylguanosine-3'-phosphate
  modified_base 17: mod_base = OTHER; note = 2'-O-methylguanosine-3'-phosphate
  modified_base 18: mod_base = OTHER; note = 2'-O-methyladenosine-3'-phosphate
  modified_base 19: mod_base = OTHER; note = 2'-O-methyluridine-3'-phosphorothioate
  modified_base 20: mod_base = OTHER; note = 2'-O-methyluridine-3'-phosphorothioate
  modified_base 21: mod_base = OTHER; note = 2'-O-methyladenosine
cctttactcttaacaggatta

SEQ ID NO: 11472 - RNA, 21 nt, synthetic construct
  source 1..21: mol_type = other RNA
  modified_base 1: mod_base = OTHER; note = 2'-O-methyluridine-3'-phosphorothioate
  modified_base 2: mod_base = OTHER; note = 2'-O-methyluridine-3'-phosphorothioate
  modified_base 3: mod_base = OTHER; note = 2'-O-methyluridine-3'-phosphate
  modified_base 4: mod_base = OTHER; note = 2'-O-methyladenosine-3'-phosphate
  modified_base 5: mod_base = OTHER; note = 2'-O-methylcytidine-3'-phosphate
  modified_base 6: mod_base = OTHER; note = 2'-O-docosanyl-uridine-3'-phosphate
  modified_base 7: mod_base = OTHER; note = 2'-deoxy-2'-fluorocytidine-3'-phosphate
  modified_base 8: mod_base = OTHER; note = 2'-O-methyluridine-3'-phosphate
  modified_base 9: mod_base = OTHER; note = 2'-deoxy-2'-fluorouridine-3'-phosphate
  modified_base 10: mod_base = OTHER; note = 2'-deoxy-2'-fluoroadenosine-3'-phosphate
  modified_base 11: mod_base = OTHER; note = 2'-deoxy-2'-fluoroadenosine-3'-phosphate
  modified_base 12: mod_base = OTHER; note = 2'-O-methylcytidine-3'-phosphate
  modified_base 13: mod_base = OTHER; note = 2'-O-methyladenosine-3'-phosphate
  modified_base 14: mod_base = OTHER; note = 2'-O-methylguanosine-3'-phosphate
  modified_base 15: mod_base = OTHER; note = 2'-O-methylguanosine-3'-phosphate
  modified_base 16: mod_base = OTHER; note = 2'-O-methyladenosine-3'-phosphate
  modified_base 17: mod_base = OTHER; note = 2'-O-methyluridine-3'-phosphate
  modified_base 18: mod_base = OTHER; note = 2'-O-methyluridine-3'-phosphate
  modified_base 19: mod_base = OTHER; note = 2'-O-methyladenosine-3'-phosphorothioate
  modified_base 20: mod_base = OTHER; note = 2'-O-methyluridine-3'-phosphorothioate
  modified_base 21: mod_base = OTHER; note = 2'-O-methyladenosine
tttactcttaacaggattata

SEQ ID NO: 11473 - RNA, 21 nt, synthetic construct
  source 1..21: mol_type = other RNA
  modified_base 1: mod_base = OTHER; note = 2'-O-methyluridine-3'-phosphorothioate
  modified_base 2: mod_base = OTHER; note = 2'-O-methyluridine-3'-phosphorothioate
  modified_base 3: mod_base = OTHER; note = 2'-O-methyladenosine-3'-phosphate
  modified_base 4: mod_base = OTHER; note = 2'-O-methylcytidine-3'-phosphate
  modified_base 5: mod_base = OTHER; note = 2'-O-methyluridine-3'-phosphate
  modified_base 6: mod_base = OTHER; note = 2'-O-docosanyl-cytidine-3'-phosphate
  modified_base 7: mod_base = OTHER; note = 2'-deoxy-2'-fluorouridine-3'-phosphate
  modified_base 8: mod_base = OTHER; note = 2'-O-methyluridine-3'-phosphate
  modified_base 9: mod_base = OTHER; note = 2'-deoxy-2'-fluoroadenosine-3'-phosphate
  modified_base 10: mod_base = OTHER; note = 2'-deoxy-2'-fluoroadenosine-3'-phosphate
  modified_base 11: mod_base = OTHER; note = 2'-deoxy-2'-fluorocytidine-3'-phosphate
  modified_base 12: mod_base = OTHER; note = 2'-O-methyladenosine-3'-phosphate
  modified_base 13: mod_base = OTHER; note = 2'-O-methylguanosine-3'-phosphate
  modified_base 14: mod_base = OTHER; note = 2'-O-methylguanosine-3'-phosphate
  modified_base 15: mod_base = OTHER; note = 2'-O-methyladenosine-3'-phosphate
  modified_base 16: mod_base = OTHER; note = 2'-O-methyluridine-3'-phosphate
  modified_base 17: mod_base = OTHER; note = 2'-O-methyluridine-3'-phosphate
  modified_base 18: mod_base = OTHER; note = 2'-O-methyladenosine-3'-phosphate
  modified_base 19: mod_base = OTHER; note = 2'-O-methyluridine-3'-phosphorothioate
  modified_base 20: mod_base = OTHER; note = 2'-O-methyladenosine-3'-phosphorothioate
  modified_base 21: mod_base = OTHER; note = 2'-O-methyladenosine
ttactcttaacaggattataa

SEQ ID NO: 11474 - RNA, 21 nt, synthetic construct
  source 1..21: mol_type = other RNA
  modified_base 1: mod_base = OTHER; note = 2'-O-methylcytidine-3'-phosphorothioate
  modified_base 2: mod_base = OTHER; note = 2'-O-methyluridine-3'-phosphorothioate
  modified_base 3: mod_base = OTHER; note = 2'-O-methyluridine-3'-phosphate
  modified_base 4: mod_base = OTHER; note = 2'-O-methyladenosine-3'-phosphate
  modified_base 5: mod_base = OTHER; note = 2'-O-methyladenosine-3'-phosphate
  modified_base 6: mod_base = OTHER; note = 2'-O-docosanyl-cytidine-3'-phosphate
  modified_base 7: mod_base = OTHER; note = 2'-deoxy-2'-fluoroadenosine-3'-phosphate
  modified_base 8: mod_base = OTHER; note = 2'-O-methylguanosine-3'-phosphate
  modified_base 9: mod_base = OTHER; note = 2'-deoxy-2'-fluoroguanosine-3'-phosphate
  modified_base 10: mod_base = OTHER; note = 2'-deoxy-2'-fluoroadenosine-3'-phosphate
  modified_base 11: mod_base = OTHER; note = 2'-deoxy-2'-fluorouridine-3'-phosphate
  modified_base 12: mod_base = OTHER; note = 2'-O-methyluridine-3'-phosphate
  modified_base 13: mod_base = OTHER; note = 2'-O-methyladenosine-3'-phosphate
  modified_base 14: mod_base = OTHER; note = 2'-O-methyluridine-3'-phosphate
  modified_base 15: mod_base = OTHER; note = 2'-O-methyladenosine-3'-phosphate
  modified_base 16: mod_base = OTHER; note = 2'-O-methyluridine-3'-phosphate
  modified_base 17: mod_base = OTHER; note = 2'-O-methyladenosine-3'-phosphate
  modified_base 18: mod_base = OTHER; note = 2'-O-methyluridine-3'-phosphate
  modified_base 19: mod_base = OTHER; note = 2'-O-methyladenosine-3'-phosphorothioate
  modified_base 20: mod_base = OTHER; note = 2'-O-methylguanosine-3'-phosphorothioate
  modified_base 21: mod_base = OTHER; note = 2'-O-methyladenosine
cttaacaggattatatataga

SEQ ID NO: 11475 - RNA, 21 nt, synthetic construct
  source 1..21: mol_type = other RNA
  modified_base 1: mod_base = OTHER; note = 2'-O-methyladenosine-3'-phosphorothioate
  modified_base 2: mod_base = OTHER; note = 2'-O-methylguanosine-3'-phosphorothioate
  modified_base 3: mod_base = OTHER; note = 2'-O-methylguanosine-3'-phosphate
  modified_base 4: mod_base = OTHER; note = 2'-O-methyladenosine-3'-phosphate
  modified_base 5: mod_base = OTHER; note = 2'-O-methyluridine-3'-phosphate
  modified_base 6: mod_base = OTHER; note = 2'-O-docosanyl-uridine-3'-phosphate
  modified_base 7: mod_base = OTHER; note = 2'-deoxy-2'-fluoroadenosine-3'-phosphate
  modified_base 8: mod_base = OTHER; note = 2'-O-methyluridine-3'-phosphate
  modified_base 9: mod_base = OTHER; note = 2'-deoxy-2'-fluoroadenosine-3'-phosphate
  modified_base 10: mod_base = OTHER; note = 2'-deoxy-2'-fluorouridine-3'-phosphate
  modified_base 11: mod_base = OTHER; note = 2'-deoxy-2'-fluoroadenosine-3'-phosphate
  modified_base 12: mod_base = OTHER; note = 2'-O-methyluridine-3'-phosphate
  modified_base 13: mod_base = OTHER; note = 2'-O-methyladenosine-3'-phosphate
  modified_base 14: mod_base = OTHER; note = 2'-O-methylguanosine-3'-phosphate
  modified_base 15: mod_base = OTHER; note = 2'-O-methyladenosine-3'-phosphate
  modified_base 16: mod_base = OTHER; note = 2'-O-methyladenosine-3'-phosphate
  modified_base 17: mod_base = OTHER; note = 2'-O-methylcytidine-3'-phosphate
  modified_base 18: mod_base = OTHER; note = 2'-O-methyladenosine-3'-phosphate
  modified_base 19: mod_base = OTHER; note = 2'-O-methyluridine-3'-phosphorothioate
  modified_base 20: mod_base = OTHER; note = 2'-O-methylguanosine-3'-phosphorothioate
  modified_base 21: mod_base = OTHER; note = 2'-O-methyladenosine
aggattatatatagaacatga

SEQ ID NO: 11476 - RNA, 21 nt, synthetic construct
  source 1..21: mol_type = other RNA
  modified_base 1: mod_base = OTHER; note = 2'-O-methylcytidine-3'-phosphorothioate
  modified_base 2: mod_base = OTHER; note = 2'-O-methyladenosine-3'-phosphorothioate
  modified_base 3: mod_base = OTHER; note = 2'-O-methyluridine-3'-phosphate
  modified_base 4: mod_base = OTHER; note = 2'-O-methylguanosine-3'-phosphate
  modified_base 5: mod_base = OTHER; note = 2'-O-methylcytidine-3'-phosphate
  modified_base 6: mod_base = OTHER; note = 2'-O-docosanyl-uridine-3'-phosphate
  modified_base 7: mod_base = OTHER; note = 2'-deoxy-2'-fluorocytidine-3'-phosphate
  modified_base 8: mod_base = OTHER; note = 2'-O-methyladenosine-3'-phosphate
  modified_base 9: mod_base = OTHER; note = 2'-deoxy-2'-fluorocytidine-3'-phosphate
  modified_base 10: mod_base = OTHER; note = 2'-deoxy-2'-fluorouridine-3'-phosphate
  modified_base 11: mod_base = OTHER; note = 2'-deoxy-2'-fluorouridine-3'-phosphate
  modified_base 12: mod_base = OTHER; note = 2'-O-methyladenosine-3'-phosphate
  modified_base 13: mod_base = OTHER; note = 2'-O-methylcytidine-3'-phosphate
  modified_base 14: mod_base = OTHER; note = 2'-O-methyladenosine-3'-phosphate
  modified_base 15: mod_base = OTHER; note = 2'-O-methyladenosine-3'-phosphate
  modified_base 16: mod_base = OTHER; note = 2'-O-methyladenosine-3'-phosphate
  modified_base 17: mod_base = OTHER; note = 2'-O-methyladenosine-3'-phosphate
  modified_base 18: mod_base = OTHER; note = 2'-O-methyladenosine-3'-phosphate
  modified_base 19: mod_base = OTHER; note = 2'-O-methyluridine-3'-phosphorothioate
  modified_base 20: mod_base = OTHER; note = 2'-O-methyladenosine-3'-phosphorothioate
  modified_base 21: mod_base = OTHER; note = 2'-O-methyladenosine
catgctcacttacaaaaataa

SEQ ID NO: 11477 - RNA, 21 nt, synthetic construct
  source 1..21: mol_type = other RNA
  modified_base 1: mod_base = OTHER; note = 2'-O-methyladenosine-3'-phosphorothioate
  modified_base 2: mod_base = OTHER; note = 2'-O-methylcytidine-3'-phosphorothioate
  modified_base 3: mod_base = OTHER; note = 2'-O-methyluridine-3'-phosphate
  modified_base 4: mod_base = OTHER; note = 2'-O-methyluridine-3'-phosphate
  modified_base 5: mod_base = OTHER; note = 2'-O-methyladenosine-3'-phosphate
  modified_base 6: mod_base = OTHER; note = 2'-O-docosanyl-cytidine-3'-phosphate
  modified_base 7: mod_base = OTHER; note = 2'-deoxy-2'-fluoroadenosine-3'-phosphate
  modified_base 8: mod_base = OTHER; note = 2'-O-methyladenosine-3'-phosphate
  modified_base 9: mod_base = OTHER; note = 2'-deoxy-2'-fluoroadenosine-3'-phosphate
  modified_base 10: mod_base = OTHER; note = 2'-deoxy-2'-fluoroadenosine-3'-phosphate
  modified_base 11: mod_base = OTHER; note = 2'-deoxy-2'-fluoroadenosine-3'-phosphate
  modified_base 12: mod_base = OTHER; note = 2'-O-methyluridine-3'-phosphate
  modified_base 13: mod_base = OTHER; note = 2'-O-methyladenosine-3'-phosphate
  modified_base 14: mod_base = OTHER; note = 2'-O-methylguanosine-3'-phosphate
  modified_base 15: mod_base = OTHER; note = 2'-O-methylguanosine-3'-phosphate
  modified_base 16: mod_base = OTHER; note = 2'-O-methyladenosine-3'-phosphate
  modified_base 17: mod_base = OTHER; note = 2'-O-methyluridine-3'-phosphate
  modified_base 18: mod_base = OTHER; note = 2'-O-methylguanosine-3'-phosphate
  modified_base 19: mod_base = OTHER; note = 2'-O-methyladenosine-3'-phosphorothioate
  modified_base 20: mod_base = OTHER; note = 2'-O-methyluridine-3'-phosphorothioate
  modified_base 21: mod_base = OTHER; note = 2'-O-methyladenosine
acttacaaaaataggatgata

SEQ ID NO: 11478 - RNA, 21 nt, synthetic construct
  source 1..21: mol_type = other RNA
  modified_base 1: mod_base = OTHER; note = 2'-O-methyladenosine-3'-phosphorothioate
  modified_base 2: mod_base = OTHER; note = 2'-O-methyluridine-3'-phosphorothioate
  modified_base 3: mod_base = OTHER; note = 2'-O-methyladenosine-3'-phosphate
  modified_base 4: mod_base = OTHER; note = 2'-O-methyladenosine-3'-phosphate
  modified_base 5: mod_base = OTHER; note = 2'-O-methylguanosine-3'-phosphate
  modified_base 6: mod_base = OTHER; note = 2'-O-docosanyl-guanosine-3'-phosphate
  modified_base 7: mod_base = OTHER; note = 2'-deoxy-2'-fluorocytidine-3'-phosphate
  modified_base 8: mod_base = OTHER; note = 2'-O-methyladenosine-3'-phosphate
  modified_base 9: mod_base = OTHER; note = 2'-deoxy-2'-fluoroguanosine-3'-phosphate
  modified_base 10: mod_base = OTHER; note = 2'-deoxy-2'-fluoroguanosine-3'-phosphate
  modified_base 11: mod_base = OTHER; note = 2'-deoxy-2'-fluorocytidine-3'-phosphate
  modified_base 12: mod_base = OTHER; note = 2'-O-methyluridine-3'-phosphate
  modified_base 13: mod_base = OTHER; note = 2'-O-methyluridine-3'-phosphate
  modified_base 14: mod_base = OTHER; note = 2'-O-methylcytidine-3'-phosphate
  modified_base 15: mod_base = OTHER; note = 2'-O-methyluridine-3'-phosphate
  modified_base 16: mod_base = OTHER; note = 2'-O-methyluridine-3'-phosphate
  modified_base 17: mod_base = OTHER; note = 2'-O-methylguanosine-3'-phosphate
  modified_base 18: mod_base = OTHER; note = 2'-O-methyluridine-3'-phosphate
  modified_base 19: mod_base = OTHER; note = 2'-O-methyladenosine-3'-phosphorothioate
  modified_base 20: mod_base = OTHER; note = 2'-O-methyluridine-3'-phosphorothioate
  modified_base 21: mod_base = OTHER; note = 2'-O-methyladenosine
ataaggcaggcttcttgtata

SEQ ID NO: 11479 - RNA, 21 nt, synthetic construct
  source 1..21: mol_type = other RNA
  modified_base 1: mod_base = OTHER; note = 2'-O-methylcytidine-3'-phosphorothioate
  modified_base 2: mod_base = OTHER; note = 2'-O-methyladenosine-3'-phosphorothioate
  modified_base 3: mod_base = OTHER; note = 2'-O-methylguanosine-3'-phosphate
  modified_base 4: mod_base = OTHER; note = 2'-O-methylguanosine-3'-phosphate
  modified_base 5: mod_base = OTHER; note = 2'-O-methylcytidine-3'-phosphate
  modified_base 6: mod_base = OTHER; note = 2'-O-docosanyl-uridine-3'-phosphate
  modified_base 7: mod_base = OTHER; note = 2'-deoxy-2'-fluorouridine-3'-phosphate
  modified_base 8: mod_base = OTHER; note = 2'-O-methylcytidine-3'-phosphate
  modified_base 9: mod_base = OTHER; note = 2'-deoxy-2'-fluorouridine-3'-phosphate
  modified_base 10: mod_base = OTHER; note = 2'-deoxy-2'-fluorouridine-3'-phosphate
  modified_base 11: mod_base = OTHER; note = 2'-deoxy-2'-fluoroguanosine-3'-phosphate
  modified_base 12: mod_base = OTHER; note = 2'-O-methyluridine-3'-phosphate
  modified_base 13: mod_base = OTHER; note = 2'-O-methyladenosine-3'-phosphate
  modified_base 14: mod_base = OTHER; note = 2'-O-methyluridine-3'-phosphate
  modified_base 15: mod_base = OTHER; note = 2'-O-methyladenosine-3'-phosphate
  modified_base 16: mod_base = OTHER; note = 2'-O-methyluridine-3'-phosphate
  modified_base 17: mod_base = OTHER; note = 2'-O-methyladenosine-3'-phosphate
  modified_base 18: mod_base = OTHER; note = 2'-O-methylcytidine-3'-phosphate
  modified_base 19: mod_base = OTHER; note = 2'-O-methyluridine-3'-phosphorothioate
  modified_base 20: mod_base = OTHER; note = 2'-O-methyluridine-3'-phosphorothioate
  modified_base 21: mod_base = OTHER; note = 2'-O-methyladenosine
caggcttcttgtatatactta

SEQ ID NO: 11480 - RNA, 21 nt, synthetic construct
  source 1..21: mol_type = other RNA
  modified_base 1: mod_base = OTHER; note = 2'-O-methyluridine-3'-phosphorothioate
  modified_base 2: mod_base = OTHER; note = 2'-O-methyladenosine-3'-phosphorothioate
  modified_base 3: mod_base = OTHER; note = 2'-O-methyluridine-3'-phosphate
  modified_base 4: mod_base = OTHER; note = 2'-O-methyladenosine-3'-phosphate
  modified_base 5: mod_base = OTHER; note = 2'-O-methyluridine-3'-phosphate
  modified_base 6: mod_base = OTHER; note = 2'-O-docosanyl-adenosine-3'-phosphate
  modified_base 7: mod_base = OTHER; note = 2'-deoxy-2'-fluorocytidine-3'-phosphate
  modified_base 8: mod_base = OTHER; note = 2'-O-methyluridine-3'-phosphate
  modified_base 9: mod_base = OTHER; note = 2'-deoxy-2'-fluorouridine-3'-phosphate
  modified_base 10: mod_base = OTHER; note = 2'-deoxy-2'-fluoroadenosine-3'-phosphate
  modified_base 11: mod_base = OTHER; note = 2'-deoxy-2'-fluorouridine-3'-phosphate
  modified_base 12: mod_base = OTHER; note = 2'-O-methylguanosine-3'-phosphate
  modified_base 13: mod_base = OTHER; note = 2'-O-methylcytidine-3'-phosphate
  modified_base 14: mod_base = OTHER; note = 2'-O-methyluridine-3'-phosphate
  modified_base 15: mod_base = OTHER; note = 2'-O-methylguanosine-3'-phosphate
  modified_base 16: mod_base = OTHER; note = 2'-O-methyluridine-3'-phosphate
  modified_base 17: mod_base = OTHER; note = 2'-O-methylcytidine-3'-phosphate
  modified_base 18: mod_base = OTHER; note = 2'-O-methyladenosine-3'-phosphate
  modified_base 19: mod_base = OTHER; note = 2'-O-methyladenosine-3'-phosphorothioate
  modified_base 20: mod_base = OTHER; note = 2'-O-methyladenosine-3'-phosphorothioate
  modified_base 21: mod_base = OTHER; note = 2'-O-methyladenosine
tatatacttatgctgtcaaaa

SEQ ID NO: 11481 - RNA, 21 nt, synthetic construct
  source 1..21: mol_type = other RNA
  modified_base 1: mod_base = OTHER; note = 2'-O-methyladenosine-3'-phosphorothioate
  modified_base 2: mod_base = OTHER; note = 2'-O-methyluridine-3'-phosphorothioate
  modified_base 3: mod_base = OTHER; note = 2'-O-methyladenosine-3'-phosphate
  modified_base 4: mod_base = OTHER; note = 2'-O-methyluridine-3'-phosphate
  modified_base 5: mod_base = OTHER; note = 2'-O-methyladenosine-3'-phosphate
  modified_base 6: mod_base = OTHER; note = 2'-O-docosanyl-cytidine-3'-phosphate
  modified_base 7: mod_base = OTHER; note = 2'-deoxy-2'-fluorouridine-3'-phosphate
  modified_base 8: mod_base = OTHER; note = 2'-O-methyluridine-3'-phosphate
  modified_base 9: mod_base = OTHER; note = 2'-deoxy-2'-fluoroadenosine-3'-phosphate
  modified_base 10: mod_base = OTHER; note = 2'-deoxy-2'-fluorouridine-3'-phosphate
  modified_base 11: mod_base = OTHER; note = 2'-deoxy-2'-fluoroguanosine-3'-phosphate
  modified_base 12: mod_base = OTHER; note = 2'-O-methylcytidine-3'-phosphate
  modified_base 13: mod_base = OTHER; note = 2'-O-methyluridine-3'-phosphate
  modified_base 14: mod_base = OTHER; note = 2'-O-methylguanosine-3'-phosphate
  modified_base 15: mod_base = OTHER; note = 2'-O-methyluridine-3'-phosphate
  modified_base 16: mod_base = OTHER; note = 2'-O-methylcytidine-3'-phosphate
  modified_base 17: mod_base = OTHER; note = 2'-O-methyladenosine-3'-phosphate
  modified_base 18: mod_base = OTHER; note = 2'-O-methyladenosine-3'-phosphate
  modified_base 19: mod_base = OTHER; note = 2'-O-methyladenosine-3'-phosphorothioate
  modified_base 20: mod_base = OTHER; note = 2'-O-methyluridine-3'-phosphorothioate
  modified_base 21: mod_base = OTHER; note = 2'-O-methyladenosine
atatacttatgctgtcaaata

SEQ ID NO: 11482 - RNA, 21 nt, synthetic construct
  source 1..21: mol_type = other RNA
  modified_base 1: mod_base = OTHER; note = 2'-O-methyluridine-3'-phosphorothioate
  modified_base 2: mod_base = OTHER; note = 2'-O-methyladenosine-3'-phosphorothioate
  modified_base 3: mod_base = OTHER; note = 2'-O-methyluridine-3'-phosphate
  modified_base 4: mod_base = OTHER; note = 2'-O-methyladenosine-3'-phosphate
  modified_base 5: mod_base = OTHER; note = 2'-O-methylcytidine-3'-phosphate
  modified_base 6: mod_base = OTHER; note = 2'-O-docosanyl-uridine-3'-phosphate
  modified_base 7: mod_base = OTHER; note = 2'-deoxy-2'-fluorouridine-3'-phosphate
  modified_base 8: mod_base = OTHER; note = 2'-O-methyladenosine-3'-phosphate
  modified_base 9: mod_base = OTHER; note = 2'-deoxy-2'-fluorouridine-3'-phosphate
  modified_base 10: mod_base = OTHER; note = 2'-deoxy-2'-fluoroguanosine-3'-phosphate
  modified_base 11: mod_base = OTHER; note = 2'-deoxy-2'-fluorocytidine-3'-phosphate
  modified_base 12: mod_base = OTHER; note = 2'-O-methyluridine-3'-phosphate
  modified_base 13: mod_base = OTHER; note = 2'-O-methylguanosine-3'-phosphate
  modified_base 14: mod_base = OTHER; note = 2'-O-methyluridine-3'-phosphate
  modified_base 15: mod_base = OTHER; note = 2'-O-methylcytidine-3'-phosphate
  modified_base 16: mod_base = OTHER; note = 2'-O-methyladenosine-3'-phosphate
  modified_base 17: mod_base = OTHER; note = 2'-O-methyladenosine-3'-phosphate
  modified_base 18: mod_base = OTHER; note = 2'-O-methyladenosine-3'-phosphate
  modified_base 19: mod_base = OTHER; note = 2'-O-methyluridine-3'-phosphorothioate
  modified_base 20: mod_base = OTHER; note = 2'-O-methylguanosine-3'-phosphorothioate
  modified_base 21: mod_base = OTHER; note = 2'-O-methyladenosine
tatacttatgctgtcaaatga

SEQ ID NO: 11483 - RNA, 21 nt, synthetic construct
  source 1..21: mol_type = other RNA
  modified_base 1: mod_base = OTHER; note = 2'-O-methyladenosine-3'-phosphorothioate
  modified_base 2: mod_base = OTHER; note = 2'-O-methyluridine-3'-phosphorothioate
  modified_base 3: mod_base = OTHER; note = 2'-O-methyladenosine-3'-phosphate
  modified_base 4: mod_base = OTHER; note = 2'-O-methylcytidine-3'-phosphate
  modified_base 5: mod_base = OTHER; note = 2'-O-methyluridine-3'-phosphate
  modified_base 6: mod_base = OTHER; note = 2'-O-docosanyl-uridine-3'-phosphate
  modified_base 7: mod_base = OTHER; note = 2'-deoxy-2'-fluoroadenosine-3'-phosphate
  modified_base 8: mod_base = OTHER; note = 2'-O-methyluridine-3'-phosphate
  modified_base 9: mod_base = OTHER; note = 2'-deoxy-2'-fluoroguanosine-3'-phosphate
  modified_base 10: mod_base = OTHER; note = 2'-deoxy-2'-fluorocytidine-3'-phosphate
  modified_base 11: mod_base = OTHER; note = 2'-deoxy-2'-fluorouridine-3'-phosphate
  modified_base 12: mod_base = OTHER; note = 2'-O-methylguanosine-3'-phosphate
  modified_base 13: mod_base = OTHER; note = 2'-O-methyluridine-3'-phosphate
  modified_base 14: mod_base = OTHER; note = 2'-O-methylcytidine-3'-phosphate
  modified_base 15: mod_base = OTHER; note = 2'-O-methyladenosine-3'-phosphate
  modified_base 16: mod_base = OTHER; note = 2'-O-methyladenosine-3'-phosphate
  modified_base 17: mod_base = OTHER; note = 2'-O-methyladenosine-3'-phosphate
  modified_base 18: mod_base = OTHER; note = 2'-O-methyluridine-3'-phosphate
  modified_base 19: mod_base = OTHER; note = 2'-O-methylguanosine-3'-phosphorothioate
  modified_base 20: mod_base = OTHER; note = 2'-O-methyluridine-3'-phosphorothioate
  modified_base 21: mod_base = OTHER; note = 2'-O-methyladenosine
atacttatgctgtcaaatgta

SEQ ID NO: 11484 - RNA, 21 nt, synthetic construct
  source 1..21: mol_type = other RNA
  modified_base 1: mod_base = OTHER; note = 2'-O-methyluridine-3'-phosphorothioate
  modified_base 2: mod_base = OTHER; note = 2'-O-methyladenosine-3'-phosphorothioate
  modified_base 3: mod_base = OTHER; note = 2'-O-methylcytidine-3'-phosphate
  modified_base 4: mod_base = OTHER; note = 2'-O-methyluridine-3'-phosphate
  modified_base 5: mod_base = OTHER; note = 2'-O-methyluridine-3'-phosphate
  modified_base 6: mod_base = OTHER; note = 2'-O-docosanyl-adenosine-3'-phosphate
  modified_base 7: mod_base = OTHER; note = 2'-deoxy-2'-fluorouridine-3'-phosphate
  modified_base 8: mod_base = OTHER; note = 2'-O-methylguanosine-3'-phosphate
  modified_base 9: mod_base = OTHER; note = 2'-deoxy-2'-fluorocytidine-3'-phosphate
  modified_base 10: mod_base = OTHER; note = 2'-deoxy-2'-fluorouridine-3'-phosphate
  modified_base 11: mod_base = OTHER; note = 2'-deoxy-2'-fluoroguanosine-3'-phosphate
  modified_base 12: mod_base = OTHER; note = 2'-O-methyluridine-3'-phosphate
  modified_base 13: mod_base = OTHER; note = 2'-O-methylcytidine-3'-phosphate
  modified_base 14: mod_base = OTHER; note = 2'-O-methyladenosine-3'-phosphate
  modified_base 15: mod_base = OTHER; note = 2'-O-methyladenosine-3'-phosphate
  modified_base 16: mod_base = OTHER; note = 2'-O-methyladenosine-3'-phosphate
  modified_base 17: mod_base = OTHER; note = 2'-O-methyluridine-3'-phosphate
  modified_base 18: mod_base = OTHER; note = 2'-O-methylguanosine-3'-phosphate
  modified_base 19: mod_base = OTHER; note = 2'-O-methyluridine-3'-phosphorothioate
  modified_base 20: mod_base = OTHER; note = 2'-O-methyluridine-3'-phosphorothioate
  modified_base 21: mod_base = OTHER; note = 2'-O-methyladenosine
tacttatgctgtcaaatgtta

SEQ ID NO: 11485 - RNA, 21 nt, synthetic construct
  source 1..21: mol_type = other RNA
  modified_base 1: mod_base = OTHER; note = 2'-O-methyladenosine-3'-phosphorothioate
  modified_base 2: mod_base = OTHER; note = 2'-O-methylcytidine-3'-phosphorothioate
  modified_base 3: mod_base = OTHER; note = 2'-O-methyluridine-3'-phosphate
  modified_base 4: mod_base = OTHER; note = 2'-O-methyluridine-3'-phosphate
  modified_base 5: mod_base = OTHER; note = 2'-O-methyladenosine-3'-phosphate
  modified_base 6: mod_base = OTHER; note = 2'-O-docosanyl-uridine-3'-phosphate
  modified_base 7: mod_base = OTHER; note = 2'-deoxy-2'-fluoroguanosine-3'-phosphate
  modified_base 8: mod_base = OTHER; note = 2'-O-methylcytidine-3'-phosphate
  modified_base 9: mod_base = OTHER; note = 2'-deoxy-2'-fluorouridine-3'-phosphate
  modified_base 10: mod_base = OTHER; note = 2'-deoxy-2'-fluoroguanosine-3'-phosphate
  modified_base 11: mod_base = OTHER; note = 2'-deoxy-2'-fluorouridine-3'-phosphate
  modified_base 12: mod_base = OTHER; note = 2'-O-methylcytidine-3'-phosphate
  modified_base 13: mod_base = OTHER; note = 2'-O-methyladenosine-3'-phosphate
  modified_base 14: mod_base = OTHER; note = 2'-O-methyladenosine-3'-phosphate
  modified_base 15: mod_base = OTHER; note = 2'-O-methyladenosine-3'-phosphate
  modified_base 16: mod_base = OTHER; note = 2'-O-methyluridine-3'-phosphate
  modified_base 17: mod_base = OTHER; note = 2'-O-methylguanosine-3'-phosphate
  modified_base 18: mod_base = OTHER; note = 2'-O-methyluridine-3'-phosphate
  modified_base 19: mod_base = OTHER; note = 2'-O-methyluridine-3'-phosphorothioate
  modified_base 20: mod_base = OTHER; note = 2'-O-methyladenosine-3'-phosphorothioate
  modified_base 21: mod_base = OTHER; note = 2'-O-methyladenosine
acttatgctgtcaaatgttaa

SEQ ID NO: 11486 - RNA, 21 nt, synthetic construct
  source 1..21: mol_type = other RNA
  modified_base 1: mod_base = OTHER; note = 2'-O-methylcytidine-3'-phosphorothioate
  modified_base 2: mod_base = OTHER; note = 2'-O-methyluridine-3'-phosphorothioate
  modified_base 3: mod_base = OTHER; note = 2'-O-methyluridine-3'-phosphate
  modified_base 4: mod_base = OTHER; note = 2'-O-methyladenosine-3'-phosphate
  modified_base 5: mod_base = OTHER; note = 2'-O-methyluridine-3'-phosphate
  modified_base 6: mod_base = OTHER; note = 2'-O-docosanyl-guanosine-3'-phosphate
  modified_base 7: mod_base = OTHER; note = 2'-deoxy-2'-fluorocytidine-3'-phosphate
  modified_base 8: mod_base = OTHER; note = 2'-O-methyluridine-3'-phosphate
  modified_base 9: mod_base = OTHER; note = 2'-deoxy-2'-fluoroguanosine-3'-phosphate
  modified_base 10: mod_base = OTHER; note = 2'-deoxy-2'-fluorouridine-3'-phosphate
  modified_base 11: mod_base = OTHER; note = 2'-deoxy-2'-fluorocytidine-3'-phosphate
  modified_base 12: mod_base = OTHER; note = 2'-O-methyladenosine-3'-phosphate
  modified_base 13: mod_base = OTHER; note = 2'-O-methyladenosine-3'-phosphate
  modified_base 14: mod_base = OTHER; note = 2'-O-methyladenosine-3'-phosphate
  modified_base 15: mod_base = OTHER; note = 2'-O-methyluridine-3'-phosphate
  modified_base 16: mod_base = OTHER; note = 2'-O-methylguanosine-3'-phosphate
  modified_base 17: mod_base = OTHER; note = 2'-O-methyluridine-3'-phosphate
  modified_base 18: mod_base = OTHER; note = 2'-O-methyluridine-3'-phosphate
  modified_base 19: mod_base = OTHER; note = 2'-O-methyladenosine-3'-phosphorothioate
  modified_base 20: mod_base = OTHER; note = 2'-O-methyluridine-3'-phosphorothioate
  modified_base 21: mod_base = OTHER; note = 2'-O-methyladenosine
cttatgctgtcaaatgttata

SEQ ID NO: 11487 - RNA, 21 nt, synthetic construct
  source 1..21: mol_type = other RNA
  modified_base 1: mod_base = OTHER; note = 2'-O-methylguanosine-3'-phosphorothioate
  modified_base 2: mod_base = OTHER; note = 2'-O-methylcytidine-3'-phosphorothioate
  modified_base 3: mod_base = OTHER; note = 2'-O-methyluridine-3'-phosphate
  modified_base 4: mod_base = OTHER; note = 2'-O-methylguanosine-3'-phosphate
  modified_base 5: mod_base = OTHER; note = 2'-O-methyluridine-3'-phosphate
  modified_base 6: mod_base = OTHER; note = 2'-O-docosanyl-cytidine-3'-phosphate
  modified_base 7: mod_base = OTHER; note = 2'-deoxy-2'-fluoroadenosine-3'-phosphate
  modified_base 8: mod_base = OTHER; note = 2'-O-methyladenosine-3'-phosphate
  modified_base 9: mod_base = OTHER; note = 2'-deoxy-2'-fluoroadenosine-3'-phosphate
  modified_base 10: mod_base = OTHER; note = 2'-deoxy-2'-fluorouridine-3'-phosphate
  modified_base 11: mod_base = OTHER; note = 2'-deoxy-2'-fluoroguanosine-3'-phosphate
  modified_base 12: mod_base = OTHER; note = 2'-O-methyluridine-3'-phosphate
  modified_base 13: mod_base = OTHER; note = 2'-O-methyluridine-3'-phosphate
  modified_base 14: mod_base = OTHER; note = 2'-O-methyladenosine-3'-phosphate
  modified_base 15: mod_base = OTHER; note = 2'-O-methyluridine-3'-phosphate
  modified_base 16: mod_base = OTHER; note = 2'-O-methyladenosine-3'-phosphate
  modified_base 17: mod_base = OTHER; note = 2'-O-methyluridine-3'-phosphate
  modified_base 18: mod_base = OTHER; note = 2'-O-methyluridine-3'-phosphate
  modified_base 19: mod_base = OTHER; note = 2'-O-methylguanosine-3'-phosphorothioate
  modified_base 20: mod_base = OTHER; note = 2'-O-methyluridine-3'-phosphorothioate
  modified_base 21: mod_base = OTHER; note = 2'-O-methyladenosine
gctgtcaaatgttatattgta

SEQ ID NO: 11488 - RNA, 21 nt, synthetic construct
  source 1..21: mol_type = other RNA
  modified_base 1: mod_base = OTHER; note = 2'-O-methyluridine-3'-phosphorothioate
  modified_base 2: mod_base = OTHER; note = 2'-O-methyluridine-3'-phosphorothioate
  modified_base 3: mod_base = OTHER; note = 2'-O-methyladenosine-3'-phosphate
  modified_base 4: mod_base = OTHER; note = 2'-O-methyluridine-3'-phosphate
  modified_base 5: mod_base = OTHER; note = 2'-O-methylguanosine-3'-phosphate
  modified_base 6: mod_base = OTHER; note = 2'-O-docosanyl-cytidine-3'-phosphate
  modified_base 7: mod_base = OTHER; note = 2'-deoxy-2'-fluorouridine-3'-phosphate
  modified_base 8: mod_base = OTHER; note = 2'-O-methylguanosine-3'-phosphate
  modified_base 9: mod_base = OTHER; note = 2'-deoxy-2'-fluorouridine-3'-phosphate
  modified_base 10: mod_base = OTHER; note = 2'-deoxy-2'-fluorocytidine-3'-phosphate
  modified_base 11: mod_base = OTHER; note = 2'-deoxy-2'-fluoroadenosine-3'-phosphate
  modified_base 12: mod_base = OTHER; note = 2'-O-methyladenosine-3'-phosphate
  modified_base 13: mod_base = OTHER; note = 2'-O-methyladenosine-3'-phosphate
  modified_base 14: mod_base = OTHER; note = 2'-O-methyluridine-3'-phosphate
  modified_base 15: mod_base = OTHER; note = 2'-O-methylguanosine-3'-phosphate
  modified_base 16: mod_base = OTHER; note = 2'-O-methyluridine-3'-phosphate
  modified_base 17: mod_base = OTHER; note = 2'-O-methyluridine-3'-phosphate
  modified_base 18: mod_base = OTHER; note = 2'-O-methyladenosine-3'-phosphate
  modified_base 19: mod_base = OTHER; note = 2'-O-methyluridine-3'-phosphorothioate
  modified_base 20: mod_base = OTHER; note = 2'-O-methyladenosine-3'-phosphorothioate
  modified_base 21: mod_base = OTHER; note = 2'-O-methyladenosine
ttatgctgtcaaatgttataa

SEQ ID NO: 11489 - RNA, 21 nt, synthetic construct
  source 1..21: mol_type = other RNA
  modified_base 1: mod_base = OTHER; note = 2'-O-methyluridine-3'-phosphorothioate
  modified_base 2: mod_base = OTHER; note = 2'-O-methyladenosine-3'-phosphorothioate
  modified_base 3: mod_base = OTHER; note = 2'-O-methyluridine-3'-phosphate
  modified_base 4: mod_base = OTHER; note = 2'-O-methylguanosine-3'-phosphate
  modified_base 5: mod_base = OTHER; note = 2'-O-methylcytidine-3'-phosphate
  modified_base 6: mod_base = OTHER; note = 2'-O-docosanyl-uridine-3'-phosphate
  modified_base 7: mod_base = OTHER; note = 2'-deoxy-2'-fluoroguanosine-3'-phosphate
  modified_base 8: mod_base = OTHER; note = 2'-O-methyluridine-3'-phosphate
  modified_base 9: mod_base = OTHER; note = 2'-deoxy-2'-fluorocytidine-3'-phosphate
  modified_base 10: mod_base = OTHER; note = 2'-deoxy-2'-fluoroadenosine-3'-phosphate
  modified_base 11: mod_base = OTHER; note = 2'-deoxy-2'-fluoroadenosine-3'-phosphate
  modified_base 12: mod_base = OTHER; note = 2'-O-methyladenosine-3'-phosphate
  modified_base 13: mod_base = OTHER; note = 2'-O-methyluridine-3'-phosphate
  modified_base 14: mod_base = OTHER; note = 2'-O-methylguanosine-3'-phosphate
  modified_base 15: mod_base = OTHER; note = 2'-O-methyluridine-3'-phosphate
  modified_base 16: mod_base = OTHER; note = 2'-O-methyluridine-3'-phosphate
  modified_base 17: mod_base = OTHER; note = 2'-O-methyladenosine-3'-phosphate
  modified_base 18: mod_base = OTHER; note = 2'-O-methyluridine-3'-phosphate
  modified_base 19: mod_base = OTHER; note = 2'-O-methyladenosine-3'-phosphorothioate
  modified_base 20: mod_base = OTHER; note = 2'-O-methyluridine-3'-phosphorothioate
  modified_base 21: mod_base = OTHER; note = 2'-O-methyladenosine
tatgctgtcaaatgttatata

SEQ ID NO: 11490 - RNA, 21 nt, synthetic construct
  source 1..21: mol_type = other RNA
  modified_base 1: mod_base = OTHER; note = 2'-O-methyluridine-3'-phosphorothioate
  modified_base 2: mod_base = OTHER; note = 2'-O-methylguanosine-3'-phosphorothioate
  modified_base 3: mod_base = OTHER; note = 2'-O-methylcytidine-3'-phosphate
  modified_base 4: mod_base = OTHER; note = 2'-O-methyluridine-3'-phosphate
  modified_base 5: mod_base = OTHER; note = 2'-O-methylguanosine-3'-phosphate
  modified_base 6: mod_base = OTHER; note = 2'-O-docosanyl-uridine-3'-phosphate
  modified_base 7: mod_base = OTHER; note = 2'-deoxy-2'-fluorocytidine-3'-phosphate
  modified_base 8: mod_base = OTHER; note = 2'-O-methyladenosine-3'-phosphate
  modified_base 9: mod_base = OTHER; note = 2'-deoxy-2'-fluoroadenosine-3'-phosphate
  modified_base 10: mod_base = OTHER; note = 2'-deoxy-2'-fluoroadenosine-3'-phosphate
  modified_base 11: mod_base = OTHER; note = 2'-deoxy-2'-fluorouridine-3'-phosphate
  modified_base 12: mod_base = OTHER; note = 2'-O-methylguanosine-3'-phosphate
  modified_base 13: mod_base = OTHER; note = 2'-O-methyluridine-3'-phosphate
  modified_base 14: mod_base = OTHER; note = 2'-O-methyluridine-3'-phosphate
  modified_base 15: mod_base = OTHER; note = 2'-O-methyladenosine-3'-phosphate
  modified_base 16: mod_base = OTHER; note = 2'-O-methyluridine-3'-phosphate
  modified_base 17: mod_base = OTHER; note = 2'-O-methyladenosine-3'-phosphate
  modified_base 18: mod_base = OTHER; note = 2'-O-methyluridine-3'-phosphate
  modified_base 19: mod_base = OTHER; note = 2'-O-methyluridine-3'-phosphorothioate
  modified_base 20: mod_base = OTHER; note = 2'-O-methylguanosine-3'-phosphorothioate
  modified_base 21: mod_base = OTHER; note = 2'-O-methyladenosine
tgctgtcaaatgttatattga

SEQ ID NO: 11491 - RNA, 21 nt, synthetic construct
  source 1..21: mol_type = other RNA
  modified_base 1: mod_base = OTHER; note = 2'-O-methylcytidine-3'-phosphorothioate
  modified_base 2: mod_base = OTHER; note = 2'-O-methyluridine-3'-phosphorothioate
  modified_base 3: mod_base = OTHER; note = 2'-O-methylguanosine-3'-phosphate
  modified_base 4: mod_base = OTHER; note = 2'-O-methyluridine-3'-phosphate
  modified_base 5: mod_base = OTHER; note = 2'-O-methylcytidine-3'-phosphate
  modified_base 6: mod_base = OTHER; note = 2'-O-docosanyl-adenosine-3'-phosphate
  modified_base 7: mod_base = OTHER; note = 2'-deoxy-2'-fluoroadenosine-3'-phosphate
  modified_base 8: mod_base = OTHER; note = 2'-O-methyladenosine-3'-phosphate
  modified_base 9: mod_base = OTHER; note = 2'-deoxy-2'-fluorouridine-3'-phosphate
  modified_base 10: mod_base = OTHER; note = 2'-deoxy-2'-fluoroguanosine-3'-phosphate
  modified_base 11: mod_base = OTHER; note = 2'-deoxy-2'-fluorouridine-3'-phosphate
  modified_base 12: mod_base = OTHER; note = 2'-O-methyluridine-3'-phosphate
  modified_base 13: mod_base = OTHER; note = 2'-O-methyladenosine-3'-phosphate
  modified_base 14: mod_base = OTHER; note = 2'-O-methyluridine-3'-phosphate
  modified_base 15: mod_base = OTHER; note = 2'-O-methyladenosine-3'-phosphate
  modified_base 16: mod_base = OTHER; note = 2'-O-methyluridine-3'-phosphate
  modified_base 17: mod_base = OTHER; note = 2'-O-methyluridine-3'-phosphate
  modified_base 18: mod_base = OTHER; note = 2'-O-methylguanosine-3'-phosphate
  modified_base 19: mod_base = OTHER; note = 2'-O-methyluridine-3'-phosphorothioate
  modified_base 20: mod_base = OTHER; note = 2'-O-methyluridine-3'-phosphorothioate
  modified_base 21: mod_base = OTHER; note = 2'-O-methyladenosine
ctgtcaaatgttatattgtta

SEQ ID NO: 11492 - RNA, 21 nt, synthetic construct
  source 1..21: mol_type = other RNA
  modified_base 1: mod_base = OTHER; note = 2'-O-methyluridine-3'-phosphorothioate
  modified_base 2: mod_base = OTHER; note = 2'-O-methylguanosine-3'-phosphorothioate
  modified_base 3: mod_base = OTHER; note = 2'-O-methyluridine-3'-phosphate
  modified_base 4: mod_base = OTHER; note = 2'-O-methylcytidine-3'-phosphate
  modified_base 5: mod_base = OTHER; note = 2'-O-methyladenosine-3'-phosphate
  modified_base 6: mod_base = OTHER; note = 2'-O-docosanyl-adenosine-3'-phosphate
  modified_base 7: mod_base = OTHER; note = 2'-deoxy-2'-fluoroadenosine-3'-phosphate
  modified_base 8: mod_base = OTHER; note = 2'-O-methyluridine-3'-phosphate
  modified_base 9: mod_base = OTHER; note = 2'-deoxy-2'-fluoroguanosine-3'-phosphate
  modified_base 10: mod_base = OTHER; note = 2'-deoxy-2'-fluorouridine-3'-phosphate
  modified_base 11: mod_base = OTHER; note = 2'-deoxy-2'-fluorouridine-3'-phosphate
  modified_base 12: mod_base = OTHER; note = 2'-O-methyladenosine-3'-phosphate
  modified_base 13: mod_base = OTHER; note = 2'-O-methyluridine-3'-phosphate
  modified_base 14: mod_base = OTHER; note = 2'-O-methyladenosine-3'-phosphate
  modified_base 15: mod_base = OTHER; note = 2'-O-methyluridine-3'-phosphate
  modified_base 16: mod_base = OTHER; note = 2'-O-methyluridine-3'-phosphate
  modified_base 17: mod_base = OTHER; note = 2'-O-methylguanosine-3'-phosphate
  modified_base 18: mod_base = OTHER; note = 2'-O-methyluridine-3'-phosphate
  modified_base 19: mod_base = OTHER; note = 2'-O-methyluridine-3'-phosphorothioate
  modified_base 20: mod_base = OTHER; note = 2'-O-methyluridine-3'-phosphorothioate
  modified_base 21: mod_base = OTHER; note = 2'-O-methyladenosine
tgtcaaatgttatattgttta

SEQ ID NO: 11493 - RNA, 21 nt, synthetic construct
  source 1..21: mol_type = other RNA
  modified_base 1: mod_base = OTHER; note = 2'-O-methyluridine-3'-phosphorothioate
  modified_base 2: mod_base = OTHER; note = 2'-O-methyladenosine-3'-phosphorothioate
  modified_base 3: mod_base = OTHER; note = 2'-O-methyluridine-3'-phosphate
  modified_base 4: mod_base = OTHER; note = 2'-O-methylguanosine-3'-phosphate
  modified_base 5: mod_base = OTHER; note = 2'-O-methyluridine-3'-phosphate
  modified_base 6: mod_base = OTHER; note = 2'-O-docosanyl-uridine-3'-phosphate
  modified_base 7: mod_base = OTHER; note = 2'-deoxy-2'-fluorocytidine-3'-phosphate
  modified_base 8: mod_base = OTHER; note = 2'-O-methyladenosine-3'-phosphate
  modified_base 9: mod_base = OTHER; note = 2'-deoxy-2'-fluoroguanosine-3'-phosphate
  modified_base 10: mod_base = OTHER; note = 2'-deoxy-2'-fluoroadenosine-3'-phosphate
  modified_base 11: mod_base = OTHER; note = 2'-deoxy-2'-fluoroguanosine-3'-phosphate
  modified_base 12: mod_base = OTHER; note = 2'-O-methyluridine-3'-phosphate
  modified_base 13: mod_base = OTHER; note = 2'-O-methyladenosine-3'-phosphate
  modified_base 14: mod_base = OTHER; note = 2'-O-methyluridine-3'-phosphate
  modified_base 15: mod_base = OTHER; note = 2'-O-methylcytidine-3'-phosphate
  modified_base 16: mod_base = OTHER; note = 2'-O-methyladenosine-3'-phosphate
  modified_base 17: mod_base = OTHER; note = 2'-O-methylguanosine-3'-phosphate
  modified_base 18: mod_base = OTHER; note = 2'-O-methyluridine-3'-phosphate
  modified_base 19: mod_base = OTHER; note = 2'-O-methylguanosine-3'-phosphorothioate
  modified_base 20: mod_base = OTHER; note = 2'-O-methyluridine-3'-phosphorothioate
  modified_base 21: mod_base = OTHER; note = 2'-O-methyladenosine
tatgttcagagtatcagtgta

SEQ ID NO: 11494 - RNA, 21 nt, synthetic construct
  source 1..21: mol_type = other RNA
  modified_base 1: mod_base = OTHER; note = 2'-O-methyladenosine-3'-phosphorothioate
  modified_base 2: mod_base = OTHER; note = 2'-O-methyluridine-3'-phosphorothioate
  modified_base 3: mod_base = OTHER; note = 2'-O-methylguanosine-3'-phosphate
  modified_base 4: mod_base = OTHER; note = 2'-O-methyluridine-3'-phosphate
  modified_base 5: mod_base = OTHER; note = 2'-O-methyluridine-3'-phosphate
  modified_base 6: mod_base = OTHER; note = 2'-O-docosanyl-cytidine-3'-phosphate
  modified_base 7: mod_base = OTHER; note = 2'-deoxy-2'-fluoroadenosine-3'-phosphate
  modified_base 8: mod_base = OTHER; note = 2'-O-methylguanosine-3'-phosphate
  modified_base 9: mod_base = OTHER; note = 2'-deoxy-2'-fluoroadenosine-3'-phosphate
  modified_base 10: mod_base = OTHER; note = 2'-deoxy-2'-fluoroguanosine-3'-phosphate
  modified_base 11: mod_base = OTHER; note = 2'-deoxy-2'-fluorouridine-3'-phosphate
  modified_base 12: mod_base = OTHER; note = 2'-O-methyladenosine-3'-phosphate
  modified_base 13: mod_base = OTHER; note = 2'-O-methyluridine-3'-phosphate
  modified_base 14: mod_base = OTHER; note = 2'-O-methylcytidine-3'-phosphate
  modified_base 15: mod_base = OTHER; note = 2'-O-methyladenosine-3'-phosphate
  modified_base 16: mod_base = OTHER; note = 2'-O-methylguanosine-3'-phosphate
  modified_base 17: mod_base = OTHER; note = 2'-O-methyluridine-3'-phosphate
  modified_base 18: mod_base = OTHER; note = 2'-O-methylguanosine-3'-phosphate
  modified_base 19: mod_base = OTHER; note = 2'-O-methyluridine-3'-phosphorothioate
  modified_base 20: mod_base = OTHER; note = 2'-O-methyluridine-3'-phosphorothioate
  modified_base 21: mod_base = OTHER; note = 2'-O-methyladenosine
atgttcagagtatcagtgtta

SEQ ID NO: 11495 - RNA, 21 nt, synthetic construct
  source 1..21: mol_type = other RNA
  modified_base 1: mod_base = OTHER; note = 2'-O-methyluridine-3'-phosphorothioate
  modified_base 2: mod_base = OTHER; note = 2'-O-methylguanosine-3'-phosphorothioate
  modified_base 3: mod_base = OTHER; note = 2'-O-methyluridine-3'-phosphate
  modified_base 4: mod_base = OTHER; note = 2'-O-methyluridine-3'-phosphate
  modified_base 5: mod_base = OTHER; note = 2'-O-methylcytidine-3'-phosphate
  modified_base 6: mod_base = OTHER; note = 2'-O-docosanyl-adenosine-3'-phosphate
  modified_base 7: mod_base = OTHER; note = 2'-deoxy-2'-fluoroguanosine-3'-phosphate
  modified_base 8: mod_base = OTHER; note = 2'-O-methyladenosine-3'-phosphate
  modified_base 9: mod_base = OTHER; note = 2'-deoxy-2'-fluoroguanosine-3'-phosphate
  modified_base 10: mod_base = OTHER; note = 2'-deoxy-2'-fluorouridine-3'-phosphate
  modified_base 11: mod_base = OTHER; note = 2'-deoxy-2'-fluoroadenosine-3'-phosphate
  modified_base 12: mod_base = OTHER; note = 2'-O-methyluridine-3'-phosphate
  modified_base 13: mod_base = OTHER; note = 2'-O-methylcytidine-3'-phosphate
  modified_base 14: mod_base = OTHER; note = 2'-O-methyladenosine-3'-phosphate
  modified_base 15: mod_base = OTHER; note = 2'-O-methylguanosine-3'-phosphate
  modified_base 16: mod_base = OTHER; note = 2'-O-methyluridine-3'-phosphate
  modified_base 17: mod_base = OTHER; note = 2'-O-methylguanosine-3'-phosphate
  modified_base 18: mod_base = OTHER; note = 2'-O-methyluridine-3'-phosphate
  modified_base 19: mod_base = OTHER; note = 2'-O-methyluridine-3'-phosphorothioate
  modified_base 20: mod_base = OTHER; note = 2'-O-methylcytidine-3'-phosphorothioate
  modified_base 21: mod_base = OTHER; note = 2'-O-methyladenosine
tgttcagagtatcagtgttca

SEQ ID NO: 11496 - RNA, 21 nt, synthetic construct
  source 1..21: mol_type = other RNA
  modified_base 1: mod_base = OTHER; note = 2'-O-methylguanosine-3'-phosphorothioate
  modified_base 2: mod_base = OTHER; note = 2'-O-methyluridine-3'-phosphorothioate
  modified_base 3: mod_base = OTHER; note = 2'-O-methyluridine-3'-phosphate
  modified_base 4: mod_base = OTHER; note = 2'-O-methylcytidine-3'-phosphate
  modified_base 5: mod_base = OTHER; note = 2'-O-methyladenosine-3'-phosphate
  modified_base 6: mod_base = OTHER; note = 2'-O-docosanyl-guanosine-3'-phosphate
  modified_base 7: mod_base = OTHER; note = 2'-deoxy-2'-fluoroadenosine-3'-phosphate
  modified_base 8: mod_base = OTHER; note = 2'-O-methylguanosine-3'-phosphate
  modified_base 9: mod_base = OTHER; note = 2'-deoxy-2'-fluorouridine-3'-phosphate
  modified_base 10: mod_base = OTHER; note = 2'-deoxy-2'-fluoroadenosine-3'-phosphate
  modified_base 11: mod_base = OTHER; note = 2'-deoxy-2'-fluorouridine-3'-phosphate
  modified_base 12: mod_base = OTHER; note = 2'-O-methylcytidine-3'-phosphate
  modified_base 13: mod_base = OTHER; note = 2'-O-methyladenosine-3'-phosphate
  modified_base 14: mod_base = OTHER; note = 2'-O-methylguanosine-3'-phosphate
  modified_base 15: mod_base = OTHER; note = 2'-O-methyluridine-3'-phosphate
  modified_base 16: mod_base = OTHER; note = 2'-O-methylguanosine-3'-phosphate
  modified_base 17: mod_base = OTHER; note = 2'-O-methyluridine-3'-phosphate
  modified_base 18: mod_base = OTHER; note = 2'-O-methyluridine-3'-phosphate
  modified_base 19: mod_base = OTHER; note = 2'-O-methylcytidine-3'-phosphorothioate
  modified_base 20: mod_base = OTHER; note = 2'-O-methyluridine-3'-phosphorothioate
  modified_base 21: mod_base = OTHER; note = 2'-O-methyladenosine
gttcagagtatcagtgttcta

SEQ ID NO: 11497 - RNA, 21 nt, synthetic construct
  source 1..21: mol_type = other RNA
  modified_base 1: mod_base = OTHER; note = 2'-O-methyluridine-3'-phosphorothioate
  modified_base 2: mod_base = OTHER; note = 2'-O-methyluridine-3'-phosphorothioate
  modified_base 3: mod_base = OTHER; note = 2'-O-methylcytidine-3'-phosphate
  modified_base 4: mod_base = OTHER; note = 2'-O-methyladenosine-3'-phosphate
  modified_base 5: mod_base = OTHER; note = 2'-O-methylguanosine-3'-phosphate
  modified_base 6: mod_base = OTHER; note = 2'-O-docosanyl-adenosine-3'-phosphate
  modified_base 7: mod_base = OTHER; note = 2'-deoxy-2'-fluoroguanosine-3'-phosphate
  modified_base 8: mod_base = OTHER; note = 2'-O-methyluridine-3'-phosphate
  modified_base 9: mod_base = OTHER; note = 2'-deoxy-2'-fluoroadenosine-3'-phosphate
  modified_base 10: mod_base = OTHER; note = 2'-deoxy-2'-fluorouridine-3'-phosphate
  modified_base 11: mod_base = OTHER; note = 2'-deoxy-2'-fluorocytidine-3'-phosphate
  modified_base 12: mod_base = OTHER; note = 2'-O-methyladenosine-3'-phosphate
  modified_base 13: mod_base = OTHER; note = 2'-O-methylguanosine-3'-phosphate
  modified_base 14: mod_base = OTHER; note = 2'-O-methyluridine-3'-phosphate
  modified_base 15: mod_base = OTHER; note = 2'-O-methylguanosine-3'-phosphate
  modified_base 16: mod_base = OTHER; note = 2'-O-methyluridine-3'-phosphate
  modified_base 17: mod_base = OTHER; note = 2'-O-methyluridine-3'-phosphate
  modified_base 18: mod_base = OTHER; note = 2'-O-methylcytidine-3'-phosphate
  modified_base 19: mod_base = OTHER; note = 2'-O-methyluridine-3'-phosphorothioate
  modified_base 20: mod_base = OTHER; note = 2'-O-methyluridine-3'-phosphorothioate
  modified_base 21: mod_base = OTHER; note = 2'-O-methyladenosine
ttcagagtatcagtgttctta

SEQ ID NO: 11498 - RNA, 21 nt, synthetic construct
  source 1..21: mol_type = other RNA
  modified_base 1: mod_base = OTHER; note = 2'-O-methyluridine-3'-phosphorothioate
  modified_base 2: mod_base = OTHER; note = 2'-O-methylcytidine-3'-phosphorothioate
  modified_base 3: mod_base = OTHER; note = 2'-O-methyladenosine-3'-phosphate
  modified_base 4: mod_base = OTHER; note = 2'-O-methylguanosine-3'-phosphate
  modified_base 5: mod_base = OTHER; note = 2'-O-methyladenosine-3'-phosphate
  modified_base 6: mod_base = OTHER; note = 2'-O-docosanyl-guanosine-3'-phosphate
  modified_base 7: mod_base = OTHER; note = 2'-deoxy-2'-fluorouridine-3'-phosphate
  modified_base 8: mod_base = OTHER; note = 2'-O-methyladenosine-3'-phosphate
  modified_base 9: mod_base = OTHER; note = 2'-deoxy-2'-fluorouridine-3'-phosphate
  modified_base 10: mod_base = OTHER; note = 2'-deoxy-2'-fluorocytidine-3'-phosphate
  modified_base 11: mod_base = OTHER; note = 2'-deoxy-2'-fluoroadenosine-3'-phosphate
  modified_base 12: mod_base = OTHER; note = 2'-O-methylguanosine-3'-phosphate
  modified_base 13: mod_base = OTHER; note = 2'-O-methyluridine-3'-phosphate
  modified_base 14: mod_base = OTHER; note = 2'-O-methylguanosine-3'-phosphate
  modified_base 15: mod_base = OTHER; note = 2'-O-methyluridine-3'-phosphate
  modified_base 16: mod_base = OTHER; note = 2'-O-methyluridine-3'-phosphate
  modified_base 17: mod_base = OTHER; note = 2'-O-methylcytidine-3'-phosphate
  modified_base 18: mod_base = OTHER; note = 2'-O-methyluridine-3'-phosphate
  modified_base 19: mod_base = OTHER; note = 2'-O-methyluridine-3'-phosphorothioate
  modified_base 20: mod_base = OTHER; note = 2'-O-methyluridine-3'-phosphorothioate
  modified_base 21: mod_base = OTHER; note = 2'-O-methyladenosine
tcagagtatcagtgttcttta

SEQ ID NO: 11499 - RNA, 21 nt, synthetic construct
  source 1..21: mol_type = other RNA
  modified_base 1: mod_base = OTHER; note = 2'-O-methylcytidine-3'-phosphorothioate
  modified_base 2: mod_base = OTHER; note = 2'-O-methyladenosine-3'-phosphorothioate
  modified_base 3: mod_base = OTHER; note = 2'-O-methylguanosine-3'-phosphate
  modified_base 4: mod_base = OTHER; note = 2'-O-methyladenosine-3'-phosphate
  modified_base 5: mod_base = OTHER; note = 2'-O-methylguanosine-3'-phosphate
  modified_base 6: mod_base = OTHER; note = 2'-O-docosanyl-uridine-3'-phosphate
  modified_base 7: mod_base = OTHER; note = 2'-deoxy-2'-fluoroadenosine-3'-phosphate
  modified_base 8: mod_base = OTHER; note = 2'-O-methyluridine-3'-phosphate
  modified_base 9: mod_base = OTHER; note = 2'-deoxy-2'-fluorocytidine-3'-phosphate
  modified_base 10: mod_base = OTHER; note = 2'-deoxy-2'-fluoroadenosine-3'-phosphate
  modified_base 11: mod_base = OTHER; note = 2'-deoxy-2'-fluoroguanosine-3'-phosphate
  modified_base 12: mod_base = OTHER; note = 2'-O-methyluridine-3'-phosphate
  modified_base 13: mod_base = OTHER; note = 2'-O-methylguanosine-3'-phosphate
  modified_base 14: mod_base = OTHER; note = 2'-O-methyluridine-3'-phosphate
  modified_base 15: mod_base = OTHER; note = 2'-O-methyluridine-3'-phosphate
  modified_base 16: mod_base = OTHER; note = 2'-O-methylcytidine-3'-phosphate
  modified_base 17: mod_base = OTHER; note = 2'-O-methyluridine-3'-phosphate
  modified_base 18: mod_base = OTHER; note = 2'-O-methyluridine-3'-phosphate
  modified_base 19: mod_base = OTHER; note = 2'-O-methyluridine-3'-phosphorothioate
  modified_base 20: mod_base = OTHER; note = 2'-O-methyladenosine-3'-phosphorothioate
  modified_base 21: mod_base = OTHER; note = 2'-O-methyladenosine
cagagtatcagtgttctttaa

SEQ ID NO: 11500 - RNA, 21 nt, synthetic construct
  source 1..21: mol_type = other RNA
  modified_base 1: mod_base = OTHER; note = 2'-O-methyladenosine-3'-phosphorothioate
  modified_base 2: mod_base = OTHER; note = 2'-O-methylguanosine-3'-phosphorothioate
  modified_base 3: mod_base = OTHER; note = 2'-O-methyladenosine-3'-phosphate
  modified_base 4: mod_base = OTHER; note = 2'-O-methylguanosine-3'-phosphate
  modified_base 5: mod_base = OTHER; note = 2'-O-methyluridine-3'-phosphate
  modified_base 6: mod_base = OTHER; note = 2'-O-docosanyl-adenosine-3'-phosphate
  modified_base 7: mod_base = OTHER; note = 2'-deoxy-2'-fluorouridine-3'-phosphate
  modified_base 8: mod_base = OTHER; note = 2'-O-methylcytidine-3'-phosphate
  modified_base 9: mod_base = OTHER; note = 2'-deoxy-2'-fluoroadenosine-3'-phosphate
  modified_base 10: mod_base = OTHER; note = 2'-deoxy-2'-fluoroguanosine-3'-phosphate
  modified_base 11: mod_base = OTHER; note = 2'-deoxy-2'-fluorouridine-3'-phosphate
  modified_base 12: mod_base = OTHER; note = 2'-O-methylguanosine-3'-phosphate
  modified_base 13: mod_base = OTHER; note = 2'-O-methyluridine-3'-phosphate
  modified_base 14: mod_base = OTHER; note = 2'-O-methyluridine-3'-phosphate
  modified_base 15: mod_base = OTHER; note = 2'-O-methylcytidine-3'-phosphate
  modified_base 16: mod_base = OTHER; note = 2'-O-methyluridine-3'-phosphate
  modified_base 17: mod_base = OTHER; note = 2'-O-methyluridine-3'-phosphate
  modified_base 18: mod_base = OTHER; note = 2'-O-methyluridine-3'-phosphate
  modified_base 19: mod_base = OTHER; note = 2'-O-methyladenosine-3'-phosphorothioate
  modified_base 20: mod_base = OTHER; note = 2'-O-methylcytidine-3'-phosphorothioate
  modified_base 21: mod_base = OTHER; note = 2'-O-methyladenosine
agagtatcagtgttctttaca

SEQ ID NO: 11501 - RNA, 21 nt, synthetic construct
  source 1..21: mol_type = other RNA
  modified_base 1: mod_base = OTHER; note = 2'-O-methylguanosine-3'-phosphorothioate
  modified_base 2: mod_base = OTHER; note = 2'-O-methyladenosine-3'-phosphorothioate
  modified_base 3: mod_base = OTHER; note = 2'-O-methylguanosine-3'-phosphate
  modified_base 4: mod_base = OTHER; note = 2'-O-methyluridine-3'-phosphate
  modified_base 5: mod_base = OTHER; note = 2'-O-methyladenosine-3'-phosphate
  modified_base 6: mod_base = OTHER; note = 2'-O-docosanyl-uridine-3'-phosphate
  modified_base 7: mod_base = OTHER; note = 2'-deoxy-2'-fluorocytidine-3'-phosphate
  modified_base 8: mod_base = OTHER; note = 2'-O-methyladenosine-3'-phosphate
  modified_base 9: mod_base = OTHER; note = 2'-deoxy-2'-fluoroguanosine-3'-phosphate
  modified_base 10: mod_base = OTHER; note = 2'-deoxy-2'-fluorouridine-3'-phosphate
  modified_base 11: mod_base = OTHER; note = 2'-deoxy-2'-fluoroguanosine-3'-phosphate
  modified_base 12: mod_base = OTHER; note = 2'-O-methyluridine-3'-phosphate
  modified_base 13: mod_base = OTHER; note = 2'-O-methyluridine-3'-phosphate
  modified_base 14: mod_base = OTHER; note = 2'-O-methylcytidine-3'-phosphate
  modified_base 15: mod_base = OTHER; note = 2'-O-methyluridine-3'-phosphate
  modified_base 16: mod_base = OTHER; note = 2'-O-methyluridine-3'-phosphate
  modified_base 17: mod_base = OTHER; note = 2'-O-methyluridine-3'-phosphate
  modified_base 18: mod_base = OTHER; note = 2'-O-methyladenosine-3'-phosphate
  modified_base 19: mod_base = OTHER; note = 2'-O-methylcytidine-3'-phosphorothioate
  modified_base 20: mod_base = OTHER; note = 2'-O-methyluridine-3'-phosphorothioate
  modified_base 21: mod_base = OTHER; note = 2'-O-methyladenosine
gagtatcagtgttctttacta

SEQ ID NO: 11502 - RNA, 21 nt, synthetic construct
  source 1..21: mol_type = other RNA
  modified_base 1: mod_base = OTHER; note = 2'-O-methyladenosine-3'-phosphorothioate
  modified_base 2: mod_base = OTHER; note = 2'-O-methylguanosine-3'-phosphorothioate
  modified_base 3: mod_base = OTHER; note = 2'-O-methyluridine-3'-phosphate
  modified_base 4: mod_base = OTHER; note = 2'-O-methyladenosine-3'-phosphate
  modified_base 5: mod_base = OTHER; note = 2'-O-methyluridine-3'-phosphate
  modified_base 6: mod_base = OTHER; note = 2'-O-docosanyl-cytidine-3'-phosphate
  modified_base 7: mod_base = OTHER; note = 2'-deoxy-2'-fluoroadenosine-3'-phosphate
  modified_base 8: mod_base = OTHER; note = 2'-O-methylguanosine-3'-phosphate
  modified_base 9: mod_base = OTHER; note = 2'-deoxy-2'-fluorouridine-3'-phosphate
  modified_base 10: mod_base = OTHER; note = 2'-deoxy-2'-fluoroguanosine-3'-phosphate
  modified_base 11: mod_base = OTHER; note = 2'-deoxy-2'-fluorouridine-3'-phosphate
  modified_base 12: mod_base = OTHER; note = 2'-O-methyluridine-3'-phosphate
  modified_base 13: mod_base = OTHER; note = 2'-O-methylcytidine-3'-phosphate
  modified_base 14: mod_base = OTHER; note = 2'-O-methyluridine-3'-phosphate
  modified_base 15: mod_base = OTHER; note = 2'-O-methyluridine-3'-phosphate
  modified_base 16: mod_base = OTHER; note = 2'-O-methyluridine-3'-phosphate
  modified_base 17: mod_base = OTHER; note = 2'-O-methyladenosine-3'-phosphate
  modified_base 18: mod_base = OTHER; note = 2'-O-methylcytidine-3'-phosphate
  modified_base 19: mod_base = OTHER; note = 2'-O-methyluridine-3'-phosphorothioate
  modified_base 20: mod_base = OTHER; note = 2'-O-methylcytidine-3'-phosphorothioate
  modified_base 21: mod_base = OTHER; note = 2'-O-methyladenosine
agtatcagtgttctttactca

SEQ ID NO: 11503 - RNA, 21 nt, synthetic construct
  source 1..21: mol_type = other RNA
  modified_base 1: mod_base = OTHER; note = 2'-O-methylguanosine-3'-phosphorothioate
  modified_base 2: mod_base = OTHER; note = 2'-O-methyluridine-3'-phosphorothioate
  modified_base 3: mod_base = OTHER; note = 2'-O-methyladenosine-3'-phosphate
  modified_base 4: mod_base = OTHER; note = 2'-O-methyluridine-3'-phosphate
  modified_base 5: mod_base = OTHER; note = 2'-O-methylcytidine-3'-phosphate
  modified_base 6: mod_base = OTHER; note = 2'-O-docosanyl-adenosine-3'-phosphate
  modified_base 7: mod_base = OTHER; note = 2'-deoxy-2'-fluoroguanosine-3'-phosphate
  modified_base 8: mod_base = OTHER; note = 2'-O-methyluridine-3'-phosphate
  modified_base 9: mod_base = OTHER; note = 2'-deoxy-2'-fluoroguanosine-3'-phosphate
  modified_base 10: mod_base = OTHER; note = 2'-deoxy-2'-fluorouridine-3'-phosphate
  modified_base 11: mod_base = OTHER; note = 2'-deoxy-2'-fluorouridine-3'-phosphate
  modified_base 12: mod_base = OTHER; note = 2'-O-methylcytidine-3'-phosphate
  modified_base 13: mod_base = OTHER; note = 2'-O-methyluridine-3'-phosphate
  modified_base 14: mod_base = OTHER; note = 2'-O-methyluridine-3'-phosphate
  modified_base 15: mod_base = OTHER; note = 2'-O-methyluridine-3'-phosphate
  modified_base 16: mod_base = OTHER; note = 2'-O-methyladenosine-3'-phosphate
  modified_base 17: mod_base = OTHER; note = 2'-O-methylcytidine-3'-phosphate
  modified_base 18: mod_base = OTHER; note = 2'-O-methyluridine-3'-phosphate
  modified_base 19: mod_base = OTHER; note = 2'-O-methylcytidine-3'-phosphorothioate
  modified_base 20: mod_base = OTHER; note = 2'-O-methylcytidine-3'-phosphorothioate
  modified_base 21: mod_base = OTHER; note = 2'-O-methyladenosine
gtatcagtgttctttactcca

SEQ ID NO: 11504 - RNA, 21 nt, synthetic construct
  source 1..21: mol_type = other RNA
  modified_base 1: mod_base = OTHER; note = 2'-O-methyluridine-3'-phosphorothioate
  modified_base 2: mod_base = OTHER; note = 2'-O-methylcytidine-3'-phosphorothioate
  modified_base 3: mod_base = OTHER; note = 2'-O-methyluridine-3'-phosphate
  modified_base 4: mod_base = OTHER; note = 2'-O-methyluridine-3'-phosphate
  modified_base 5: mod_base = OTHER; note = 2'-O-methyluridine-3'-phosphate
  modified_base 6: mod_base = OTHER; note = 2'-O-docosanyl-adenosine-3'-phosphate
  modified_base 7: mod_base = OTHER; note = 2'-deoxy-2'-fluorocytidine-3'-phosphate
  modified_base 8: mod_base = OTHER; note = 2'-O-methyluridine-3'-phosphate
  modified_base 9: mod_base = OTHER; note = 2'-deoxy-2'-fluorocytidine-3'-phosphate
  modified_base 10: mod_base = OTHER; note = 2'-deoxy-2'-fluorocytidine-3'-phosphate
  modified_base 11: mod_base = OTHER; note = 2'-deoxy-2'-fluorouridine-3'-phosphate
  modified_base 12: mod_base = OTHER; note = 2'-O-methyluridine-3'-phosphate
  modified_base 13: mod_base = OTHER; note = 2'-O-methyladenosine-3'-phosphate
  modified_base 14: mod_base = OTHER; note = 2'-O-methylcytidine-3'-phosphate
  modified_base 15: mod_base = OTHER; note = 2'-O-methyladenosine-3'-phosphate
  modified_base 16: mod_base = OTHER; note = 2'-O-methylguanosine-3'-phosphate
  modified_base 17: mod_base = OTHER; note = 2'-O-methyladenosine-3'-phosphate
  modified_base 18: mod_base = OTHER; note = 2'-O-methyluridine-3'-phosphate
  modified_base 19: mod_base = OTHER; note = 2'-O-methyladenosine-3'-phosphorothioate
  modified_base 20: mod_base = OTHER; note = 2'-O-methyluridine-3'-phosphorothioate
  modified_base 21: mod_base = OTHER; note = 2'-O-methyladenosine
tctttactccttacagatata

SEQ ID NO: 11505 - RNA, 21 nt, synthetic construct
  source 1..21: mol_type = other RNA
  modified_base 1: mod_base = OTHER; note = 2'-O-methyluridine-3'-phosphorothioate
  modified_base 2: mod_base = OTHER; note = 2'-O-methyluridine-3'-phosphorothioate
  modified_base 3: mod_base = OTHER; note = 2'-O-methyladenosine-3'-phosphate
  modified_base 4: mod_base = OTHER; note = 2'-O-methylcytidine-3'-phosphate
  modified_base 5: mod_base = OTHER; note = 2'-O-methyluridine-3'-phosphate
  modified_base 6: mod_base = OTHER; note = 2'-O-docosanyl-cytidine-3'-phosphate
  modified_base 7: mod_base = OTHER; note = 2'-deoxy-2'-fluorocytidine-3'-phosphate
  modified_base 8: mod_base = OTHER; note = 2'-O-methyluridine-3'-phosphate
  modified_base 9: mod_base = OTHER; note = 2'-deoxy-2'-fluorouridine-3'-phosphate
  modified_base 10: mod_base = OTHER; note = 2'-deoxy-2'-fluoroadenosine-3'-phosphate
  modified_base 11: mod_base = OTHER; note = 2'-deoxy-2'-fluorocytidine-3'-phosphate
  modified_base 12: mod_base = OTHER; note = 2'-O-methyladenosine-3'-phosphate
  modified_base 13: mod_base = OTHER; note = 2'-O-methylguanosine-3'-phosphate
  modified_base 14: mod_base = OTHER; note = 2'-O-methyladenosine-3'-phosphate
  modified_base 15: mod_base = OTHER; note = 2'-O-methyluridine-3'-phosphate
  modified_base 16: mod_base = OTHER; note = 2'-O-methyladenosine-3'-phosphate
  modified_base 17: mod_base = OTHER; note = 2'-O-methyluridine-3'-phosphate
  modified_base 18: mod_base = OTHER; note = 2'-O-methyluridine-3'-phosphate
  modified_base 19: mod_base = OTHER; note = 2'-O-methyluridine-3'-phosphorothioate
  modified_base 20: mod_base = OTHER; note = 2'-O-methyluridine-3'-phosphorothioate
  modified_base 21: mod_base = OTHER; note = 2'-O-methyladenosine
ttactccttacagatatttta

SEQ ID NO: 11506 - RNA, 21 nt, synthetic construct
  source 1..21: mol_type = other RNA
  modified_base 1: mod_base = OTHER; note = 2'-O-methyluridine-3'-phosphorothioate
  modified_base 2: mod_base = OTHER; note = 2'-O-methyladenosine-3'-phosphorothioate
  modified_base 3: mod_base = OTHER; note = 2'-O-methyladenosine-3'-phosphate
  modified_base 4: mod_base = OTHER; note = 2'-O-methyladenosine-3'-phosphate
  modified_base 5: mod_base = OTHER; note = 2'-O-methyluridine-3'-phosphate
  modified_base 6: mod_base = OTHER; note = 2'-O-docosanyl-guanosine-3'-phosphate
  modified_base 7: mod_base = OTHER; note = 2'-deoxy-2'-fluorocytidine-3'-phosphate
  modified_base 8: mod_base = OTHER; note = 2'-O-methyladenosine-3'-phosphate
  modified_base 9: mod_base = OTHER; note = 2'-deoxy-2'-fluoroguanosine-3'-phosphate
  modified_base 10: mod_base = OTHER; note = 2'-deoxy-2'-fluorocytidine-3'-phosphate
  modified_base 11: mod_base = OTHER; note = 2'-deoxy-2'-fluoroadenosine-3'-phosphate
  modified_base 12: mod_base = OTHER; note = 2'-O-methyluridine-3'-phosphate
  modified_base 13: mod_base = OTHER; note = 2'-O-methylcytidine-3'-phosphate
  modified_base 14: mod_base = OTHER; note = 2'-O-methyladenosine-3'-phosphate
  modified_base 15: mod_base = OTHER; note = 2'-O-methylcytidine-3'-phosphate
  modified_base 16: mod_base = OTHER; note = 2'-O-methyluridine-3'-phosphate
  modified_base 17: mod_base = OTHER; note = 2'-O-methyluridine-3'-phosphate
  modified_base 18: mod_base = OTHER; note = 2'-O-methyluridine-3'-phosphate
  modified_base 19: mod_base = OTHER; note = 2'-O-methylcytidine-3'-phosphorothioate
  modified_base 20: mod_base = OTHER; note = 2'-O-methyluridine-3'-phosphorothioate
  modified_base 21: mod_base = OTHER; note = 2'-O-methyladenosine
taaatgcagcatcactttcta

SEQ ID NO: 11507 - RNA, 21 nt, synthetic construct
  source 1..21: mol_type = other RNA
  modified_base 1: mod_base = OTHER; note = 2'-O-methylguanosine-3'-phosphorothioate
  modified_base 2: mod_base = OTHER; note = 2'-O-methylcytidine-3'-phosphorothioate
  modified_base 3: mod_base = OTHER; note = 2'-O-methyladenosine-3'-phosphate
  modified_base 4: mod_base = OTHER; note = 2'-O-methyluridine-3'-phosphate
  modified_base 5: mod_base = OTHER; note = 2'-O-methylcytidine-3'-phosphate
  modified_base 6: mod_base = OTHER; note = 2'-O-docosanyl-adenosine-3'-phosphate
  modified_base 7: mod_base = OTHER; note = 2'-deoxy-2'-fluorocytidine-3'-phosphate
  modified_base 8: mod_base = OTHER; note = 2'-O-methyluridine-3'-phosphate
  modified_base 9: mod_base = OTHER; note = 2'-deoxy-2'-fluorouridine-3'-phosphate
  modified_base 10: mod_base = OTHER; note = 2'-deoxy-2'-fluorouridine-3'-phosphate
  modified_base 11: mod_base = OTHER; note = 2'-deoxy-2'-fluorocytidine-3'-phosphate
  modified_base 12: mod_base = OTHER; note = 2'-O-methyluridine-3'-phosphate
  modified_base 13: mod_base = OTHER; note = 2'-O-methylguanosine-3'-phosphate
  modified_base 14: mod_base = OTHER; note = 2'-O-methyladenosine-3'-phosphate
  modified_base 15: mod_base = OTHER; note = 2'-O-methyladenosine-3'-phosphate
  modified_base 16: mod_base = OTHER; note = 2'-O-methyladenosine-3'-phosphate
  modified_base 17: mod_base = OTHER; note = 2'-O-methyladenosine-3'-phosphate
  modified_base 18: mod_base = OTHER; note = 2'-O-methyluridine-3'-phosphate
  modified_base 19: mod_base = OTHER; note = 2'-O-methyladenosine-3'-phosphorothioate
  modified_base 20: mod_base = OTHER; note = 2'-O-methyladenosine-3'-phosphorothioate
  modified_base 21: mod_base = OTHER; note = 2'-O-methyladenosine
gcatcactttctgaaaataaa

SEQ ID NO: 11508 - RNA, 21 nt, synthetic construct
  source 1..21: mol_type = other RNA
  modified_base 1: mod_base = OTHER; note = 2'-O-methylguanosine-3'-phosphorothioate
  modified_base 2: mod_base = OTHER; note = 2'-O-methyladenosine-3'-phosphorothioate
  modified_base 3: mod_base = OTHER; note = 2'-O-methylguanosine-3'-phosphate
  modified_base 4: mod_base = OTHER; note = 2'-O-methyladenosine-3'-phosphate
  modified_base 5: mod_base = OTHER; note = 2'-O-methyladenosine-3'-phosphate
  modified_base 6: mod_base = OTHER; note = 2'-O-docosanyl-adenosine-3'-phosphate
  modified_base 7: mod_base = OTHER; note = 2'-deoxy-2'-fluorocytidine-3'-phosphate
  modified_base 8: mod_base = OTHER; note = 2'-O-methyladenosine-3'-phosphate
  modified_base 9: mod_base = OTHER; note = 2'-deoxy-2'-fluorouridine-3'-phosphate
  modified_base 10: mod_base = OTHER; note = 2'-deoxy-2'-fluorouridine-3'-phosphate
  modified_base 11: mod_base = OTHER; note = 2'-deoxy-2'-fluoroadenosine-3'-phosphate
  modified_base 12: mod_base = OTHER; note = 2'-O-methyluridine-3'-phosphate
  modified_base 13: mod_base = OTHER; note = 2'-O-methyluridine-3'-phosphate
  modified_base 14: mod_base = OTHER; note = 2'-O-methyluridine-3'-phosphate
  modified_base 15: mod_base = OTHER; note = 2'-O-methylguanosine-3'-phosphate
  modified_base 16: mod_base = OTHER; note = 2'-O-methyluridine-3'-phosphate
  modified_base 17: mod_base = OTHER; note = 2'-O-methyluridine-3'-phosphate
  modified_base 18: mod_base = OTHER; note = 2'-O-methylguanosine-3'-phosphate
  modified_base 19: mod_base = OTHER; note = 2'-O-methyluridine-3'-phosphorothioate
  modified_base 20: mod_base = OTHER; note = 2'-O-methylcytidine-3'-phosphorothioate
  modified_base 21: mod_base = OTHER; note = 2'-O-methyladenosine
gagaaacattatttgttgtca

SEQ ID NO: 11509 - RNA, 21 nt, synthetic construct
  source 1..21: mol_type = other RNA
  modified_base 1: mod_base = OTHER; note = 2'-O-methyluridine-3'-phosphorothioate
  modified_base 2: mod_base = OTHER; note = 2'-O-methylguanosine-3'-phosphorothioate
  modified_base 3: mod_base = OTHER; note = 2'-O-methyluridine-3'-phosphate
  modified_base 4: mod_base = OTHER; note = 2'-O-methyluridine-3'-phosphate
  modified_base 5: mod_base = OTHER; note = 2'-O-methylguanosine-3'-phosphate
  modified_base 6: mod_base = OTHER; note = 2'-O-docosanyl-uridine-3'-phosphate
  modified_base 7: mod_base = OTHER; note = 2'-deoxy-2'-fluorocytidine-3'-phosphate
  modified_base 8: mod_base = OTHER; note = 2'-O-methyladenosine-3'-phosphate
  modified_base 9: mod_base = OTHER; note = 2'-deoxy-2'-fluoroguanosine-3'-phosphate
  modified_base 10: mod_base = OTHER; note = 2'-deoxy-2'-fluorouridine-3'-phosphate
  modified_base 11: mod_base = OTHER; note = 2'-deoxy-2'-fluoroadenosine-3'-phosphate
  modified_base 12: mod_base = OTHER; note = 2'-O-methyluridine-3'-phosphate
  modified_base 13: mod_base = OTHER; note = 2'-O-methyluridine-3'-phosphate
  modified_base 14: mod_base = OTHER; note = 2'-O-methyluridine-3'-phosphate
  modified_base 15: mod_base = OTHER; note = 2'-O-methylcytidine-3'-phosphate
  modified_base 16: mod_base = OTHER; note = 2'-O-methyladenosine-3'-phosphate
  modified_base 17: mod_base = OTHER; note = 2'-O-methylguanosine-3'-phosphate
  modified_base 18: mod_base = OTHER; note = 2'-O-methylcytidine-3'-phosphate
  modified_base 19: mod_base = OTHER; note = 2'-O-methyladenosine-3'-phosphorothioate
  modified_base 20: mod_base = OTHER; note = 2'-O-methyluridine-3'-phosphorothioate
  modified_base 21: mod_base = OTHER; note = 2'-O-methyladenosine
tgttgtcagtatttcagcata

SEQ ID NO: 11510 - RNA, 21 nt, synthetic construct
  source 1..21: mol_type = other RNA
  modified_base 1: mod_base = OTHER; note = 2'-O-methylguanosine-3'-phosphorothioate
  modified_base 2: mod_base = OTHER; note = 2'-O-methyluridine-3'-phosphorothioate
  modified_base 3: mod_base = OTHER; note = 2'-O-methyladenosine-3'-phosphate
  modified_base 4: mod_base = OTHER; note = 2'-O-methyluridine-3'-phosphate
  modified_base 5: mod_base = OTHER; note = 2'-O-methyluridine-3'-phosphate
  modified_base 6: mod_base = OTHER; note = 2'-O-docosanyl-uridine-3'-phosphate
  modified_base 7: mod_base = OTHER; note = 2'-deoxy-2'-fluorocytidine-3'-phosphate
  modified_base 8: mod_base = OTHER; note = 2'-O-methyladenosine-3'-phosphate
  modified_base 9: mod_base = OTHER; note = 2'-deoxy-2'-fluoroguanosine-3'-phosphate
  modified_base 10: mod_base = OTHER; note = 2'-deoxy-2'-fluorocytidine-3'-phosphate
  modified_base 11: mod_base = OTHER; note = 2'-deoxy-2'-fluoroadenosine-3'-phosphate
  modified_base 12: mod_base = OTHER; note = 2'-O-methyluridine-3'-phosphate
  modified_base 13: mod_base = OTHER; note = 2'-O-methylguanosine-3'-phosphate
  modified_base 14: mod_base = OTHER; note = 2'-O-methyladenosine-3'-phosphate
  modified_base 15: mod_base = OTHER; note = 2'-O-methyladenosine-3'-phosphate
  modified_base 16: mod_base = OTHER; note = 2'-O-methylcytidine-3'-phosphate
  modified_base 17: mod_base = OTHER; note = 2'-O-methyluridine-3'-phosphate
  modified_base 18: mod_base = OTHER; note = 2'-O-methyluridine-3'-phosphate
  modified_base 19: mod_base = OTHER; note = 2'-O-methylguanosine-3'-phosphorothioate
  modified_base 20: mod_base = OTHER; note = 2'-O-methyluridine-3'-phosphorothioate
  modified_base 21: mod_base = OTHER; note = 2'-O-methyladenosine
gtatttcagcatgaacttgta

SEQ ID NO: 11511 - RNA, 21 nt, synthetic construct
  source 1..21: mol_type = other RNA
  modified_base 1: mod_base = OTHER; note = 2'-O-methyluridine-3'-phosphorothioate
  modified_base 2: mod_base = OTHER; note = 2'-O-methyladenosine-3'-phosphorothioate
  modified_base 3: mod_base = OTHER; note = 2'-O-methyladenosine-3'-phosphate
  modified_base 4: mod_base = OTHER; note = 2'-O-methyluridine-3'-phosphate
  modified_base 5: mod_base = OTHER; note = 2'-O-methyluridine-3'-phosphate
  modified_base 6: mod_base = OTHER; note = 2'-O-docosanyl-guanosine-3'-phosphate
  modified_base 7: mod_base = OTHER; note = 2'-deoxy-2'-fluoroguanosine-3'-phosphate
  modified_base 8: mod_base = OTHER; note = 2'-O-methyluridine-3'-phosphate
  modified_base 9: mod_base = OTHER; note = 2'-deoxy-2'-fluoroadenosine-3'-phosphate
  modified_base 10: mod_base = OTHER; note = 2'-deoxy-2'-fluorocytidine-3'-phosphate
  modified_base 11: mod_base = OTHER; note = 2'-deoxy-2'-fluoroadenosine-3'-phosphate
  modified_base 12: mod_base = OTHER; note = 2'-O-methylguanosine-3'-phosphate
  modified_base 13: mod_base = OTHER; note = 2'-O-methyladenosine-3'-phosphate
  modified_base 14: mod_base = OTHER; note = 2'-O-methyluridine-3'-phosphate
  modified_base 15: mod_base = OTHER; note = 2'-O-methyluridine-3'-phosphate
  modified_base 16: mod_base = OTHER; note = 2'-O-methylcytidine-3'-phosphate
  modified_base 17: mod_base = OTHER; note = 2'-O-methyluridine-3'-phosphate
  modified_base 18: mod_base = OTHER; note = 2'-O-methylguanosine-3'-phosphate
  modified_base 19: mod_base = OTHER; note = 2'-O-methyluridine-3'-phosphorothioate
  modified_base 20: mod_base = OTHER; note = 2'-O-methyluridine-3'-phosphorothioate
  modified_base 21: mod_base = OTHER; note = 2'-O-methyladenosine
taattggtacagattctgtta

SEQ ID NO: 11512 - RNA, 21 nt, synthetic construct
  source 1..21: mol_type = other RNA
  modified_base 1: mod_base = OTHER; note = 2'-O-methyluridine-3'-phosphorothioate
  modified_base 2: mod_base = OTHER; note = 2'-O-methyluridine-3'-phosphorothioate
  modified_base 3: mod_base = OTHER; note = 2'-O-methylguanosine-3'-phosphate
  modified_base 4: mod_base = OTHER; note = 2'-O-methyluridine-3'-phosphate
  modified_base 5: mod_base = OTHER; note = 2'-O-methyladenosine-3'-phosphate
  modified_base 6: mod_base = OTHER; note = 2'-O-docosanyl-adenosine-3'-phosphate
  modified_base 7: mod_base = OTHER; note = 2'-deoxy-2'-fluorouridine-3'-phosphate
  modified_base 8: mod_base = OTHER; note = 2'-O-methyluridine-3'-phosphate
  modified_base 9: mod_base = OTHER; note = 2'-deoxy-2'-fluoroguanosine-3'-phosphate
  modified_base 10: mod_base = OTHER; note = 2'-deoxy-2'-fluoroguanosine-3'-phosphate
  modified_base 11: mod_base = OTHER; note = 2'-deoxy-2'-fluorouridine-3'-phosphate
  modified_base 12: mod_base = OTHER; note = 2'-O-methyladenosine-3'-phosphate
  modified_base 13: mod_base = OTHER; note = 2'-O-methylcytidine-3'-phosphate
  modified_base 14: mod_base = OTHER; note = 2'-O-methyladenosine-3'-phosphate
  modified_base 15: mod_base = OTHER; note = 2'-O-methylguanosine-3'-phosphate
  modified_base 16: mod_base = OTHER; note = 2'-O-methyladenosine-3'-phosphate
  modified_base 17: mod_base = OTHER; note = 2'-O-methyluridine-3'-phosphate
  modified_base 18: mod_base = OTHER; note = 2'-O-methyluridine-3'-phosphate
  modified_base 19: mod_base = OTHER; note = 2'-O-methylcytidine-3'-phosphorothioate
  modified_base 20: mod_base = OTHER; note = 2'-O-methyluridine-3'-phosphorothioate
  modified_base 21: mod_base = OTHER; note = 2'-O-methyladenosine
ttgtaattggtacagattcta

SEQ ID NO: 11513 - RNA, 21 nt, synthetic construct
  source 1..21: mol_type = other RNA
  modified_base 1: mod_base = OTHER; note = 2'-O-methyluridine-3'-phosphorothioate
  modified_base 2: mod_base = OTHER; note = 2'-O-methylguanosine-3'-phosphorothioate
  modified_base 3: mod_base = OTHER; note = 2'-O-methyluridine-3'-phosphate
  modified_base 4: mod_base = OTHER; note = 2'-O-methyladenosine-3'-phosphate
  modified_base 5: mod_base = OTHER; note = 2'-O-methyladenosine-3'-phosphate
  modified_base 6: mod_base = OTHER; note = 2'-O-docosanyl-uridine-3'-phosphate
  modified_base 7: mod_base = OTHER; note = 2'-deoxy-2'-fluorouridine-3'-phosphate
  modified_base 8: mod_base = OTHER; note = 2'-O-methylguanosine-3'-phosphate
  modified_base 9: mod_base = OTHER; note = 2'-deoxy-2'-fluoroguanosine-3'-phosphate
  modified_base 10: mod_base = OTHER; note = 2'-deoxy-2'-fluorouridine-3'-phosphate
  modified_base 11: mod_base = OTHER; note = 2'-deoxy-2'-fluoroadenosine-3'-phosphate
  modified_base 12: mod_base = OTHER; note = 2'-O-methylcytidine-3'-phosphate
  modified_base 13: mod_base = OTHER; note = 2'-O-methyladenosine-3'-phosphate
  modified_base 14: mod_base = OTHER; note = 2'-O-methylguanosine-3'-phosphate
  modified_base 15: mod_base = OTHER; note = 2'-O-methyladenosine-3'-phosphate
  modified_base 16: mod_base = OTHER; note = 2'-O-methyluridine-3'-phosphate
  modified_base 17: mod_base = OTHER; note = 2'-O-methyluridine-3'-phosphate
  modified_base 18: mod_base = OTHER; note = 2'-O-methylcytidine-3'-phosphate
  modified_base 19: mod_base = OTHER; note = 2'-O-methyluridine-3'-phosphorothioate
  modified_base 20: mod_base = OTHER; note = 2'-O-methylguanosine-3'-phosphorothioate
  modified_base 21: mod_base = OTHER; note = 2'-O-methyladenosine
tgtaattggtacagattctga

SEQ ID NO: 11514 - RNA, 21 nt, synthetic construct
  source 1..21: mol_type = other RNA
  modified_base 1: mod_base = OTHER; note = 2'-O-methylguanosine-3'-phosphorothioate
  modified_base 2: mod_base = OTHER; note = 2'-O-methyluridine-3'-phosphorothioate
  modified_base 3: mod_base = OTHER; note = 2'-O-methyladenosine-3'-phosphate
  modified_base 4: mod_base = OTHER; note = 2'-O-methyladenosine-3'-phosphate
  modified_base 5: mod_base = OTHER; note = 2'-O-methyluridine-3'-phosphate
  modified_base 6: mod_base = OTHER; note = 2'-O-docosanyl-uridine-3'-phosphate
  modified_base 7: mod_base = OTHER; note = 2'-deoxy-2'-fluoroguanosine-3'-phosphate
  modified_base 8: mod_base = OTHER; note = 2'-O-methylguanosine-3'-phosphate
  modified_base 9: mod_base = OTHER; note = 2'-deoxy-2'-fluorouridine-3'-phosphate
  modified_base 10: mod_base = OTHER; note = 2'-deoxy-2'-fluoroadenosine-3'-phosphate
  modified_base 11: mod_base = OTHER; note = 2'-deoxy-2'-fluorocytidine-3'-phosphate
  modified_base 12: mod_base = OTHER; note = 2'-O-methyladenosine-3'-phosphate
  modified_base 13: mod_base = OTHER; note = 2'-O-methylguanosine-3'-phosphate
  modified_base 14: mod_base = OTHER; note = 2'-O-methyladenosine-3'-phosphate
  modified_base 15: mod_base = OTHER; note = 2'-O-methyluridine-3'-phosphate
  modified_base 16: mod_base = OTHER; note = 2'-O-methyluridine-3'-phosphate
  modified_base 17: mod_base = OTHER; note = 2'-O-methylcytidine-3'-phosphate
  modified_base 18: mod_base = OTHER; note = 2'-O-methyluridine-3'-phosphate
  modified_base 19: mod_base = OTHER; note = 2'-O-methylguanosine-3'-phosphorothioate
  modified_base 20: mod_base = OTHER; note = 2'-O-methyluridine-3'-phosphorothioate
  modified_base 21: mod_base = OTHER; note = 2'-O-methyladenosine
gtaattggtacagattctgta

SEQ ID NO: 11515 - RNA, 21 nt, synthetic construct
  source 1..21: mol_type = other RNA
  modified_base 1: mod_base = OTHER; note = 2'-O-methyladenosine-3'-phosphorothioate
  modified_base 2: mod_base = OTHER; note = 2'-O-methyladenosine-3'-phosphorothioate
  modified_base 3: mod_base = OTHER; note = 2'-O-methyluridine-3'-phosphate
  modified_base 4: mod_base = OTHER; note = 2'-O-methyluridine-3'-phosphate
  modified_base 5: mod_base = OTHER; note = 2'-O-methylguanosine-3'-phosphate
  modified_base 6: mod_base = OTHER; note = 2'-O-docosanyl-guanosine-3'-phosphate
  modified_base 7: mod_base = OTHER; note = 2'-deoxy-2'-fluorouridine-3'-phosphate
  modified_base 8: mod_base = OTHER; note = 2'-O-methyladenosine-3'-phosphate
  modified_base 9: mod_base = OTHER; note = 2'-deoxy-2'-fluorocytidine-3'-phosphate
  modified_base 10: mod_base = OTHER; note = 2'-deoxy-2'-fluoroadenosine-3'-phosphate
  modified_base 11: mod_base = OTHER; note = 2'-deoxy-2'-fluoroguanosine-3'-phosphate
  modified_base 12: mod_base = OTHER; note = 2'-O-methyladenosine-3'-phosphate
  modified_base 13: mod_base = OTHER; note = 2'-O-methyluridine-3'-phosphate
  modified_base 14: mod_base = OTHER; note = 2'-O-methyluridine-3'-phosphate
  modified_base 15: mod_base = OTHER; note = 2'-O-methylcytidine-3'-phosphate
  modified_base 16: mod_base = OTHER; note = 2'-O-methyluridine-3'-phosphate
  modified_base 17: mod_base = OTHER; note = 2'-O-methylguanosine-3'-phosphate
  modified_base 18: mod_base = OTHER; note = 2'-O-methyluridine-3'-phosphate
  modified_base 19: mod_base = OTHER; note = 2'-O-methyluridine-3'-phosphorothioate
  modified_base 20: mod_base = OTHER; note = 2'-O-methylguanosine-3'-phosphorothioate
  modified_base 21: mod_base = OTHER; note = 2'-O-methyladenosine
aattggtacagattctgttga

SEQ ID NO: 11516 - RNA, 21 nt, synthetic construct
  source 1..21: mol_type = other RNA
  modified_base 1: mod_base = OTHER; note = 2'-O-methyladenosine-3'-phosphorothioate
  modified_base 2: mod_base = OTHER; note = 2'-O-methyluridine-3'-phosphorothioate
  modified_base 3: mod_base = OTHER; note = 2'-O-methyluridine-3'-phosphate
  modified_base 4: mod_base = OTHER; note = 2'-O-methylguanosine-3'-phosphate
  modified_base 5: mod_base = OTHER; note = 2'-O-methylguanosine-3'-phosphate
  modified_base 6: mod_base = OTHER; note = 2'-O-docosanyl-uridine-3'-phosphate
  modified_base 7: mod_base = OTHER; note = 2'-deoxy-2'-fluoroadenosine-3'-phosphate
  modified_base 8: mod_base = OTHER; note = 2'-O-methylcytidine-3'-phosphate
  modified_base 9: mod_base = OTHER; note = 2'-deoxy-2'-fluoroadenosine-3'-phosphate
  modified_base 10: mod_base = OTHER; note = 2'-deoxy-2'-fluoroguanosine-3'-phosphate
  modified_base 11: mod_base = OTHER; note = 2'-deoxy-2'-fluoroadenosine-3'-phosphate
  modified_base 12: mod_base = OTHER; note = 2'-O-methyluridine-3'-phosphate
  modified_base 13: mod_base = OTHER; note = 2'-O-methyluridine-3'-phosphate
  modified_base 14: mod_base = OTHER; note = 2'-O-methylcytidine-3'-phosphate
  modified_base 15: mod_base = OTHER; note = 2'-O-methyluridine-3'-phosphate
  modified_base 16: mod_base = OTHER; note = 2'-O-methylguanosine-3'-phosphate
  modified_base 17: mod_base = OTHER; note = 2'-O-methyluridine-3'-phosphate
  modified_base 18: mod_base = OTHER; note = 2'-O-methyluridine-3'-phosphate
  modified_base 19: mod_base = OTHER; note = 2'-O-methylguanosine-3'-phosphorothioate
  modified_base 20: mod_base = OTHER; note = 2'-O-methyluridine-3'-phosphorothioate
  modified_base 21: mod_base = OTHER; note = 2'-O-methyladenosine
attggtacagattctgttgta

SEQ ID NO: 11517 - RNA, 21 nt, synthetic construct
  source 1..21: mol_type = other RNA
  modified_base 1: mod_base = OTHER; note = 2'-O-methyluridine-3'-phosphorothioate
  modified_base 2: mod_base = OTHER; note = 2'-O-methyluridine-3'-phosphorothioate
  modified_base 3: mod_base = OTHER; note = 2'-O-methylguanosine-3'-phosphate
  modified_base 4: mod_base = OTHER; note = 2'-O-methylguanosine-3'-phosphate
  modified_base 5: mod_base = OTHER; note = 2'-O-methyluridine-3'-phosphate
  modified_base 6: mod_base = OTHER; note = 2'-O-docosanyl-adenosine-3'-phosphate
  modified_base 7: mod_base = OTHER; note = 2'-deoxy-2'-fluorocytidine-3'-phosphate
  modified_base 8: mod_base = OTHER; note = 2'-O-methyladenosine-3'-phosphate
  modified_base 9: mod_base = OTHER; note = 2'-deoxy-2'-fluoroguanosine-3'-phosphate
  modified_base 10: mod_base = OTHER; note = 2'-deoxy-2'-fluoroadenosine-3'-phosphate
  modified_base 11: mod_base = OTHER; note = 2'-deoxy-2'-fluorouridine-3'-phosphate
  modified_base 12: mod_base = OTHER; note = 2'-O-methyluridine-3'-phosphate
  modified_base 13: mod_base = OTHER; note = 2'-O-methylcytidine-3'-phosphate
  modified_base 14: mod_base = OTHER; note = 2'-O-methyluridine-3'-phosphate
  modified_base 15: mod_base = OTHER; note = 2'-O-methylguanosine-3'-phosphate
  modified_base 16: mod_base = OTHER; note = 2'-O-methyluridine-3'-phosphate
  modified_base 17: mod_base = OTHER; note = 2'-O-methyluridine-3'-phosphate
  modified_base 18: mod_base = OTHER; note = 2'-O-methylguanosine-3'-phosphate
  modified_base 19: mod_base = OTHER; note = 2'-O-methyluridine-3'-phosphorothioate
  modified_base 20: mod_base = OTHER; note = 2'-O-methyladenosine-3'-phosphorothioate
  modified_base 21: mod_base = OTHER; note = 2'-O-methyladenosine
ttggtacagattctgttgtaa

SEQ ID NO: 11518 - RNA, 21 nt, synthetic construct
  source 1..21: mol_type = other RNA
  modified_base 1: mod_base = OTHER; note = 2'-O-methyluridine-3'-phosphorothioate
  modified_base 2: mod_base = OTHER; note = 2'-O-methylguanosine-3'-phosphorothioate
  modified_base 3: mod_base = OTHER; note = 2'-O-methylguanosine-3'-phosphate
  modified_base 4: mod_base = OTHER; note = 2'-O-methyluridine-3'-phosphate
  modified_base 5: mod_base = OTHER; note = 2'-O-methyladenosine-3'-phosphate
  modified_base 6: mod_base = OTHER; note = 2'-O-docosanyl-cytidine-3'-phosphate
  modified_base 7: mod_base = OTHER; note = 2'-deoxy-2'-fluoroadenosine-3'-phosphate
  modified_base 8: mod_base = OTHER; note = 2'-O-methylguanosine-3'-phosphate
  modified_base 9: mod_base = OTHER; note = 2'-deoxy-2'-fluoroadenosine-3'-phosphate
  modified_base 10: mod_base = OTHER; note = 2'-deoxy-2'-fluorouridine-3'-phosphate
  modified_base 11: mod_base = OTHER; note = 2'-deoxy-2'-fluorouridine-3'-phosphate
  modified_base 12: mod_base = OTHER; note = 2'-O-methylcytidine-3'-phosphate
  modified_base 13: mod_base = OTHER; note = 2'-O-methyluridine-3'-phosphate
  modified_base 14: mod_base = OTHER; note = 2'-O-methylguanosine-3'-phosphate
  modified_base 15: mod_base = OTHER; note = 2'-O-methyluridine-3'-phosphate
  modified_base 16: mod_base = OTHER; note = 2'-O-methyluridine-3'-phosphate
  modified_base 17: mod_base = OTHER; note = 2'-O-methylguanosine-3'-phosphate
  modified_base 18: mod_base = OTHER; note = 2'-O-methyluridine-3'-phosphate
  modified_base 19: mod_base = OTHER; note = 2'-O-methyladenosine-3'-phosphorothioate
  modified_base 20: mod_base = OTHER; note = 2'-O-methyluridine-3'-phosphorothioate
  modified_base 21: mod_base = OTHER; note = 2'-O-methyladenosine
tggtacagattctgttgtata

SEQ ID NO: 11519 - RNA, 21 nt, synthetic construct
  source 1..21: mol_type = other RNA
  modified_base 1: mod_base = OTHER; note = 2'-O-methylguanosine-3'-phosphorothioate
  modified_base 2: mod_base = OTHER; note = 2'-O-methylguanosine-3'-phosphorothioate
  modified_base 3: mod_base = OTHER; note = 2'-O-methyluridine-3'-phosphate
  modified_base 4: mod_base = OTHER; note = 2'-O-methyladenosine-3'-phosphate
  modified_base 5: mod_base = OTHER; note = 2'-O-methylcytidine-3'-phosphate
  modified_base 6: mod_base = OTHER; note = 2'-O-docosanyl-adenosine-3'-phosphate
  modified_base 7: mod_base = OTHER; note = 2'-deoxy-2'-fluoroguanosine-3'-phosphate
  modified_base 8: mod_base = OTHER; note = 2'-O-methyladenosine-3'-phosphate
  modified_base 9: mod_base = OTHER; note = 2'-deoxy-2'-fluorouridine-3'-phosphate
  modified_base 10: mod_base = OTHER; note = 2'-deoxy-2'-fluorouridine-3'-phosphate
  modified_base 11: mod_base = OTHER; note = 2'-deoxy-2'-fluorocytidine-3'-phosphate
  modified_base 12: mod_base = OTHER; note = 2'-O-methyluridine-3'-phosphate
  modified_base 13: mod_base = OTHER; note = 2'-O-methylguanosine-3'-phosphate
  modified_base 14: mod_base = OTHER; note = 2'-O-methyluridine-3'-phosphate
  modified_base 15: mod_base = OTHER; note = 2'-O-methyluridine-3'-phosphate
  modified_base 16: mod_base = OTHER; note = 2'-O-methylguanosine-3'-phosphate
  modified_base 17: mod_base = OTHER; note = 2'-O-methyluridine-3'-phosphate
  modified_base 18: mod_base = OTHER; note = 2'-O-methyladenosine-3'-phosphate
  modified_base 19: mod_base = OTHER; note = 2'-O-methyluridine-3'-phosphorothioate
  modified_base 20: mod_base = OTHER; note = 2'-O-methylguanosine-3'-phosphorothioate
  modified_base 21: mod_base = OTHER; note = 2'-O-methyladenosine
ggtacagattctgttgtatga

SEQ ID NO: 11520 - RNA, 21 nt, synthetic construct
  source 1..21: mol_type = other RNA
  modified_base 1: mod_base = OTHER; note = 2'-O-methylguanosine-3'-phosphorothioate
  modified_base 2: mod_base = OTHER; note = 2'-O-methyluridine-3'-phosphorothioate
  modified_base 3: mod_base = OTHER; note = 2'-O-methyladenosine-3'-phosphate
  modified_base 4: mod_base = OTHER; note = 2'-O-methylcytidine-3'-phosphate
  modified_base 5: mod_base = OTHER; note = 2'-O-methyladenosine-3'-phosphate
  modified_base 6: mod_base = OTHER; note = 2'-O-docosanyl-guanosine-3'-phosphate
  modified_base 7: mod_base = OTHER; note = 2'-deoxy-2'-fluoroadenosine-3'-phosphate
  modified_base 8: mod_base = OTHER; note = 2'-O-methyluridine-3'-phosphate
  modified_base 9: mod_base = OTHER; note = 2'-deoxy-2'-fluorouridine-3'-phosphate
  modified_base 10: mod_base = OTHER; note = 2'-deoxy-2'-fluorocytidine-3'-phosphate
  modified_base 11: mod_base = OTHER; note = 2'-deoxy-2'-fluorouridine-3'-phosphate
  modified_base 12: mod_base = OTHER; note = 2'-O-methylguanosine-3'-phosphate
  modified_base 13: mod_base = OTHER; note = 2'-O-methyluridine-3'-phosphate
  modified_base 14: mod_base = OTHER; note = 2'-O-methyluridine-3'-phosphate
  modified_base 15: mod_base = OTHER; note = 2'-O-methylguanosine-3'-phosphate
  modified_base 16: mod_base = OTHER; note = 2'-O-methyluridine-3'-phosphate
  modified_base 17: mod_base = OTHER; note = 2'-O-methyladenosine-3'-phosphate
  modified_base 18: mod_base = OTHER; note = 2'-O-methyluridine-3'-phosphate
  modified_base 19: mod_base = OTHER; note = 2'-O-methylguanosine-3'-phosphorothioate
  modified_base 20: mod_base = OTHER; note = 2'-O-methylcytidine-3'-phosphorothioate
  modified_base 21: mod_base = OTHER; note = 2'-O-methyladenosine
gtacagattctgttgtatgca

SEQ ID NO: 11521 - RNA, 21 nt, synthetic construct
  source 1..21: mol_type = other RNA
  modified_base 1: mod_base = OTHER; note = 2'-O-methyluridine-3'-phosphorothioate
  modified_base 2: mod_base = OTHER; note = 2'-O-methyladenosine-3'-phosphorothioate
  modified_base 3: mod_base = OTHER; note = 2'-O-methylcytidine-3'-phosphate
  modified_base 4: mod_base = OTHER; note = 2'-O-methyladenosine-3'-phosphate
  modified_base 5: mod_base = OTHER; note = 2'-O-methylguanosine-3'-phosphate
  modified_base 6: mod_base = OTHER; note = 2'-O-docosanyl-adenosine-3'-phosphate
  modified_base 7: mod_base = OTHER; note = 2'-deoxy-2'-fluorouridine-3'-phosphate
  modified_base 8: mod_base = OTHER; note = 2'-O-methyluridine-3'-phosphate
  modified_base 9: mod_base = OTHER; note = 2'-deoxy-2'-fluorocytidine-3'-phosphate
  modified_base 10: mod_base = OTHER; note = 2'-deoxy-2'-fluorouridine-3'-phosphate
  modified_base 11: mod_base = OTHER; note = 2'-deoxy-2'-fluoroguanosine-3'-phosphate
  modified_base 12: mod_base = OTHER; note = 2'-O-methyluridine-3'-phosphate
  modified_base 13: mod_base = OTHER; note = 2'-O-methyluridine-3'-phosphate
  modified_base 14: mod_base = OTHER; note = 2'-O-methylguanosine-3'-phosphate
  modified_base 15: mod_base = OTHER; note = 2'-O-methyluridine-3'-phosphate
  modified_base 16: mod_base = OTHER; note = 2'-O-methyladenosine-3'-phosphate
  modified_base 17: mod_base = OTHER; note = 2'-O-methyluridine-3'-phosphate
  modified_base 18: mod_base = OTHER; note = 2'-O-methylguanosine-3'-phosphate
  modified_base 19: mod_base = OTHER; note = 2'-O-methylcytidine-3'-phosphorothioate
  modified_base 20: mod_base = OTHER; note = 2'-O-methyluridine-3'-phosphorothioate
  modified_base 21: mod_base = OTHER; note = 2'-O-methyladenosine
tacagattctgttgtatgcta

SEQ ID NO: 11522 - RNA, 21 nt, synthetic construct
  source 1..21: mol_type = other RNA
  modified_base 1: mod_base = OTHER; note = 2'-O-methyladenosine-3'-phosphorothioate
  modified_base 2: mod_base = OTHER; note = 2'-O-methylcytidine-3'-phosphorothioate
  modified_base 3: mod_base = OTHER; note = 2'-O-methyladenosine-3'-phosphate
  modified_base 4: mod_base = OTHER; note = 2'-O-methylguanosine-3'-phosphate
  modified_base 5: mod_base = OTHER; note = 2'-O-methyladenosine-3'-phosphate
  modified_base 6: mod_base = OTHER; note = 2'-O-docosanyl-uridine-3'-phosphate
  modified_base 7: mod_base = OTHER; note = 2'-deoxy-2'-fluorouridine-3'-phosphate
  modified_base 8: mod_base = OTHER; note = 2'-O-methylcytidine-3'-phosphate
  modified_base 9: mod_base = OTHER; note = 2'-deoxy-2'-fluorouridine-3'-phosphate
  modified_base 10: mod_base = OTHER; note = 2'-deoxy-2'-fluoroguanosine-3'-phosphate
  modified_base 11: mod_base = OTHER; note = 2'-deoxy-2'-fluorouridine-3'-phosphate
  modified_base 12: mod_base = OTHER; note = 2'-O-methyluridine-3'-phosphate
  modified_base 13: mod_base = OTHER; note = 2'-O-methylguanosine-3'-phosphate
  modified_base 14: mod_base = OTHER; note = 2'-O-methyluridine-3'-phosphate
  modified_base 15: mod_base = OTHER; note = 2'-O-methyladenosine-3'-phosphate
  modified_base 16: mod_base = OTHER; note = 2'-O-methyluridine-3'-phosphate
  modified_base 17: mod_base = OTHER; note = 2'-O-methylguanosine-3'-phosphate
  modified_base 18: mod_base = OTHER; note = 2'-O-methylcytidine-3'-phosphate
  modified_base 19: mod_base = OTHER; note = 2'-O-methyluridine-3'-phosphorothioate
  modified_base 20: mod_base = OTHER; note = 2'-O-methyluridine-3'-phosphorothioate
  modified_base 21: mod_base = OTHER; note = 2'-O-methyladenosine
acagattctgttgtatgctta

SEQ ID NO: 11523 - RNA, 21 nt, synthetic construct
  source 1..21: mol_type = other RNA
  modified_base 1: mod_base = OTHER; note = 2'-O-methylcytidine-3'-phosphorothioate
  modified_base 2: mod_base = OTHER; note = 2'-O-methyladenosine-3'-phosphorothioate
  modified_base 3: mod_base = OTHER; note = 2'-O-methylguanosine-3'-phosphate
  modified_base 4: mod_base = OTHER; note = 2'-O-methyladenosine-3'-phosphate
  modified_base 5: mod_base = OTHER; note = 2'-O-methyluridine-3'-phosphate
  modified_base 6: mod_base = OTHER; note = 2'-O-docosanyl-uridine-3'-phosphate
  modified_base 7: mod_base = OTHER; note = 2'-deoxy-2'-fluorocytidine-3'-phosphate
  modified_base 8: mod_base = OTHER; note = 2'-O-methyluridine-3'-phosphate
  modified_base 9: mod_base = OTHER; note = 2'-deoxy-2'-fluoroguanosine-3'-phosphate
  modified_base 10: mod_base = OTHER; note = 2'-deoxy-2'-fluorouridine-3'-phosphate
  modified_base 11: mod_base = OTHER; note = 2'-deoxy-2'-fluorouridine-3'-phosphate
  modified_base 12: mod_base = OTHER; note = 2'-O-methylguanosine-3'-phosphate
  modified_base 13: mod_base = OTHER; note = 2'-O-methyluridine-3'-phosphate
  modified_base 14: mod_base = OTHER; note = 2'-O-methyladenosine-3'-phosphate
  modified_base 15: mod_base = OTHER; note = 2'-O-methyluridine-3'-phosphate
  modified_base 16: mod_base = OTHER; note = 2'-O-methylguanosine-3'-phosphate
  modified_base 17: mod_base = OTHER; note = 2'-O-methylcytidine-3'-phosphate
  modified_base 18: mod_base = OTHER; note = 2'-O-methyluridine-3'-phosphate
  modified_base 19: mod_base = OTHER; note = 2'-O-methyluridine-3'-phosphorothioate
  modified_base 20: mod_base = OTHER; note = 2'-O-methyluridine-3'-phosphorothioate
  modified_base 21: mod_base = OTHER; note = 2'-O-methyladenosine
cagattctgttgtatgcttta

SEQ ID NO: 11524 - RNA, 21 nt, synthetic construct
  source 1..21: mol_type = other RNA
  modified_base 1: mod_base = OTHER; note = 2'-O-methylcytidine-3'-phosphorothioate
  modified_base 2: mod_base = OTHER; note = 2'-O-methyladenosine-3'-phosphorothioate
  modified_base 3: mod_base = OTHER; note = 2'-O-methylcytidine-3'-phosphate
  modified_base 4: mod_base = OTHER; note = 2'-O-methyladenosine-3'-phosphate
  modified_base 5: mod_base = OTHER; note = 2'-O-methyluridine-3'-phosphate
  modified_base 6: mod_base = OTHER; note = 2'-O-docosanyl-cytidine-3'-phosphate
  modified_base 7: mod_base = OTHER; note = 2'-deoxy-2'-fluorouridine-3'-phosphate
  modified_base 8: mod_base = OTHER; note = 2'-O-methyladenosine-3'-phosphate
  modified_base 9: mod_base = OTHER; note = 2'-deoxy-2'-fluoroguanosine-3'-phosphate
  modified_base 10: mod_base = OTHER; note = 2'-deoxy-2'-fluoroadenosine-3'-phosphate
  modified_base 11: mod_base = OTHER; note = 2'-deoxy-2'-fluoroadenosine-3'-phosphate
  modified_base 12: mod_base = OTHER; note = 2'-O-methyluridine-3'-phosphate
  modified_base 13: mod_base = OTHER; note = 2'-O-methyluridine-3'-phosphate
  modified_base 14: mod_base = OTHER; note = 2'-O-methylcytidine-3'-phosphate
  modified_base 15: mod_base = OTHER; note = 2'-O-methyluridine-3'-phosphate
  modified_base 16: mod_base = OTHER; note = 2'-O-methyluridine-3'-phosphate
  modified_base 17: mod_base = OTHER; note = 2'-O-methyladenosine-3'-phosphate
  modified_base 18: mod_base = OTHER; note = 2'-O-methyladenosine-3'-phosphate
  modified_base 19: mod_base = OTHER; note = 2'-O-methyluridine-3'-phosphorothioate
  modified_base 20: mod_base = OTHER; note = 2'-O-methyluridine-3'-phosphorothioate
  modified_base 21: mod_base = OTHER; note = 2'-O-methyladenosine
cacatctagaattcttaatta

SEQ ID NO: 11525 - RNA, 21 nt, synthetic construct
  source 1..21: mol_type = other RNA
  modified_base 1: mod_base = OTHER; note = 2'-O-methyladenosine-3'-phosphorothioate
  modified_base 2: mod_base = OTHER; note = 2'-O-methylguanosine-3'-phosphorothioate
  modified_base 3: mod_base = OTHER; note = 2'-O-methyladenosine-3'-phosphate
  modified_base 4: mod_base = OTHER; note = 2'-O-methyluridine-3'-phosphate
  modified_base 5: mod_base = OTHER; note = 2'-O-methyluridine-3'-phosphate
  modified_base 6: mod_base = OTHER; note = 2'-O-docosanyl-cytidine-3'-phosphate
  modified_base 7: mod_base = OTHER; note = 2'-deoxy-2'-fluorouridine-3'-phosphate
  modified_base 8: mod_base = OTHER; note = 2'-O-methylguanosine-3'-phosphate
  modified_base 9: mod_base = OTHER; note = 2'-deoxy-2'-fluorouridine-3'-phosphate
  modified_base 10: mod_base = OTHER; note = 2'-deoxy-2'-fluorouridine-3'-phosphate
  modified_base 11: mod_base = OTHER; note = 2'-deoxy-2'-fluoroguanosine-3'-phosphate
  modified_base 12: mod_base = OTHER; note = 2'-O-methyluridine-3'-phosphate
  modified_base 13: mod_base = OTHER; note = 2'-O-methyladenosine-3'-phosphate
  modified_base 14: mod_base = OTHER; note = 2'-O-methyluridine-3'-phosphate
  modified_base 15: mod_base = OTHER; note = 2'-O-methylguanosine-3'-phosphate
  modified_base 16: mod_base = OTHER; note = 2'-O-methylcytidine-3'-phosphate
  modified_base 17: mod_base = OTHER; note = 2'-O-methyluridine-3'-phosphate
  modified_base 18: mod_base = OTHER; note = 2'-O-methyluridine-3'-phosphate
  modified_base 19: mod_base = OTHER; note = 2'-O-methyluridine-3'-phosphorothioate
  modified_base 20: mod_base = OTHER; note = 2'-O-methylcytidine-3'-phosphorothioate
  modified_base 21: mod_base = OTHER; note = 2'-O-methyladenosine
agattctgttgtatgctttca

SEQ ID NO: 11526 - RNA, 21 nt, synthetic construct
  source 1..21: mol_type = other RNA
  modified_base 1: mod_base = OTHER; note = 2'-O-methylguanosine-3'-phosphorothioate
  modified_base 2: mod_base = OTHER; note = 2'-O-methyladenosine-3'-phosphorothioate
  modified_base 3: mod_base = OTHER; note = 2'-O-methyluridine-3'-phosphate
  modified_base 4: mod_base = OTHER; note = 2'-O-methyluridine-3'-phosphate
  modified_base 5: mod_base = OTHER; note = 2'-O-methylcytidine-3'-phosphate
  modified_base 6: mod_base = OTHER; note = 2'-O-docosanyl-uridine-3'-phosphate
  modified_base 7: mod_base = OTHER; note = 2'-deoxy-2'-fluoroguanosine-3'-phosphate
  modified_base 8: mod_base = OTHER; note = 2'-O-methyluridine-3'-phosphate
  modified_base 9: mod_base = OTHER; note = 2'-deoxy-2'-fluorouridine-3'-phosphate
  modified_base 10: mod_base = OTHER; note = 2'-deoxy-2'-fluoroguanosine-3'-phosphate
  modified_base 11: mod_base = OTHER; note = 2'-deoxy-2'-fluorouridine-3'-phosphate
  modified_base 12: mod_base = OTHER; note = 2'-O-methyladenosine-3'-phosphate
  modified_base 13: mod_base = OTHER; note = 2'-O-methyluridine-3'-phosphate
  modified_base 14: mod_base = OTHER; note = 2'-O-methylguanosine-3'-phosphate
  modified_base 15: mod_base = OTHER; note = 2'-O-methylcytidine-3'-phosphate
  modified_base 16: mod_base = OTHER; note = 2'-O-methyluridine-3'-phosphate
  modified_base 17: mod_base = OTHER; note = 2'-O-methyluridine-3'-phosphate
  modified_base 18: mod_base = OTHER; note = 2'-O-methyluridine-3'-phosphate
  modified_base 19: mod_base = OTHER; note = 2'-O-methylcytidine-3'-phosphorothioate
  modified_base 20: mod_base = OTHER; note = 2'-O-methyluridine-3'-phosphorothioate
  modified_base 21: mod_base = OTHER; note = 2'-O-methyladenosine
gattctgttgtatgctttcta

SEQ ID NO: 11527 - RNA, 21 nt, synthetic construct
  source 1..21: mol_type = other RNA
  modified_base 1: mod_base = OTHER; note = 2'-O-methyluridine-3'-phosphorothioate
  modified_base 2: mod_base = OTHER; note = 2'-O-methylguanosine-3'-phosphorothioate
  modified_base 3: mod_base = OTHER; note = 2'-O-methylguanosine-3'-phosphate
  modified_base 4: mod_base = OTHER; note = 2'-O-methylcytidine-3'-phosphate
  modified_base 5: mod_base = OTHER; note = 2'-O-methyladenosine-3'-phosphate
  modified_base 6: mod_base = OTHER; note = 2'-O-docosanyl-uridine-3'-phosphate
  modified_base 7: mod_base = OTHER; note = 2'-deoxy-2'-fluoroguanosine-3'-phosphate
  modified_base 8: mod_base = OTHER; note = 2'-O-methyluridine-3'-phosphate
  modified_base 9: mod_base = OTHER; note = 2'-deoxy-2'-fluorocytidine-3'-phosphate
  modified_base 10: mod_base = OTHER; note = 2'-deoxy-2'-fluoroadenosine-3'-phosphate
  modified_base 11: mod_base = OTHER; note = 2'-deoxy-2'-fluorocytidine-3'-phosphate
  modified_base 12: mod_base = OTHER; note = 2'-O-methyladenosine-3'-phosphate
  modified_base 13: mod_base = OTHER; note = 2'-O-methyluridine-3'-phosphate
  modified_base 14: mod_base = OTHER; note = 2'-O-methylcytidine-3'-phosphate
  modified_base 15: mod_base = OTHER; note = 2'-O-methyluridine-3'-phosphate
  modified_base 16: mod_base = OTHER; note = 2'-O-methyladenosine-3'-phosphate
  modified_base 17: mod_base = OTHER; note = 2'-O-methylguanosine-3'-phosphate
  modified_base 18: mod_base = OTHER; note = 2'-O-methyladenosine-3'-phosphate
  modified_base 19: mod_base = OTHER; note = 2'-O-methyladenosine-3'-phosphorothioate
  modified_base 20: mod_base = OTHER; note = 2'-O-methyluridine-3'-phosphorothioate
  modified_base 21: mod_base = OTHER; note = 2'-O-methyladenosine
tggcatgtcacatctagaata

SEQ ID NO: 11528 - RNA, 21 nt, synthetic construct
  source 1..21: mol_type = other RNA
  modified_base 1: mod_base = OTHER; note = 2'-O-methylguanosine-3'-phosphorothioate
  modified_base 2: mod_base = OTHER; note = 2'-O-methylguanosine-3'-phosphorothioate
  modified_base 3: mod_base = OTHER; note = 2'-O-methylcytidine-3'-phosphate
  modified_base 4: mod_base = OTHER; note = 2'-O-methyladenosine-3'-phosphate
  modified_base 5: mod_base = OTHER; note = 2'-O-methyluridine-3'-phosphate
  modified_base 6: mod_base = OTHER; note = 2'-O-docosanyl-guanosine-3'-phosphate
  modified_base 7: mod_base = OTHER; note = 2'-deoxy-2'-fluorouridine-3'-phosphate
  modified_base 8: mod_base = OTHER; note = 2'-O-methylcytidine-3'-phosphate
  modified_base 9: mod_base = OTHER; note = 2'-deoxy-2'-fluoroadenosine-3'-phosphate
  modified_base 10: mod_base = OTHER; note = 2'-deoxy-2'-fluorocytidine-3'-phosphate
  modified_base 11: mod_base = OTHER; note = 2'-deoxy-2'-fluoroadenosine-3'-phosphate
  modified_base 12: mod_base = OTHER; note = 2'-O-methyluridine-3'-phosphate
  modified_base 13: mod_base = OTHER; note = 2'-O-methylcytidine-3'-phosphate
  modified_base 14: mod_base = OTHER; note = 2'-O-methyluridine-3'-phosphate
  modified_base 15: mod_base = OTHER; note = 2'-O-methyladenosine-3'-phosphate
  modified_base 16: mod_base = OTHER; note = 2'-O-methylguanosine-3'-phosphate
  modified_base 17: mod_base = OTHER; note = 2'-O-methyladenosine-3'-phosphate
  modified_base 18: mod_base = OTHER; note = 2'-O-methyladenosine-3'-phosphate
  modified_base 19: mod_base = OTHER; note = 2'-O-methyluridine-3'-phosphorothioate
  modified_base 20: mod_base = OTHER; note = 2'-O-methyluridine-3'-phosphorothioate
  modified_base 21: mod_base = OTHER; note = 2'-O-methyladenosine
ggcatgtcacatctagaatta

SEQ ID NO: 11529 - RNA, 21 nt, synthetic construct
  source 1..21: mol_type = other RNA
  modified_base 1: mod_base = OTHER; note = 2'-O-methylguanosine-3'-phosphorothioate
  modified_base 2: mod_base = OTHER; note = 2'-O-methylcytidine-3'-phosphorothioate
  modified_base 3: mod_base = OTHER; note = 2'-O-methyladenosine-3'-phosphate
  modified_base 4: mod_base = OTHER; note = 2'-O-methyluridine-3'-phosphate
  modified_base 5: mod_base = OTHER; note = 2'-O-methylguanosine-3'-phosphate
  modified_base 6: mod_base = OTHER; note = 2'-O-docosanyl-uridine-3'-phosphate
  modified_base 7: mod_base = OTHER; note = 2'-deoxy-2'-fluorocytidine-3'-phosphate
  modified_base 8: mod_base = OTHER; note = 2'-O-methyladenosine-3'-phosphate
  modified_base 9: mod_base = OTHER; note = 2'-deoxy-2'-fluorocytidine-3'-phosphate
  modified_base 10: mod_base = OTHER; note = 2'-deoxy-2'-fluoroadenosine-3'-phosphate
  modified_base 11: mod_base = OTHER; note = 2'-deoxy-2'-fluorouridine-3'-phosphate
  modified_base 12: mod_base = OTHER; note = 2'-O-methylcytidine-3'-phosphate
  modified_base 13: mod_base = OTHER; note = 2'-O-methyluridine-3'-phosphate
  modified_base 14: mod_base = OTHER; note = 2'-O-methyladenosine-3'-phosphate
  modified_base 15: mod_base = OTHER; note = 2'-O-methylguanosine-3'-phosphate
  modified_base 16: mod_base = OTHER; note = 2'-O-methyladenosine-3'-phosphate
  modified_base 17: mod_base = OTHER; note = 2'-O-methyladenosine-3'-phosphate
  modified_base 18: mod_base = OTHER; note = 2'-O-methyluridine-3'-phosphate
  modified_base 19: mod_base = OTHER; note = 2'-O-methyluridine-3'-phosphorothioate
  modified_base 20: mod_base = OTHER; note = 2'-O-methylcytidine-3'-phosphorothioate
  modified_base 21: mod_base = OTHER; note = 2'-O-methyladenosine
gcatgtcacatctagaattca

SEQ ID NO: 11530 - RNA, 21 nt, synthetic construct
  source 1..21: mol_type = other RNA
  modified_base 1: mod_base = OTHER; note = 2'-O-methylcytidine-3'-phosphorothioate
  modified_base 2: mod_base = OTHER; note = 2'-O-methyladenosine-3'-phosphorothioate
  modified_base 3: mod_base = OTHER; note = 2'-O-methyluridine-3'-phosphate
  modified_base 4: mod_base = OTHER; note = 2'-O-methylguanosine-3'-phosphate
  modified_base 5: mod_base = OTHER; note = 2'-O-methyluridine-3'-phosphate
  modified_base 6: mod_base = OTHER; note = 2'-O-docosanyl-cytidine-3'-phosphate
  modified_base 7: mod_base = OTHER; note = 2'-deoxy-2'-fluoroadenosine-3'-phosphate
  modified_base 8: mod_base = OTHER; note = 2'-O-methylcytidine-3'-phosphate
  modified_base 9: mod_base = OTHER; note = 2'-deoxy-2'-fluoroadenosine-3'-phosphate
  modified_base 10: mod_base = OTHER; note = 2'-deoxy-2'-fluorouridine-3'-phosphate
  modified_base 11: mod_base = OTHER; note = 2'-deoxy-2'-fluorocytidine-3'-phosphate
  modified_base 12: mod_base = OTHER; note = 2'-O-methyluridine-3'-phosphate
  modified_base 13: mod_base = OTHER; note = 2'-O-methyladenosine-3'-phosphate
  modified_base 14: mod_base = OTHER; note = 2'-O-methylguanosine-3'-phosphate
  modified_base 15: mod_base = OTHER; note = 2'-O-methyladenosine-3'-phosphate
  modified_base 16: mod_base = OTHER; note = 2'-O-methyladenosine-3'-phosphate
  modified_base 17: mod_base = OTHER; note = 2'-O-methyluridine-3'-phosphate
  modified_base 18: mod_base = OTHER; note = 2'-O-methyluridine-3'-phosphate
  modified_base 19: mod_base = OTHER; note = 2'-O-methylcytidine-3'-phosphorothioate
  modified_base 20: mod_base = OTHER; note = 2'-O-methyluridine-3'-phosphorothioate
  modified_base 21: mod_base = OTHER; note = 2'-O-methyladenosine
catgtcacatctagaattcta

SEQ ID NO: 11531 - RNA, 21 nt, synthetic construct
  source 1..21: mol_type = other RNA
  modified_base 1: mod_base = OTHER; note = 2'-O-methyladenosine-3'-phosphorothioate
  modified_base 2: mod_base = OTHER; note = 2'-O-methyluridine-3'-phosphorothioate
  modified_base 3: mod_base = OTHER; note = 2'-O-methylguanosine-3'-phosphate
  modified_base 4: mod_base = OTHER; note = 2'-O-methyluridine-3'-phosphate
  modified_base 5: mod_base = OTHER; note = 2'-O-methylcytidine-3'-phosphate
  modified_base 6: mod_base = OTHER; note = 2'-O-docosanyl-adenosine-3'-phosphate
  modified_base 7: mod_base = OTHER; note = 2'-deoxy-2'-fluorocytidine-3'-phosphate
  modified_base 8: mod_base = OTHER; note = 2'-O-methyladenosine-3'-phosphate
  modified_base 9: mod_base = OTHER; note = 2'-deoxy-2'-fluorouridine-3'-phosphate
  modified_base 10: mod_base = OTHER; note = 2'-deoxy-2'-fluorocytidine-3'-phosphate
  modified_base 11: mod_base = OTHER; note = 2'-deoxy-2'-fluorouridine-3'-phosphate
  modified_base 12: mod_base = OTHER; note = 2'-O-methyladenosine-3'-phosphate
  modified_base 13: mod_base = OTHER; note = 2'-O-methylguanosine-3'-phosphate
  modified_base 14: mod_base = OTHER; note = 2'-O-methyladenosine-3'-phosphate
  modified_base 15: mod_base = OTHER; note = 2'-O-methyladenosine-3'-phosphate
  modified_base 16: mod_base = OTHER; note = 2'-O-methyluridine-3'-phosphate
  modified_base 17: mod_base = OTHER; note = 2'-O-methyluridine-3'-phosphate
  modified_base 18: mod_base = OTHER; note = 2'-O-methylcytidine-3'-phosphate
  modified_base 19: mod_base = OTHER; note = 2'-O-methyluridine-3'-phosphorothioate
  modified_base 20: mod_base = OTHER; note = 2'-O-methyluridine-3'-phosphorothioate
  modified_base 21: mod_base = OTHER; note = 2'-O-methyladenosine
atgtcacatctagaattctta

SEQ ID NO: 11532 - RNA, 21 nt, synthetic construct
  source 1..21: mol_type = other RNA
  modified_base 1: mod_base = OTHER; note = 2'-O-methyluridine-3'-phosphorothioate
  modified_base 2: mod_base = OTHER; note = 2'-O-methylguanosine-3'-phosphorothioate
  modified_base 3: mod_base = OTHER; note = 2'-O-methyluridine-3'-phosphate
  modified_base 4: mod_base = OTHER; note = 2'-O-methylcytidine-3'-phosphate
  modified_base 5: mod_base = OTHER; note = 2'-O-methyladenosine-3'-phosphate
  modified_base 6: mod_base = OTHER; note = 2'-O-docosanyl-cytidine-3'-phosphate
  modified_base 7: mod_base = OTHER; note = 2'-deoxy-2'-fluoroadenosine-3'-phosphate
  modified_base 8: mod_base = OTHER; note = 2'-O-methyluridine-3'-phosphate
  modified_base 9: mod_base = OTHER; note = 2'-deoxy-2'-fluorocytidine-3'-phosphate
  modified_base 10: mod_base = OTHER; note = 2'-deoxy-2'-fluorouridine-3'-phosphate
  modified_base 11: mod_base = OTHER; note = 2'-deoxy-2'-fluoroadenosine-3'-phosphate
  modified_base 12: mod_base = OTHER; note = 2'-O-methylguanosine-3'-phosphate
  modified_base 13: mod_base = OTHER; note = 2'-O-methyladenosine-3'-phosphate
  modified_base 14: mod_base = OTHER; note = 2'-O-methyladenosine-3'-phosphate
  modified_base 15: mod_base = OTHER; note = 2'-O-methyluridine-3'-phosphate
  modified_base 16: mod_base = OTHER; note = 2'-O-methyluridine-3'-phosphate
  modified_base 17: mod_base = OTHER; note = 2'-O-methylcytidine-3'-phosphate
  modified_base 18: mod_base = OTHER; note = 2'-O-methyluridine-3'-phosphate
  modified_base 19: mod_base = OTHER; note = 2'-O-methyluridine-3'-phosphorothioate
  modified_base 20: mod_base = OTHER; note = 2'-O-methyladenosine-3'-phosphorothioate
  modified_base 21: mod_base = OTHER; note = 2'-O-methyladenosine
tgtcacatctagaattcttaa

SEQ ID NO: 11533 - RNA, 21 nt, synthetic construct
  source 1..21: mol_type = other RNA
  modified_base 1: mod_base = OTHER; note = 2'-O-methylguanosine-3'-phosphorothioate
  modified_base 2: mod_base = OTHER; note = 2'-O-methyluridine-3'-phosphorothioate
  modified_base 3: mod_base = OTHER; note = 2'-O-methylcytidine-3'-phosphate
  modified_base 4: mod_base = OTHER; note = 2'-O-methyladenosine-3'-phosphate
  modified_base 5: mod_base = OTHER; note = 2'-O-methylcytidine-3'-phosphate
  modified_base 6: mod_base = OTHER; note = 2'-O-docosanyl-adenosine-3'-phosphate
  modified_base 7: mod_base = OTHER; note = 2'-deoxy-2'-fluorouridine-3'-phosphate
  modified_base 8: mod_base = OTHER; note = 2'-O-methylcytidine-3'-phosphate
  modified_base 9: mod_base = OTHER; note = 2'-deoxy-2'-fluorouridine-3'-phosphate
  modified_base 10: mod_base = OTHER; note = 2'-deoxy-2'-fluoroadenosine-3'-phosphate
  modified_base 11: mod_base = OTHER; note = 2'-deoxy-2'-fluoroguanosine-3'-phosphate
  modified_base 12: mod_base = OTHER; note = 2'-O-methyladenosine-3'-phosphate
  modified_base 13: mod_base = OTHER; note = 2'-O-methyladenosine-3'-phosphate
  modified_base 14: mod_base = OTHER; note = 2'-O-methyluridine-3'-phosphate
  modified_base 15: mod_base = OTHER; note = 2'-O-methyluridine-3'-phosphate
  modified_base 16: mod_base = OTHER; note = 2'-O-methylcytidine-3'-phosphate
  modified_base 17: mod_base = OTHER; note = 2'-O-methyluridine-3'-phosphate
  modified_base 18: mod_base = OTHER; note = 2'-O-methyluridine-3'-phosphate
  modified_base 19: mod_base = OTHER; note = 2'-O-methyladenosine-3'-phosphorothioate
  modified_base 20: mod_base = OTHER; note = 2'-O-methyladenosine-3'-phosphorothioate
  modified_base 21: mod_base = OTHER; note = 2'-O-methyladenosine
gtcacatctagaattcttaaa

SEQ ID NO: 11534 - RNA, 21 nt, synthetic construct
  source 1..21: mol_type = other RNA
  modified_base 1: mod_base = OTHER; note = 2'-O-methyluridine-3'-phosphorothioate
  modified_base 2: mod_base = OTHER; note = 2'-O-methylcytidine-3'-phosphorothioate
  modified_base 3: mod_base = OTHER; note = 2'-O-methyladenosine-3'-phosphate
  modified_base 4: mod_base = OTHER; note = 2'-O-methylcytidine-3'-phosphate
  modified_base 5: mod_base = OTHER; note = 2'-O-methyladenosine-3'-phosphate
  modified_base 6: mod_base = OTHER; note = 2'-O-docosanyl-uridine-3'-phosphate
  modified_base 7: mod_base = OTHER; note = 2'-deoxy-2'-fluorocytidine-3'-phosphate
  modified_base 8: mod_base = OTHER; note = 2'-O-methyluridine-3'-phosphate
  modified_base 9: mod_base = OTHER; note = 2'-deoxy-2'-fluoroadenosine-3'-phosphate
  modified_base 10: mod_base = OTHER; note = 2'-deoxy-2'-fluoroguanosine-3'-phosphate
  modified_base 11: mod_base = OTHER; note = 2'-deoxy-2'-fluoroadenosine-3'-phosphate
  modified_base 12: mod_base = OTHER; note = 2'-O-methyladenosine-3'-phosphate
  modified_base 13: mod_base = OTHER; note = 2'-O-methyluridine-3'-phosphate
  modified_base 14: mod_base = OTHER; note = 2'-O-methyluridine-3'-phosphate
  modified_base 15: mod_base = OTHER; note = 2'-O-methylcytidine-3'-phosphate
  modified_base 16: mod_base = OTHER; note = 2'-O-methyluridine-3'-phosphate
  modified_base 17: mod_base = OTHER; note = 2'-O-methyluridine-3'-phosphate
  modified_base 18: mod_base = OTHER; note = 2'-O-methyladenosine-3'-phosphate
  modified_base 19: mod_base = OTHER; note = 2'-O-methyladenosine-3'-phosphorothioate
  modified_base 20: mod_base = OTHER; note = 2'-O-methyluridine-3'-phosphorothioate
  modified_base 21: mod_base = OTHER; note = 2'-O-methyladenosine
tcacatctagaattcttaata

SEQ ID NO: 11535 - RNA, 21 nt, synthetic construct
  source 1..21: mol_type = other RNA
  modified_base 1: mod_base = OTHER; note = 2'-O-methyluridine-3'-phosphorothioate
  modified_base 2: mod_base = OTHER; note = 2'-O-methylguanosine-3'-phosphorothioate
  modified_base 3: mod_base = OTHER; note = 2'-O-methyladenosine-3'-phosphate
  modified_base 4: mod_base = OTHER; note = 2'-O-methylcytidine-3'-phosphate
  modified_base 5: mod_base = OTHER; note = 2'-O-methyluridine-3'-phosphate
  modified_base 6: mod_base = OTHER; note = 2'-O-docosanyl-uridine-3'-phosphate
  modified_base 7: mod_base = OTHER; note = 2'-deoxy-2'-fluoroguanosine-3'-phosphate
  modified_base 8: mod_base = OTHER; note = 2'-O-methyladenosine-3'-phosphate
  modified_base 9: mod_base = OTHER; note = 2'-deoxy-2'-fluoroguanosine-3'-phosphate
  modified_base 10: mod_base = OTHER; note = 2'-deoxy-2'-fluoroadenosine-3'-phosphate
  modified_base 11: mod_base = OTHER; note = 2'-deoxy-2'-fluoroguanosine-3'-phosphate
  modified_base 12: mod_base = OTHER; note = 2'-O-methyluridine-3'-phosphate
  modified_base 13: mod_base = OTHER; note = 2'-O-methyluridine-3'-phosphate
  modified_base 14: mod_base = OTHER; note = 2'-O-methyladenosine-3'-phosphate
  modified_base 15: mod_base = OTHER; note = 2'-O-methyladenosine-3'-phosphate
  modified_base 16: mod_base = OTHER; note = 2'-O-methylguanosine-3'-phosphate
  modified_base 17: mod_base = OTHER; note = 2'-O-methyluridine-3'-phosphate
  modified_base 18: mod_base = OTHER; note = 2'-O-methylguanosine-3'-phosphate
  modified_base 19: mod_base = OTHER; note = 2'-O-methyladenosine-3'-phosphorothioate
  modified_base 20: mod_base = OTHER; note = 2'-O-methyladenosine-3'-phosphorothioate
  modified_base 21: mod_base = OTHER; note = 2'-O-methyladenosine
tgacttgagagttaagtgaaa

SEQ ID NO: 11536 - RNA, 21 nt, synthetic construct
  source 1..21: mol_type = other RNA
  modified_base 1: mod_base = OTHER; note = 2'-O-methyluridine-3'-phosphorothioate
  modified_base 2: mod_base = OTHER; note = 2'-O-methyluridine-3'-phosphorothioate
  modified_base 3: mod_base = OTHER; note = 2'-O-methylguanosine-3'-phosphate
  modified_base 4: mod_base = OTHER; note = 2'-O-methyladenosine-3'-phosphate
  modified_base 5: mod_base = OTHER; note = 2'-O-methylguanosine-3'-phosphate
  modified_base 6: mod_base = OTHER; note = 2'-O-docosanyl-adenosine-3'-phosphate
  modified_base 7: mod_base = OTHER; note = 2'-deoxy-2'-fluoroguanosine-3'-phosphate
  modified_base 8: mod_base = OTHER; note = 2'-O-methyluridine-3'-phosphate
  modified_base 9: mod_base = OTHER; note = 2'-deoxy-2'-fluorouridine-3'-phosphate
  modified_base 10: mod_base = OTHER; note = 2'-deoxy-2'-fluoroadenosine-3'-phosphate
  modified_base 11: mod_base = OTHER; note = 2'-deoxy-2'-fluoroadenosine-3'-phosphate
  modified_base 12: mod_base = OTHER; note = 2'-O-methylguanosine-3'-phosphate
  modified_base 13: mod_base = OTHER; note = 2'-O-methyluridine-3'-phosphate
  modified_base 14: mod_base = OTHER; note = 2'-O-methylguanosine-3'-phosphate
  modified_base 15: mod_base = OTHER; note = 2'-O-methyladenosine-3'-phosphate
  modified_base 16: mod_base = OTHER; note = 2'-O-methyladenosine-3'-phosphate
  modified_base 17: mod_base = OTHER; note = 2'-O-methyladenosine-3'-phosphate
  modified_base 18: mod_base = OTHER; note = 2'-O-methylcytidine-3'-phosphate
  modified_base 19: mod_base = OTHER; note = 2'-O-methyladenosine-3'-phosphorothioate
  modified_base 20: mod_base = OTHER; note = 2'-O-methyluridine-3'-phosphorothioate
  modified_base 21: mod_base = OTHER; note = 2'-O-methyladenosine
ttgagagttaagtgaaacata

SEQ ID NO: 11537 - RNA, 21 nt, synthetic construct
  source 1..21: mol_type = other RNA
  modified_base 1: mod_base = OTHER; note = 2'-O-methyluridine-3'-phosphorothioate
  modified_base 2: mod_base = OTHER; note = 2'-O-methyladenosine-3'-phosphorothioate
  modified_base 3: mod_base = OTHER; note = 2'-O-methylguanosine-3'-phosphate
  modified_base 4: mod_base = OTHER; note = 2'-O-methylcytidine-3'-phosphate
  modified_base 5: mod_base = OTHER; note = 2'-O-methyladenosine-3'-phosphate
  modified_base 6: mod_base = OTHER; note = 2'-O-docosanyl-cytidine-3'-phosphate
  modified_base 7: mod_base = OTHER; note = 2'-deoxy-2'-fluorouridine-3'-phosphate
  modified_base 8: mod_base = OTHER; note = 2'-O-methyluridine-3'-phosphate
  modified_base 9: mod_base = OTHER; note = 2'-deoxy-2'-fluoroguanosine-3'-phosphate
  modified_base 10: mod_base = OTHER; note = 2'-deoxy-2'-fluorocytidine-3'-phosphate
  modified_base 11: mod_base = OTHER; note = 2'-deoxy-2'-fluorouridine-3'-phosphate
  modified_base 12: mod_base = OTHER; note = 2'-O-methyluridine-3'-phosphate
  modified_base 13: mod_base = OTHER; note = 2'-O-methyluridine-3'-phosphate
  modified_base 14: mod_base = OTHER; note = 2'-O-methyluridine-3'-phosphate
  modified_base 15: mod_base = OTHER; note = 2'-O-methylcytidine-3'-phosphate
  modified_base 16: mod_base = OTHER; note = 2'-O-methyladenosine-3'-phosphate
  modified_base 17: mod_base = OTHER; note = 2'-O-methyluridine-3'-phosphate
  modified_base 18: mod_base = OTHER; note = 2'-O-methylcytidine-3'-phosphate
  modified_base 19: mod_base = OTHER; note = 2'-O-methyluridine-3'-phosphorothioate
  modified_base 20: mod_base = OTHER; note = 2'-O-methyluridine-3'-phosphorothioate
  modified_base 21: mod_base = OTHER; note = 2'-O-methyladenosine
tagcacttgcttttcatctta

SEQ ID NO: 11538 - RNA, 21 nt, synthetic construct
  source 1..21: mol_type = other RNA
  modified_base 1: mod_base = OTHER; note = 2'-O-methyluridine-3'-phosphorothioate
  modified_base 2: mod_base = OTHER; note = 2'-O-methyluridine-3'-phosphorothioate
  modified_base 3: mod_base = OTHER; note = 2'-O-methylguanosine-3'-phosphate
  modified_base 4: mod_base = OTHER; note = 2'-O-methylcytidine-3'-phosphate
  modified_base 5: mod_base = OTHER; note = 2'-O-methyladenosine-3'-phosphate
  modified_base 6: mod_base = OTHER; note = 2'-O-docosanyl-uridine-3'-phosphate
  modified_base 7: mod_base = OTHER; note = 2'-deoxy-2'-fluorouridine-3'-phosphate
  modified_base 8: mod_base = OTHER; note = 2'-O-methyluridine-3'-phosphate
  modified_base 9: mod_base = OTHER; note = 2'-deoxy-2'-fluorouridine-3'-phosphate
  modified_base 10: mod_base = OTHER; note = 2'-deoxy-2'-fluoroadenosine-3'-phosphate
  modified_base 11: mod_base = OTHER; note = 2'-deoxy-2'-fluoroadenosine-3'-phosphate
  modified_base 12: mod_base = OTHER; note = 2'-O-methyladenosine-3'-phosphate
  modified_base 13: mod_base = OTHER; note = 2'-O-methyluridine-3'-phosphate
  modified_base 14: mod_base = OTHER; note = 2'-O-methyluridine-3'-phosphate
  modified_base 15: mod_base = OTHER; note = 2'-O-methyluridine-3'-phosphate
  modified_base 16: mod_base = OTHER; note = 2'-O-methylcytidine-3'-phosphate
  modified_base 17: mod_base = OTHER; note = 2'-O-methylcytidine-3'-phosphate
  modified_base 18: mod_base = OTHER; note = 2'-O-methyladenosine-3'-phosphate
  modified_base 19: mod_base = OTHER; note = 2'-O-methyluridine-3'-phosphorothioate
  modified_base 20: mod_base = OTHER; note = 2'-O-methylguanosine-3'-phosphorothioate
  modified_base 21: mod_base = OTHER; note = 2'-O-methyladenosine
ttgcattttaaatttccatga

SEQ ID NO: 11539 - RNA, 21 nt, synthetic construct
  source 1..21: mol_type = other RNA
  modified_base 1: mod_base = OTHER; note = 2'-O-methyladenosine-3'-phosphorothioate
  modified_base 2: mod_base = OTHER; note = 2'-O-methyluridine-3'-phosphorothioate
  modified_base 3: mod_base = OTHER; note = 2'-O-methyluridine-3'-phosphate
  modified_base 4: mod_base = OTHER; note = 2'-O-methyluridine-3'-phosphate
  modified_base 5: mod_base = OTHER; note = 2'-O-methyluridine-3'-phosphate
  modified_base 6: mod_base = OTHER; note = 2'-O-docosanyl-adenosine-3'-phosphate
  modified_base 7: mod_base = OTHER; note = 2'-deoxy-2'-fluoroadenosine-3'-phosphate
  modified_base 8: mod_base = OTHER; note = 2'-O-methyladenosine-3'-phosphate
  modified_base 9: mod_base = OTHER; note = 2'-deoxy-2'-fluorouridine-3'-phosphate
  modified_base 10: mod_base = OTHER; note = 2'-deoxy-2'-fluorouridine-3'-phosphate
  modified_base 11: mod_base = OTHER; note = 2'-deoxy-2'-fluorouridine-3'-phosphate
  modified_base 12: mod_base = OTHER; note = 2'-O-methylcytidine-3'-phosphate
  modified_base 13: mod_base = OTHER; note = 2'-O-methylcytidine-3'-phosphate
  modified_base 14: mod_base = OTHER; note = 2'-O-methyladenosine-3'-phosphate
  modified_base 15: mod_base = OTHER; note = 2'-O-methyluridine-3'-phosphate
  modified_base 16: mod_base = OTHER; note = 2'-O-methylguanosine-3'-phosphate
  modified_base 17: mod_base = OTHER; note = 2'-O-methyladenosine-3'-phosphate
  modified_base 18: mod_base = OTHER; note = 2'-O-methyluridine-3'-phosphate
  modified_base 19: mod_base = OTHER; note = 2'-O-methyluridine-3'-phosphorothioate
  modified_base 20: mod_base = OTHER; note = 2'-O-methylguanosine-3'-phosphorothioate
  modified_base 21: mod_base = OTHER; note = 2'-O-methyladenosine
attttaaatttccatgattga

SEQ ID NO: 11540 - RNA, 21 nt, synthetic construct
  source 1..21: mol_type = other RNA
  modified_base 1: mod_base = OTHER; note = 2'-O-methyluridine-3'-phosphorothioate
  modified_base 2: mod_base = OTHER; note = 2'-O-methylguanosine-3'-phosphorothioate
  modified_base 3: mod_base = OTHER; note = 2'-O-methylguanosine-3'-phosphate
  modified_base 4: mod_base = OTHER; note = 2'-O-methyluridine-3'-phosphate
  modified_base 5: mod_base = OTHER; note = 2'-O-methyluridine-3'-phosphate
  modified_base 6: mod_base = OTHER; note = 2'-O-docosanyl-guanosine-3'-phosphate
  modified_base 7: mod_base = OTHER; note = 2'-deoxy-2'-fluorocytidine-3'-phosphate
  modified_base 8: mod_base = OTHER; note = 2'-O-methyladenosine-3'-phosphate
  modified_base 9: mod_base = OTHER; note = 2'-deoxy-2'-fluoroguanosine-3'-phosphate
  modified_base 10: mod_base = OTHER; note = 2'-deoxy-2'-fluorouridine-3'-phosphate
  modified_base 11: mod_base = OTHER; note = 2'-deoxy-2'-fluoroadenosine-3'-phosphate
  modified_base 12: mod_base = OTHER; note = 2'-O-methyluridine-3'-phosphate
  modified_base 13: mod_base = OTHER; note = 2'-O-methylcytidine-3'-phosphate
  modified_base 14: mod_base = OTHER; note = 2'-O-methyluridine-3'-phosphate
  modified_base 15: mod_base = OTHER; note = 2'-O-methylguanosine-3'-phosphate
  modified_base 16: mod_base = OTHER; note = 2'-O-methyladenosine-3'-phosphate
  modified_base 17: mod_base = OTHER; note = 2'-O-methyladenosine-3'-phosphate
  modified_base 18: mod_base = OTHER; note = 2'-O-methyladenosine-3'-phosphate
  modified_base 19: mod_base = OTHER; note = 2'-O-methyladenosine-3'-phosphorothioate
  modified_base 20: mod_base = OTHER; note = 2'-O-methyladenosine-3'-phosphorothioate
  modified_base 21: mod_base = OTHER; note = 2'-O-methyladenosine
tggttgcagtatctgaaaaaa

SEQ ID NO: 11541 - RNA, 21 nt, synthetic construct
  source 1..21: mol_type = other RNA
  modified_base 1: mod_base = OTHER; note = 2'-O-methylguanosine-3'-phosphorothioate
  modified_base 2: mod_base = OTHER; note = 2'-O-methylguanosine-3'-phosphorothioate
  modified_base 3: mod_base = OTHER; note = 2'-O-methyluridine-3'-phosphate
  modified_base 4: mod_base = OTHER; note = 2'-O-methyluridine-3'-phosphate
  modified_base 5: mod_base = OTHER; note = 2'-O-methylguanosine-3'-phosphate
  modified_base 6: mod_base = OTHER; note = 2'-O-docosanyl-cytidine-3'-phosphate
  modified_base 7: mod_base = OTHER; note = 2'-deoxy-2'-fluoroadenosine-3'-phosphate
  modified_base 8: mod_base = OTHER; note = 2'-O-methylguanosine-3'-phosphate
  modified_base 9: mod_base = OTHER; note = 2'-deoxy-2'-fluorouridine-3'-phosphate
  modified_base 10: mod_base = OTHER; note = 2'-deoxy-2'-fluoroadenosine-3'-phosphate
  modified_base 11: mod_base = OTHER; note = 2'-deoxy-2'-fluorouridine-3'-phosphate
  modified_base 12: mod_base = OTHER; note = 2'-O-methylcytidine-3'-phosphate
  modified_base 13: mod_base = OTHER; note = 2'-O-methyluridine-3'-phosphate
  modified_base 14: mod_base = OTHER; note = 2'-O-methylguanosine-3'-phosphate
  modified_base 15: mod_base = OTHER; note = 2'-O-methyladenosine-3'-phosphate
  modified_base 16: mod_base = OTHER; note = 2'-O-methyladenosine-3'-phosphate
  modified_base 17: mod_base = OTHER; note = 2'-O-methyladenosine-3'-phosphate
  modified_base 18: mod_base = OTHER; note = 2'-O-methyladenosine-3'-phosphate
  modified_base 19: mod_base = OTHER; note = 2'-O-methyladenosine-3'-phosphorothioate
  modified_base 20: mod_base = OTHER; note = 2'-O-methyladenosine-3'-phosphorothioate
  modified_base 21: mod_base = OTHER; note = 2'-O-methyladenosine
ggttgcagtatctgaaaaaaa

SEQ ID NO: 11542 - RNA, 21 nt, synthetic construct
  source 1..21: mol_type = other RNA
  modified_base 1: mod_base = OTHER; note = 2'-O-methylguanosine-3'-phosphorothioate
  modified_base 2: mod_base = OTHER; note = 2'-O-methyluridine-3'-phosphorothioate
  modified_base 3: mod_base = OTHER; note = 2'-O-methyluridine-3'-phosphate
  modified_base 4: mod_base = OTHER; note = 2'-O-methylguanosine-3'-phosphate
  modified_base 5: mod_base = OTHER; note = 2'-O-methylcytidine-3'-phosphate
  modified_base 6: mod_base = OTHER; note = 2'-O-docosanyl-adenosine-3'-phosphate
  modified_base 7: mod_base = OTHER; note = 2'-deoxy-2'-fluoroguanosine-3'-phosphate
  modified_base 8: mod_base = OTHER; note = 2'-O-methyluridine-3'-phosphate
  modified_base 9: mod_base = OTHER; note = 2'-deoxy-2'-fluoroadenosine-3'-phosphate
  modified_base 10: mod_base = OTHER; note = 2'-deoxy-2'-fluorouridine-3'-phosphate
  modified_base 11: mod_base = OTHER; note = 2'-deoxy-2'-fluorocytidine-3'-phosphate
  modified_base 12: mod_base = OTHER; note = 2'-O-methyluridine-3'-phosphate
  modified_base 13: mod_base = OTHER; note = 2'-O-methylguanosine-3'-phosphate
  modified_base 14: mod_base = OTHER; note = 2'-O-methyladenosine-3'-phosphate
  modified_base 15: mod_base = OTHER; note = 2'-O-methyladenosine-3'-phosphate
  modified_base 16: mod_base = OTHER; note = 2'-O-methyladenosine-3'-phosphate
  modified_base 17: mod_base = OTHER; note = 2'-O-methyladenosine-3'-phosphate
  modified_base 18: mod_base = OTHER; note = 2'-O-methyladenosine-3'-phosphate
  modified_base 19: mod_base = OTHER; note = 2'-O-methyladenosine-3'-phosphorothioate
  modified_base 20: mod_base = OTHER; note = 2'-O-methyluridine-3'-phosphorothioate
  modified_base 21: mod_base = OTHER; note = 2'-O-methyladenosine
gttgcagtatctgaaaaaata

SEQ ID NO: 11543 - RNA, 21 nt, synthetic construct
  source 1..21: mol_type = other RNA
  modified_base 1: mod_base = OTHER; note = 2'-O-methyluridine-3'-phosphorothioate
  modified_base 2: mod_base = OTHER; note = 2'-O-methyluridine-3'-phosphorothioate
  modified_base 3: mod_base = OTHER; note = 2'-O-methylguanosine-3'-phosphate
  modified_base 4: mod_base = OTHER; note = 2'-O-methylcytidine-3'-phosphate
  modified_base 5: mod_base = OTHER; note = 2'-O-methyladenosine-3'-phosphate
  modified_base 6: mod_base = OTHER; note = 2'-O-docosanyl-guanosine-3'-phosphate
  modified_base 7: mod_base = OTHER; note = 2'-deoxy-2'-fluorouridine-3'-phosphate
  modified_base 8: mod_base = OTHER; note = 2'-O-methyladenosine-3'-phosphate
  modified_base 9: mod_base = OTHER; note = 2'-deoxy-2'-fluorouridine-3'-phosphate
  modified_base 10: mod_base = OTHER; note = 2'-deoxy-2'-fluorocytidine-3'-phosphate
  modified_base 11: mod_base = OTHER; note = 2'-deoxy-2'-fluorouridine-3'-phosphate
  modified_base 12: mod_base = OTHER; note = 2'-O-methylguanosine-3'-phosphate
  modified_base 13: mod_base = OTHER; note = 2'-O-methyladenosine-3'-phosphate
  modified_base 14: mod_base = OTHER; note = 2'-O-methyladenosine-3'-phosphate
  modified_base 15: mod_base = OTHER; note = 2'-O-methyladenosine-3'-phosphate
  modified_base 16: mod_base = OTHER; note = 2'-O-methyladenosine-3'-phosphate
  modified_base 17: mod_base = OTHER; note = 2'-O-methyladenosine-3'-phosphate
  modified_base 18: mod_base = OTHER; note = 2'-O-methyladenosine-3'-phosphate
  modified_base 19: mod_base = OTHER; note = 2'-O-methyluridine-3'-phosphorothioate
  modified_base 20: mod_base = OTHER; note = 2'-O-methyluridine-3'-phosphorothioate
  modified_base 21: mod_base = OTHER; note = 2'-O-methyladenosine
ttgcagtatctgaaaaaatta

SEQ ID NO: 11544 - RNA, 21 nt, synthetic construct
  source 1..21: mol_type = other RNA
  modified_base 1: mod_base = OTHER; note = 2'-O-methyluridine-3'-phosphorothioate
  modified_base 2: mod_base = OTHER; note = 2'-O-methylguanosine-3'-phosphorothioate
  modified_base 3: mod_base = OTHER; note = 2'-O-methylcytidine-3'-phosphate
  modified_base 4: mod_base = OTHER; note = 2'-O-methyladenosine-3'-phosphate
  modified_base 5: mod_base = OTHER; note = 2'-O-methylguanosine-3'-phosphate
  modified_base 6: mod_base = OTHER; note = 2'-O-docosanyl-uridine-3'-phosphate
  modified_base 7: mod_base = OTHER; note = 2'-deoxy-2'-fluoroadenosine-3'-phosphate
  modified_base 8: mod_base = OTHER; note = 2'-O-methyluridine-3'-phosphate
  modified_base 9: mod_base = OTHER; note = 2'-deoxy-2'-fluorocytidine-3'-phosphate
  modified_base 10: mod_base = OTHER; note = 2'-deoxy-2'-fluorouridine-3'-phosphate
  modified_base 11: mod_base = OTHER; note = 2'-deoxy-2'-fluoroguanosine-3'-phosphate
  modified_base 12: mod_base = OTHER; note = 2'-O-methyladenosine-3'-phosphate
  modified_base 13: mod_base = OTHER; note = 2'-O-methyladenosine-3'-phosphate
  modified_base 14: mod_base = OTHER; note = 2'-O-methyladenosine-3'-phosphate
  modified_base 15: mod_base = OTHER; note = 2'-O-methyladenosine-3'-phosphate
  modified_base 16: mod_base = OTHER; note = 2'-O-methyladenosine-3'-phosphate
  modified_base 17: mod_base = OTHER; note = 2'-O-methyladenosine-3'-phosphate
  modified_base 18: mod_base = OTHER; note = 2'-O-methyluridine-3'-phosphate
  modified_base 19: mod_base = OTHER; note = 2'-O-methyluridine-3'-phosphorothioate
  modified_base 20: mod_base = OTHER; note = 2'-O-methyladenosine-3'-phosphorothioate
  modified_base 21: mod_base = OTHER; note = 2'-O-methyladenosine
tgcagtatctgaaaaaattaa

SEQ ID NO: 11545 - RNA, 21 nt, synthetic construct
  source 1..21: mol_type = other RNA
  modified_base 1: mod_base = OTHER; note = 2'-O-methyladenosine-3'-phosphorothioate
  modified_base 2: mod_base = OTHER; note = 2'-O-methyluridine-3'-phosphorothioate
  modified_base 3: mod_base = OTHER; note = 2'-O-methyluridine-3'-phosphate
  modified_base 4: mod_base = OTHER; note = 2'-O-methylcytidine-3'-phosphate
  modified_base 5: mod_base = OTHER; note = 2'-O-methyladenosine-3'-phosphate
  modified_base 6: mod_base = OTHER; note = 2'-O-docosanyl-uridine-3'-phosphate
  modified_base 7: mod_base = OTHER; note = 2'-deoxy-2'-fluorouridine-3'-phosphate
  modified_base 8: mod_base = OTHER; note = 2'-O-methyladenosine-3'-phosphate
  modified_base 9: mod_base = OTHER; note = 2'-deoxy-2'-fluoroguanosine-3'-phosphate
  modified_base 10: mod_base = OTHER; note = 2'-deoxy-2'-fluoroguanosine-3'-phosphate
  modified_base 11: mod_base = OTHER; note = 2'-deoxy-2'-fluorouridine-3'-phosphate
  modified_base 12: mod_base = OTHER; note = 2'-O-methyluridine-3'-phosphate
  modified_base 13: mod_base = OTHER; note = 2'-O-methyladenosine-3'-phosphate
  modified_base 14: mod_base = OTHER; note = 2'-O-methylguanosine-3'-phosphate
  modified_base 15: mod_base = OTHER; note = 2'-O-methyladenosine-3'-phosphate
  modified_base 16: mod_base = OTHER; note = 2'-O-methyladenosine-3'-phosphate
  modified_base 17: mod_base = OTHER; note = 2'-O-methylguanosine-3'-phosphate
  modified_base 18: mod_base = OTHER; note = 2'-O-methyluridine-3'-phosphate
  modified_base 19: mod_base = OTHER; note = 2'-O-methyluridine-3'-phosphorothioate
  modified_base 20: mod_base = OTHER; note = 2'-O-methylcytidine-3'-phosphorothioate
  modified_base 21: mod_base = OTHER; note = 2'-O-methyladenosine
attcattaggttagaagttca

SEQ ID NO: 11546 - RNA, 21 nt, synthetic construct
  source 1..21: mol_type = other RNA
  modified_base 1: mod_base = OTHER; note = 2'-O-methyluridine-3'-phosphorothioate
  modified_base 2: mod_base = OTHER; note = 2'-O-methyladenosine-3'-phosphorothioate
  modified_base 3: mod_base = OTHER; note = 2'-O-methylguanosine-3'-phosphate
  modified_base 4: mod_base = OTHER; note = 2'-O-methyladenosine-3'-phosphate
  modified_base 5: mod_base = OTHER; note = 2'-O-methyladenosine-3'-phosphate
  modified_base 6: mod_base = OTHER; note = 2'-O-docosanyl-guanosine-3'-phosphate
  modified_base 7: mod_base = OTHER; note = 2'-deoxy-2'-fluorouridine-3'-phosphate
  modified_base 8: mod_base = OTHER; note = 2'-O-methyluridine-3'-phosphate
  modified_base 9: mod_base = OTHER; note = 2'-deoxy-2'-fluorocytidine-3'-phosphate
  modified_base 10: mod_base = OTHER; note = 2'-deoxy-2'-fluorocytidine-3'-phosphate
  modified_base 11: mod_base = OTHER; note = 2'-deoxy-2'-fluoroadenosine-3'-phosphate
  modified_base 12: mod_base = OTHER; note = 2'-O-methylguanosine-3'-phosphate
  modified_base 13: mod_base = OTHER; note = 2'-O-methyladenosine-3'-phosphate
  modified_base 14: mod_base = OTHER; note = 2'-O-methyladenosine-3'-phosphate
  modified_base 15: mod_base = OTHER; note = 2'-O-methyluridine-3'-phosphate
  modified_base 16: mod_base = OTHER; note = 2'-O-methyladenosine-3'-phosphate
  modified_base 17: mod_base = OTHER; note = 2'-O-methyladenosine-3'-phosphate
  modified_base 18: mod_base = OTHER; note = 2'-O-methyluridine-3'-phosphate
  modified_base 19: mod_base = OTHER; note = 2'-O-methyluridine-3'-phosphorothioate
  modified_base 20: mod_base = OTHER; note = 2'-O-methyluridine-3'-phosphorothioate
  modified_base 21: mod_base = OTHER; note = 2'-O-methyladenosine
tagaagttccagaataattta

SEQ ID NO: 11547 - RNA, 21 nt, synthetic construct
  source 1..21: mol_type = other RNA
  modified_base 1: mod_base = OTHER; note = 2'-O-methyladenosine-3'-phosphorothioate
  modified_base 2: mod_base = OTHER; note = 2'-O-methylcytidine-3'-phosphorothioate
  modified_base 3: mod_base = OTHER; note = 2'-O-methylcytidine-3'-phosphate
  modified_base 4: mod_base = OTHER; note = 2'-O-methyluridine-3'-phosphate
  modified_base 5: mod_base = OTHER; note = 2'-O-methyladenosine-3'-phosphate
  modified_base 6: mod_base = OTHER; note = 2'-O-docosanyl-cytidine-3'-phosphate
  modified_base 7: mod_base = OTHER; note = 2'-deoxy-2'-fluorouridine-3'-phosphate
  modified_base 8: mod_base = OTHER; note = 2'-O-methyladenosine-3'-phosphate
  modified_base 9: mod_base = OTHER; note = 2'-deoxy-2'-fluorouridine-3'-phosphate
  modified_base 10: mod_base = OTHER; note = 2'-deoxy-2'-fluorouridine-3'-phosphate
  modified_base 11: mod_base = OTHER; note = 2'-deoxy-2'-fluoroguanosine-3'-phosphate
  modified_base 12: mod_base = OTHER; note = 2'-O-methyluridine-3'-phosphate
  modified_base 13: mod_base = OTHER; note = 2'-O-methyladenosine-3'-phosphate
  modified_base 14: mod_base = OTHER; note = 2'-O-methylguanosine-3'-phosphate
  modified_base 15: mod_base = OTHER; note = 2'-O-methyladenosine-3'-phosphate
  modified_base 16: mod_base = OTHER; note = 2'-O-methyladenosine-3'-phosphate
  modified_base 17: mod_base = OTHER; note = 2'-O-methyluridine-3'-phosphate
  modified_base 18: mod_base = OTHER; note = 2'-O-methyluridine-3'-phosphate
  modified_base 19: mod_base = OTHER; note = 2'-O-methyladenosine-3'-phosphorothioate
  modified_base 20: mod_base = OTHER; note = 2'-O-methylcytidine-3'-phosphorothioate
  modified_base 21: mod_base = OTHER; note = 2'-O-methyladenosine
acctactattgtagaattaca

SEQ ID NO: 11548 - RNA, 21 nt, synthetic construct
  source 1..21: mol_type = other RNA
  modified_base 1: mod_base = OTHER; note = 2'-O-methylcytidine-3'-phosphorothioate
  modified_base 2: mod_base = OTHER; note = 2'-O-methyladenosine-3'-phosphorothioate
  modified_base 3: mod_base = OTHER; note = 2'-O-methyladenosine-3'-phosphate
  modified_base 4: mod_base = OTHER; note = 2'-O-methyladenosine-3'-phosphate
  modified_base 5: mod_base = OTHER; note = 2'-O-methyladenosine-3'-phosphate
  modified_base 6: mod_base = OTHER; note = 2'-O-docosanyl-cytidine-3'-phosphate
  modified_base 7: mod_base = OTHER; note = 2'-deoxy-2'-fluoroadenosine-3'-phosphate
  modified_base 8: mod_base = OTHER; note = 2'-O-methyladenosine-3'-phosphate
  modified_base 9: mod_base = OTHER; note = 2'-deoxy-2'-fluoroadenosine-3'-phosphate
  modified_base 10: mod_base = OTHER; note = 2'-deoxy-2'-fluoroadenosine-3'-phosphate
  modified_base 11: mod_base = OTHER; note = 2'-deoxy-2'-fluorocytidine-3'-phosphate
  modified_base 12: mod_base = OTHER; note = 2'-O-methyluridine-3'-phosphate
  modified_base 13: mod_base = OTHER; note = 2'-O-methyladenosine-3'-phosphate
  modified_base 14: mod_base = OTHER; note = 2'-O-methylcytidine-3'-phosphate
  modified_base 15: mod_base = OTHER; note = 2'-O-methyluridine-3'-phosphate
  modified_base 16: mod_base = OTHER; note = 2'-O-methylcytidine-3'-phosphate
  modified_base 17: mod_base = OTHER; note = 2'-O-methylcytidine-3'-phosphate
  modified_base 18: mod_base = OTHER; note = 2'-O-methyluridine-3'-phosphate
  modified_base 19: mod_base = OTHER; note = 2'-O-methyladenosine-3'-phosphorothioate
  modified_base 20: mod_base = OTHER; note = 2'-O-methyluridine-3'-phosphorothioate
  modified_base 21: mod_base = OTHER; note = 2'-O-methyladenosine
caaaacaaaactactcctata

SEQ ID NO: 11549 - RNA, 21 nt, synthetic construct
  source 1..21: mol_type = other RNA
  modified_base 1: mod_base = OTHER; note = 2'-O-methyladenosine-3'-phosphorothioate
  modified_base 2: mod_base = OTHER; note = 2'-O-methyladenosine-3'-phosphorothioate
  modified_base 3: mod_base = OTHER; note = 2'-O-methyladenosine-3'-phosphate
  modified_base 4: mod_base = OTHER; note = 2'-O-methylcytidine-3'-phosphate
  modified_base 5: mod_base = OTHER; note = 2'-O-methyladenosine-3'-phosphate
  modified_base 6: mod_base = OTHER; note = 2'-O-docosanyl-adenosine-3'-phosphate
  modified_base 7: mod_base = OTHER; note = 2'-deoxy-2'-fluoroadenosine-3'-phosphate
  modified_base 8: mod_base = OTHER; note = 2'-O-methyladenosine-3'-phosphate
  modified_base 9: mod_base = OTHER; note = 2'-deoxy-2'-fluorocytidine-3'-phosphate
  modified_base 10: mod_base = OTHER; note = 2'-deoxy-2'-fluoroadenosine-3'-phosphate
  modified_base 11: mod_base = OTHER; note = 2'-deoxy-2'-fluoroadenosine-3'-phosphate
  modified_base 12: mod_base = OTHER; note = 2'-O-methyladenosine-3'-phosphate
  modified_base 13: mod_base = OTHER; note = 2'-O-methyladenosine-3'-phosphate
  modified_base 14: mod_base = OTHER; note = 2'-O-methylcytidine-3'-phosphate
  modified_base 15: mod_base = OTHER; note = 2'-O-methyluridine-3'-phosphate
  modified_base 16: mod_base = OTHER; note = 2'-O-methyladenosine-3'-phosphate
  modified_base 17: mod_base = OTHER; note = 2'-O-methylcytidine-3'-phosphate
  modified_base 18: mod_base = OTHER; note = 2'-O-methyluridine-3'-phosphate
  modified_base 19: mod_base = OTHER; note = 2'-O-methylcytidine-3'-phosphorothioate
  modified_base 20: mod_base = OTHER; note = 2'-O-methylcytidine-3'-phosphorothioate
  modified_base 21: mod_base = OTHER; note = 2'-O-methyladenosine
aaacaaaacaaaactactcca

SEQ ID NO: 11550 - RNA, 21 nt, synthetic construct
  source 1..21: mol_type = other RNA
  modified_base 1: mod_base = OTHER; note = 2'-O-methyladenosine-3'-phosphorothioate
  modified_base 2: mod_base = OTHER; note = 2'-O-methylcytidine-3'-phosphorothioate
  modified_base 3: mod_base = OTHER; note = 2'-O-methyladenosine-3'-phosphate
  modified_base 4: mod_base = OTHER; note = 2'-O-methyladenosine-3'-phosphate
  modified_base 5: mod_base = OTHER; note = 2'-O-methyladenosine-3'-phosphate
  modified_base 6: mod_base = OTHER; note = 2'-O-docosanyl-adenosine-3'-phosphate
  modified_base 7: mod_base = OTHER; note = 2'-deoxy-2'-fluorocytidine-3'-phosphate
  modified_base 8: mod_base = OTHER; note = 2'-O-methyladenosine-3'-phosphate
  modified_base 9: mod_base = OTHER; note = 2'-deoxy-2'-fluoroadenosine-3'-phosphate
  modified_base 10: mod_base = OTHER; note = 2'-deoxy-2'-fluoroadenosine-3'-phosphate
  modified_base 11: mod_base = OTHER; note = 2'-deoxy-2'-fluoroadenosine-3'-phosphate
  modified_base 12: mod_base = OTHER; note = 2'-O-methylcytidine-3'-phosphate
  modified_base 13: mod_base = OTHER; note = 2'-O-methyluridine-3'-phosphate
  modified_base 14: mod_base = OTHER; note = 2'-O-methyladenosine-3'-phosphate
  modified_base 15: mod_base = OTHER; note = 2'-O-methylcytidine-3'-phosphate
  modified_base 16: mod_base = OTHER; note = 2'-O-methyluridine-3'-phosphate
  modified_base 17: mod_base = OTHER; note = 2'-O-methylcytidine-3'-phosphate
  modified_base 18: mod_base = OTHER; note = 2'-O-methylcytidine-3'-phosphate
  modified_base 19: mod_base = OTHER; note = 2'-O-methyluridine-3'-phosphorothioate
  modified_base 20: mod_base = OTHER; note = 2'-O-methyladenosine-3'-phosphorothioate
  modified_base 21: mod_base = OTHER; note = 2'-O-methyladenosine
acaaaacaaaactactcctaa

SEQ ID NO: 11551 - RNA, 21 nt, synthetic construct
  source 1..21: mol_type = other RNA
  modified_base 1: mod_base = OTHER; note = 2'-O-methyladenosine-3'-phosphorothioate
  modified_base 2: mod_base = OTHER; note = 2'-O-methyladenosine-3'-phosphorothioate
  modified_base 3: mod_base = OTHER; note = 2'-O-methyladenosine-3'-phosphate
  modified_base 4: mod_base = OTHER; note = 2'-O-methyladenosine-3'-phosphate
  modified_base 5: mod_base = OTHER; note = 2'-O-methylcytidine-3'-phosphate
  modified_base 6: mod_base = OTHER; note = 2'-O-docosanyl-adenosine-3'-phosphate
  modified_base 7: mod_base = OTHER; note = 2'-deoxy-2'-fluoroadenosine-3'-phosphate
  modified_base 8: mod_base = OTHER; note = 2'-O-methyladenosine-3'-phosphate
  modified_base 9: mod_base = OTHER; note = 2'-deoxy-2'-fluoroadenosine-3'-phosphate
  modified_base 10: mod_base = OTHER; note = 2'-deoxy-2'-fluorocytidine-3'-phosphate
  modified_base 11: mod_base = OTHER; note = 2'-deoxy-2'-fluorouridine-3'-phosphate
  modified_base 12: mod_base = OTHER; note = 2'-O-methyladenosine-3'-phosphate
  modified_base 13: mod_base = OTHER; note = 2'-O-methylcytidine-3'-phosphate
  modified_base 14: mod_base = OTHER; note = 2'-O-methyluridine-3'-phosphate
  modified_base 15: mod_base = OTHER; note = 2'-O-methylcytidine-3'-phosphate
  modified_base 16: mod_base = OTHER; note = 2'-O-methylcytidine-3'-phosphate
  modified_base 17: mod_base = OTHER; note = 2'-O-methyluridine-3'-phosphate
  modified_base 18: mod_base = OTHER; note = 2'-O-methyladenosine-3'-phosphate
  modified_base 19: mod_base = OTHER; note = 2'-O-methyluridine-3'-phosphorothioate
  modified_base 20: mod_base = OTHER; note = 2'-O-methyluridine-3'-phosphorothioate
  modified_base 21: mod_base = OTHER; note = 2'-O-methyladenosine
aaaacaaaactactcctatta

SEQ ID NO: 11552 - RNA, 21 nt, synthetic construct
  source 1..21: mol_type = other RNA
  modified_base 1: mod_base = OTHER; note = 2'-O-methyladenosine-3'-phosphorothioate
  modified_base 2: mod_base = OTHER; note = 2'-O-methyladenosine-3'-phosphorothioate
  modified_base 3: mod_base = OTHER; note = 2'-O-methyladenosine-3'-phosphate
  modified_base 4: mod_base = OTHER; note = 2'-O-methylcytidine-3'-phosphate
  modified_base 5: mod_base = OTHER; note = 2'-O-methyladenosine-3'-phosphate
  modified_base 6: mod_base = OTHER; note = 2'-O-docosanyl-adenosine-3'-phosphate
  modified_base 7: mod_base = OTHER; note = 2'-deoxy-2'-fluoroadenosine-3'-phosphate
  modified_base 8: mod_base = OTHER; note = 2'-O-methyladenosine-3'-phosphate
  modified_base 9: mod_base = OTHER; note = 2'-deoxy-2'-fluorocytidine-3'-phosphate
  modified_base 10: mod_base = OTHER; note = 2'-deoxy-2'-fluorouridine-3'-phosphate
  modified_base 11: mod_base = OTHER; note = 2'-deoxy-2'-fluoroadenosine-3'-phosphate
  modified_base 12: mod_base = OTHER; note = 2'-O-methylcytidine-3'-phosphate
  modified_base 13: mod_base = OTHER; note = 2'-O-methyluridine-3'-phosphate
  modified_base 14: mod_base = OTHER; note = 2'-O-methylcytidine-3'-phosphate
  modified_base 15: mod_base = OTHER; note = 2'-O-methylcytidine-3'-phosphate
  modified_base 16: mod_base = OTHER; note = 2'-O-methyluridine-3'-phosphate
  modified_base 17: mod_base = OTHER; note = 2'-O-methyladenosine-3'-phosphate
  modified_base 18: mod_base = OTHER; note = 2'-O-methyluridine-3'-phosphate
  modified_base 19: mod_base = OTHER; note = 2'-O-methyluridine-3'-phosphorothioate
  modified_base 20: mod_base = OTHER; note = 2'-O-methyluridine-3'-phosphorothioate
  modified_base 21: mod_base = OTHER; note = 2'-O-methyladenosine
aaacaaaactactcctattta

SEQ ID NO: 11553 - RNA, 21 nt, synthetic construct
  source 1..21: mol_type = other RNA
  modified_base 1: mod_base = OTHER; note = 2'-O-methyladenosine-3'-phosphorothioate
  modified_base 2: mod_base = OTHER; note = 2'-O-methylcytidine-3'-phosphorothioate
  modified_base 3: mod_base = OTHER; note = 2'-O-methyladenosine-3'-phosphate
  modified_base 4: mod_base = OTHER; note = 2'-O-methyladenosine-3'-phosphate
  modified_base 5: mod_base = OTHER; note = 2'-O-methyladenosine-3'-phosphate
  modified_base 6: mod_base = OTHER; note = 2'-O-docosanyl-adenosine-3'-phosphate
  modified_base 7: mod_base = OTHER; note = 2'-deoxy-2'-fluorocytidine-3'-phosphate
  modified_base 8: mod_base = OTHER; note = 2'-O-methyluridine-3'-phosphate
  modified_base 9: mod_base = OTHER; note = 2'-deoxy-2'-fluoroadenosine-3'-phosphate
  modified_base 10: mod_base = OTHER; note = 2'-deoxy-2'-fluorocytidine-3'-phosphate
  modified_base 11: mod_base = OTHER; note = 2'-deoxy-2'-fluorouridine-3'-phosphate
  modified_base 12: mod_base = OTHER; note = 2'-O-methylcytidine-3'-phosphate
  modified_base 13: mod_base = OTHER; note = 2'-O-methylcytidine-3'-phosphate
  modified_base 14: mod_base = OTHER; note = 2'-O-methyluridine-3'-phosphate
  modified_base 15: mod_base = OTHER; note = 2'-O-methyladenosine-3'-phosphate
  modified_base 16: mod_base = OTHER; note = 2'-O-methyluridine-3'-phosphate
  modified_base 17: mod_base = OTHER; note = 2'-O-methyluridine-3'-phosphate
  modified_base 18: mod_base = OTHER; note = 2'-O-methyluridine-3'-phosphate
  modified_base 19: mod_base = OTHER; note = 2'-O-methyluridine-3'-phosphorothioate
  modified_base 20: mod_base = OTHER; note = 2'-O-methylcytidine-3'-phosphorothioate
  modified_base 21: mod_base = OTHER; note = 2'-O-methyladenosine
acaaaactactcctattttca

SEQ ID NO: 11554 - RNA, 21 nt, synthetic construct
  source 1..21: mol_type = other RNA
  modified_base 1: mod_base = OTHER; note = 2'-O-methylcytidine-3'-phosphorothioate
  modified_base 2: mod_base = OTHER; note = 2'-O-methyladenosine-3'-phosphorothioate
  modified_base 3: mod_base = OTHER; note = 2'-O-methyladenosine-3'-phosphate
  modified_base 4: mod_base = OTHER; note = 2'-O-methyladenosine-3'-phosphate
  modified_base 5: mod_base = OTHER; note = 2'-O-methyladenosine-3'-phosphate
  modified_base 6: mod_base = OTHER; note = 2'-O-docosanyl-cytidine-3'-phosphate
  modified_base 7: mod_base = OTHER; note = 2'-deoxy-2'-fluorouridine-3'-phosphate
  modified_base 8: mod_base = OTHER; note = 2'-O-methyladenosine-3'-phosphate
  modified_base 9: mod_base = OTHER; note = 2'-deoxy-2'-fluorocytidine-3'-phosphate
  modified_base 10: mod_base = OTHER; note = 2'-deoxy-2'-fluorouridine-3'-phosphate
  modified_base 11: mod_base = OTHER; note = 2'-deoxy-2'-fluorocytidine-3'-phosphate
  modified_base 12: mod_base = OTHER; note = 2'-O-methylcytidine-3'-phosphate
  modified_base 13: mod_base = OTHER; note = 2'-O-methyluridine-3'-phosphate
  modified_base 14: mod_base = OTHER; note = 2'-O-methyladenosine-3'-phosphate
  modified_base 15: mod_base = OTHER; note = 2'-O-methyluridine-3'-phosphate
  modified_base 16: mod_base = OTHER; note = 2'-O-methyluridine-3'-phosphate
  modified_base 17: mod_base = OTHER; note = 2'-O-methyluridine-3'-phosphate
  modified_base 18: mod_base = OTHER; note = 2'-O-methyluridine-3'-phosphate
  modified_base 19: mod_base = OTHER; note = 2'-O-methylcytidine-3'-phosphorothioate
  modified_base 20: mod_base = OTHER; note = 2'-O-methylcytidine-3'-phosphorothioate
  modified_base 21: mod_base = OTHER; note = 2'-O-methyladenosine
caaaactactcctattttcca

SEQ ID NO: 11555 - RNA, 21 nt, synthetic construct
  source 1..21: mol_type = other RNA
  modified_base 1: mod_base = OTHER; note = 2'-O-methyladenosine-3'-phosphorothioate
  modified_base 2: mod_base = OTHER; note = 2'-O-methyladenosine-3'-phosphorothioate
  modified_base 3: mod_base = OTHER; note = 2'-O-methyladenosine-3'-phosphate
  modified_base 4: mod_base = OTHER; note = 2'-O-methyladenosine-3'-phosphate
  modified_base 5: mod_base = OTHER; note = 2'-O-methylcytidine-3'-phosphate
  modified_base 6: mod_base = OTHER; note = 2'-O-docosanyl-uridine-3'-phosphate
  modified_base 7: mod_base = OTHER; note = 2'-deoxy-2'-fluoroadenosine-3'-phosphate
  modified_base 8: mod_base = OTHER; note = 2'-O-methylcytidine-3'-phosphate
  modified_base 9: mod_base = OTHER; note = 2'-deoxy-2'-fluorouridine-3'-phosphate
  modified_base 10: mod_base = OTHER; note = 2'-deoxy-2'-fluorocytidine-3'-phosphate
  modified_base 11: mod_base = OTHER; note = 2'-deoxy-2'-fluorocytidine-3'-phosphate
  modified_base 12: mod_base = OTHER; note = 2'-O-methyluridine-3'-phosphate
  modified_base 13: mod_base = OTHER; note = 2'-O-methyladenosine-3'-phosphate
  modified_base 14: mod_base = OTHER; note = 2'-O-methyluridine-3'-phosphate
  modified_base 15: mod_base = OTHER; note = 2'-O-methyluridine-3'-phosphate
  modified_base 16: mod_base = OTHER; note = 2'-O-methyluridine-3'-phosphate
  modified_base 17: mod_base = OTHER; note = 2'-O-methyluridine-3'-phosphate
  modified_base 18: mod_base = OTHER; note = 2'-O-methylcytidine-3'-phosphate
  modified_base 19: mod_base = OTHER; note = 2'-O-methylcytidine-3'-phosphorothioate
  modified_base 20: mod_base = OTHER; note = 2'-O-methyluridine-3'-phosphorothioate
  modified_base 21: mod_base = OTHER; note = 2'-O-methyladenosine
aaaactactcctattttccta

SEQ ID NO: 11556 - RNA, 21 nt, synthetic construct
  source 1..21: mol_type = other RNA
  modified_base 1: mod_base = OTHER; note = 2'-O-methyladenosine-3'-phosphorothioate
  modified_base 2: mod_base = OTHER; note = 2'-O-methyluridine-3'-phosphorothioate
  modified_base 3: mod_base = OTHER; note = 2'-O-methyluridine-3'-phosphate
  modified_base 4: mod_base = OTHER; note = 2'-O-methyluridine-3'-phosphate
  modified_base 5: mod_base = OTHER; note = 2'-O-methyluridine-3'-phosphate
  modified_base 6: mod_base = OTHER; note = 2'-O-docosanyl-cytidine-3'-phosphate
  modified_base 7: mod_base = OTHER; note = 2'-deoxy-2'-fluorocytidine-3'-phosphate
  modified_base 8: mod_base = OTHER; note = 2'-O-methyluridine-3'-phosphate
  modified_base 9: mod_base = OTHER; note = 2'-deoxy-2'-fluoroguanosine-3'-phosphate
  modified_base 10: mod_base = OTHER; note = 2'-deoxy-2'-fluoroguanosine-3'-phosphate
  modified_base 11: mod_base = OTHER; note = 2'-deoxy-2'-fluoroadenosine-3'-phosphate
  modified_base 12: mod_base = OTHER; note = 2'-O-methyladenosine-3'-phosphate
  modified_base 13: mod_base = OTHER; note = 2'-O-methyluridine-3'-phosphate
  modified_base 14: mod_base = OTHER; note = 2'-O-methyluridine-3'-phosphate
  modified_base 15: mod_base = OTHER; note = 2'-O-methyluridine-3'-phosphate
  modified_base 16: mod_base = OTHER; note = 2'-O-methyluridine-3'-phosphate
  modified_base 17: mod_base = OTHER; note = 2'-O-methylguanosine-3'-phosphate
  modified_base 18: mod_base = OTHER; note = 2'-O-methylcytidine-3'-phosphate
  modified_base 19: mod_base = OTHER; note = 2'-O-methylcytidine-3'-phosphorothioate
  modified_base 20: mod_base = OTHER; note = 2'-O-methyladenosine-3'-phosphorothioate
  modified_base 21: mod_base = OTHER; note = 2'-O-methyladenosine
attttcctggaattttgccaa

SEQ ID NO: 11557 - RNA, 21 nt, synthetic construct
  source 1..21: mol_type = other RNA
  modified_base 1: mod_base = OTHER; note = 2'-O-methylguanosine-3'-phosphorothioate
  modified_base 2: mod_base = OTHER; note = 2'-O-methyladenosine-3'-phosphorothioate
  modified_base 3: mod_base = OTHER; note = 2'-O-methyluridine-3'-phosphate
  modified_base 4: mod_base = OTHER; note = 2'-O-methylguanosine-3'-phosphate
  modified_base 5: mod_base = OTHER; note = 2'-O-methyluridine-3'-phosphate
  modified_base 6: mod_base = OTHER; note = 2'-O-docosanyl-uridine-3'-phosphate
  modified_base 7: mod_base = OTHER; note = 2'-deoxy-2'-fluorouridine-3'-phosphate
  modified_base 8: mod_base = OTHER; note = 2'-O-methylguanosine-3'-phosphate
  modified_base 9: mod_base = OTHER; note = 2'-deoxy-2'-fluorocytidine-3'-phosphate
  modified_base 10: mod_base = OTHER; note = 2'-deoxy-2'-fluorocytidine-3'-phosphate
  modified_base 11: mod_base = OTHER; note = 2'-deoxy-2'-fluoroadenosine-3'-phosphate
  modified_base 12: mod_base = OTHER; note = 2'-O-methyluridine-3'-phosphate
  modified_base 13: mod_base = OTHER; note = 2'-O-methyluridine-3'-phosphate
  modified_base 14: mod_base = OTHER; note = 2'-O-methyladenosine-3'-phosphate
  modified_base 15: mod_base = OTHER; note = 2'-O-methyluridine-3'-phosphate
  modified_base 16: mod_base = OTHER; note = 2'-O-methyladenosine-3'-phosphate
  modified_base 17: mod_base = OTHER; note = 2'-O-methylcytidine-3'-phosphate
  modified_base 18: mod_base = OTHER; note = 2'-O-methyladenosine-3'-phosphate
  modified_base 19: mod_base = OTHER; note = 2'-O-methyladenosine-3'-phosphorothioate
  modified_base 20: mod_base = OTHER; note = 2'-O-methyladenosine-3'-phosphorothioate
  modified_base 21: mod_base = OTHER; note = 2'-O-methyladenosine
gatgtttgccattatacaaaa

SEQ ID NO: 11558 - RNA, 21 nt, synthetic construct
  source 1..21: mol_type = other RNA
  modified_base 1: mod_base = OTHER; note = 2'-O-methylguanosine-3'-phosphorothioate
  modified_base 2: mod_base = OTHER; note = 2'-O-methyluridine-3'-phosphorothioate
  modified_base 3: mod_base = OTHER; note = 2'-O-methyladenosine-3'-phosphate
  modified_base 4: mod_base = OTHER; note = 2'-O-methyladenosine-3'-phosphate
  modified_base 5: mod_base = OTHER; note = 2'-O-methyladenosine-3'-phosphate
  modified_base 6: mod_base = OTHER; note = 2'-O-docosanyl-cytidine-3'-phosphate
  modified_base 7: mod_base = OTHER; note = 2'-deoxy-2'-fluoroadenosine-3'-phosphate
  modified_base 8: mod_base = OTHER; note = 2'-O-methyladenosine-3'-phosphate
  modified_base 9: mod_base = OTHER; note = 2'-deoxy-2'-fluorocytidine-3'-phosphate
  modified_base 10: mod_base = OTHER; note = 2'-deoxy-2'-fluorouridine-3'-phosphate
  modified_base 11: mod_base = OTHER; note = 2'-deoxy-2'-fluorouridine-3'-phosphate
  modified_base 12: mod_base = OTHER; note = 2'-O-methyladenosine-3'-phosphate
  modified_base 13: mod_base = OTHER; note = 2'-O-methyladenosine-3'-phosphate
  modified_base 14: mod_base = OTHER; note = 2'-O-methyladenosine-3'-phosphate
  modified_base 15: mod_base = OTHER; note = 2'-O-methyladenosine-3'-phosphate
  modified_base 16: mod_base = OTHER; note = 2'-O-methyluridine-3'-phosphate
  modified_base 17: mod_base = OTHER; note = 2'-O-methyluridine-3'-phosphate
  modified_base 18: mod_base = OTHER; note = 2'-O-methylguanosine-3'-phosphate
  modified_base 19: mod_base = OTHER; note = 2'-O-methylcytidine-3'-phosphorothioate
  modified_base 20: mod_base = OTHER; note = 2'-O-methyluridine-3'-phosphorothioate
  modified_base 21: mod_base = OTHER; note = 2'-O-methyladenosine
gtaaacaacttaaaattgcta

SEQ ID NO: 11559 - RNA, 21 nt, synthetic construct
  source 1..21: mol_type = other RNA
  modified_base 1: mod_base = OTHER; note = 2'-O-methylcytidine-3'-phosphorothioate
  modified_base 2: mod_base = OTHER; note = 2'-O-methyladenosine-3'-phosphorothioate
  modified_base 3: mod_base = OTHER; note = 2'-O-methyladenosine-3'-phosphate
  modified_base 4: mod_base = OTHER; note = 2'-O-methyladenosine-3'-phosphate
  modified_base 5: mod_base = OTHER; note = 2'-O-methylguanosine-3'-phosphate
  modified_base 6: mod_base = OTHER; note = 2'-O-docosanyl-uridine-3'-phosphate
  modified_base 7: mod_base = OTHER; note = 2'-deoxy-2'-fluorouridine-3'-phosphate
  modified_base 8: mod_base = OTHER; note = 2'-O-methyluridine-3'-phosphate
  modified_base 9: mod_base = OTHER; note = 2'-deoxy-2'-fluoroguanosine-3'-phosphate
  modified_base 10: mod_base = OTHER; note = 2'-deoxy-2'-fluoroadenosine-3'-phosphate
  modified_base 11: mod_base = OTHER; note = 2'-deoxy-2'-fluoroguanosine-3'-phosphate
  modified_base 12: mod_base = OTHER; note = 2'-O-methyluridine-3'-phosphate
  modified_base 13: mod_base = OTHER; note = 2'-O-methyladenosine-3'-phosphate
  modified_base 14: mod_base = OTHER; note = 2'-O-methyladenosine-3'-phosphate
  modified_base 15: mod_base = OTHER; note = 2'-O-methyladenosine-3'-phosphate
  modified_base 16: mod_base = OTHER; note = 2'-O-methylcytidine-3'-phosphate
  modified_base 17: mod_base = OTHER; note = 2'-O-methyladenosine-3'-phosphate
  modified_base 18: mod_base = OTHER; note = 2'-O-methyladenosine-3'-phosphate
  modified_base 19: mod_base = OTHER; note = 2'-O-methylcytidine-3'-phosphorothioate
  modified_base 20: mod_base = OTHER; note = 2'-O-methyluridine-3'-phosphorothioate
  modified_base 21: mod_base = OTHER; note = 2'-O-methyladenosine
caaagtttgagtaaacaacta

SEQ ID NO: 11560 - RNA, 21 nt, synthetic construct
  source 1..21: mol_type = other RNA
  modified_base 1: mod_base = OTHER; note = 2'-O-methyladenosine-3'-phosphorothioate
  modified_base 2: mod_base = OTHER; note = 2'-O-methyladenosine-3'-phosphorothioate
  modified_base 3: mod_base = OTHER; note = 2'-O-methyladenosine-3'-phosphate
  modified_base 4: mod_base = OTHER; note = 2'-O-methylguanosine-3'-phosphate
  modified_base 5: mod_base = OTHER; note = 2'-O-methyluridine-3'-phosphate
  modified_base 6: mod_base = OTHER; note = 2'-O-docosanyl-uridine-3'-phosphate
  modified_base 7: mod_base = OTHER; note = 2'-deoxy-2'-fluorouridine-3'-phosphate
  modified_base 8: mod_base = OTHER; note = 2'-O-methylguanosine-3'-phosphate
  modified_base 9: mod_base = OTHER; note = 2'-deoxy-2'-fluoroadenosine-3'-phosphate
  modified_base 10: mod_base = OTHER; note = 2'-deoxy-2'-fluoroguanosine-3'-phosphate
  modified_base 11: mod_base = OTHER; note = 2'-deoxy-2'-fluorouridine-3'-phosphate
  modified_base 12: mod_base = OTHER; note = 2'-O-methyladenosine-3'-phosphate
  modified_base 13: mod_base = OTHER; note = 2'-O-methyladenosine-3'-phosphate
  modified_base 14: mod_base = OTHER; note = 2'-O-methyladenosine-3'-phosphate
  modified_base 15: mod_base = OTHER; note = 2'-O-methylcytidine-3'-phosphate
  modified_base 16: mod_base = OTHER; note = 2'-O-methyladenosine-3'-phosphate
  modified_base 17: mod_base = OTHER; note = 2'-O-methyladenosine-3'-phosphate
  modified_base 18: mod_base = OTHER; note = 2'-O-methylcytidine-3'-phosphate
  modified_base 19: mod_base = OTHER; note = 2'-O-methyluridine-3'-phosphorothioate
  modified_base 20: mod_base = OTHER; note = 2'-O-methyluridine-3'-phosphorothioate
  modified_base 21: mod_base = OTHER; note = 2'-O-methyladenosine
aaagtttgagtaaacaactta

SEQ ID NO: 11561 - RNA, 21 nt, synthetic construct
  source 1..21: mol_type = other RNA
  modified_base 1: mod_base = OTHER; note = 2'-O-methyladenosine-3'-phosphorothioate
  modified_base 2: mod_base = OTHER; note = 2'-O-methyladenosine-3'-phosphorothioate
  modified_base 3: mod_base = OTHER; note = 2'-O-methylguanosine-3'-phosphate
  modified_base 4: mod_base = OTHER; note = 2'-O-methyluridine-3'-phosphate
  modified_base 5: mod_base = OTHER; note = 2'-O-methyluridine-3'-phosphate
  modified_base 6: mod_base = OTHER; note = 2'-O-docosanyl-uridine-3'-phosphate
  modified_base 7: mod_base = OTHER; note = 2'-deoxy-2'-fluoroguanosine-3'-phosphate
  modified_base 8: mod_base = OTHER; note = 2'-O-methyladenosine-3'-phosphate
  modified_base 9: mod_base = OTHER; note = 2'-deoxy-2'-fluoroguanosine-3'-phosphate
  modified_base 10: mod_base = OTHER; note = 2'-deoxy-2'-fluorouridine-3'-phosphate
  modified_base 11: mod_base = OTHER; note = 2'-deoxy-2'-fluoroadenosine-3'-phosphate
  modified_base 12: mod_base = OTHER; note = 2'-O-methyladenosine-3'-phosphate
  modified_base 13: mod_base = OTHER; note = 2'-O-methyladenosine-3'-phosphate
  modified_base 14: mod_base = OTHER; note = 2'-O-methylcytidine-3'-phosphate
  modified_base 15: mod_base = OTHER; note = 2'-O-methyladenosine-3'-phosphate
  modified_base 16: mod_base = OTHER; note = 2'-O-methyladenosine-3'-phosphate
  modified_base 17: mod_base = OTHER; note = 2'-O-methylcytidine-3'-phosphate
  modified_base 18: mod_base = OTHER; note = 2'-O-methyluridine-3'-phosphate
  modified_base 19: mod_base = OTHER; note = 2'-O-methyluridine-3'-phosphorothioate
  modified_base 20: mod_base = OTHER; note = 2'-O-methyladenosine-3'-phosphorothioate
  modified_base 21: mod_base = OTHER; note = 2'-O-methyladenosine
aagtttgagtaaacaacttaa

SEQ ID NO: 11562 - RNA, 21 nt, synthetic construct
  source 1..21: mol_type = other RNA
  modified_base 1: mod_base = OTHER; note = 2'-O-methyladenosine-3'-phosphorothioate
  modified_base 2: mod_base = OTHER; note = 2'-O-methylguanosine-3'-phosphorothioate
  modified_base 3: mod_base = OTHER; note = 2'-O-methyluridine-3'-phosphate
  modified_base 4: mod_base = OTHER; note = 2'-O-methyladenosine-3'-phosphate
  modified_base 5: mod_base = OTHER; note = 2'-O-methyladenosine-3'-phosphate
  modified_base 6: mod_base = OTHER; note = 2'-O-docosanyl-adenosine-3'-phosphate
  modified_base 7: mod_base = OTHER; note = 2'-deoxy-2'-fluorocytidine-3'-phosphate
  modified_base 8: mod_base = OTHER; note = 2'-O-methyladenosine-3'-phosphate
  modified_base 9: mod_base = OTHER; note = 2'-deoxy-2'-fluoroadenosine-3'-phosphate
  modified_base 10: mod_base = OTHER; note = 2'-deoxy-2'-fluorocytidine-3'-phosphate
  modified_base 11: mod_base = OTHER; note = 2'-deoxy-2'-fluorouridine-3'-phosphate
  modified_base 12: mod_base = OTHER; note = 2'-O-methyluridine-3'-phosphate
  modified_base 13: mod_base = OTHER; note = 2'-O-methyladenosine-3'-phosphate
  modified_base 14: mod_base = OTHER; note = 2'-O-methyladenosine-3'-phosphate
  modified_base 15: mod_base = OTHER; note = 2'-O-methyladenosine-3'-phosphate
  modified_base 16: mod_base = OTHER; note = 2'-O-methyladenosine-3'-phosphate
  modified_base 17: mod_base = OTHER; note = 2'-O-methyluridine-3'-phosphate
  modified_base 18: mod_base = OTHER; note = 2'-O-methyluridine-3'-phosphate
  modified_base 19: mod_base = OTHER; note = 2'-O-methylguanosine-3'-phosphorothioate
  modified_base 20: mod_base = OTHER; note = 2'-O-methylcytidine-3'-phosphorothioate
  modified_base 21: mod_base = OTHER; note = 2'-O-methyladenosine
agtaaacaacttaaaattgca

SEQ ID NO: 11563 - RNA, 21 nt, synthetic construct
  source 1..21: mol_type = other RNA
  modified_base 1: mod_base = OTHER; note = 2'-O-methyladenosine-3'-phosphorothioate
  modified_base 2: mod_base = OTHER; note = 2'-O-methyladenosine-3'-phosphorothioate
  modified_base 3: mod_base = OTHER; note = 2'-O-methyladenosine-3'-phosphate
  modified_base 4: mod_base = OTHER; note = 2'-O-methylcytidine-3'-phosphate
  modified_base 5: mod_base = OTHER; note = 2'-O-methyladenosine-3'-phosphate
  modified_base 6: mod_base = OTHER; note = 2'-O-docosanyl-adenosine-3'-phosphate
  modified_base 7: mod_base = OTHER; note = 2'-deoxy-2'-fluorocytidine-3'-phosphate
  modified_base 8: mod_base = OTHER; note = 2'-O-methyluridine-3'-phosphate
  modified_base 9: mod_base = OTHER; note = 2'-deoxy-2'-fluorouridine-3'-phosphate
  modified_base 10: mod_base = OTHER; note = 2'-deoxy-2'-fluoroadenosine-3'-phosphate
  modified_base 11: mod_base = OTHER; note = 2'-deoxy-2'-fluoroadenosine-3'-phosphate
  modified_base 12: mod_base = OTHER; note = 2'-O-methyladenosine-3'-phosphate
  modified_base 13: mod_base = OTHER; note = 2'-O-methyladenosine-3'-phosphate
  modified_base 14: mod_base = OTHER; note = 2'-O-methyluridine-3'-phosphate
  modified_base 15: mod_base = OTHER; note = 2'-O-methyluridine-3'-phosphate
  modified_base 16: mod_base = OTHER; note = 2'-O-methylguanosine-3'-phosphate
  modified_base 17: mod_base = OTHER; note = 2'-O-methylcytidine-3'-phosphate
  modified_base 18: mod_base = OTHER; note = 2'-O-methyluridine-3'-phosphate
  modified_base 19: mod_base = OTHER; note = 2'-O-methyluridine-3'-phosphorothioate
  modified_base 20: mod_base = OTHER; note = 2'-O-methylguanosine-3'-phosphorothioate
  modified_base 21: mod_base = OTHER; note = 2'-O-methyladenosine
aaacaacttaaaattgcttga

SEQ ID NO: 11564 - RNA, 21 nt, synthetic construct
  source 1..21: mol_type = other RNA
  modified_base 1: mod_base = OTHER; note = 2'-O-methyladenosine-3'-phosphorothioate
  modified_base 2: mod_base = OTHER; note = 2'-O-methyluridine-3'-phosphorothioate
  modified_base 3: mod_base = OTHER; note = 2'-O-methyladenosine-3'-phosphate
  modified_base 4: mod_base = OTHER; note = 2'-O-methylguanosine-3'-phosphate
  modified_base 5: mod_base = OTHER; note = 2'-O-methyluridine-3'-phosphate
  modified_base 6: mod_base = OTHER; note = 2'-O-docosanyl-cytidine-3'-phosphate
  modified_base 7: mod_base = OTHER; note = 2'-deoxy-2'-fluorouridine-3'-phosphate
  modified_base 8: mod_base = OTHER; note = 2'-O-methyluridine-3'-phosphate
  modified_base 9: mod_base = OTHER; note = 2'-deoxy-2'-fluorouridine-3'-phosphate
  modified_base 10: mod_base = OTHER; note = 2'-deoxy-2'-fluoroguanosine-3'-phosphate
  modified_base 11: mod_base = OTHER; note = 2'-deoxy-2'-fluoroadenosine-3'-phosphate
  modified_base 12: mod_base = OTHER; note = 2'-O-methyluridine-3'-phosphate
  modified_base 13: mod_base = OTHER; note = 2'-O-methyluridine-3'-phosphate
  modified_base 14: mod_base = OTHER; note = 2'-O-methylguanosine-3'-phosphate
  modified_base 15: mod_base = OTHER; note = 2'-O-methyladenosine-3'-phosphate
  modified_base 16: mod_base = OTHER; note = 2'-O-methyladenosine-3'-phosphate
  modified_base 17: mod_base = OTHER; note = 2'-O-methyladenosine-3'-phosphate
  modified_base 18: mod_base = OTHER; note = 2'-O-methyluridine-3'-phosphate
  modified_base 19: mod_base = OTHER; note = 2'-O-methyladenosine-3'-phosphorothioate
  modified_base 20: mod_base = OTHER; note = 2'-O-methyladenosine-3'-phosphorothioate
  modified_base 21: mod_base = OTHER; note = 2'-O-methyladenosine
atagtctttgattgaaataaa

SEQ ID NO: 11565 - RNA, 21 nt, synthetic construct
  source 1..21: mol_type = other RNA
  modified_base 1: mod_base = OTHER; note = 2'-O-methylguanosine-3'-phosphorothioate
  modified_base 2: mod_base = OTHER; note = 2'-O-methyladenosine-3'-phosphorothioate
  modified_base 3: mod_base = OTHER; note = 2'-O-methylguanosine-3'-phosphate
  modified_base 4: mod_base = OTHER; note = 2'-O-methyladenosine-3'-phosphate
  modified_base 5: mod_base = OTHER; note = 2'-O-methyladenosine-3'-phosphate
  modified_base 6: mod_base = OTHER; note = 2'-O-docosanyl-uridine-3'-phosphate
  modified_base 7: mod_base = OTHER; note = 2'-deoxy-2'-fluoroguanosine-3'-phosphate
  modified_base 8: mod_base = OTHER; note = 2'-O-methyluridine-3'-phosphate
  modified_base 9: mod_base = OTHER; note = 2'-deoxy-2'-fluoroadenosine-3'-phosphate
  modified_base 10: mod_base = OTHER; note = 2'-deoxy-2'-fluorouridine-3'-phosphate
  modified_base 11: mod_base = OTHER; note = 2'-deoxy-2'-fluorouridine-3'-phosphate
  modified_base 12: mod_base = OTHER; note = 2'-O-methyluridine-3'-phosphate
  modified_base 13: mod_base = OTHER; note = 2'-O-methylguanosine-3'-phosphate
  modified_base 14: mod_base = OTHER; note = 2'-O-methylguanosine-3'-phosphate
  modified_base 15: mod_base = OTHER; note = 2'-O-methylcytidine-3'-phosphate
  modified_base 16: mod_base = OTHER; note = 2'-O-methyluridine-3'-phosphate
  modified_base 17: mod_base = OTHER; note = 2'-O-methyladenosine-3'-phosphate
  modified_base 18: mod_base = OTHER; note = 2'-O-methyladenosine-3'-phosphate
  modified_base 19: mod_base = OTHER; note = 2'-O-methyladenosine-3'-phosphorothioate
  modified_base 20: mod_base = OTHER; note = 2'-O-methyluridine-3'-phosphorothioate
  modified_base 21: mod_base = OTHER; note = 2'-O-methyladenosine
gagaatgtatttggctaaata

SEQ ID NO: 11566 - RNA, 21 nt, synthetic construct
  source 1..21: mol_type = other RNA
  modified_base 1: mod_base = OTHER; note = 2'-O-methylcytidine-3'-phosphorothioate
  modified_base 2: mod_base = OTHER; note = 2'-O-methyluridine-3'-phosphorothioate
  modified_base 3: mod_base = OTHER; note = 2'-O-methyluridine-3'-phosphate
  modified_base 4: mod_base = OTHER; note = 2'-O-methylcytidine-3'-phosphate
  modified_base 5: mod_base = OTHER; note = 2'-O-methyladenosine-3'-phosphate
  modified_base 6: mod_base = OTHER; note = 2'-O-docosanyl-adenosine-3'-phosphate
  modified_base 7: mod_base = OTHER; note = 2'-deoxy-2'-fluorouridine-3'-phosphate
  modified_base 8: mod_base = OTHER; note = 2'-O-methyladenosine-3'-phosphate
  modified_base 9: mod_base = OTHER; note = 2'-deoxy-2'-fluoroadenosine-3'-phosphate
  modified_base 10: mod_base = OTHER; note = 2'-deoxy-2'-fluorouridine-3'-phosphate
  modified_base 11: mod_base = OTHER; note = 2'-deoxy-2'-fluorocytidine-3'-phosphate
  modified_base 12: mod_base = OTHER; note = 2'-O-methyladenosine-3'-phosphate
  modified_base 13: mod_base = OTHER; note = 2'-O-methyluridine-3'-phosphate
  modified_base 14: mod_base = OTHER; note = 2'-O-methyluridine-3'-phosphate
  modified_base 15: mod_base = OTHER; note = 2'-O-methylcytidine-3'-phosphate
  modified_base 16: mod_base = OTHER; note = 2'-O-methylcytidine-3'-phosphate
  modified_base 17: mod_base = OTHER; note = 2'-O-methyluridine-3'-phosphate
  modified_base 18: mod_base = OTHER; note = 2'-O-methyluridine-3'-phosphate
  modified_base 19: mod_base = OTHER; note = 2'-O-methyluridine-3'-phosphorothioate
  modified_base 20: mod_base = OTHER; note = 2'-O-methyladenosine-3'-phosphorothioate
  modified_base 21: mod_base = OTHER; note = 2'-O-methyladenosine
cttcaataatcattcctttaa

SEQ ID NO: 11567 - RNA, 21 nt, synthetic construct
  source 1..21: mol_type = other RNA
  modified_base 1: mod_base = OTHER; note = 2'-O-methyluridine-3'-phosphorothioate
  modified_base 2: mod_base = OTHER; note = 2'-O-methylcytidine-3'-phosphorothioate
  modified_base 3: mod_base = OTHER; note = 2'-O-methyladenosine-3'-phosphate
  modified_base 4: mod_base = OTHER; note = 2'-O-methylcytidine-3'-phosphate
  modified_base 5: mod_base = OTHER; note = 2'-O-methyladenosine-3'-phosphate
  modified_base 6: mod_base = OTHER; note = 2'-O-docosanyl-adenosine-3'-phosphate
  modified_base 7: mod_base = OTHER; note = 2'-deoxy-2'-fluoroadenosine-3'-phosphate
  modified_base 8: mod_base = OTHER; note = 2'-O-methylcytidine-3'-phosphate
  modified_base 9: mod_base = OTHER; note = 2'-deoxy-2'-fluoroadenosine-3'-phosphate
  modified_base 10: mod_base = OTHER; note = 2'-deoxy-2'-fluorocytidine-3'-phosphate
  modified_base 11: mod_base = OTHER; note = 2'-deoxy-2'-fluoroadenosine-3'-phosphate
  modified_base 12: mod_base = OTHER; note = 2'-O-methyluridine-3'-phosphate
  modified_base 13: mod_base = OTHER; note = 2'-O-methylcytidine-3'-phosphate
  modified_base 14: mod_base = OTHER; note = 2'-O-methyladenosine-3'-phosphate
  modified_base 15: mod_base = OTHER; note = 2'-O-methyluridine-3'-phosphate
  modified_base 16: mod_base = OTHER; note = 2'-O-methyluridine-3'-phosphate
  modified_base 17: mod_base = OTHER; note = 2'-O-methyladenosine-3'-phosphate
  modified_base 18: mod_base = OTHER; note = 2'-O-methylcytidine-3'-phosphate
  modified_base 19: mod_base = OTHER; note = 2'-O-methyladenosine-3'-phosphorothioate
  modified_base 20: mod_base = OTHER; note = 2'-O-methyladenosine-3'-phosphorothioate
  modified_base 21: mod_base = OTHER; note = 2'-O-methyladenosine
tcacaaacacatcattacaaa

SEQ ID NO: 11568 - RNA, 21 nt, synthetic construct
  source 1..21: mol_type = other RNA
  modified_base 1: mod_base = OTHER; note = 2'-O-methylcytidine-3'-phosphorothioate
  modified_base 2: mod_base = OTHER; note = 2'-O-methyluridine-3'-phosphorothioate
  modified_base 3: mod_base = OTHER; note = 2'-O-methylguanosine-3'-phosphate
  modified_base 4: mod_base = OTHER; note = 2'-O-methylguanosine-3'-phosphate
  modified_base 5: mod_base = OTHER; note = 2'-O-methylcytidine-3'-phosphate
  modified_base 6: mod_base = OTHER; note = 2'-O-docosanyl-adenosine-3'-phosphate
  modified_base 7: mod_base = OTHER; note = 2'-deoxy-2'-fluoroguanosine-3'-phosphate
  modified_base 8: mod_base = OTHER; note = 2'-O-methyluridine-3'-phosphate
  modified_base 9: mod_base = OTHER; note = 2'-deoxy-2'-fluorouridine-3'-phosphate
  modified_base 10: mod_base = OTHER; note = 2'-deoxy-2'-fluoroguanosine-3'-phosphate
  modified_base 11: mod_base = OTHER; note = 2'-deoxy-2'-fluoroadenosine-3'-phosphate
  modified_base 12: mod_base = OTHER; note = 2'-O-methyluridine-3'-phosphate
  modified_base 13: mod_base = OTHER; note = 2'-O-methylguanosine-3'-phosphate
  modified_base 14: mod_base = OTHER; note = 2'-O-methyluridine-3'-phosphate
  modified_base 15: mod_base = OTHER; note = 2'-O-methylcytidine-3'-phosphate
  modified_base 16: mod_base = OTHER; note = 2'-O-methyluridine-3'-phosphate
  modified_base 17: mod_base = OTHER; note = 2'-O-methyluridine-3'-phosphate
  modified_base 18: mod_base = OTHER; note = 2'-O-methylcytidine-3'-phosphate
  modified_base 19: mod_base = OTHER; note = 2'-O-methyladenosine-3'-phosphorothioate
  modified_base 20: mod_base = OTHER; note = 2'-O-methyladenosine-3'-phosphorothioate
  modified_base 21: mod_base = OTHER; note = 2'-O-methyladenosine
ctggcagttgatgtcttcaaa

SEQ ID NO: 11569 - RNA, 21 nt, synthetic construct
  source 1..21: mol_type = other RNA
  modified_base 1: mod_base = OTHER; note = 2'-O-methylguanosine-3'-phosphorothioate
  modified_base 2: mod_base = OTHER; note = 2'-O-methylguanosine-3'-phosphorothioate
  modified_base 3: mod_base = OTHER; note = 2'-O-methylcytidine-3'-phosphate
  modified_base 4: mod_base = OTHER; note = 2'-O-methyladenosine-3'-phosphate
  modified_base 5: mod_base = OTHER; note = 2'-O-methylguanosine-3'-phosphate
  modified_base 6: mod_base = OTHER; note = 2'-O-docosanyl-uridine-3'-phosphate
  modified_base 7: mod_base = OTHER; note = 2'-deoxy-2'-fluorouridine-3'-phosphate
  modified_base 8: mod_base = OTHER; note = 2'-O-methylguanosine-3'-phosphate
  modified_base 9: mod_base = OTHER; note = 2'-deoxy-2'-fluoroadenosine-3'-phosphate
  modified_base 10: mod_base = OTHER; note = 2'-deoxy-2'-fluorouridine-3'-phosphate
  modified_base 11: mod_base = OTHER; note = 2'-deoxy-2'-fluoroguanosine-3'-phosphate
  modified_base 12: mod_base = OTHER; note = 2'-O-methyluridine-3'-phosphate
  modified_base 13: mod_base = OTHER; note = 2'-O-methylcytidine-3'-phosphate
  modified_base 14: mod_base = OTHER; note = 2'-O-methyluridine-3'-phosphate
  modified_base 15: mod_base = OTHER; note = 2'-O-methyluridine-3'-phosphate
  modified_base 16: mod_base = OTHER; note = 2'-O-methylcytidine-3'-phosphate
  modified_base 17: mod_base = OTHER; note = 2'-O-methyladenosine-3'-phosphate
  modified_base 18: mod_base = OTHER; note = 2'-O-methyladenosine-3'-phosphate
  modified_base 19: mod_base = OTHER; note = 2'-O-methyluridine-3'-phosphorothioate
  modified_base 20: mod_base = OTHER; note = 2'-O-methyladenosine-3'-phosphorothioate
  modified_base 21: mod_base = OTHER; note = 2'-O-methyladenosine
ggcagttgatgtcttcaataa

SEQ ID NO: 11570 - RNA, 21 nt, synthetic construct
  source 1..21: mol_type = other RNA
  modified_base 1: mod_base = OTHER; note = 2'-O-methylguanosine-3'-phosphorothioate
  modified_base 2: mod_base = OTHER; note = 2'-O-methylcytidine-3'-phosphorothioate
  modified_base 3: mod_base = OTHER; note = 2'-O-methyladenosine-3'-phosphate
  modified_base 4: mod_base = OTHER; note = 2'-O-methylguanosine-3'-phosphate
  modified_base 5: mod_base = OTHER; note = 2'-O-methyluridine-3'-phosphate
  modified_base 6: mod_base = OTHER; note = 2'-O-docosanyl-uridine-3'-phosphate
  modified_base 7: mod_base = OTHER; note = 2'-deoxy-2'-fluoroguanosine-3'-phosphate
  modified_base 8: mod_base = OTHER; note = 2'-O-methyladenosine-3'-phosphate
  modified_base 9: mod_base = OTHER; note = 2'-deoxy-2'-fluorouridine-3'-phosphate
  modified_base 10: mod_base = OTHER; note = 2'-deoxy-2'-fluoroguanosine-3'-phosphate
  modified_base 11: mod_base = OTHER; note = 2'-deoxy-2'-fluorouridine-3'-phosphate
  modified_base 12: mod_base = OTHER; note = 2'-O-methylcytidine-3'-phosphate
  modified_base 13: mod_base = OTHER; note = 2'-O-methyluridine-3'-phosphate
  modified_base 14: mod_base = OTHER; note = 2'-O-methyluridine-3'-phosphate
  modified_base 15: mod_base = OTHER; note = 2'-O-methylcytidine-3'-phosphate
  modified_base 16: mod_base = OTHER; note = 2'-O-methyladenosine-3'-phosphate
  modified_base 17: mod_base = OTHER; note = 2'-O-methyladenosine-3'-phosphate
  modified_base 18: mod_base = OTHER; note = 2'-O-methyluridine-3'-phosphate
  modified_base 19: mod_base = OTHER; note = 2'-O-methyladenosine-3'-phosphorothioate
  modified_base 20: mod_base = OTHER; note = 2'-O-methyladenosine-3'-phosphorothioate
  modified_base 21: mod_base = OTHER; note = 2'-O-methyladenosine
gcagttgatgtcttcaataaa

SEQ ID NO: 11571 - RNA, 21 nt, synthetic construct
  source 1..21: mol_type = other RNA
  modified_base 1: mod_base = OTHER; note = 2'-O-methylcytidine-3'-phosphorothioate
  modified_base 2: mod_base = OTHER; note = 2'-O-methyladenosine-3'-phosphorothioate
  modified_base 3: mod_base = OTHER; note = 2'-O-methylguanosine-3'-phosphate
  modified_base 4: mod_base = OTHER; note = 2'-O-methyluridine-3'-phosphate
  modified_base 5: mod_base = OTHER; note = 2'-O-methyluridine-3'-phosphate
  modified_base 6: mod_base = OTHER; note = 2'-O-docosanyl-guanosine-3'-phosphate
  modified_base 7: mod_base = OTHER; note = 2'-deoxy-2'-fluoroadenosine-3'-phosphate
  modified_base 8: mod_base = OTHER; note = 2'-O-methyluridine-3'-phosphate
  modified_base 9: mod_base = OTHER; note = 2'-deoxy-2'-fluoroguanosine-3'-phosphate
  modified_base 10: mod_base = OTHER; note = 2'-deoxy-2'-fluorouridine-3'-phosphate
  modified_base 11: mod_base = OTHER; note = 2'-deoxy-2'-fluorocytidine-3'-phosphate
  modified_base 12: mod_base = OTHER; note = 2'-O-methyluridine-3'-phosphate
  modified_base 13: mod_base = OTHER; note = 2'-O-methyluridine-3'-phosphate
  modified_base 14: mod_base = OTHER; note = 2'-O-methylcytidine-3'-phosphate
  modified_base 15: mod_base = OTHER; note = 2'-O-methyladenosine-3'-phosphate
  modified_base 16: mod_base = OTHER; note = 2'-O-methyladenosine-3'-phosphate
  modified_base 17: mod_base = OTHER; note = 2'-O-methyluridine-3'-phosphate
  modified_base 18: mod_base = OTHER; note = 2'-O-methyladenosine-3'-phosphate
  modified_base 19: mod_base = OTHER; note = 2'-O-methyladenosine-3'-phosphorothioate
  modified_base 20: mod_base = OTHER; note = 2'-O-methyluridine-3'-phosphorothioate
  modified_base 21: mod_base = OTHER; note = 2'-O-methyladenosine
cagttgatgtcttcaataata

SEQ ID NO: 11572 - RNA, 21 nt, synthetic construct
  source 1..21: mol_type = other RNA
  modified_base 1: mod_base = OTHER; note = 2'-O-methyladenosine-3'-phosphorothioate
  modified_base 2: mod_base = OTHER; note = 2'-O-methylguanosine-3'-phosphorothioate
  modified_base 3: mod_base = OTHER; note = 2'-O-methyluridine-3'-phosphate
  modified_base 4: mod_base = OTHER; note = 2'-O-methyluridine-3'-phosphate
  modified_base 5: mod_base = OTHER; note = 2'-O-methylguanosine-3'-phosphate
  modified_base 6: mod_base = OTHER; note = 2'-O-docosanyl-adenosine-3'-phosphate
  modified_base 7: mod_base = OTHER; note = 2'-deoxy-2'-fluorouridine-3'-phosphate
  modified_base 8: mod_base = OTHER; note = 2'-O-methylguanosine-3'-phosphate
  modified_base 9: mod_base = OTHER; note = 2'-deoxy-2'-fluorouridine-3'-phosphate
  modified_base 10: mod_base = OTHER; note = 2'-deoxy-2'-fluorocytidine-3'-phosphate
  modified_base 11: mod_base = OTHER; note = 2'-deoxy-2'-fluorouridine-3'-phosphate
  modified_base 12: mod_base = OTHER; note = 2'-O-methyluridine-3'-phosphate
  modified_base 13: mod_base = OTHER; note = 2'-O-methylcytidine-3'-phosphate
  modified_base 14: mod_base = OTHER; note = 2'-O-methyladenosine-3'-phosphate
  modified_base 15: mod_base = OTHER; note = 2'-O-methyladenosine-3'-phosphate
  modified_base 16: mod_base = OTHER; note = 2'-O-methyluridine-3'-phosphate
  modified_base 17: mod_base = OTHER; note = 2'-O-methyladenosine-3'-phosphate
  modified_base 18: mod_base = OTHER; note = 2'-O-methyladenosine-3'-phosphate
  modified_base 19: mod_base = OTHER; note = 2'-O-methyluridine-3'-phosphorothioate
  modified_base 20: mod_base = OTHER; note = 2'-O-methylcytidine-3'-phosphorothioate
  modified_base 21: mod_base = OTHER; note = 2'-O-methyladenosine
agttgatgtcttcaataatca

SEQ ID NO: 11573 - RNA, 21 nt, synthetic construct
  source 1..21: mol_type = other RNA
  modified_base 1: mod_base = OTHER; note = 2'-O-methylguanosine-3'-phosphorothioate
  modified_base 2: mod_base = OTHER; note = 2'-O-methyluridine-3'-phosphorothioate
  modified_base 3: mod_base = OTHER; note = 2'-O-methyluridine-3'-phosphate
  modified_base 4: mod_base = OTHER; note = 2'-O-methylguanosine-3'-phosphate
  modified_base 5: mod_base = OTHER; note = 2'-O-methyladenosine-3'-phosphate
  modified_base 6: mod_base = OTHER; note = 2'-O-docosanyl-uridine-3'-phosphate
  modified_base 7: mod_base = OTHER; note = 2'-deoxy-2'-fluoroguanosine-3'-phosphate
  modified_base 8: mod_base = OTHER; note = 2'-O-methyluridine-3'-phosphate
  modified_base 9: mod_base = OTHER; note = 2'-deoxy-2'-fluorocytidine-3'-phosphate
  modified_base 10: mod_base = OTHER; note = 2'-deoxy-2'-fluorouridine-3'-phosphate
  modified_base 11: mod_base = OTHER; note = 2'-deoxy-2'-fluorouridine-3'-phosphate
  modified_base 12: mod_base = OTHER; note = 2'-O-methylcytidine-3'-phosphate
  modified_base 13: mod_base = OTHER; note = 2'-O-methyladenosine-3'-phosphate
  modified_base 14: mod_base = OTHER; note = 2'-O-methyladenosine-3'-phosphate
  modified_base 15: mod_base = OTHER; note = 2'-O-methyluridine-3'-phosphate
  modified_base 16: mod_base = OTHER; note = 2'-O-methyladenosine-3'-phosphate
  modified_base 17: mod_base = OTHER; note = 2'-O-methyladenosine-3'-phosphate
  modified_base 18: mod_base = OTHER; note = 2'-O-methyluridine-3'-phosphate
  modified_base 19: mod_base = OTHER; note = 2'-O-methylcytidine-3'-phosphorothioate
  modified_base 20: mod_base = OTHER; note = 2'-O-methyladenosine-3'-phosphorothioate
  modified_base 21: mod_base = OTHER; note = 2'-O-methyladenosine
gttgatgtcttcaataatcaa

SEQ ID NO: 11574 - RNA, 21 nt, synthetic construct
  source 1..21: mol_type = other RNA
  modified_base 1: mod_base = OTHER; note = 2'-O-methyluridine-3'-phosphorothioate
  modified_base 2: mod_base = OTHER; note = 2'-O-methyluridine-3'-phosphorothioate
  modified_base 3: mod_base = OTHER; note = 2'-O-methylguanosine-3'-phosphate
  modified_base 4: mod_base = OTHER; note = 2'-O-methyladenosine-3'-phosphate
  modified_base 5: mod_base = OTHER; note = 2'-O-methyluridine-3'-phosphate
  modified_base 6: mod_base = OTHER; note = 2'-O-docosanyl-guanosine-3'-phosphate
  modified_base 7: mod_base = OTHER; note = 2'-deoxy-2'-fluorouridine-3'-phosphate
  modified_base 8: mod_base = OTHER; note = 2'-O-methylcytidine-3'-phosphate
  modified_base 9: mod_base = OTHER; note = 2'-deoxy-2'-fluorouridine-3'-phosphate
  modified_base 10: mod_base = OTHER; note = 2'-deoxy-2'-fluorouridine-3'-phosphate
  modified_base 11: mod_base = OTHER; note = 2'-deoxy-2'-fluorocytidine-3'-phosphate
  modified_base 12: mod_base = OTHER; note = 2'-O-methyladenosine-3'-phosphate
  modified_base 13: mod_base = OTHER; note = 2'-O-methyladenosine-3'-phosphate
  modified_base 14: mod_base = OTHER; note = 2'-O-methyluridine-3'-phosphate
  modified_base 15: mod_base = OTHER; note = 2'-O-methyladenosine-3'-phosphate
  modified_base 16: mod_base = OTHER; note = 2'-O-methyladenosine-3'-phosphate
  modified_base 17: mod_base = OTHER; note = 2'-O-methyluridine-3'-phosphate
  modified_base 18: mod_base = OTHER; note = 2'-O-methylcytidine-3'-phosphate
  modified_base 19: mod_base = OTHER; note = 2'-O-methyladenosine-3'-phosphorothioate
  modified_base 20: mod_base = OTHER; note = 2'-O-methyluridine-3'-phosphorothioate
  modified_base 21: mod_base = OTHER; note = 2'-O-methyladenosine
ttgatgtcttcaataatcata

SEQ ID NO: 11575 - RNA, 21 nt, synthetic construct
  source 1..21: mol_type = other RNA
  modified_base 1: mod_base = OTHER; note = 2'-O-methyluridine-3'-phosphorothioate
  modified_base 2: mod_base = OTHER; note = 2'-O-methylguanosine-3'-phosphorothioate
  modified_base 3: mod_base = OTHER; note = 2'-O-methyladenosine-3'-phosphate
  modified_base 4: mod_base = OTHER; note = 2'-O-methyluridine-3'-phosphate
  modified_base 5: mod_base = OTHER; note = 2'-O-methylguanosine-3'-phosphate
  modified_base 6: mod_base = OTHER; note = 2'-O-docosanyl-uridine-3'-phosphate
  modified_base 7: mod_base = OTHER; note = 2'-deoxy-2'-fluorocytidine-3'-phosphate
  modified_base 8: mod_base = OTHER; note = 2'-O-methyluridine-3'-phosphate
  modified_base 9: mod_base = OTHER; note = 2'-deoxy-2'-fluorouridine-3'-phosphate
  modified_base 10: mod_base = OTHER; note = 2'-deoxy-2'-fluorocytidine-3'-phosphate
  modified_base 11: mod_base = OTHER; note = 2'-deoxy-2'-fluoroadenosine-3'-phosphate
  modified_base 12: mod_base = OTHER; note = 2'-O-methyladenosine-3'-phosphate
  modified_base 13: mod_base = OTHER; note = 2'-O-methyluridine-3'-phosphate
  modified_base 14: mod_base = OTHER; note = 2'-O-methyladenosine-3'-phosphate
  modified_base 15: mod_base = OTHER; note = 2'-O-methyladenosine-3'-phosphate
  modified_base 16: mod_base = OTHER; note = 2'-O-methyluridine-3'-phosphate
  modified_base 17: mod_base = OTHER; note = 2'-O-methylcytidine-3'-phosphate
  modified_base 18: mod_base = OTHER; note = 2'-O-methyladenosine-3'-phosphate
  modified_base 19: mod_base = OTHER; note = 2'-O-methyluridine-3'-phosphorothioate
  modified_base 20: mod_base = OTHER; note = 2'-O-methyluridine-3'-phosphorothioate
  modified_base 21: mod_base = OTHER; note = 2'-O-methyladenosine
tgatgtcttcaataatcatta

SEQ ID NO: 11576 - RNA, 21 nt, synthetic construct
  source 1..21: mol_type = other RNA
  modified_base 1: mod_base = OTHER; note = 2'-O-methylguanosine-3'-phosphorothioate
  modified_base 2: mod_base = OTHER; note = 2'-O-methyladenosine-3'-phosphorothioate
  modified_base 3: mod_base = OTHER; note = 2'-O-methyluridine-3'-phosphate
  modified_base 4: mod_base = OTHER; note = 2'-O-methylguanosine-3'-phosphate
  modified_base 5: mod_base = OTHER; note = 2'-O-methyluridine-3'-phosphate
  modified_base 6: mod_base = OTHER; note = 2'-O-docosanyl-cytidine-3'-phosphate
  modified_base 7: mod_base = OTHER; note = 2'-deoxy-2'-fluorouridine-3'-phosphate
  modified_base 8: mod_base = OTHER; note = 2'-O-methyluridine-3'-phosphate
  modified_base 9: mod_base = OTHER; note = 2'-deoxy-2'-fluorocytidine-3'-phosphate
  modified_base 10: mod_base = OTHER; note = 2'-deoxy-2'-fluoroadenosine-3'-phosphate
  modified_base 11: mod_base = OTHER; note = 2'-deoxy-2'-fluoroadenosine-3'-phosphate
  modified_base 12: mod_base = OTHER; note = 2'-O-methyluridine-3'-phosphate
  modified_base 13: mod_base = OTHER; note = 2'-O-methyladenosine-3'-phosphate
  modified_base 14: mod_base = OTHER; note = 2'-O-methyladenosine-3'-phosphate
  modified_base 15: mod_base = OTHER; note = 2'-O-methyluridine-3'-phosphate
  modified_base 16: mod_base = OTHER; note = 2'-O-methylcytidine-3'-phosphate
  modified_base 17: mod_base = OTHER; note = 2'-O-methyladenosine-3'-phosphate
  modified_base 18: mod_base = OTHER; note = 2'-O-methyluridine-3'-phosphate
  modified_base 19: mod_base = OTHER; note = 2'-O-methyluridine-3'-phosphorothioate
  modified_base 20: mod_base = OTHER; note = 2'-O-methylcytidine-3'-phosphorothioate
  modified_base 21: mod_base = OTHER; note = 2'-O-methyladenosine
gatgtcttcaataatcattca

SEQ ID NO: 11577 - RNA, 21 nt, synthetic construct
  source 1..21: mol_type = other RNA
  modified_base 1: mod_base = OTHER; note = 2'-O-methyladenosine-3'-phosphorothioate
  modified_base 2: mod_base = OTHER; note = 2'-O-methyluridine-3'-phosphorothioate
  modified_base 3: mod_base = OTHER; note = 2'-O-methylguanosine-3'-phosphate
  modified_base 4: mod_base = OTHER; note = 2'-O-methyluridine-3'-phosphate
  modified_base 5: mod_base = OTHER; note = 2'-O-methylcytidine-3'-phosphate
  modified_base 6: mod_base = OTHER; note = 2'-O-docosanyl-uridine-3'-phosphate
  modified_base 7: mod_base = OTHER; note = 2'-deoxy-2'-fluorouridine-3'-phosphate
  modified_base 8: mod_base = OTHER; note = 2'-O-methylcytidine-3'-phosphate
  modified_base 9: mod_base = OTHER; note = 2'-deoxy-2'-fluoroadenosine-3'-phosphate
  modified_base 10: mod_base = OTHER; note = 2'-deoxy-2'-fluoroadenosine-3'-phosphate
  modified_base 11: mod_base = OTHER; note = 2'-deoxy-2'-fluorouridine-3'-phosphate
  modified_base 12: mod_base = OTHER; note = 2'-O-methyladenosine-3'-phosphate
  modified_base 13: mod_base = OTHER; note = 2'-O-methyladenosine-3'-phosphate
  modified_base 14: mod_base = OTHER; note = 2'-O-methyluridine-3'-phosphate
  modified_base 15: mod_base = OTHER; note = 2'-O-methylcytidine-3'-phosphate
  modified_base 16: mod_base = OTHER; note = 2'-O-methyladenosine-3'-phosphate
  modified_base 17: mod_base = OTHER; note = 2'-O-methyluridine-3'-phosphate
  modified_base 18: mod_base = OTHER; note = 2'-O-methyluridine-3'-phosphate
  modified_base 19: mod_base = OTHER; note = 2'-O-methylcytidine-3'-phosphorothioate
  modified_base 20: mod_base = OTHER; note = 2'-O-methylcytidine-3'-phosphorothioate
  modified_base 21: mod_base = OTHER; note = 2'-O-methyladenosine
atgtcttcaataatcattcca

SEQ ID NO: 11578 - RNA, 21 nt, synthetic construct
  source 1..21: mol_type = other RNA
  modified_base 1: mod_base = OTHER; note = 2'-O-methyluridine-3'-phosphorothioate
  modified_base 2: mod_base = OTHER; note = 2'-O-methylguanosine-3'-phosphorothioate
  modified_base 3: mod_base = OTHER; note = 2'-O-methyluridine-3'-phosphate
  modified_base 4: mod_base = OTHER; note = 2'-O-methylcytidine-3'-phosphate
  modified_base 5: mod_base = OTHER; note = 2'-O-methyluridine-3'-phosphate
  modified_base 6: mod_base = OTHER; note = 2'-O-docosanyl-uridine-3'-phosphate
  modified_base 7: mod_base = OTHER; note = 2'-deoxy-2'-fluorocytidine-3'-phosphate
  modified_base 8: mod_base = OTHER; note = 2'-O-methyladenosine-3'-phosphate
  modified_base 9: mod_base = OTHER; note = 2'-deoxy-2'-fluoroadenosine-3'-phosphate
  modified_base 10: mod_base = OTHER; note = 2'-deoxy-2'-fluorouridine-3'-phosphate
  modified_base 11: mod_base = OTHER; note = 2'-deoxy-2'-fluoroadenosine-3'-phosphate
  modified_base 12: mod_base = OTHER; note = 2'-O-methyladenosine-3'-phosphate
  modified_base 13: mod_base = OTHER; note = 2'-O-methyluridine-3'-phosphate
  modified_base 14: mod_base = OTHER; note = 2'-O-methylcytidine-3'-phosphate
  modified_base 15: mod_base = OTHER; note = 2'-O-methyladenosine-3'-phosphate
  modified_base 16: mod_base = OTHER; note = 2'-O-methyluridine-3'-phosphate
  modified_base 17: mod_base = OTHER; note = 2'-O-methyluridine-3'-phosphate
  modified_base 18: mod_base = OTHER; note = 2'-O-methylcytidine-3'-phosphate
  modified_base 19: mod_base = OTHER; note = 2'-O-methylcytidine-3'-phosphorothioate
  modified_base 20: mod_base = OTHER; note = 2'-O-methyluridine-3'-phosphorothioate
  modified_base 21: mod_base = OTHER; note = 2'-O-methyladenosine
tgtcttcaataatcattccta

SEQ ID NO: 11579 - RNA, 21 nt, synthetic construct
  source 1..21: mol_type = other RNA
  modified_base 1: mod_base = OTHER; note = 2'-O-methylguanosine-3'-phosphorothioate
  modified_base 2: mod_base = OTHER; note = 2'-O-methyluridine-3'-phosphorothioate
  modified_base 3: mod_base = OTHER; note = 2'-O-methylcytidine-3'-phosphate
  modified_base 4: mod_base = OTHER; note = 2'-O-methyluridine-3'-phosphate
  modified_base 5: mod_base = OTHER; note = 2'-O-methyluridine-3'-phosphate
  modified_base 6: mod_base = OTHER; note = 2'-O-docosanyl-cytidine-3'-phosphate
  modified_base 7: mod_base = OTHER; note = 2'-deoxy-2'-fluoroadenosine-3'-phosphate
  modified_base 8: mod_base = OTHER; note = 2'-O-methyladenosine-3'-phosphate
  modified_base 9: mod_base = OTHER; note = 2'-deoxy-2'-fluorouridine-3'-phosphate
  modified_base 10: mod_base = OTHER; note = 2'-deoxy-2'-fluoroadenosine-3'-phosphate
  modified_base 11: mod_base = OTHER; note = 2'-deoxy-2'-fluoroadenosine-3'-phosphate
  modified_base 12: mod_base = OTHER; note = 2'-O-methyluridine-3'-phosphate
  modified_base 13: mod_base = OTHER; note = 2'-O-methylcytidine-3'-phosphate
  modified_base 14: mod_base = OTHER; note = 2'-O-methyladenosine-3'-phosphate
  modified_base 15: mod_base = OTHER; note = 2'-O-methyluridine-3'-phosphate
  modified_base 16: mod_base = OTHER; note = 2'-O-methyluridine-3'-phosphate
  modified_base 17: mod_base = OTHER; note = 2'-O-methylcytidine-3'-phosphate
  modified_base 18: mod_base = OTHER; note = 2'-O-methylcytidine-3'-phosphate
  modified_base 19: mod_base = OTHER; note = 2'-O-methyluridine-3'-phosphorothioate
  modified_base 20: mod_base = OTHER; note = 2'-O-methyluridine-3'-phosphorothioate
  modified_base 21: mod_base = OTHER; note = 2'-O-methyladenosine
gtcttcaataatcattcctta

SEQ ID NO: 11580 - RNA, 21 nt, synthetic construct
  source 1..21: mol_type = other RNA
  modified_base 1: mod_base = OTHER; note = 2'-O-methyluridine-3'-phosphorothioate
  modified_base 2: mod_base = OTHER; note = 2'-O-methylcytidine-3'-phosphorothioate
  modified_base 3: mod_base = OTHER; note = 2'-O-methyluridine-3'-phosphate
  modified_base 4: mod_base = OTHER; note = 2'-O-methyluridine-3'-phosphate
  modified_base 5: mod_base = OTHER; note = 2'-O-methylcytidine-3'-phosphate
  modified_base 6: mod_base = OTHER; note = 2'-O-docosanyl-adenosine-3'-phosphate
  modified_base 7: mod_base = OTHER; note = 2'-deoxy-2'-fluoroadenosine-3'-phosphate
  modified_base 8: mod_base = OTHER; note = 2'-O-methyluridine-3'-phosphate
  modified_base 9: mod_base = OTHER; note = 2'-deoxy-2'-fluoroadenosine-3'-phosphate
  modified_base 10: mod_base = OTHER; note = 2'-deoxy-2'-fluoroadenosine-3'-phosphate
  modified_base 11: mod_base = OTHER; note = 2'-deoxy-2'-fluorouridine-3'-phosphate
  modified_base 12: mod_base = OTHER; note = 2'-O-methylcytidine-3'-phosphate
  modified_base 13: mod_base = OTHER; note = 2'-O-methyladenosine-3'-phosphate
  modified_base 14: mod_base = OTHER; note = 2'-O-methyluridine-3'-phosphate
  modified_base 15: mod_base = OTHER; note = 2'-O-methyluridine-3'-phosphate
  modified_base 16: mod_base = OTHER; note = 2'-O-methylcytidine-3'-phosphate
  modified_base 17: mod_base = OTHER; note = 2'-O-methylcytidine-3'-phosphate
  modified_base 18: mod_base = OTHER; note = 2'-O-methyluridine-3'-phosphate
  modified_base 19: mod_base = OTHER; note = 2'-O-methyluridine-3'-phosphorothioate
  modified_base 20: mod_base = OTHER; note = 2'-O-methyluridine-3'-phosphorothioate
  modified_base 21: mod_base = OTHER; note = 2'-O-methyladenosine
tcttcaataatcattccttta

SEQ ID NO: 11581 - RNA, 21 nt, synthetic construct
  source 1..21: mol_type = other RNA
  modified_base 1: mod_base = OTHER; note = 2'-O-methyladenosine-3'-phosphorothioate
  modified_base 2: mod_base = OTHER; note = 2'-O-methyluridine-3'-phosphorothioate
  modified_base 3: mod_base = OTHER; note = 2'-O-methyluridine-3'-phosphate
  modified_base 4: mod_base = OTHER; note = 2'-O-methylcytidine-3'-phosphate
  modified_base 5: mod_base = OTHER; note = 2'-O-methyladenosine-3'-phosphate
  modified_base 6: mod_base = OTHER; note = 2'-O-docosanyl-cytidine-3'-phosphate
  modified_base 7: mod_base = OTHER; note = 2'-deoxy-2'-fluoroadenosine-3'-phosphate
  modified_base 8: mod_base = OTHER; note = 2'-O-methyladenosine-3'-phosphate
  modified_base 9: mod_base = OTHER; note = 2'-deoxy-2'-fluoroadenosine-3'-phosphate
  modified_base 10: mod_base = OTHER; note = 2'-deoxy-2'-fluorocytidine-3'-phosphate
  modified_base 11: mod_base = OTHER; note = 2'-deoxy-2'-fluoroadenosine-3'-phosphate
  modified_base 12: mod_base = OTHER; note = 2'-O-methylcytidine-3'-phosphate
  modified_base 13: mod_base = OTHER; note = 2'-O-methyladenosine-3'-phosphate
  modified_base 14: mod_base = OTHER; note = 2'-O-methyluridine-3'-phosphate
  modified_base 15: mod_base = OTHER; note = 2'-O-methylcytidine-3'-phosphate
  modified_base 16: mod_base = OTHER; note = 2'-O-methyladenosine-3'-phosphate
  modified_base 17: mod_base = OTHER; note = 2'-O-methyluridine-3'-phosphate
  modified_base 18: mod_base = OTHER; note = 2'-O-methyluridine-3'-phosphate
  modified_base 19: mod_base = OTHER; note = 2'-O-methyladenosine-3'-phosphorothioate
  modified_base 20: mod_base = OTHER; note = 2'-O-methylcytidine-3'-phosphorothioate
  modified_base 21: mod_base = OTHER; note = 2'-O-methyladenosine
attcacaaacacatcattaca

SEQ ID NO: 11582 - RNA, 21 nt, synthetic construct
  source 1..21: mol_type = other RNA
  modified_base 1: mod_base = OTHER; note = 2'-O-methyluridine-3'-phosphorothioate
  modified_base 2: mod_base = OTHER; note = 2'-O-methyluridine-3'-phosphorothioate
  modified_base 3: mod_base = OTHER; note = 2'-O-methylcytidine-3'-phosphate
  modified_base 4: mod_base = OTHER; note = 2'-O-methyladenosine-3'-phosphate
  modified_base 5: mod_base = OTHER; note = 2'-O-methylcytidine-3'-phosphate
  modified_base 6: mod_base = OTHER; note = 2'-O-docosanyl-adenosine-3'-phosphate
  modified_base 7: mod_base = OTHER; note = 2'-deoxy-2'-fluoroadenosine-3'-phosphate
  modified_base 8: mod_base = OTHER; note = 2'-O-methyladenosine-3'-phosphate
  modified_base 9: mod_base = OTHER; note = 2'-deoxy-2'-fluorocytidine-3'-phosphate
  modified_base 10: mod_base = OTHER; note = 2'-deoxy-2'-fluoroadenosine-3'-phosphate
  modified_base 11: mod_base = OTHER; note = 2'-deoxy-2'-fluorocytidine-3'-phosphate
  modified_base 12: mod_base = OTHER; note = 2'-O-methyladenosine-3'-phosphate
  modified_base 13: mod_base = OTHER; note = 2'-O-methyluridine-3'-phosphate
  modified_base 14: mod_base = OTHER; note = 2'-O-methylcytidine-3'-phosphate
  modified_base 15: mod_base = OTHER; note = 2'-O-methyladenosine-3'-phosphate
  modified_base 16: mod_base = OTHER; note = 2'-O-methyluridine-3'-phosphate
  modified_base 17: mod_base = OTHER; note = 2'-O-methyluridine-3'-phosphate
  modified_base 18: mod_base = OTHER; note = 2'-O-methyladenosine-3'-phosphate
  modified_base 19: mod_base = OTHER; note = 2'-O-methylcytidine-3'-phosphorothioate
  modified_base 20: mod_base = OTHER; note = 2'-O-methyladenosine-3'-phosphorothioate
  modified_base 21: mod_base = OTHER; note = 2'-O-methyladenosine
ttcacaaacacatcattacaa

SEQ ID NO: 11583 - RNA, 21 nt, synthetic construct
  source 1..21: mol_type = other RNA
  modified_base 1: mod_base = OTHER; note = 2'-O-methylcytidine-3'-phosphorothioate
  modified_base 2: mod_base = OTHER; note = 2'-O-methyladenosine-3'-phosphorothioate
  modified_base 3: mod_base = OTHER; note = 2'-O-methylcytidine-3'-phosphate
  modified_base 4: mod_base = OTHER; note = 2'-O-methyladenosine-3'-phosphate
  modified_base 5: mod_base = OTHER; note = 2'-O-methyladenosine-3'-phosphate
  modified_base 6: mod_base = OTHER; note = 2'-O-docosanyl-adenosine-3'-phosphate
  modified_base 7: mod_base = OTHER; note = 2'-deoxy-2'-fluorocytidine-3'-phosphate
  modified_base 8: mod_base = OTHER; note = 2'-O-methyladenosine-3'-phosphate
  modified_base 9: mod_base = OTHER; note = 2'-deoxy-2'-fluorocytidine-3'-phosphate
  modified_base 10: mod_base = OTHER; note = 2'-deoxy-2'-fluoroadenosine-3'-phosphate
  modified_base 11: mod_base = OTHER; note = 2'-deoxy-2'-fluorouridine-3'-phosphate
  modified_base 12: mod_base = OTHER; note = 2'-O-methylcytidine-3'-phosphate
  modified_base 13: mod_base = OTHER; note = 2'-O-methyladenosine-3'-phosphate
  modified_base 14: mod_base = OTHER; note = 2'-O-methyluridine-3'-phosphate
  modified_base 15: mod_base = OTHER; note = 2'-O-methyluridine-3'-phosphate
  modified_base 16: mod_base = OTHER; note = 2'-O-methyladenosine-3'-phosphate
  modified_base 17: mod_base = OTHER; note = 2'-O-methylcytidine-3'-phosphate
  modified_base 18: mod_base = OTHER; note = 2'-O-methyladenosine-3'-phosphate
  modified_base 19: mod_base = OTHER; note = 2'-O-methyladenosine-3'-phosphorothioate
  modified_base 20: mod_base = OTHER; note = 2'-O-methylguanosine-3'-phosphorothioate
  modified_base 21: mod_base = OTHER; note = 2'-O-methyladenosine
cacaaacacatcattacaaga

SEQ ID NO: 11584 - RNA, 21 nt, synthetic construct
  source 1..21: mol_type = other RNA
  modified_base 1: mod_base = OTHER; note = 2'-O-methyladenosine-3'-phosphorothioate
  modified_base 2: mod_base = OTHER; note = 2'-O-methylcytidine-3'-phosphorothioate
  modified_base 3: mod_base = OTHER; note = 2'-O-methyladenosine-3'-phosphate
  modified_base 4: mod_base = OTHER; note = 2'-O-methyladenosine-3'-phosphate
  modified_base 5: mod_base = OTHER; note = 2'-O-methyladenosine-3'-phosphate
  modified_base 6: mod_base = OTHER; note = 2'-O-docosanyl-cytidine-3'-phosphate
  modified_base 7: mod_base = OTHER; note = 2'-deoxy-2'-fluoroadenosine-3'-phosphate
  modified_base 8: mod_base = OTHER; note = 2'-O-methylcytidine-3'-phosphate
  modified_base 9: mod_base = OTHER; note = 2'-deoxy-2'-fluoroadenosine-3'-phosphate
  modified_base 10: mod_base = OTHER; note = 2'-deoxy-2'-fluorouridine-3'-phosphate
  modified_base 11: mod_base = OTHER; note = 2'-deoxy-2'-fluorocytidine-3'-phosphate
  modified_base 12: mod_base = OTHER; note = 2'-O-methyladenosine-3'-phosphate
  modified_base 13: mod_base = OTHER; note = 2'-O-methyluridine-3'-phosphate
  modified_base 14: mod_base = OTHER; note = 2'-O-methyluridine-3'-phosphate
  modified_base 15: mod_base = OTHER; note = 2'-O-methyladenosine-3'-phosphate
  modified_base 16: mod_base = OTHER; note = 2'-O-methylcytidine-3'-phosphate
  modified_base 17: mod_base = OTHER; note = 2'-O-methyladenosine-3'-phosphate
  modified_base 18: mod_base = OTHER; note = 2'-O-methyladenosine-3'-phosphate
  modified_base 19: mod_base = OTHER; note = 2'-O-methylguanosine-3'-phosphorothioate
  modified_base 20: mod_base = OTHER; note = 2'-O-methylcytidine-3'-phosphorothioate
  modified_base 21: mod_base = OTHER; note = 2'-O-methyladenosine
acaaacacatcattacaagca

SEQ ID NO: 11585 - RNA, 21 nt, synthetic construct
  source 1..21: mol_type = other RNA
  modified_base 1: mod_base = OTHER; note = 2'-O-methylcytidine-3'-phosphorothioate
  modified_base 2: mod_base = OTHER; note = 2'-O-methyladenosine-3'-phosphorothioate
  modified_base 3: mod_base = OTHER; note = 2'-O-methyladenosine-3'-phosphate
  modified_base 4: mod_base = OTHER; note = 2'-O-methyladenosine-3'-phosphate
  modified_base 5: mod_base = OTHER; note = 2'-O-methylcytidine-3'-phosphate
  modified_base 6: mod_base = OTHER; note = 2'-O-docosanyl-adenosine-3'-phosphate
  modified_base 7: mod_base = OTHER; note = 2'-deoxy-2'-fluorocytidine-3'-phosphate
  modified_base 8: mod_base = OTHER; note = 2'-O-methyladenosine-3'-phosphate
  modified_base 9: mod_base = OTHER; note = 2'-deoxy-2'-fluorouridine-3'-phosphate
  modified_base 10: mod_base = OTHER; note = 2'-deoxy-2'-fluorocytidine-3'-phosphate
  modified_base 11: mod_base = OTHER; note = 2'-deoxy-2'-fluoroadenosine-3'-phosphate
  modified_base 12: mod_base = OTHER; note = 2'-O-methyluridine-3'-phosphate
  modified_base 13: mod_base = OTHER; note = 2'-O-methyluridine-3'-phosphate
  modified_base 14: mod_base = OTHER; note = 2'-O-methyladenosine-3'-phosphate
  modified_base 15: mod_base = OTHER; note = 2'-O-methylcytidine-3'-phosphate
  modified_base 16: mod_base = OTHER; note = 2'-O-methyladenosine-3'-phosphate
  modified_base 17: mod_base = OTHER; note = 2'-O-methyladenosine-3'-phosphate
  modified_base 18: mod_base = OTHER; note = 2'-O-methylguanosine-3'-phosphate
  modified_base 19: mod_base = OTHER; note = 2'-O-methylcytidine-3'-phosphorothioate
  modified_base 20: mod_base = OTHER; note = 2'-O-methyluridine-3'-phosphorothioate
  modified_base 21: mod_base = OTHER; note = 2'-O-methyladenosine
caaacacatcattacaagcta

SEQ ID NO: 11586 - RNA, 21 nt, synthetic construct
  source 1..21: mol_type = other RNA
  modified_base 1: mod_base = OTHER; note = 2'-O-methyladenosine-3'-phosphorothioate
  modified_base 2: mod_base = OTHER; note = 2'-O-methyladenosine-3'-phosphorothioate
  modified_base 3: mod_base = OTHER; note = 2'-O-methyladenosine-3'-phosphate
  modified_base 4: mod_base = OTHER; note = 2'-O-methylcytidine-3'-phosphate
  modified_base 5: mod_base = OTHER; note = 2'-O-methyladenosine-3'-phosphate
  modified_base 6: mod_base = OTHER; note = 2'-O-docosanyl-cytidine-3'-phosphate
  modified_base 7: mod_base = OTHER; note = 2'-deoxy-2'-fluoroadenosine-3'-phosphate
  modified_base 8: mod_base = OTHER; note = 2'-O-methyluridine-3'-phosphate
  modified_base 9: mod_base = OTHER; note = 2'-deoxy-2'-fluorocytidine-3'-phosphate
  modified_base 10: mod_base = OTHER; note = 2'-deoxy-2'-fluoroadenosine-3'-phosphate
  modified_base 11: mod_base = OTHER; note = 2'-deoxy-2'-fluorouridine-3'-phosphate
  modified_base 12: mod_base = OTHER; note = 2'-O-methyluridine-3'-phosphate
  modified_base 13: mod_base = OTHER; note = 2'-O-methyladenosine-3'-phosphate
  modified_base 14: mod_base = OTHER; note = 2'-O-methylcytidine-3'-phosphate
  modified_base 15: mod_base = OTHER; note = 2'-O-methyladenosine-3'-phosphate
  modified_base 16: mod_base = OTHER; note = 2'-O-methyladenosine-3'-phosphate
  modified_base 17: mod_base = OTHER; note = 2'-O-methylguanosine-3'-phosphate
  modified_base 18: mod_base = OTHER; note = 2'-O-methylcytidine-3'-phosphate
  modified_base 19: mod_base = OTHER; note = 2'-O-methyluridine-3'-phosphorothioate
  modified_base 20: mod_base = OTHER; note = 2'-O-methyladenosine-3'-phosphorothioate
  modified_base 21: mod_base = OTHER; note = 2'-O-methyladenosine
aaacacatcattacaagctaa

SEQ ID NO: 11587 - RNA, 21 nt, synthetic construct
  source 1..21: mol_type = other RNA
  modified_base 1: mod_base = OTHER; note = 2'-O-methyladenosine-3'-phosphorothioate
  modified_base 2: mod_base = OTHER; note = 2'-O-methyladenosine-3'-phosphorothioate
  modified_base 3: mod_base = OTHER; note = 2'-O-methylcytidine-3'-phosphate
  modified_base 4: mod_base = OTHER; note = 2'-O-methyladenosine-3'-phosphate
  modified_base 5: mod_base = OTHER; note = 2'-O-methylcytidine-3'-phosphate
  modified_base 6: mod_base = OTHER; note = 2'-O-docosanyl-adenosine-3'-phosphate
  modified_base 7: mod_base = OTHER; note = 2'-deoxy-2'-fluorouridine-3'-phosphate
  modified_base 8: mod_base = OTHER; note = 2'-O-methylcytidine-3'-phosphate
  modified_base 9: mod_base = OTHER; note = 2'-deoxy-2'-fluoroadenosine-3'-phosphate
  modified_base 10: mod_base = OTHER; note = 2'-deoxy-2'-fluorouridine-3'-phosphate
  modified_base 11: mod_base = OTHER; note = 2'-deoxy-2'-fluorouridine-3'-phosphate
  modified_base 12: mod_base = OTHER; note = 2'-O-methyladenosine-3'-phosphate
  modified_base 13: mod_base = OTHER; note = 2'-O-methylcytidine-3'-phosphate
  modified_base 14: mod_base = OTHER; note = 2'-O-methyladenosine-3'-phosphate
  modified_base 15: mod_base = OTHER; note = 2'-O-methyladenosine-3'-phosphate
  modified_base 16: mod_base = OTHER; note = 2'-O-methylguanosine-3'-phosphate
  modified_base 17: mod_base = OTHER; note = 2'-O-methylcytidine-3'-phosphate
  modified_base 18: mod_base = OTHER; note = 2'-O-methyluridine-3'-phosphate
  modified_base 19: mod_base = OTHER; note = 2'-O-methyladenosine-3'-phosphorothioate
  modified_base 20: mod_base = OTHER; note = 2'-O-methylcytidine-3'-phosphorothioate
  modified_base 21: mod_base = OTHER; note = 2'-O-methyladenosine
aacacatcattacaagctaca

SEQ ID NO: 11588 - RNA, 21 nt, synthetic construct
  source 1..21: mol_type = other RNA
  modified_base 1: mod_base = OTHER; note = 2'-O-methyladenosine-3'-phosphorothioate
  modified_base 2: mod_base = OTHER; note = 2'-O-methylcytidine-3'-phosphorothioate
  modified_base 3: mod_base = OTHER; note = 2'-O-methyladenosine-3'-phosphate
  modified_base 4: mod_base = OTHER; note = 2'-O-methylcytidine-3'-phosphate
  modified_base 5: mod_base = OTHER; note = 2'-O-methyladenosine-3'-phosphate
  modified_base 6: mod_base = OTHER; note = 2'-O-docosanyl-uridine-3'-phosphate
  modified_base 7: mod_base = OTHER; note = 2'-deoxy-2'-fluorocytidine-3'-phosphate
  modified_base 8: mod_base = OTHER; note = 2'-O-methyladenosine-3'-phosphate
  modified_base 9: mod_base = OTHER; note = 2'-deoxy-2'-fluorouridine-3'-phosphate
  modified_base 10: mod_base = OTHER; note = 2'-deoxy-2'-fluorouridine-3'-phosphate
  modified_base 11: mod_base = OTHER; note = 2'-deoxy-2'-fluoroadenosine-3'-phosphate
  modified_base 12: mod_base = OTHER; note = 2'-O-methylcytidine-3'-phosphate
  modified_base 13: mod_base = OTHER; note = 2'-O-methyladenosine-3'-phosphate
  modified_base 14: mod_base = OTHER; note = 2'-O-methyladenosine-3'-phosphate
  modified_base 15: mod_base = OTHER; note = 2'-O-methylguanosine-3'-phosphate
  modified_base 16: mod_base = OTHER; note = 2'-O-methylcytidine-3'-phosphate
  modified_base 17: mod_base = OTHER; note = 2'-O-methyluridine-3'-phosphate
  modified_base 18: mod_base = OTHER; note = 2'-O-methyladenosine-3'-phosphate
  modified_base 19: mod_base = OTHER; note = 2'-O-methylcytidine-3'-phosphorothioate
  modified_base 20: mod_base = OTHER; note = 2'-O-methyluridine-3'-phosphorothioate
  modified_base 21: mod_base = OTHER; note = 2'-O-methyladenosine
acacatcattacaagctacta

SEQ ID NO: 11589 - RNA, 21 nt, synthetic construct
  source 1..21: mol_type = other RNA
  modified_base 1: mod_base = OTHER; note = 2'-O-methylcytidine-3'-phosphorothioate
  modified_base 2: mod_base = OTHER; note = 2'-O-methyladenosine-3'-phosphorothioate
  modified_base 3: mod_base = OTHER; note = 2'-O-methylcytidine-3'-phosphate
  modified_base 4: mod_base = OTHER; note = 2'-O-methyladenosine-3'-phosphate
  modified_base 5: mod_base = OTHER; note = 2'-O-methyluridine-3'-phosphate
  modified_base 6: mod_base = OTHER; note = 2'-O-docosanyl-cytidine-3'-phosphate
  modified_base 7: mod_base = OTHER; note = 2'-deoxy-2'-fluoroadenosine-3'-phosphate
  modified_base 8: mod_base = OTHER; note = 2'-O-methyluridine-3'-phosphate
  modified_base 9: mod_base = OTHER; note = 2'-deoxy-2'-fluorouridine-3'-phosphate
  modified_base 10: mod_base = OTHER; note = 2'-deoxy-2'-fluoroadenosine-3'-phosphate
  modified_base 11: mod_base = OTHER; note = 2'-deoxy-2'-fluorocytidine-3'-phosphate
  modified_base 12: mod_base = OTHER; note = 2'-O-methyladenosine-3'-phosphate
  modified_base 13: mod_base = OTHER; note = 2'-O-methyladenosine-3'-phosphate
  modified_base 14: mod_base = OTHER; note = 2'-O-methylguanosine-3'-phosphate
  modified_base 15: mod_base = OTHER; note = 2'-O-methylcytidine-3'-phosphate
  modified_base 16: mod_base = OTHER; note = 2'-O-methyluridine-3'-phosphate
  modified_base 17: mod_base = OTHER; note = 2'-O-methyladenosine-3'-phosphate
  modified_base 18: mod_base = OTHER; note = 2'-O-methylcytidine-3'-phosphate
  modified_base 19: mod_base = OTHER; note = 2'-O-methyluridine-3'-phosphorothioate
  modified_base 20: mod_base = OTHER; note = 2'-O-methyluridine-3'-phosphorothioate
  modified_base 21: mod_base = OTHER; note = 2'-O-methyladenosine
cacatcattacaagctactta

SEQ ID NO: 11590 - RNA, 21 nt, synthetic construct
  source 1..21: mol_type = other RNA
  modified_base 1: mod_base = OTHER; note = 2'-O-methyladenosine-3'-phosphorothioate
  modified_base 2: mod_base = OTHER; note = 2'-O-methyladenosine-3'-phosphorothioate
  modified_base 3: mod_base = OTHER; note = 2'-O-methylguanosine-3'-phosphate
  modified_base 4: mod_base = OTHER; note = 2'-O-methylcytidine-3'-phosphate
  modified_base 5: mod_base = OTHER; note = 2'-O-methyluridine-3'-phosphate
  modified_base 6: mod_base = OTHER; note = 2'-O-docosanyl-adenosine-3'-phosphate
  modified_base 7: mod_base = OTHER; note = 2'-deoxy-2'-fluorocytidine-3'-phosphate
  modified_base 8: mod_base = OTHER; note = 2'-O-methyluridine-3'-phosphate
  modified_base 9: mod_base = OTHER; note = 2'-deoxy-2'-fluorouridine-3'-phosphate
  modified_base 10: mod_base = OTHER; note = 2'-deoxy-2'-fluoroadenosine-3'-phosphate
  modified_base 11: mod_base = OTHER; note = 2'-deoxy-2'-fluoroguanosine-3'-phosphate
  modified_base 12: mod_base = OTHER; note = 2'-O-methyladenosine-3'-phosphate
  modified_base 13: mod_base = OTHER; note = 2'-O-methyladenosine-3'-phosphate
  modified_base 14: mod_base = OTHER; note = 2'-O-methyladenosine-3'-phosphate
  modified_base 15: mod_base = OTHER; note = 2'-O-methyluridine-3'-phosphate
  modified_base 16: mod_base = OTHER; note = 2'-O-methylguanosine-3'-phosphate
  modified_base 17: mod_base = OTHER; note = 2'-O-methyluridine-3'-phosphate
  modified_base 18: mod_base = OTHER; note = 2'-O-methyluridine-3'-phosphate
  modified_base 19: mod_base = OTHER; note = 2'-O-methyluridine-3'-phosphorothioate
  modified_base 20: mod_base = OTHER; note = 2'-O-methyladenosine-3'-phosphorothioate
  modified_base 21: mod_base = OTHER; note = 2'-O-methyladenosine
aagctacttagaaatgtttaa

SEQ ID NO: 11591 - RNA, 21 nt, synthetic construct
  source 1..21: mol_type = other RNA
  modified_base 1: mod_base = OTHER; note = 2'-O-methyluridine-3'-phosphorothioate
  modified_base 2: mod_base = OTHER; note = 2'-O-methylcytidine-3'-phosphorothioate
  modified_base 3: mod_base = OTHER; note = 2'-O-methyladenosine-3'-phosphate
  modified_base 4: mod_base = OTHER; note = 2'-O-methyluridine-3'-phosphate
  modified_base 5: mod_base = OTHER; note = 2'-O-methyluridine-3'-phosphate
  modified_base 6: mod_base = OTHER; note = 2'-O-docosanyl-adenosine-3'-phosphate
  modified_base 7: mod_base = OTHER; note = 2'-deoxy-2'-fluorocytidine-3'-phosphate
  modified_base 8: mod_base = OTHER; note = 2'-O-methyladenosine-3'-phosphate
  modified_base 9: mod_base = OTHER; note = 2'-deoxy-2'-fluoroadenosine-3'-phosphate
  modified_base 10: mod_base = OTHER; note = 2'-deoxy-2'-fluoroguanosine-3'-phosphate
  modified_base 11: mod_base = OTHER; note = 2'-deoxy-2'-fluorocytidine-3'-phosphate
  modified_base 12: mod_base = OTHER; note = 2'-O-methyluridine-3'-phosphate
  modified_base 13: mod_base = OTHER; note = 2'-O-methyladenosine-3'-phosphate
  modified_base 14: mod_base = OTHER; note = 2'-O-methylcytidine-3'-phosphate
  modified_base 15: mod_base = OTHER; note = 2'-O-methyluridine-3'-phosphate
  modified_base 16: mod_base = OTHER; note = 2'-O-methyluridine-3'-phosphate
  modified_base 17: mod_base = OTHER; note = 2'-O-methyladenosine-3'-phosphate
  modified_base 18: mod_base = OTHER; note = 2'-O-methylguanosine-3'-phosphate
  modified_base 19: mod_base = OTHER; note = 2'-O-methyladenosine-3'-phosphorothioate
  modified_base 20: mod_base = OTHER; note = 2'-O-methyladenosine-3'-phosphorothioate
  modified_base 21: mod_base = OTHER; note = 2'-O-methyladenosine
tcattacaagctacttagaaa

SEQ ID NO: 11592 - RNA, 21 nt, synthetic construct
  source 1..21: mol_type = other RNA
  modified_base 1: mod_base = OTHER; note = 2'-O-methyladenosine-3'-phosphorothioate
  modified_base 2: mod_base = OTHER; note = 2'-O-methylcytidine-3'-phosphorothioate
  modified_base 3: mod_base = OTHER; note = 2'-O-methyladenosine-3'-phosphate
  modified_base 4: mod_base = OTHER; note = 2'-O-methyladenosine-3'-phosphate
  modified_base 5: mod_base = OTHER; note = 2'-O-methylguanosine-3'-phosphate
  modified_base 6: mod_base = OTHER; note = 2'-O-docosanyl-cytidine-3'-phosphate
  modified_base 7: mod_base = OTHER; note = 2'-deoxy-2'-fluorouridine-3'-phosphate
  modified_base 8: mod_base = OTHER; note = 2'-O-methyladenosine-3'-phosphate
  modified_base 9: mod_base = OTHER; note = 2'-deoxy-2'-fluorocytidine-3'-phosphate
  modified_base 10: mod_base = OTHER; note = 2'-deoxy-2'-fluorouridine-3'-phosphate
  modified_base 11: mod_base = OTHER; note = 2'-deoxy-2'-fluorouridine-3'-phosphate
  modified_base 12: mod_base = OTHER; note = 2'-O-methyladenosine-3'-phosphate
  modified_base 13: mod_base = OTHER; note = 2'-O-methylguanosine-3'-phosphate
  modified_base 14: mod_base = OTHER; note = 2'-O-methyladenosine-3'-phosphate
  modified_base 15: mod_base = OTHER; note = 2'-O-methyladenosine-3'-phosphate
  modified_base 16: mod_base = OTHER; note = 2'-O-methyladenosine-3'-phosphate
  modified_base 17: mod_base = OTHER; note = 2'-O-methyluridine-3'-phosphate
  modified_base 18: mod_base = OTHER; note = 2'-O-methylguanosine-3'-phosphate
  modified_base 19: mod_base = OTHER; note = 2'-O-methyluridine-3'-phosphorothioate
  modified_base 20: mod_base = OTHER; note = 2'-O-methyluridine-3'-phosphorothioate
  modified_base 21: mod_base = OTHER; note = 2'-O-methyladenosine
acaagctacttagaaatgtta

SEQ ID NO: 11593 - RNA, 21 nt, synthetic construct
  source 1..21: mol_type = other RNA
  modified_base 1: mod_base = OTHER; note = 2'-O-methylcytidine-3'-phosphorothioate
  modified_base 2: mod_base = OTHER; note = 2'-O-methyluridine-3'-phosphorothioate
  modified_base 3: mod_base = OTHER; note = 2'-O-methyladenosine-3'-phosphate
  modified_base 4: mod_base = OTHER; note = 2'-O-methylcytidine-3'-phosphate
  modified_base 5: mod_base = OTHER; note = 2'-O-methyluridine-3'-phosphate
  modified_base 6: mod_base = OTHER; note = 2'-O-docosanyl-uridine-3'-phosphate
  modified_base 7: mod_base = OTHER; note = 2'-deoxy-2'-fluoroadenosine-3'-phosphate
  modified_base 8: mod_base = OTHER; note = 2'-O-methylguanosine-3'-phosphate
  modified_base 9: mod_base = OTHER; note = 2'-deoxy-2'-fluoroadenosine-3'-phosphate
  modified_base 10: mod_base = OTHER; note = 2'-deoxy-2'-fluoroadenosine-3'-phosphate
  modified_base 11: mod_base = OTHER; note = 2'-deoxy-2'-fluoroadenosine-3'-phosphate
  modified_base 12: mod_base = OTHER; note = 2'-O-methyluridine-3'-phosphate
  modified_base 13: mod_base = OTHER; note = 2'-O-methylguanosine-3'-phosphate
  modified_base 14: mod_base = OTHER; note = 2'-O-methyluridine-3'-phosphate
  modified_base 15: mod_base = OTHER; note = 2'-O-methyluridine-3'-phosphate
  modified_base 16: mod_base = OTHER; note = 2'-O-methyluridine-3'-phosphate
  modified_base 17: mod_base = OTHER; note = 2'-O-methyladenosine-3'-phosphate
  modified_base 18: mod_base = OTHER; note = 2'-O-methylguanosine-3'-phosphate
  modified_base 19: mod_base = OTHER; note = 2'-O-methyluridine-3'-phosphorothioate
  modified_base 20: mod_base = OTHER; note = 2'-O-methyladenosine-3'-phosphorothioate
  modified_base 21: mod_base = OTHER; note = 2'-O-methyladenosine
ctacttagaaatgtttagtaa

SEQ ID NO: 11594 - RNA, 21 nt, synthetic construct
  source 1..21: mol_type = other RNA
  modified_base 1: mod_base = OTHER; note = 2'-O-methylguanosine-3'-phosphorothioate
  modified_base 2: mod_base = OTHER; note = 2'-O-methyladenosine-3'-phosphorothioate
  modified_base 3: mod_base = OTHER; note = 2'-O-methyladenosine-3'-phosphate
  modified_base 4: mod_base = OTHER; note = 2'-O-methyladenosine-3'-phosphate
  modified_base 5: mod_base = OTHER; note = 2'-O-methylcytidine-3'-phosphate
  modified_base 6: mod_base = OTHER; note = 2'-O-docosanyl-adenosine-3'-phosphate
  modified_base 7: mod_base = OTHER; note = 2'-deoxy-2'-fluorouridine-3'-phosphate
  modified_base 8: mod_base = OTHER; note = 2'-O-methyladenosine-3'-phosphate
  modified_base 9: mod_base = OTHER; note = 2'-deoxy-2'-fluorocytidine-3'-phosphate
  modified_base 10: mod_base = OTHER; note = 2'-deoxy-2'-fluorouridine-3'-phosphate
  modified_base 11: mod_base = OTHER; note = 2'-deoxy-2'-fluoroadenosine-3'-phosphate
  modified_base 12: mod_base = OTHER; note = 2'-O-methyluridine-3'-phosphate
  modified_base 13: mod_base = OTHER; note = 2'-O-methyluridine-3'-phosphate
  modified_base 14: mod_base = OTHER; note = 2'-O-methyluridine-3'-phosphate
  modified_base 15: mod_base = OTHER; note = 2'-O-methylcytidine-3'-phosphate
  modified_base 16: mod_base = OTHER; note = 2'-O-methyluridine-3'-phosphate
  modified_base 17: mod_base = OTHER; note = 2'-O-methylguanosine-3'-phosphate
  modified_base 18: mod_base = OTHER; note = 2'-O-methyluridine-3'-phosphate
  modified_base 19: mod_base = OTHER; note = 2'-O-methyluridine-3'-phosphorothioate
  modified_base 20: mod_base = OTHER; note = 2'-O-methyluridine-3'-phosphorothioate
  modified_base 21: mod_base = OTHER; note = 2'-O-methyladenosine
gaaacatactatttctgttta

SEQ ID NO: 11595 - RNA, 21 nt, synthetic construct
  source 1..21: mol_type = other RNA
  modified_base 1: mod_base = OTHER; note = 2'-O-methylcytidine-3'-phosphorothioate
  modified_base 2: mod_base = OTHER; note = 2'-O-methyluridine-3'-phosphorothioate
  modified_base 3: mod_base = OTHER; note = 2'-O-methylguanosine-3'-phosphate
  modified_base 4: mod_base = OTHER; note = 2'-O-methylcytidine-3'-phosphate
  modified_base 5: mod_base = OTHER; note = 2'-O-methyluridine-3'-phosphate
  modified_base 6: mod_base = OTHER; note = 2'-O-docosanyl-uridine-3'-phosphate
  modified_base 7: mod_base = OTHER; note = 2'-deoxy-2'-fluorocytidine-3'-phosphate
  modified_base 8: mod_base = OTHER; note = 2'-O-methyluridine-3'-phosphate
  modified_base 9: mod_base = OTHER; note = 2'-deoxy-2'-fluoroadenosine-3'-phosphate
  modified_base 10: mod_base = OTHER; note = 2'-deoxy-2'-fluoroadenosine-3'-phosphate
  modified_base 11: mod_base = OTHER; note = 2'-deoxy-2'-fluoroadenosine-3'-phosphate
  modified_base 12: mod_base = OTHER; note = 2'-O-methyluridine-3'-phosphate
  modified_base 13: mod_base = OTHER; note = 2'-O-methyladenosine-3'-phosphate
  modified_base 14: mod_base = OTHER; note = 2'-O-methyladenosine-3'-phosphate
  modified_base 15: mod_base = OTHER; note = 2'-O-methylcytidine-3'-phosphate
  modified_base 16: mod_base = OTHER; note = 2'-O-methyladenosine-3'-phosphate
  modified_base 17: mod_base = OTHER; note = 2'-O-methyladenosine-3'-phosphate
  modified_base 18: mod_base = OTHER; note = 2'-O-methyladenosine-3'-phosphate
  modified_base 19: mod_base = OTHER; note = 2'-O-methyladenosine-3'-phosphorothioate
  modified_base 20: mod_base = OTHER; note = 2'-O-methyladenosine-3'-phosphorothioate
  modified_base 21: mod_base = OTHER; note = 2'-O-methyladenosine
ctgcttctaaataacaaaaaa

SEQ ID NO: 11596 - RNA, 21 nt, synthetic construct
  source 1..21: mol_type = other RNA
  modified_base 1: mod_base = OTHER; note = 2'-O-methyluridine-3'-phosphorothioate
  modified_base 2: mod_base = OTHER; note = 2'-O-methylguanosine-3'-phosphorothioate
  modified_base 3: mod_base = OTHER; note = 2'-O-methylcytidine-3'-phosphate
  modified_base 4: mod_base = OTHER; note = 2'-O-methyluridine-3'-phosphate
  modified_base 5: mod_base = OTHER; note = 2'-O-methyluridine-3'-phosphate
  modified_base 6: mod_base = OTHER; note = 2'-O-docosanyl-cytidine-3'-phosphate
  modified_base 7: mod_base = OTHER; note = 2'-deoxy-2'-fluorouridine-3'-phosphate
  modified_base 8: mod_base = OTHER; note = 2'-O-methyladenosine-3'-phosphate
  modified_base 9: mod_base = OTHER; note = 2'-deoxy-2'-fluoroadenosine-3'-phosphate
  modified_base 10: mod_base = OTHER; note = 2'-deoxy-2'-fluoroadenosine-3'-phosphate
  modified_base 11: mod_base = OTHER; note = 2'-deoxy-2'-fluorouridine-3'-phosphate
  modified_base 12: mod_base = OTHER; note = 2'-O-methyladenosine-3'-phosphate
  modified_base 13: mod_base = OTHER; note = 2'-O-methyladenosine-3'-phosphate
  modified_base 14: mod_base = OTHER; note = 2'-O-methylcytidine-3'-phosphate
  modified_base 15: mod_base = OTHER; note = 2'-O-methyladenosine-3'-phosphate
  modified_base 16: mod_base = OTHER; note = 2'-O-methyladenosine-3'-phosphate
  modified_base 17: mod_base = OTHER; note = 2'-O-methyladenosine-3'-phosphate
  modified_base 18: mod_base = OTHER; note = 2'-O-methyladenosine-3'-phosphate
  modified_base 19: mod_base = OTHER; note = 2'-O-methyladenosine-3'-phosphorothioate
  modified_base 20: mod_base = OTHER; note = 2'-O-methyladenosine-3'-phosphorothioate
  modified_base 21: mod_base = OTHER; note = 2'-O-methyladenosine
tgcttctaaataacaaaaaaa

SEQ ID NO: 11597 - RNA, 21 nt, synthetic construct
  source 1..21: mol_type = other RNA
  modified_base 1: mod_base = OTHER; note = 2'-O-methyluridine-3'-phosphorothioate
  modified_base 2: mod_base = OTHER; note = 2'-O-methylguanosine-3'-phosphorothioate
  modified_base 3: mod_base = OTHER; note = 2'-O-methylguanosine-3'-phosphate
  modified_base 4: mod_base = OTHER; note = 2'-O-methylguanosine-3'-phosphate
  modified_base 5: mod_base = OTHER; note = 2'-O-methylcytidine-3'-phosphate
  modified_base 6: mod_base = OTHER; note = 2'-O-docosanyl-adenosine-3'-phosphate
  modified_base 7: mod_base = OTHER; note = 2'-deoxy-2'-fluorouridine-3'-phosphate
  modified_base 8: mod_base = OTHER; note = 2'-O-methyluridine-3'-phosphate
  modified_base 9: mod_base = OTHER; note = 2'-deoxy-2'-fluorouridine-3'-phosphate
  modified_base 10: mod_base = OTHER; note = 2'-deoxy-2'-fluorouridine-3'-phosphate
  modified_base 11: mod_base = OTHER; note = 2'-deoxy-2'-fluorouridine-3'-phosphate
  modified_base 12: mod_base = OTHER; note = 2'-O-methylcytidine-3'-phosphate
  modified_base 13: mod_base = OTHER; note = 2'-O-methyladenosine-3'-phosphate
  modified_base 14: mod_base = OTHER; note = 2'-O-methyladenosine-3'-phosphate
  modified_base 15: mod_base = OTHER; note = 2'-O-methyladenosine-3'-phosphate
  modified_base 16: mod_base = OTHER; note = 2'-O-methyladenosine-3'-phosphate
  modified_base 17: mod_base = OTHER; note = 2'-O-methylcytidine-3'-phosphate
  modified_base 18: mod_base = OTHER; note = 2'-O-methyladenosine-3'-phosphate
  modified_base 19: mod_base = OTHER; note = 2'-O-methyluridine-3'-phosphorothioate
  modified_base 20: mod_base = OTHER; note = 2'-O-methyluridine-3'-phosphorothioate
  modified_base 21: mod_base = OTHER; note = 2'-O-methyladenosine
tgggcatttttcaaaacatta

SEQ ID NO: 11598 - RNA, 21 nt, synthetic construct
  source 1..21: mol_type = other RNA
  modified_base 1: mod_base = OTHER; note = 2'-O-methylcytidine-3'-phosphorothioate
  modified_base 2: mod_base = OTHER; note = 2'-O-methyluridine-3'-phosphorothioate
  modified_base 3: mod_base = OTHER; note = 2'-O-methyluridine-3'-phosphate
  modified_base 4: mod_base = OTHER; note = 2'-O-methyluridine-3'-phosphate
  modified_base 5: mod_base = OTHER; note = 2'-O-methyluridine-3'-phosphate
  modified_base 6: mod_base = OTHER; note = 2'-O-docosanyl-uridine-3'-phosphate
  modified_base 7: mod_base = OTHER; note = 2'-deoxy-2'-fluorouridine-3'-phosphate
  modified_base 8: mod_base = OTHER; note = 2'-O-methyluridine-3'-phosphate
  modified_base 9: mod_base = OTHER; note = 2'-deoxy-2'-fluorocytidine-3'-phosphate
  modified_base 10: mod_base = OTHER; note = 2'-deoxy-2'-fluoroadenosine-3'-phosphate
  modified_base 11: mod_base = OTHER; note = 2'-deoxy-2'-fluorouridine-3'-phosphate
  modified_base 12: mod_base = OTHER; note = 2'-O-methylcytidine-3'-phosphate
  modified_base 13: mod_base = OTHER; note = 2'-O-methyluridine-3'-phosphate
  modified_base 14: mod_base = OTHER; note = 2'-O-methyladenosine-3'-phosphate
  modified_base 15: mod_base = OTHER; note = 2'-O-methylguanosine-3'-phosphate
  modified_base 16: mod_base = OTHER; note = 2'-O-methylcytidine-3'-phosphate
  modified_base 17: mod_base = OTHER; note = 2'-O-methylcytidine-3'-phosphate
  modified_base 18: mod_base = OTHER; note = 2'-O-methyluridine-3'-phosphate
  modified_base 19: mod_base = OTHER; note = 2'-O-methyluridine-3'-phosphorothioate
  modified_base 20: mod_base = OTHER; note = 2'-O-methylguanosine-3'-phosphorothioate
  modified_base 21: mod_base = OTHER; note = 2'-O-methyladenosine
ctttttttcatctagccttga

SEQ ID NO: 11599 - RNA, 21 nt, synthetic construct
  source 1..21: mol_type = other RNA
  modified_base 1: mod_base = OTHER; note = 2'-O-methyladenosine-3'-phosphorothioate
  modified_base 2: mod_base = OTHER; note = 2'-O-methylcytidine-3'-phosphorothioate
  modified_base 3: mod_base = OTHER; note = 2'-O-methyluridine-3'-phosphate
  modified_base 4: mod_base = OTHER; note = 2'-O-methyluridine-3'-phosphate
  modified_base 5: mod_base = OTHER; note = 2'-O-methyluridine-3'-phosphate
  modified_base 6: mod_base = OTHER; note = 2'-O-docosanyl-cytidine-3'-phosphate
  modified_base 7: mod_base = OTHER; note = 2'-deoxy-2'-fluorouridine-3'-phosphate
  modified_base 8: mod_base = OTHER; note = 2'-O-methyluridine-3'-phosphate
  modified_base 9: mod_base = OTHER; note = 2'-deoxy-2'-fluorouridine-3'-phosphate
  modified_base 10: mod_base = OTHER; note = 2'-deoxy-2'-fluorouridine-3'-phosphate
  modified_base 11: mod_base = OTHER; note = 2'-deoxy-2'-fluorouridine-3'-phosphate
  modified_base 12: mod_base = OTHER; note = 2'-O-methyluridine-3'-phosphate
  modified_base 13: mod_base = OTHER; note = 2'-O-methyluridine-3'-phosphate
  modified_base 14: mod_base = OTHER; note = 2'-O-methylcytidine-3'-phosphate
  modified_base 15: mod_base = OTHER; note = 2'-O-methyladenosine-3'-phosphate
  modified_base 16: mod_base = OTHER; note = 2'-O-methyluridine-3'-phosphate
  modified_base 17: mod_base = OTHER; note = 2'-O-methylcytidine-3'-phosphate
  modified_base 18: mod_base = OTHER; note = 2'-O-methyluridine-3'-phosphate
  modified_base 19: mod_base = OTHER; note = 2'-O-methyladenosine-3'-phosphorothioate
  modified_base 20: mod_base = OTHER; note = 2'-O-methylguanosine-3'-phosphorothioate
  modified_base 21: mod_base = OTHER; note = 2'-O-methyladenosine
actttctttttttcatctaga

SEQ ID NO: 11600 - RNA, 21 nt, synthetic construct
  source 1..21: mol_type = other RNA
  modified_base 1: mod_base = OTHER; note = 2'-O-methylcytidine-3'-phosphorothioate
  modified_base 2: mod_base = OTHER; note = 2'-O-methyluridine-3'-phosphorothioate
  modified_base 3: mod_base = OTHER; note = 2'-O-methyluridine-3'-phosphate
  modified_base 4: mod_base = OTHER; note = 2'-O-methyluridine-3'-phosphate
  modified_base 5: mod_base = OTHER; note = 2'-O-methylcytidine-3'-phosphate
  modified_base 6: mod_base = OTHER; note = 2'-O-docosanyl-uridine-3'-phosphate
  modified_base 7: mod_base = OTHER; note = 2'-deoxy-2'-fluorouridine-3'-phosphate
  modified_base 8: mod_base = OTHER; note = 2'-O-methyluridine-3'-phosphate
  modified_base 9: mod_base = OTHER; note = 2'-deoxy-2'-fluorouridine-3'-phosphate
  modified_base 10: mod_base = OTHER; note = 2'-deoxy-2'-fluorouridine-3'-phosphate
  modified_base 11: mod_base = OTHER; note = 2'-deoxy-2'-fluorouridine-3'-phosphate
  modified_base 12: mod_base = OTHER; note = 2'-O-methyluridine-3'-phosphate
  modified_base 13: mod_base = OTHER; note = 2'-O-methylcytidine-3'-phosphate
  modified_base 14: mod_base = OTHER; note = 2'-O-methyladenosine-3'-phosphate
  modified_base 15: mod_base = OTHER; note = 2'-O-methyluridine-3'-phosphate
  modified_base 16: mod_base = OTHER; note = 2'-O-methylcytidine-3'-phosphate
  modified_base 17: mod_base = OTHER; note = 2'-O-methyluridine-3'-phosphate
  modified_base 18: mod_base = OTHER; note = 2'-O-methyladenosine-3'-phosphate
  modified_base 19: mod_base = OTHER; note = 2'-O-methylguanosine-3'-phosphorothioate
  modified_base 20: mod_base = OTHER; note = 2'-O-methylcytidine-3'-phosphorothioate
  modified_base 21: mod_base = OTHER; note = 2'-O-methyladenosine
ctttctttttttcatctagca

SEQ ID NO: 11601 - RNA, 21 nt, synthetic construct
  source 1..21: mol_type = other RNA
  modified_base 1: mod_base = OTHER; note = 2'-O-methyluridine-3'-phosphorothioate
  modified_base 2: mod_base = OTHER; note = 2'-O-methyluridine-3'-phosphorothioate
  modified_base 3: mod_base = OTHER; note = 2'-O-methyluridine-3'-phosphate
  modified_base 4: mod_base = OTHER; note = 2'-O-methylcytidine-3'-phosphate
  modified_base 5: mod_base = OTHER; note = 2'-O-methyluridine-3'-phosphate
  modified_base 6: mod_base = OTHER; note = 2'-O-docosanyl-uridine-3'-phosphate
  modified_base 7: mod_base = OTHER; note = 2'-deoxy-2'-fluorouridine-3'-phosphate
  modified_base 8: mod_base = OTHER; note = 2'-O-methyluridine-3'-phosphate
  modified_base 9: mod_base = OTHER; note = 2'-deoxy-2'-fluorouridine-3'-phosphate
  modified_base 10: mod_base = OTHER; note = 2'-deoxy-2'-fluorouridine-3'-phosphate
  modified_base 11: mod_base = OTHER; note = 2'-deoxy-2'-fluorouridine-3'-phosphate
  modified_base 12: mod_base = OTHER; note = 2'-O-methylcytidine-3'-phosphate
  modified_base 13: mod_base = OTHER; note = 2'-O-methyladenosine-3'-phosphate
  modified_base 14: mod_base = OTHER; note = 2'-O-methyluridine-3'-phosphate
  modified_base 15: mod_base = OTHER; note = 2'-O-methylcytidine-3'-phosphate
  modified_base 16: mod_base = OTHER; note = 2'-O-methyluridine-3'-phosphate
  modified_base 17: mod_base = OTHER; note = 2'-O-methyladenosine-3'-phosphate
  modified_base 18: mod_base = OTHER; note = 2'-O-methylguanosine-3'-phosphate
  modified_base 19: mod_base = OTHER; note = 2'-O-methylcytidine-3'-phosphorothioate
  modified_base 20: mod_base = OTHER; note = 2'-O-methylcytidine-3'-phosphorothioate
  modified_base 21: mod_base = OTHER; note = 2'-O-methyladenosine
tttctttttttcatctagcca

SEQ ID NO: 11602 - RNA, 21 nt, synthetic construct
  source 1..21: mol_type = other RNA
  modified_base 1: mod_base = OTHER; note = 2'-O-methyluridine-3'-phosphorothioate
  modified_base 2: mod_base = OTHER; note = 2'-O-methyluridine-3'-phosphorothioate
  modified_base 3: mod_base = OTHER; note = 2'-O-methylcytidine-3'-phosphate
  modified_base 4: mod_base = OTHER; note = 2'-O-methyluridine-3'-phosphate
  modified_base 5: mod_base = OTHER; note = 2'-O-methyluridine-3'-phosphate
  modified_base 6: mod_base = OTHER; note = 2'-O-docosanyl-uridine-3'-phosphate
  modified_base 7: mod_base = OTHER; note = 2'-deoxy-2'-fluorouridine-3'-phosphate
  modified_base 8: mod_base = OTHER; note = 2'-O-methyluridine-3'-phosphate
  modified_base 9: mod_base = OTHER; note = 2'-deoxy-2'-fluorouridine-3'-phosphate
  modified_base 10: mod_base = OTHER; note = 2'-deoxy-2'-fluorouridine-3'-phosphate
  modified_base 11: mod_base = OTHER; note = 2'-deoxy-2'-fluorocytidine-3'-phosphate
  modified_base 12: mod_base = OTHER; note = 2'-O-methyladenosine-3'-phosphate
  modified_base 13: mod_base = OTHER; note = 2'-O-methyluridine-3'-phosphate
  modified_base 14: mod_base = OTHER; note = 2'-O-methylcytidine-3'-phosphate
  modified_base 15: mod_base = OTHER; note = 2'-O-methyluridine-3'-phosphate
  modified_base 16: mod_base = OTHER; note = 2'-O-methyladenosine-3'-phosphate
  modified_base 17: mod_base = OTHER; note = 2'-O-methylguanosine-3'-phosphate
  modified_base 18: mod_base = OTHER; note = 2'-O-methylcytidine-3'-phosphate
  modified_base 19: mod_base = OTHER; note = 2'-O-methylcytidine-3'-phosphorothioate
  modified_base 20: mod_base = OTHER; note = 2'-O-methyluridine-3'-phosphorothioate
  modified_base 21: mod_base = OTHER; note = 2'-O-methyladenosine
ttctttttttcatctagccta

SEQ ID NO: 11603 - RNA, 21 nt, synthetic construct
  source 1..21: mol_type = other RNA
  modified_base 1: mod_base = OTHER; note = 2'-O-methyluridine-3'-phosphorothioate
  modified_base 2: mod_base = OTHER; note = 2'-O-methylcytidine-3'-phosphorothioate
  modified_base 3: mod_base = OTHER; note = 2'-O-methyluridine-3'-phosphate
  modified_base 4: mod_base = OTHER; note = 2'-O-methyluridine-3'-phosphate
  modified_base 5: mod_base = OTHER; note = 2'-O-methyluridine-3'-phosphate
  modified_base 6: mod_base = OTHER; note = 2'-O-docosanyl-uridine-3'-phosphate
  modified_base 7: mod_base = OTHER; note = 2'-deoxy-2'-fluorouridine-3'-phosphate
  modified_base 8: mod_base = OTHER; note = 2'-O-methyluridine-3'-phosphate
  modified_base 9: mod_base = OTHER; note = 2'-deoxy-2'-fluorouridine-3'-phosphate
  modified_base 10: mod_base = OTHER; note = 2'-deoxy-2'-fluorocytidine-3'-phosphate
  modified_base 11: mod_base = OTHER; note = 2'-deoxy-2'-fluoroadenosine-3'-phosphate
  modified_base 12: mod_base = OTHER; note = 2'-O-methyluridine-3'-phosphate
  modified_base 13: mod_base = OTHER; note = 2'-O-methylcytidine-3'-phosphate
  modified_base 14: mod_base = OTHER; note = 2'-O-methyluridine-3'-phosphate
  modified_base 15: mod_base = OTHER; note = 2'-O-methyladenosine-3'-phosphate
  modified_base 16: mod_base = OTHER; note = 2'-O-methylguanosine-3'-phosphate
  modified_base 17: mod_base = OTHER; note = 2'-O-methylcytidine-3'-phosphate
  modified_base 18: mod_base = OTHER; note = 2'-O-methylcytidine-3'-phosphate
  modified_base 19: mod_base = OTHER; note = 2'-O-methyluridine-3'-phosphorothioate
  modified_base 20: mod_base = OTHER; note = 2'-O-methyluridine-3'-phosphorothioate
  modified_base 21: mod_base = OTHER; note = 2'-O-methyladenosine
tctttttttcatctagcctta

SEQ ID NO: 11604 - RNA, 21 nt, synthetic construct
  source 1..21: mol_type = other RNA
  modified_base 1: mod_base = OTHER; note = 2'-O-methyluridine-3'-phosphorothioate
  modified_base 2: mod_base = OTHER; note = 2'-O-methyluridine-3'-phosphorothioate
  modified_base 3: mod_base = OTHER; note = 2'-O-methyluridine-3'-phosphate
  modified_base 4: mod_base = OTHER; note = 2'-O-methyluridine-3'-phosphate
  modified_base 5: mod_base = OTHER; note = 2'-O-methyluridine-3'-phosphate
  modified_base 6: mod_base = OTHER; note = 2'-O-docosanyl-uridine-3'-phosphate
  modified_base 7: mod_base = OTHER; note = 2'-deoxy-2'-fluorouridine-3'-phosphate
  modified_base 8: mod_base = OTHER; note = 2'-O-methylcytidine-3'-phosphate
  modified_base 9: mod_base = OTHER; note = 2'-deoxy-2'-fluoroadenosine-3'-phosphate
  modified_base 10: mod_base = OTHER; note = 2'-deoxy-2'-fluorouridine-3'-phosphate
  modified_base 11: mod_base = OTHER; note = 2'-deoxy-2'-fluorocytidine-3'-phosphate
  modified_base 12: mod_base = OTHER; note = 2'-O-methyluridine-3'-phosphate
  modified_base 13: mod_base = OTHER; note = 2'-O-methyladenosine-3'-phosphate
  modified_base 14: mod_base = OTHER; note = 2'-O-methylguanosine-3'-phosphate
  modified_base 15: mod_base = OTHER; note = 2'-O-methylcytidine-3'-phosphate
  modified_base 16: mod_base = OTHER; note = 2'-O-methylcytidine-3'-phosphate
  modified_base 17: mod_base = OTHER; note = 2'-O-methyluridine-3'-phosphate
  modified_base 18: mod_base = OTHER; note = 2'-O-methyluridine-3'-phosphate
  modified_base 19: mod_base = OTHER; note = 2'-O-methylguanosine-3'-phosphorothioate
  modified_base 20: mod_base = OTHER; note = 2'-O-methylcytidine-3'-phosphorothioate
  modified_base 21: mod_base = OTHER; note = 2'-O-methyladenosine
tttttttcatctagccttgca

SEQ ID NO: 11605 - RNA, 21 nt, synthetic construct
  source 1..21: mol_type = other RNA
  modified_base 1: mod_base = OTHER; note = 2'-O-methyluridine-3'-phosphorothioate
  modified_base 2: mod_base = OTHER; note = 2'-O-methyluridine-3'-phosphorothioate
  modified_base 3: mod_base = OTHER; note = 2'-O-methyluridine-3'-phosphate
  modified_base 4: mod_base = OTHER; note = 2'-O-methyluridine-3'-phosphate
  modified_base 5: mod_base = OTHER; note = 2'-O-methyluridine-3'-phosphate
  modified_base 6: mod_base = OTHER; note = 2'-O-docosanyl-uridine-3'-phosphate
  modified_base 7: mod_base = OTHER; note = 2'-deoxy-2'-fluorocytidine-3'-phosphate
  modified_base 8: mod_base = OTHER; note = 2'-O-methyladenosine-3'-phosphate
  modified_base 9: mod_base = OTHER; note = 2'-deoxy-2'-fluorouridine-3'-phosphate
  modified_base 10: mod_base = OTHER; note = 2'-deoxy-2'-fluorocytidine-3'-phosphate
  modified_base 11: mod_base = OTHER; note = 2'-deoxy-2'-fluorouridine-3'-phosphate
  modified_base 12: mod_base = OTHER; note = 2'-O-methyladenosine-3'-phosphate
  modified_base 13: mod_base = OTHER; note = 2'-O-methylguanosine-3'-phosphate
  modified_base 14: mod_base = OTHER; note = 2'-O-methylcytidine-3'-phosphate
  modified_base 15: mod_base = OTHER; note = 2'-O-methylcytidine-3'-phosphate
  modified_base 16: mod_base = OTHER; note = 2'-O-methyluridine-3'-phosphate
  modified_base 17: mod_base = OTHER; note = 2'-O-methyluridine-3'-phosphate
  modified_base 18: mod_base = OTHER; note = 2'-O-methylguanosine-3'-phosphate
  modified_base 19: mod_base = OTHER; note = 2'-O-methylcytidine-3'-phosphorothioate
  modified_base 20: mod_base = OTHER; note = 2'-O-methyluridine-3'-phosphorothioate
  modified_base 21: mod_base = OTHER; note = 2'-O-methyladenosine
ttttttcatctagccttgcta

SEQ ID NO: 11606 - RNA, 21 nt, synthetic construct
  source 1..21: mol_type = other RNA
  modified_base 1: mod_base = OTHER; note = 2'-O-methyluridine-3'-phosphorothioate
  modified_base 2: mod_base = OTHER; note = 2'-O-methyluridine-3'-phosphorothioate
  modified_base 3: mod_base = OTHER; note = 2'-O-methyluridine-3'-phosphate
  modified_base 4: mod_base = OTHER; note = 2'-O-methyluridine-3'-phosphate
  modified_base 5: mod_base = OTHER; note = 2'-O-methyluridine-3'-phosphate
  modified_base 6: mod_base = OTHER; note = 2'-O-docosanyl-cytidine-3'-phosphate
  modified_base 7: mod_base = OTHER; note = 2'-deoxy-2'-fluoroadenosine-3'-phosphate
  modified_base 8: mod_base = OTHER; note = 2'-O-methyluridine-3'-phosphate
  modified_base 9: mod_base = OTHER; note = 2'-deoxy-2'-fluorocytidine-3'-phosphate
  modified_base 10: mod_base = OTHER; note = 2'-deoxy-2'-fluorouridine-3'-phosphate
  modified_base 11: mod_base = OTHER; note = 2'-deoxy-2'-fluoroadenosine-3'-phosphate
  modified_base 12: mod_base = OTHER; note = 2'-O-methylguanosine-3'-phosphate
  modified_base 13: mod_base = OTHER; note = 2'-O-methylcytidine-3'-phosphate
  modified_base 14: mod_base = OTHER; note = 2'-O-methylcytidine-3'-phosphate
  modified_base 15: mod_base = OTHER; note = 2'-O-methyluridine-3'-phosphate
  modified_base 16: mod_base = OTHER; note = 2'-O-methyluridine-3'-phosphate
  modified_base 17: mod_base = OTHER; note = 2'-O-methylguanosine-3'-phosphate
  modified_base 18: mod_base = OTHER; note = 2'-O-methylcytidine-3'-phosphate
  modified_base 19: mod_base = OTHER; note = 2'-O-methyluridine-3'-phosphorothioate
  modified_base 20: mod_base = OTHER; note = 2'-O-methyluridine-3'-phosphorothioate
  modified_base 21: mod_base = OTHER; note = 2'-O-methyladenosine
tttttcatctagccttgctta

SEQ ID NO: 11607 - RNA, 21 nt, synthetic construct
  source 1..21: mol_type = other RNA
  modified_base 1: mod_base = OTHER; note = 2'-O-methyluridine-3'-phosphorothioate
  modified_base 2: mod_base = OTHER; note = 2'-O-methyluridine-3'-phosphorothioate
  modified_base 3: mod_base = OTHER; note = 2'-O-methyluridine-3'-phosphate
  modified_base 4: mod_base = OTHER; note = 2'-O-methyluridine-3'-phosphate
  modified_base 5: mod_base = OTHER; note = 2'-O-methylcytidine-3'-phosphate
  modified_base 6: mod_base = OTHER; note = 2'-O-docosanyl-adenosine-3'-phosphate
  modified_base 7: mod_base = OTHER; note = 2'-deoxy-2'-fluorouridine-3'-phosphate
  modified_base 8: mod_base = OTHER; note = 2'-O-methylcytidine-3'-phosphate
  modified_base 9: mod_base = OTHER; note = 2'-deoxy-2'-fluorouridine-3'-phosphate
  modified_base 10: mod_base = OTHER; note = 2'-deoxy-2'-fluoroadenosine-3'-phosphate
  modified_base 11: mod_base = OTHER; note = 2'-deoxy-2'-fluoroguanosine-3'-phosphate
  modified_base 12: mod_base = OTHER; note = 2'-O-methylcytidine-3'-phosphate
  modified_base 13: mod_base = OTHER; note = 2'-O-methylcytidine-3'-phosphate
  modified_base 14: mod_base = OTHER; note = 2'-O-methyluridine-3'-phosphate
  modified_base 15: mod_base = OTHER; note = 2'-O-methyluridine-3'-phosphate
  modified_base 16: mod_base = OTHER; note = 2'-O-methylguanosine-3'-phosphate
  modified_base 17: mod_base = OTHER; note = 2'-O-methylcytidine-3'-phosphate
  modified_base 18: mod_base = OTHER; note = 2'-O-methyluridine-3'-phosphate
  modified_base 19: mod_base = OTHER; note = 2'-O-methyluridine-3'-phosphorothioate
  modified_base 20: mod_base = OTHER; note = 2'-O-methyluridine-3'-phosphorothioate
  modified_base 21: mod_base = OTHER; note = 2'-O-methyladenosine
ttttcatctagccttgcttta

SEQ ID NO: 11608 - RNA, 21 nt, synthetic construct
  source 1..21: mol_type = other RNA
  modified_base 1: mod_base = OTHER; note = 2'-O-methyluridine-3'-phosphorothioate
  modified_base 2: mod_base = OTHER; note = 2'-O-methyluridine-3'-phosphorothioate
  modified_base 3: mod_base = OTHER; note = 2'-O-methylcytidine-3'-phosphate
  modified_base 4: mod_base = OTHER; note = 2'-O-methyladenosine-3'-phosphate
  modified_base 5: mod_base = OTHER; note = 2'-O-methyluridine-3'-phosphate
  modified_base 6: mod_base = OTHER; note = 2'-O-docosanyl-cytidine-3'-phosphate
  modified_base 7: mod_base = OTHER; note = 2'-deoxy-2'-fluorouridine-3'-phosphate
  modified_base 8: mod_base = OTHER; note = 2'-O-methyladenosine-3'-phosphate
  modified_base 9: mod_base = OTHER; note = 2'-deoxy-2'-fluoroguanosine-3'-phosphate
  modified_base 10: mod_base = OTHER; note = 2'-deoxy-2'-fluorocytidine-3'-phosphate
  modified_base 11: mod_base = OTHER; note = 2'-deoxy-2'-fluorocytidine-3'-phosphate
  modified_base 12: mod_base = OTHER; note = 2'-O-methyluridine-3'-phosphate
  modified_base 13: mod_base = OTHER; note = 2'-O-methyluridine-3'-phosphate
  modified_base 14: mod_base = OTHER; note = 2'-O-methylguanosine-3'-phosphate
  modified_base 15: mod_base = OTHER; note = 2'-O-methylcytidine-3'-phosphate
  modified_base 16: mod_base = OTHER; note = 2'-O-methyluridine-3'-phosphate
  modified_base 17: mod_base = OTHER; note = 2'-O-methyluridine-3'-phosphate
  modified_base 18: mod_base = OTHER; note = 2'-O-methyluridine-3'-phosphate
  modified_base 19: mod_base = OTHER; note = 2'-O-methyladenosine-3'-phosphorothioate
  modified_base 20: mod_base = OTHER; note = 2'-O-methyluridine-3'-phosphorothioate
  modified_base 21: mod_base = OTHER; note = 2'-O-methyladenosine
ttcatctagccttgctttata

SEQ ID NO: 11609 - RNA, 21 nt, synthetic construct
  source 1..21: mol_type = other RNA
  modified_base 1: mod_base = OTHER; note = 2'-O-methylcytidine-3'-phosphorothioate
  modified_base 2: mod_base = OTHER; note = 2'-O-methylcytidine-3'-phosphorothioate
  modified_base 3: mod_base = OTHER; note = 2'-O-methyluridine-3'-phosphate
  modified_base 4: mod_base = OTHER; note = 2'-O-methyluridine-3'-phosphate
  modified_base 5: mod_base = OTHER; note = 2'-O-methyladenosine-3'-phosphate
  modified_base 6: mod_base = OTHER; note = 2'-O-docosanyl-guanosine-3'-phosphate
  modified_base 7: mod_base = OTHER; note = 2'-deoxy-2'-fluorouridine-3'-phosphate
  modified_base 8: mod_base = OTHER; note = 2'-O-methyladenosine-3'-phosphate
  modified_base 9: mod_base = OTHER; note = 2'-deoxy-2'-fluorocytidine-3'-phosphate
  modified_base 10: mod_base = OTHER; note = 2'-deoxy-2'-fluorouridine-3'-phosphate
  modified_base 11: mod_base = OTHER; note = 2'-deoxy-2'-fluorocytidine-3'-phosphate
  modified_base 12: mod_base = OTHER; note = 2'-O-methyluridine-3'-phosphate
  modified_base 13: mod_base = OTHER; note = 2'-O-methylcytidine-3'-phosphate
  modified_base 14: mod_base = OTHER; note = 2'-O-methyladenosine-3'-phosphate
  modified_base 15: mod_base = OTHER; note = 2'-O-methylguanosine-3'-phosphate
  modified_base 16: mod_base = OTHER; note = 2'-O-methyladenosine-3'-phosphate
  modified_base 17: mod_base = OTHER; note = 2'-O-methylguanosine-3'-phosphate
  modified_base 18: mod_base = OTHER; note = 2'-O-methyladenosine-3'-phosphate
  modified_base 19: mod_base = OTHER; note = 2'-O-methyluridine-3'-phosphorothioate
  modified_base 20: mod_base = OTHER; note = 2'-O-methyluridine-3'-phosphorothioate
  modified_base 21: mod_base = OTHER; note = 2'-O-methyladenosine
ccttagtactctcagagatta

SEQ ID NO: 11610 - RNA, 21 nt, synthetic construct
  source 1..21: mol_type = other RNA
  modified_base 1: mod_base = OTHER; note = 2'-O-methyluridine-3'-phosphorothioate
  modified_base 2: mod_base = OTHER; note = 2'-O-methyladenosine-3'-phosphorothioate
  modified_base 3: mod_base = OTHER; note = 2'-O-methylcytidine-3'-phosphate
  modified_base 4: mod_base = OTHER; note = 2'-O-methyluridine-3'-phosphate
  modified_base 5: mod_base = OTHER; note = 2'-O-methylcytidine-3'-phosphate
  modified_base 6: mod_base = OTHER; note = 2'-O-docosanyl-uridine-3'-phosphate
  modified_base 7: mod_base = OTHER; note = 2'-deoxy-2'-fluorocytidine-3'-phosphate
  modified_base 8: mod_base = OTHER; note = 2'-O-methyladenosine-3'-phosphate
  modified_base 9: mod_base = OTHER; note = 2'-deoxy-2'-fluoroguanosine-3'-phosphate
  modified_base 10: mod_base = OTHER; note = 2'-deoxy-2'-fluoroadenosine-3'-phosphate
  modified_base 11: mod_base = OTHER; note = 2'-deoxy-2'-fluoroguanosine-3'-phosphate
  modified_base 12: mod_base = OTHER; note = 2'-O-methyladenosine-3'-phosphate
  modified_base 13: mod_base = OTHER; note = 2'-O-methyluridine-3'-phosphate
  modified_base 14: mod_base = OTHER; note = 2'-O-methyluridine-3'-phosphate
  modified_base 15: mod_base = OTHER; note = 2'-O-methyladenosine-3'-phosphate
  modified_base 16: mod_base = OTHER; note = 2'-O-methyluridine-3'-phosphate
  modified_base 17: mod_base = OTHER; note = 2'-O-methyladenosine-3'-phosphate
  modified_base 18: mod_base = OTHER; note = 2'-O-methyluridine-3'-phosphate
  modified_base 19: mod_base = OTHER; note = 2'-O-methyladenosine-3'-phosphorothioate
  modified_base 20: mod_base = OTHER; note = 2'-O-methyladenosine-3'-phosphorothioate
  modified_base 21: mod_base = OTHER; note = 2'-O-methyladenosine
tactctcagagattatataaa

SEQ ID NO: 11611 - RNA, 21 nt, synthetic construct
  source 1..21: mol_type = other RNA
  modified_base 1: mod_base = OTHER; note = 2'-O-methyladenosine-3'-phosphorothioate
  modified_base 2: mod_base = OTHER; note = 2'-O-methylcytidine-3'-phosphorothioate
  modified_base 3: mod_base = OTHER; note = 2'-O-methyluridine-3'-phosphate
  modified_base 4: mod_base = OTHER; note = 2'-O-methylcytidine-3'-phosphate
  modified_base 5: mod_base = OTHER; note = 2'-O-methyluridine-3'-phosphate
  modified_base 6: mod_base = OTHER; note = 2'-O-docosanyl-cytidine-3'-phosphate
  modified_base 7: mod_base = OTHER; note = 2'-deoxy-2'-fluoroadenosine-3'-phosphate
  modified_base 8: mod_base = OTHER; note = 2'-O-methylguanosine-3'-phosphate
  modified_base 9: mod_base = OTHER; note = 2'-deoxy-2'-fluoroadenosine-3'-phosphate
  modified_base 10: mod_base = OTHER; note = 2'-deoxy-2'-fluoroguanosine-3'-phosphate
  modified_base 11: mod_base = OTHER; note = 2'-deoxy-2'-fluoroadenosine-3'-phosphate
  modified_base 12: mod_base = OTHER; note = 2'-O-methyluridine-3'-phosphate
  modified_base 13: mod_base = OTHER; note = 2'-O-methyluridine-3'-phosphate
  modified_base 14: mod_base = OTHER; note = 2'-O-methyladenosine-3'-phosphate
  modified_base 15: mod_base = OTHER; note = 2'-O-methyluridine-3'-phosphate
  modified_base 16: mod_base = OTHER; note = 2'-O-methyladenosine-3'-phosphate
  modified_base 17: mod_base = OTHER; note = 2'-O-methyluridine-3'-phosphate
  modified_base 18: mod_base = OTHER; note = 2'-O-methyladenosine-3'-phosphate
  modified_base 19: mod_base = OTHER; note = 2'-O-methyladenosine-3'-phosphorothioate
  modified_base 20: mod_base = OTHER; note = 2'-O-methyladenosine-3'-phosphorothioate
  modified_base 21: mod_base = OTHER; note = 2'-O-methyladenosine
actctcagagattatataaaa

SEQ ID NO: 11612 - RNA, 21 nt, synthetic construct
  source 1..21: mol_type = other RNA
  modified_base 1: mod_base = OTHER; note = 2'-O-methyladenosine-3'-phosphorothioate
  modified_base 2: mod_base = OTHER; note = 2'-O-methylguanosine-3'-phosphorothioate
  modified_base 3: mod_base = OTHER; note = 2'-O-methyluridine-3'-phosphate
  modified_base 4: mod_base = OTHER; note = 2'-O-methyluridine-3'-phosphate
  modified_base 5: mod_base = OTHER; note = 2'-O-methyladenosine-3'-phosphate
  modified_base 6: mod_base = OTHER; note = 2'-O-docosanyl-cytidine-3'-phosphate
  modified_base 7: mod_base = OTHER; note = 2'-deoxy-2'-fluorouridine-3'-phosphate
  modified_base 8: mod_base = OTHER; note = 2'-O-methyladenosine-3'-phosphate
  modified_base 9: mod_base = OTHER; note = 2'-deoxy-2'-fluoroguanosine-3'-phosphate
  modified_base 10: mod_base = OTHER; note = 2'-deoxy-2'-fluorocytidine-3'-phosphate
  modified_base 11: mod_base = OTHER; note = 2'-deoxy-2'-fluoroadenosine-3'-phosphate
  modified_base 12: mod_base = OTHER; note = 2'-O-methylguanosine-3'-phosphate
  modified_base 13: mod_base = OTHER; note = 2'-O-methyladenosine-3'-phosphate
  modified_base 14: mod_base = OTHER; note = 2'-O-methyladenosine-3'-phosphate
  modified_base 15: mod_base = OTHER; note = 2'-O-methylcytidine-3'-phosphate
  modified_base 16: mod_base = OTHER; note = 2'-O-methyluridine-3'-phosphate
  modified_base 17: mod_base = OTHER; note = 2'-O-methylcytidine-3'-phosphate
  modified_base 18: mod_base = OTHER; note = 2'-O-methyluridine-3'-phosphate
  modified_base 19: mod_base = OTHER; note = 2'-O-methyluridine-3'-phosphorothioate
  modified_base 20: mod_base = OTHER; note = 2'-O-methyladenosine-3'-phosphorothioate
  modified_base 21: mod_base = OTHER; note = 2'-O-methyladenosine
agttactagcagaactcttaa

SEQ ID NO: 11613 - RNA, 21 nt, synthetic construct
  source 1..21: mol_type = other RNA
  modified_base 1: mod_base = OTHER; note = 2'-O-methylcytidine-3'-phosphorothioate
  modified_base 2: mod_base = OTHER; note = 2'-O-methyladenosine-3'-phosphorothioate
  modified_base 3: mod_base = OTHER; note = 2'-O-methylguanosine-3'-phosphate
  modified_base 4: mod_base = OTHER; note = 2'-O-methylcytidine-3'-phosphate
  modified_base 5: mod_base = OTHER; note = 2'-O-methyladenosine-3'-phosphate
  modified_base 6: mod_base = OTHER; note = 2'-O-docosanyl-cytidine-3'-phosphate
  modified_base 7: mod_base = OTHER; note = 2'-deoxy-2'-fluorouridine-3'-phosphate
  modified_base 8: mod_base = OTHER; note = 2'-O-methylguanosine-3'-phosphate
  modified_base 9: mod_base = OTHER; note = 2'-deoxy-2'-fluorouridine-3'-phosphate
  modified_base 10: mod_base = OTHER; note = 2'-deoxy-2'-fluorouridine-3'-phosphate
  modified_base 11: mod_base = OTHER; note = 2'-deoxy-2'-fluorocytidine-3'-phosphate
  modified_base 12: mod_base = OTHER; note = 2'-O-methylcytidine-3'-phosphate
  modified_base 13: mod_base = OTHER; note = 2'-O-methylcytidine-3'-phosphate
  modified_base 14: mod_base = OTHER; note = 2'-O-methyluridine-3'-phosphate
  modified_base 15: mod_base = OTHER; note = 2'-O-methylguanosine-3'-phosphate
  modified_base 16: mod_base = OTHER; note = 2'-O-methylcytidine-3'-phosphate
  modified_base 17: mod_base = OTHER; note = 2'-O-methylcytidine-3'-phosphate
  modified_base 18: mod_base = OTHER; note = 2'-O-methyladenosine-3'-phosphate
  modified_base 19: mod_base = OTHER; note = 2'-O-methyluridine-3'-phosphorothioate
  modified_base 20: mod_base = OTHER; note = 2'-O-methyladenosine-3'-phosphorothioate
  modified_base 21: mod_base = OTHER; note = 2'-O-methyladenosine
cagcactgttccctgccataa

SEQ ID NO: 11614 - RNA, 21 nt, synthetic construct
  source 1..21: mol_type = other RNA
  modified_base 1: mod_base = OTHER; note = 2'-O-methyladenosine-3'-phosphorothioate
  modified_base 2: mod_base = OTHER; note = 2'-O-methylguanosine-3'-phosphorothioate
  modified_base 3: mod_base = OTHER; note = 2'-O-methylcytidine-3'-phosphate
  modified_base 4: mod_base = OTHER; note = 2'-O-methyladenosine-3'-phosphate
  modified_base 5: mod_base = OTHER; note = 2'-O-methylcytidine-3'-phosphate
  modified_base 6: mod_base = OTHER; note = 2'-O-docosanyl-uridine-3'-phosphate
  modified_base 7: mod_base = OTHER; note = 2'-deoxy-2'-fluoroguanosine-3'-phosphate
  modified_base 8: mod_base = OTHER; note = 2'-O-methyluridine-3'-phosphate
  modified_base 9: mod_base = OTHER; note = 2'-deoxy-2'-fluorouridine-3'-phosphate
  modified_base 10: mod_base = OTHER; note = 2'-deoxy-2'-fluorocytidine-3'-phosphate
  modified_base 11: mod_base = OTHER; note = 2'-deoxy-2'-fluorocytidine-3'-phosphate
  modified_base 12: mod_base = OTHER; note = 2'-O-methylcytidine-3'-phosphate
  modified_base 13: mod_base = OTHER; note = 2'-O-methyluridine-3'-phosphate
  modified_base 14: mod_base = OTHER; note = 2'-O-methylguanosine-3'-phosphate
  modified_base 15: mod_base = OTHER; note = 2'-O-methylcytidine-3'-phosphate
  modified_base 16: mod_base = OTHER; note = 2'-O-methylcytidine-3'-phosphate
  modified_base 17: mod_base = OTHER; note = 2'-O-methyladenosine-3'-phosphate
  modified_base 18: mod_base = OTHER; note = 2'-O-methyluridine-3'-phosphate
  modified_base 19: mod_base = OTHER; note = 2'-O-methyladenosine-3'-phosphorothioate
  modified_base 20: mod_base = OTHER; note = 2'-O-methyluridine-3'-phosphorothioate
  modified_base 21: mod_base = OTHER; note = 2'-O-methyladenosine
agcactgttccctgccatata

SEQ ID NO: 11615 - RNA, 21 nt, synthetic construct
  source 1..21: mol_type = other RNA
  modified_base 1: mod_base = OTHER; note = 2'-O-methylguanosine-3'-phosphorothioate
  modified_base 2: mod_base = OTHER; note = 2'-O-methylcytidine-3'-phosphorothioate
  modified_base 3: mod_base = OTHER; note = 2'-O-methyladenosine-3'-phosphate
  modified_base 4: mod_base = OTHER; note = 2'-O-methylcytidine-3'-phosphate
  modified_base 5: mod_base = OTHER; note = 2'-O-methyluridine-3'-phosphate
  modified_base 6: mod_base = OTHER; note = 2'-O-docosanyl-guanosine-3'-phosphate
  modified_base 7: mod_base = OTHER; note = 2'-deoxy-2'-fluorouridine-3'-phosphate
  modified_base 8: mod_base = OTHER; note = 2'-O-methyluridine-3'-phosphate
  modified_base 9: mod_base = OTHER; note = 2'-deoxy-2'-fluorocytidine-3'-phosphate
  modified_base 10: mod_base = OTHER; note = 2'-deoxy-2'-fluorocytidine-3'-phosphate
  modified_base 11: mod_base = OTHER; note = 2'-deoxy-2'-fluorocytidine-3'-phosphate
  modified_base 12: mod_base = OTHER; note = 2'-O-methyluridine-3'-phosphate
  modified_base 13: mod_base = OTHER; note = 2'-O-methylguanosine-3'-phosphate
  modified_base 14: mod_base = OTHER; note = 2'-O-methylcytidine-3'-phosphate
  modified_base 15: mod_base = OTHER; note = 2'-O-methylcytidine-3'-phosphate
  modified_base 16: mod_base = OTHER; note = 2'-O-methyladenosine-3'-phosphate
  modified_base 17: mod_base = OTHER; note = 2'-O-methyluridine-3'-phosphate
  modified_base 18: mod_base = OTHER; note = 2'-O-methyladenosine-3'-phosphate
  modified_base 19: mod_base = OTHER; note = 2'-O-methyluridine-3'-phosphorothioate
  modified_base 20: mod_base = OTHER; note = 2'-O-methylcytidine-3'-phosphorothioate
  modified_base 21: mod_base = OTHER; note = 2'-O-methyladenosine
gcactgttccctgccatatca

SEQ ID NO: 11616 - RNA, 21 nt, synthetic construct
  source 1..21: mol_type = other RNA
  modified_base 1: mod_base = OTHER; note = 2'-O-methylcytidine-3'-phosphorothioate
  modified_base 2: mod_base = OTHER; note = 2'-O-methyladenosine-3'-phosphorothioate
  modified_base 3: mod_base = OTHER; note = 2'-O-methylcytidine-3'-phosphate
  modified_base 4: mod_base = OTHER; note = 2'-O-methyluridine-3'-phosphate
  modified_base 5: mod_base = OTHER; note = 2'-O-methylguanosine-3'-phosphate
  modified_base 6: mod_base = OTHER; note = 2'-O-docosanyl-uridine-3'-phosphate
  modified_base 7: mod_base = OTHER; note = 2'-deoxy-2'-fluorouridine-3'-phosphate
  modified_base 8: mod_base = OTHER; note = 2'-O-methylcytidine-3'-phosphate
  modified_base 9: mod_base = OTHER; note = 2'-deoxy-2'-fluorocytidine-3'-phosphate
  modified_base 10: mod_base = OTHER; note = 2'-deoxy-2'-fluorocytidine-3'-phosphate
  modified_base 11: mod_base = OTHER; note = 2'-deoxy-2'-fluorouridine-3'-phosphate
  modified_base 12: mod_base = OTHER; note = 2'-O-methylguanosine-3'-phosphate
  modified_base 13: mod_base = OTHER; note = 2'-O-methylcytidine-3'-phosphate
  modified_base 14: mod_base = OTHER; note = 2'-O-methylcytidine-3'-phosphate
  modified_base 15: mod_base = OTHER; note = 2'-O-methyladenosine-3'-phosphate
  modified_base 16: mod_base = OTHER; note = 2'-O-methyluridine-3'-phosphate
  modified_base 17: mod_base = OTHER; note = 2'-O-methyladenosine-3'-phosphate
  modified_base 18: mod_base = OTHER; note = 2'-O-methyluridine-3'-phosphate
  modified_base 19: mod_base = OTHER; note = 2'-O-methylcytidine-3'-phosphorothioate
  modified_base 20: mod_base = OTHER; note = 2'-O-methylcytidine-3'-phosphorothioate
  modified_base 21: mod_base = OTHER; note = 2'-O-methyladenosine
cactgttccctgccatatcca

SEQ ID NO: 11617 - RNA, 21 nt, synthetic construct
  source 1..21: mol_type = other RNA
  modified_base 1: mod_base = OTHER; note = 2'-O-methylcytidine-3'-phosphorothioate
  modified_base 2: mod_base = OTHER; note = 2'-O-methyladenosine-3'-phosphorothioate
  modified_base 3: mod_base = OTHER; note = 2'-O-methyladenosine-3'-phosphate
  modified_base 4: mod_base = OTHER; note = 2'-O-methylcytidine-3'-phosphate
  modified_base 5: mod_base = OTHER; note = 2'-O-methyluridine-3'-phosphate
  modified_base 6: mod_base = OTHER; note = 2'-O-docosanyl-uridine-3'-phosphate
  modified_base 7: mod_base = OTHER; note = 2'-deoxy-2'-fluorouridine-3'-phosphate
  modified_base 8: mod_base = OTHER; note = 2'-O-methyluridine-3'-phosphate
  modified_base 9: mod_base = OTHER; note = 2'-deoxy-2'-fluoroadenosine-3'-phosphate
  modified_base 10: mod_base = OTHER; note = 2'-deoxy-2'-fluorocytidine-3'-phosphate
  modified_base 11: mod_base = OTHER; note = 2'-deoxy-2'-fluorouridine-3'-phosphate
  modified_base 12: mod_base = OTHER; note = 2'-O-methylguanosine-3'-phosphate
  modified_base 13: mod_base = OTHER; note = 2'-O-methyladenosine-3'-phosphate
  modified_base 14: mod_base = OTHER; note = 2'-O-methyluridine-3'-phosphate
  modified_base 15: mod_base = OTHER; note = 2'-O-methyluridine-3'-phosphate
  modified_base 16: mod_base = OTHER; note = 2'-O-methyladenosine-3'-phosphate
  modified_base 17: mod_base = OTHER; note = 2'-O-methyladenosine-3'-phosphate
  modified_base 18: mod_base = OTHER; note = 2'-O-methyladenosine-3'-phosphate
  modified_base 19: mod_base = OTHER; note = 2'-O-methyladenosine-3'-phosphorothioate
  modified_base 20: mod_base = OTHER; note = 2'-O-methyladenosine-3'-phosphorothioate
  modified_base 21: mod_base = OTHER; note = 2'-O-methyladenosine
caacttttactgattaaaaaa

SEQ ID NO: 11618 - RNA, 21 nt, synthetic construct
  source 1..21: mol_type = other RNA
  modified_base 1: mod_base = OTHER; note = 2'-O-methylguanosine-3'-phosphorothioate
  modified_base 2: mod_base = OTHER; note = 2'-O-methyluridine-3'-phosphorothioate
  modified_base 3: mod_base = OTHER; note = 2'-O-methyladenosine-3'-phosphate
  modified_base 4: mod_base = OTHER; note = 2'-O-methyladenosine-3'-phosphate
  modified_base 5: mod_base = OTHER; note = 2'-O-methyluridine-3'-phosphate
  modified_base 6: mod_base = OTHER; note = 2'-O-docosanyl-guanosine-3'-phosphate
  modified_base 7: mod_base = OTHER; note = 2'-deoxy-2'-fluorouridine-3'-phosphate
  modified_base 8: mod_base = OTHER; note = 2'-O-methylguanosine-3'-phosphate
  modified_base 9: mod_base = OTHER; note = 2'-deoxy-2'-fluorocytidine-3'-phosphate
  modified_base 10: mod_base = OTHER; note = 2'-deoxy-2'-fluorocytidine-3'-phosphate
  modified_base 11: mod_base = OTHER; note = 2'-deoxy-2'-fluoroadenosine-3'-phosphate
  modified_base 12: mod_base = OTHER; note = 2'-O-methyluridine-3'-phosphate
  modified_base 13: mod_base = OTHER; note = 2'-O-methyluridine-3'-phosphate
  modified_base 14: mod_base = OTHER; note = 2'-O-methylcytidine-3'-phosphate
  modified_base 15: mod_base = OTHER; note = 2'-O-methyladenosine-3'-phosphate
  modified_base 16: mod_base = OTHER; note = 2'-O-methyladenosine-3'-phosphate
  modified_base 17: mod_base = OTHER; note = 2'-O-methyluridine-3'-phosphate
  modified_base 18: mod_base = OTHER; note = 2'-O-methylguanosine-3'-phosphate
  modified_base 19: mod_base = OTHER; note = 2'-O-methyladenosine-3'-phosphorothioate
  modified_base 20: mod_base = OTHER; note = 2'-O-methyluridine-3'-phosphorothioate
  modified_base 21: mod_base = OTHER; note = 2'-O-methyladenosine
gtaatgtgccattcaatgata

SEQ ID NO: 11619 - RNA, 21 nt, synthetic construct
  source 1..21: mol_type = other RNA
  modified_base 1: mod_base = OTHER; note = 2'-O-methyluridine-3'-phosphorothioate
  modified_base 2: mod_base = OTHER; note = 2'-O-methylguanosine-3'-phosphorothioate
  modified_base 3: mod_base = OTHER; note = 2'-O-methyladenosine-3'-phosphate
  modified_base 4: mod_base = OTHER; note = 2'-O-methyluridine-3'-phosphate
  modified_base 5: mod_base = OTHER; note = 2'-O-methylguanosine-3'-phosphate
  modified_base 6: mod_base = OTHER; note = 2'-O-docosanyl-adenosine-3'-phosphate
  modified_base 7: mod_base = OTHER; note = 2'-deoxy-2'-fluorouridine-3'-phosphate
  modified_base 8: mod_base = OTHER; note = 2'-O-methyladenosine-3'-phosphate
  modified_base 9: mod_base = OTHER; note = 2'-deoxy-2'-fluoroadenosine-3'-phosphate
  modified_base 10: mod_base = OTHER; note = 2'-deoxy-2'-fluoroadenosine-3'-phosphate
  modified_base 11: mod_base = OTHER; note = 2'-deoxy-2'-fluoroadenosine-3'-phosphate
  modified_base 12: mod_base = OTHER; note = 2'-O-methyluridine-3'-phosphate
  modified_base 13: mod_base = OTHER; note = 2'-O-methylcytidine-3'-phosphate
  modified_base 14: mod_base = OTHER; note = 2'-O-methylcytidine-3'-phosphate
  modified_base 15: mod_base = OTHER; note = 2'-O-methylcytidine-3'-phosphate
  modified_base 16: mod_base = OTHER; note = 2'-O-methyladenosine-3'-phosphate
  modified_base 17: mod_base = OTHER; note = 2'-O-methylcytidine-3'-phosphate
  modified_base 18: mod_base = OTHER; note = 2'-O-methyluridine-3'-phosphate
  modified_base 19: mod_base = OTHER; note = 2'-O-methyluridine-3'-phosphorothioate
  modified_base 20: mod_base = OTHER; note = 2'-O-methyluridine-3'-phosphorothioate
  modified_base 21: mod_base = OTHER; note = 2'-O-methyladenosine
tgatgataaaatcccacttta

SEQ ID NO: 11620 - RNA, 21 nt, synthetic construct
  source 1..21: mol_type = other RNA
  modified_base 1: mod_base = OTHER; note = 2'-O-methylguanosine-3'-phosphorothioate
  modified_base 2: mod_base = OTHER; note = 2'-O-methyladenosine-3'-phosphorothioate
  modified_base 3: mod_base = OTHER; note = 2'-O-methyluridine-3'-phosphate
  modified_base 4: mod_base = OTHER; note = 2'-O-methylguanosine-3'-phosphate
  modified_base 5: mod_base = OTHER; note = 2'-O-methyladenosine-3'-phosphate
  modified_base 6: mod_base = OTHER; note = 2'-O-docosanyl-uridine-3'-phosphate
  modified_base 7: mod_base = OTHER; note = 2'-deoxy-2'-fluoroadenosine-3'-phosphate
  modified_base 8: mod_base = OTHER; note = 2'-O-methyladenosine-3'-phosphate
  modified_base 9: mod_base = OTHER; note = 2'-deoxy-2'-fluoroadenosine-3'-phosphate
  modified_base 10: mod_base = OTHER; note = 2'-deoxy-2'-fluoroadenosine-3'-phosphate
  modified_base 11: mod_base = OTHER; note = 2'-deoxy-2'-fluorouridine-3'-phosphate
  modified_base 12: mod_base = OTHER; note = 2'-O-methylcytidine-3'-phosphate
  modified_base 13: mod_base = OTHER; note = 2'-O-methylcytidine-3'-phosphate
  modified_base 14: mod_base = OTHER; note = 2'-O-methylcytidine-3'-phosphate
  modified_base 15: mod_base = OTHER; note = 2'-O-methyladenosine-3'-phosphate
  modified_base 16: mod_base = OTHER; note = 2'-O-methylcytidine-3'-phosphate
  modified_base 17: mod_base = OTHER; note = 2'-O-methyluridine-3'-phosphate
  modified_base 18: mod_base = OTHER; note = 2'-O-methyluridine-3'-phosphate
  modified_base 19: mod_base = OTHER; note = 2'-O-methyluridine-3'-phosphorothioate
  modified_base 20: mod_base = OTHER; note = 2'-O-methyluridine-3'-phosphorothioate
  modified_base 21: mod_base = OTHER; note = 2'-O-methyladenosine
gatgataaaatcccactttta

SEQ ID NO: 11621 - RNA, 21 nt, synthetic construct
  source 1..21: mol_type = other RNA
  modified_base 1: mod_base = OTHER; note = 2'-O-methylcytidine-3'-phosphorothioate
  modified_base 2: mod_base = OTHER; note = 2'-O-methylcytidine-3'-phosphorothioate
  modified_base 3: mod_base = OTHER; note = 2'-O-methyladenosine-3'-phosphate
  modified_base 4: mod_base = OTHER; note = 2'-O-methylcytidine-3'-phosphate
  modified_base 5: mod_base = OTHER; note = 2'-O-methyluridine-3'-phosphate
  modified_base 6: mod_base = OTHER; note = 2'-O-docosanyl-uridine-3'-phosphate
  modified_base 7: mod_base = OTHER; note = 2'-deoxy-2'-fluorouridine-3'-phosphate
  modified_base 8: mod_base = OTHER; note = 2'-O-methyluridine-3'-phosphate
  modified_base 9: mod_base = OTHER; note = 2'-deoxy-2'-fluorocytidine-3'-phosphate
  modified_base 10: mod_base = OTHER; note = 2'-deoxy-2'-fluorouridine-3'-phosphate
  modified_base 11: mod_base = OTHER; note = 2'-deoxy-2'-fluorouridine-3'-phosphate
  modified_base 12: mod_base = OTHER; note = 2'-O-methyluridine-3'-phosphate
  modified_base 13: mod_base = OTHER; note = 2'-O-methylguanosine-3'-phosphate
  modified_base 14: mod_base = OTHER; note = 2'-O-methylguanosine-3'-phosphate
  modified_base 15: mod_base = OTHER; note = 2'-O-methylguanosine-3'-phosphate
  modified_base 16: mod_base = OTHER; note = 2'-O-methyluridine-3'-phosphate
  modified_base 17: mod_base = OTHER; note = 2'-O-methyluridine-3'-phosphate
  modified_base 18: mod_base = OTHER; note = 2'-O-methyluridine-3'-phosphate
  modified_base 19: mod_base = OTHER; note = 2'-O-methylcytidine-3'-phosphorothioate
  modified_base 20: mod_base = OTHER; note = 2'-O-methyluridine-3'-phosphorothioate
  modified_base 21: mod_base = OTHER; note = 2'-O-methyladenosine
ccacttttctttgggtttcta

SEQ ID NO: 11622 - RNA, 21 nt, synthetic construct
  source 1..21: mol_type = other RNA
  modified_base 1: mod_base = OTHER; note = 2'-O-methylcytidine-3'-phosphorothioate
  modified_base 2: mod_base = OTHER; note = 2'-O-methyladenosine-3'-phosphorothioate
  modified_base 3: mod_base = OTHER; note = 2'-O-methylcytidine-3'-phosphate
  modified_base 4: mod_base = OTHER; note = 2'-O-methyluridine-3'-phosphate
  modified_base 5: mod_base = OTHER; note = 2'-O-methyluridine-3'-phosphate
  modified_base 6: mod_base = OTHER; note = 2'-O-docosanyl-uridine-3'-phosphate
  modified_base 7: mod_base = OTHER; note = 2'-deoxy-2'-fluorouridine-3'-phosphate
  modified_base 8: mod_base = OTHER; note = 2'-O-methylcytidine-3'-phosphate
  modified_base 9: mod_base = OTHER; note = 2'-deoxy-2'-fluorouridine-3'-phosphate
  modified_base 10: mod_base = OTHER; note = 2'-deoxy-2'-fluorouridine-3'-phosphate
  modified_base 11: mod_base = OTHER; note = 2'-deoxy-2'-fluorouridine-3'-phosphate
  modified_base 12: mod_base = OTHER; note = 2'-O-methylguanosine-3'-phosphate
  modified_base 13: mod_base = OTHER; note = 2'-O-methylguanosine-3'-phosphate
  modified_base 14: mod_base = OTHER; note = 2'-O-methylguanosine-3'-phosphate
  modified_base 15: mod_base = OTHER; note = 2'-O-methyluridine-3'-phosphate
  modified_base 16: mod_base = OTHER; note = 2'-O-methyluridine-3'-phosphate
  modified_base 17: mod_base = OTHER; note = 2'-O-methyluridine-3'-phosphate
  modified_base 18: mod_base = OTHER; note = 2'-O-methylcytidine-3'-phosphate
  modified_base 19: mod_base = OTHER; note = 2'-O-methyluridine-3'-phosphorothioate
  modified_base 20: mod_base = OTHER; note = 2'-O-methyladenosine-3'-phosphorothioate
  modified_base 21: mod_base = OTHER; note = 2'-O-methyladenosine
cacttttctttgggtttctaa

SEQ ID NO: 11623 - RNA, 21 nt, synthetic construct
  source 1..21: mol_type = other RNA
  modified_base 1: mod_base = OTHER; note = 2'-O-methyladenosine-3'-phosphorothioate
  modified_base 2: mod_base = OTHER; note = 2'-O-methylcytidine-3'-phosphorothioate
  modified_base 3: mod_base = OTHER; note = 2'-O-methyluridine-3'-phosphate
  modified_base 4: mod_base = OTHER; note = 2'-O-methyluridine-3'-phosphate
  modified_base 5: mod_base = OTHER; note = 2'-O-methyluridine-3'-phosphate
  modified_base 6: mod_base = OTHER; note = 2'-O-docosanyl-uridine-3'-phosphate
  modified_base 7: mod_base = OTHER; note = 2'-deoxy-2'-fluorocytidine-3'-phosphate
  modified_base 8: mod_base = OTHER; note = 2'-O-methyluridine-3'-phosphate
  modified_base 9: mod_base = OTHER; note = 2'-deoxy-2'-fluorouridine-3'-phosphate
  modified_base 10: mod_base = OTHER; note = 2'-deoxy-2'-fluorouridine-3'-phosphate
  modified_base 11: mod_base = OTHER; note = 2'-deoxy-2'-fluoroguanosine-3'-phosphate
  modified_base 12: mod_base = OTHER; note = 2'-O-methylguanosine-3'-phosphate
  modified_base 13: mod_base = OTHER; note = 2'-O-methylguanosine-3'-phosphate
  modified_base 14: mod_base = OTHER; note = 2'-O-methyluridine-3'-phosphate
  modified_base 15: mod_base = OTHER; note = 2'-O-methyluridine-3'-phosphate
  modified_base 16: mod_base = OTHER; note = 2'-O-methyluridine-3'-phosphate
  modified_base 17: mod_base = OTHER; note = 2'-O-methylcytidine-3'-phosphate
  modified_base 18: mod_base = OTHER; note = 2'-O-methyluridine-3'-phosphate
  modified_base 19: mod_base = OTHER; note = 2'-O-methyladenosine-3'-phosphorothioate
  modified_base 20: mod_base = OTHER; note = 2'-O-methylcytidine-3'-phosphorothioate
  modified_base 21: mod_base = OTHER; note = 2'-O-methyladenosine
acttttctttgggtttctaca

SEQ ID NO: 11624 - RNA, 21 nt, synthetic construct
  source 1..21: mol_type = other RNA
  modified_base 1: mod_base = OTHER; note = 2'-O-methylcytidine-3'-phosphorothioate
  modified_base 2: mod_base = OTHER; note = 2'-O-methyluridine-3'-phosphorothioate
  modified_base 3: mod_base = OTHER; note = 2'-O-methyluridine-3'-phosphate
  modified_base 4: mod_base = OTHER; note = 2'-O-methyluridine-3'-phosphate
  modified_base 5: mod_base = OTHER; note = 2'-O-methyluridine-3'-phosphate
  modified_base 6: mod_base = OTHER; note = 2'-O-docosanyl-cytidine-3'-phosphate
  modified_base 7: mod_base = OTHER; note = 2'-deoxy-2'-fluorouridine-3'-phosphate
  modified_base 8: mod_base = OTHER; note = 2'-O-methyluridine-3'-phosphate
  modified_base 9: mod_base = OTHER; note = 2'-deoxy-2'-fluorouridine-3'-phosphate
  modified_base 10: mod_base = OTHER; note = 2'-deoxy-2'-fluoroguanosine-3'-phosphate
  modified_base 11: mod_base = OTHER; note = 2'-deoxy-2'-fluoroguanosine-3'-phosphate
  modified_base 12: mod_base = OTHER; note = 2'-O-methylguanosine-3'-phosphate
  modified_base 13: mod_base = OTHER; note = 2'-O-methyluridine-3'-phosphate
  modified_base 14: mod_base = OTHER; note = 2'-O-methyluridine-3'-phosphate
  modified_base 15: mod_base = OTHER; note = 2'-O-methyluridine-3'-phosphate
  modified_base 16: mod_base = OTHER; note = 2'-O-methylcytidine-3'-phosphate
  modified_base 17: mod_base = OTHER; note = 2'-O-methyluridine-3'-phosphate
  modified_base 18: mod_base = OTHER; note = 2'-O-methyladenosine-3'-phosphate
  modified_base 19: mod_base = OTHER; note = 2'-O-methylcytidine-3'-phosphorothioate
  modified_base 20: mod_base = OTHER; note = 2'-O-methyluridine-3'-phosphorothioate
  modified_base 21: mod_base = OTHER; note = 2'-O-methyladenosine
cttttctttgggtttctacta

SEQ ID NO: 11625 - RNA, 21 nt, synthetic construct
  source 1..21: mol_type = other RNA
  modified_base 1: mod_base = OTHER; note = 2'-O-methyluridine-3'-phosphorothioate
  modified_base 2: mod_base = OTHER; note = 2'-O-methyluridine-3'-phosphorothioate
  modified_base 3: mod_base = OTHER; note = 2'-O-methyluridine-3'-phosphate
  modified_base 4: mod_base = OTHER; note = 2'-O-methyluridine-3'-phosphate
  modified_base 5: mod_base = OTHER; note = 2'-O-methylcytidine-3'-phosphate
  modified_base 6: mod_base = OTHER; note = 2'-O-docosanyl-uridine-3'-phosphate
  modified_base 7: mod_base = OTHER; note = 2'-deoxy-2'-fluorouridine-3'-phosphate
  modified_base 8: mod_base = OTHER; note = 2'-O-methyluridine-3'-phosphate
  modified_base 9: mod_base = OTHER; note = 2'-deoxy-2'-fluoroguanosine-3'-phosphate
  modified_base 10: mod_base = OTHER; note = 2'-deoxy-2'-fluoroguanosine-3'-phosphate
  modified_base 11: mod_base = OTHER; note = 2'-deoxy-2'-fluoroguanosine-3'-phosphate
  modified_base 12: mod_base = OTHER; note = 2'-O-methyluridine-3'-phosphate
  modified_base 13: mod_base = OTHER; note = 2'-O-methyluridine-3'-phosphate
  modified_base 14: mod_base = OTHER; note = 2'-O-methyluridine-3'-phosphate
  modified_base 15: mod_base = OTHER; note = 2'-O-methylcytidine-3'-phosphate
  modified_base 16: mod_base = OTHER; note = 2'-O-methyluridine-3'-phosphate
  modified_base 17: mod_base = OTHER; note = 2'-O-methyladenosine-3'-phosphate
  modified_base 18: mod_base = OTHER; note = 2'-O-methylcytidine-3'-phosphate
  modified_base 19: mod_base = OTHER; note = 2'-O-methyluridine-3'-phosphorothioate
  modified_base 20: mod_base = OTHER; note = 2'-O-methyladenosine-3'-phosphorothioate
  modified_base 21: mod_base = OTHER; note = 2'-O-methyladenosine
ttttctttgggtttctactaa

SEQ ID NO: 11626 - RNA, 21 nt, synthetic construct
  source 1..21: mol_type = other RNA
  modified_base 1: mod_base = OTHER; note = 2'-O-methyluridine-3'-phosphorothioate
  modified_base 2: mod_base = OTHER; note = 2'-O-methyluridine-3'-phosphorothioate
  modified_base 3: mod_base = OTHER; note = 2'-O-methyluridine-3'-phosphate
  modified_base 4: mod_base = OTHER; note = 2'-O-methylcytidine-3'-phosphate
  modified_base 5: mod_base = OTHER; note = 2'-O-methyluridine-3'-phosphate
  modified_base 6: mod_base = OTHER; note = 2'-O-docosanyl-uridine-3'-phosphate
  modified_base 7: mod_base = OTHER; note = 2'-deoxy-2'-fluorouridine-3'-phosphate
  modified_base 8: mod_base = OTHER; note = 2'-O-methylguanosine-3'-phosphate
  modified_base 9: mod_base = OTHER; note = 2'-deoxy-2'-fluoroguanosine-3'-phosphate
  modified_base 10: mod_base = OTHER; note = 2'-deoxy-2'-fluoroguanosine-3'-phosphate
  modified_base 11: mod_base = OTHER; note = 2'-deoxy-2'-fluorouridine-3'-phosphate
  modified_base 12: mod_base = OTHER; note = 2'-O-methyluridine-3'-phosphate
  modified_base 13: mod_base = OTHER; note = 2'-O-methyluridine-3'-phosphate
  modified_base 14: mod_base = OTHER; note = 2'-O-methylcytidine-3'-phosphate
  modified_base 15: mod_base = OTHER; note = 2'-O-methyluridine-3'-phosphate
  modified_base 16: mod_base = OTHER; note = 2'-O-methyladenosine-3'-phosphate
  modified_base 17: mod_base = OTHER; note = 2'-O-methylcytidine-3'-phosphate
  modified_base 18: mod_base = OTHER; note = 2'-O-methyluridine-3'-phosphate
  modified_base 19: mod_base = OTHER; note = 2'-O-methyladenosine-3'-phosphorothioate
  modified_base 20: mod_base = OTHER; note = 2'-O-methyladenosine-3'-phosphorothioate
  modified_base 21: mod_base = OTHER; note = 2'-O-methyladenosine
tttctttgggtttctactaaa

SEQ ID NO: 11627 - RNA, 21 nt, synthetic construct
  source 1..21: mol_type = other RNA
  modified_base 1: mod_base = OTHER; note = 2'-O-methyluridine-3'-phosphorothioate
  modified_base 2: mod_base = OTHER; note = 2'-O-methyluridine-3'-phosphorothioate
  modified_base 3: mod_base = OTHER; note = 2'-O-methylcytidine-3'-phosphate
  modified_base 4: mod_base = OTHER; note = 2'-O-methyluridine-3'-phosphate
  modified_base 5: mod_base = OTHER; note = 2'-O-methyluridine-3'-phosphate
  modified_base 6: mod_base = OTHER; note = 2'-O-docosanyl-uridine-3'-phosphate
  modified_base 7: mod_base = OTHER; note = 2'-deoxy-2'-fluoroguanosine-3'-phosphate
  modified_base 8: mod_base = OTHER; note = 2'-O-methylguanosine-3'-phosphate
  modified_base 9: mod_base = OTHER; note = 2'-deoxy-2'-fluoroguanosine-3'-phosphate
  modified_base 10: mod_base = OTHER; note = 2'-deoxy-2'-fluorouridine-3'-phosphate
  modified_base 11: mod_base = OTHER; note = 2'-deoxy-2'-fluorouridine-3'-phosphate
  modified_base 12: mod_base = OTHER; note = 2'-O-methyluridine-3'-phosphate
  modified_base 13: mod_base = OTHER; note = 2'-O-methylcytidine-3'-phosphate
  modified_base 14: mod_base = OTHER; note = 2'-O-methyluridine-3'-phosphate
  modified_base 15: mod_base = OTHER; note = 2'-O-methyladenosine-3'-phosphate
  modified_base 16: mod_base = OTHER; note = 2'-O-methylcytidine-3'-phosphate
  modified_base 17: mod_base = OTHER; note = 2'-O-methyluridine-3'-phosphate
  modified_base 18: mod_base = OTHER; note = 2'-O-methyladenosine-3'-phosphate
  modified_base 19: mod_base = OTHER; note = 2'-O-methyladenosine-3'-phosphorothioate
  modified_base 20: mod_base = OTHER; note = 2'-O-methyladenosine-3'-phosphorothioate
  modified_base 21: mod_base = OTHER; note = 2'-O-methyladenosine
ttctttgggtttctactaaaa

SEQ ID NO: 11628 - RNA, 21 nt, synthetic construct
  source 1..21: mol_type = other RNA
  modified_base 1: mod_base = OTHER; note = 2'-O-methyluridine-3'-phosphorothioate
  modified_base 2: mod_base = OTHER; note = 2'-O-methylcytidine-3'-phosphorothioate
  modified_base 3: mod_base = OTHER; note = 2'-O-methyluridine-3'-phosphate
  modified_base 4: mod_base = OTHER; note = 2'-O-methyluridine-3'-phosphate
  modified_base 5: mod_base = OTHER; note = 2'-O-methyluridine-3'-phosphate
  modified_base 6: mod_base = OTHER; note = 2'-O-docosanyl-guanosine-3'-phosphate
  modified_base 7: mod_base = OTHER; note = 2'-deoxy-2'-fluoroguanosine-3'-phosphate
  modified_base 8: mod_base = OTHER; note = 2'-O-methylguanosine-3'-phosphate
  modified_base 9: mod_base = OTHER; note = 2'-deoxy-2'-fluorouridine-3'-phosphate
  modified_base 10: mod_base = OTHER; note = 2'-deoxy-2'-fluorouridine-3'-phosphate
  modified_base 11: mod_base = OTHER; note = 2'-deoxy-2'-fluorouridine-3'-phosphate
  modified_base 12: mod_base = OTHER; note = 2'-O-methylcytidine-3'-phosphate
  modified_base 13: mod_base = OTHER; note = 2'-O-methyluridine-3'-phosphate
  modified_base 14: mod_base = OTHER; note = 2'-O-methyladenosine-3'-phosphate
  modified_base 15: mod_base = OTHER; note = 2'-O-methylcytidine-3'-phosphate
  modified_base 16: mod_base = OTHER; note = 2'-O-methyluridine-3'-phosphate
  modified_base 17: mod_base = OTHER; note = 2'-O-methyladenosine-3'-phosphate
  modified_base 18: mod_base = OTHER; note = 2'-O-methyladenosine-3'-phosphate
  modified_base 19: mod_base = OTHER; note = 2'-O-methyladenosine-3'-phosphorothioate
  modified_base 20: mod_base = OTHER; note = 2'-O-methyladenosine-3'-phosphorothioate
  modified_base 21: mod_base = OTHER; note = 2'-O-methyladenosine
tctttgggtttctactaaaaa

SEQ ID NO: 11629 - RNA, 21 nt, synthetic construct
  source 1..21: mol_type = other RNA
  modified_base 1: mod_base = OTHER; note = 2'-O-methylcytidine-3'-phosphorothioate
  modified_base 2: mod_base = OTHER; note = 2'-O-methyluridine-3'-phosphorothioate
  modified_base 3: mod_base = OTHER; note = 2'-O-methyluridine-3'-phosphate
  modified_base 4: mod_base = OTHER; note = 2'-O-methyluridine-3'-phosphate
  modified_base 5: mod_base = OTHER; note = 2'-O-methylguanosine-3'-phosphate
  modified_base 6: mod_base = OTHER; note = 2'-O-docosanyl-guanosine-3'-phosphate
  modified_base 7: mod_base = OTHER; note = 2'-deoxy-2'-fluoroguanosine-3'-phosphate
  modified_base 8: mod_base = OTHER; note = 2'-O-methyluridine-3'-phosphate
  modified_base 9: mod_base = OTHER; note = 2'-deoxy-2'-fluorouridine-3'-phosphate
  modified_base 10: mod_base = OTHER; note = 2'-deoxy-2'-fluorouridine-3'-phosphate
  modified_base 11: mod_base = OTHER; note = 2'-deoxy-2'-fluorocytidine-3'-phosphate
  modified_base 12: mod_base = OTHER; note = 2'-O-methyluridine-3'-phosphate
  modified_base 13: mod_base = OTHER; note = 2'-O-methyladenosine-3'-phosphate
  modified_base 14: mod_base = OTHER; note = 2'-O-methylcytidine-3'-phosphate
  modified_base 15: mod_base = OTHER; note = 2'-O-methyluridine-3'-phosphate
  modified_base 16: mod_base = OTHER; note = 2'-O-methyladenosine-3'-phosphate
  modified_base 17: mod_base = OTHER; note = 2'-O-methyladenosine-3'-phosphate
  modified_base 18: mod_base = OTHER; note = 2'-O-methyladenosine-3'-phosphate
  modified_base 19: mod_base = OTHER; note = 2'-O-methyladenosine-3'-phosphorothioate
  modified_base 20: mod_base = OTHER; note = 2'-O-methyluridine-3'-phosphorothioate
  modified_base 21: mod_base = OTHER; note = 2'-O-methyladenosine
ctttgggtttctactaaaata

SEQ ID NO: 11630 - RNA, 21 nt, synthetic construct
  source 1..21: mol_type = other RNA
  modified_base 1: mod_base = OTHER; note = 2'-O-methyluridine-3'-phosphorothioate
  modified_base 2: mod_base = OTHER; note = 2'-O-methyluridine-3'-phosphorothioate
  modified_base 3: mod_base = OTHER; note = 2'-O-methyluridine-3'-phosphate
  modified_base 4: mod_base = OTHER; note = 2'-O-methylguanosine-3'-phosphate
  modified_base 5: mod_base = OTHER; note = 2'-O-methylguanosine-3'-phosphate
  modified_base 6: mod_base = OTHER; note = 2'-O-docosanyl-guanosine-3'-phosphate
  modified_base 7: mod_base = OTHER; note = 2'-deoxy-2'-fluorouridine-3'-phosphate
  modified_base 8: mod_base = OTHER; note = 2'-O-methyluridine-3'-phosphate
  modified_base 9: mod_base = OTHER; note = 2'-deoxy-2'-fluorouridine-3'-phosphate
  modified_base 10: mod_base = OTHER; note = 2'-deoxy-2'-fluorocytidine-3'-phosphate
  modified_base 11: mod_base = OTHER; note = 2'-deoxy-2'-fluorouridine-3'-phosphate
  modified_base 12: mod_base = OTHER; note = 2'-O-methyladenosine-3'-phosphate
  modified_base 13: mod_base = OTHER; note = 2'-O-methylcytidine-3'-phosphate
  modified_base 14: mod_base = OTHER; note = 2'-O-methyluridine-3'-phosphate
  modified_base 15: mod_base = OTHER; note = 2'-O-methyladenosine-3'-phosphate
  modified_base 16: mod_base = OTHER; note = 2'-O-methyladenosine-3'-phosphate
  modified_base 17: mod_base = OTHER; note = 2'-O-methyladenosine-3'-phosphate
  modified_base 18: mod_base = OTHER; note = 2'-O-methyladenosine-3'-phosphate
  modified_base 19: mod_base = OTHER; note = 2'-O-methyluridine-3'-phosphorothioate
  modified_base 20: mod_base = OTHER; note = 2'-O-methyladenosine-3'-phosphorothioate
  modified_base 21: mod_base = OTHER; note = 2'-O-methyladenosine
tttgggtttctactaaaataa

SEQ ID NO: 11631 - RNA, 21 nt, synthetic construct
  source 1..21: mol_type = other RNA
  modified_base 1: mod_base = OTHER; note = 2'-O-methyluridine-3'-phosphorothioate
  modified_base 2: mod_base = OTHER; note = 2'-O-methyluridine-3'-phosphorothioate
  modified_base 3: mod_base = OTHER; note = 2'-O-methylguanosine-3'-phosphate
  modified_base 4: mod_base = OTHER; note = 2'-O-methylguanosine-3'-phosphate
  modified_base 5: mod_base = OTHER; note = 2'-O-methylguanosine-3'-phosphate
  modified_base 6: mod_base = OTHER; note = 2'-O-docosanyl-uridine-3'-phosphate
  modified_base 7: mod_base = OTHER; note = 2'-deoxy-2'-fluorouridine-3'-phosphate
  modified_base 8: mod_base = OTHER; note = 2'-O-methyluridine-3'-phosphate
  modified_base 9: mod_base = OTHER; note = 2'-deoxy-2'-fluorocytidine-3'-phosphate
  modified_base 10: mod_base = OTHER; note = 2'-deoxy-2'-fluorouridine-3'-phosphate
  modified_base 11: mod_base = OTHER; note = 2'-deoxy-2'-fluoroadenosine-3'-phosphate
  modified_base 12: mod_base = OTHER; note = 2'-O-methylcytidine-3'-phosphate
  modified_base 13: mod_base = OTHER; note = 2'-O-methyluridine-3'-phosphate
  modified_base 14: mod_base = OTHER; note = 2'-O-methyladenosine-3'-phosphate
  modified_base 15: mod_base = OTHER; note = 2'-O-methyladenosine-3'-phosphate
  modified_base 16: mod_base = OTHER; note = 2'-O-methyladenosine-3'-phosphate
  modified_base 17: mod_base = OTHER; note = 2'-O-methyladenosine-3'-phosphate
  modified_base 18: mod_base = OTHER; note = 2'-O-methyluridine-3'-phosphate
  modified_base 19: mod_base = OTHER; note = 2'-O-methyladenosine-3'-phosphorothioate
  modified_base 20: mod_base = OTHER; note = 2'-O-methyladenosine-3'-phosphorothioate
  modified_base 21: mod_base = OTHER; note = 2'-O-methyladenosine
ttgggtttctactaaaataaa

SEQ ID NO: 11632 - RNA, 21 nt, synthetic construct
  source 1..21: mol_type = other RNA
  modified_base 1: mod_base = OTHER; note = 2'-O-methyladenosine-3'-phosphorothioate
  modified_base 2: mod_base = OTHER; note = 2'-O-methyladenosine-3'-phosphorothioate
  modified_base 3: mod_base = OTHER; note = 2'-O-methyladenosine-3'-phosphate
  modified_base 4: mod_base = OTHER; note = 2'-O-methyladenosine-3'-phosphate
  modified_base 5: mod_base = OTHER; note = 2'-O-methyluridine-3'-phosphate
  modified_base 6: mod_base = OTHER; note = 2'-O-docosanyl-adenosine-3'-phosphate
  modified_base 7: mod_base = OTHER; note = 2'-deoxy-2'-fluoroadenosine-3'-phosphate
  modified_base 8: mod_base = OTHER; note = 2'-O-methyluridine-3'-phosphate
  modified_base 9: mod_base = OTHER; note = 2'-deoxy-2'-fluorouridine-3'-phosphate
  modified_base 10: mod_base = OTHER; note = 2'-deoxy-2'-fluorouridine-3'-phosphate
  modified_base 11: mod_base = OTHER; note = 2'-deoxy-2'-fluoroadenosine-3'-phosphate
  modified_base 12: mod_base = OTHER; note = 2'-O-methylcytidine-3'-phosphate
  modified_base 13: mod_base = OTHER; note = 2'-O-methyluridine-3'-phosphate
  modified_base 14: mod_base = OTHER; note = 2'-O-methylcytidine-3'-phosphate
  modified_base 15: mod_base = OTHER; note = 2'-O-methyladenosine-3'-phosphate
  modified_base 16: mod_base = OTHER; note = 2'-O-methylcytidine-3'-phosphate
  modified_base 17: mod_base = OTHER; note = 2'-O-methyluridine-3'-phosphate
  modified_base 18: mod_base = OTHER; note = 2'-O-methylcytidine-3'-phosphate
  modified_base 19: mod_base = OTHER; note = 2'-O-methyladenosine-3'-phosphorothioate
  modified_base 20: mod_base = OTHER; note = 2'-O-methylguanosine-3'-phosphorothioate
  modified_base 21: mod_base = OTHER; note = 2'-O-methyladenosine
aaaataatttactcactcaga

SEQ ID NO: 11633 - RNA, 21 nt, synthetic construct
  source 1..21: mol_type = other RNA
  modified_base 1: mod_base = OTHER; note = 2'-O-methyladenosine-3'-phosphorothioate
  modified_base 2: mod_base = OTHER; note = 2'-O-methyladenosine-3'-phosphorothioate
  modified_base 3: mod_base = OTHER; note = 2'-O-methyluridine-3'-phosphate
  modified_base 4: mod_base = OTHER; note = 2'-O-methyladenosine-3'-phosphate
  modified_base 5: mod_base = OTHER; note = 2'-O-methyladenosine-3'-phosphate
  modified_base 6: mod_base = OTHER; note = 2'-O-docosanyl-uridine-3'-phosphate
  modified_base 7: mod_base = OTHER; note = 2'-deoxy-2'-fluorouridine-3'-phosphate
  modified_base 8: mod_base = OTHER; note = 2'-O-methyluridine-3'-phosphate
  modified_base 9: mod_base = OTHER; note = 2'-deoxy-2'-fluoroadenosine-3'-phosphate
  modified_base 10: mod_base = OTHER; note = 2'-deoxy-2'-fluorocytidine-3'-phosphate
  modified_base 11: mod_base = OTHER; note = 2'-deoxy-2'-fluorouridine-3'-phosphate
  modified_base 12: mod_base = OTHER; note = 2'-O-methylcytidine-3'-phosphate
  modified_base 13: mod_base = OTHER; note = 2'-O-methyladenosine-3'-phosphate
  modified_base 14: mod_base = OTHER; note = 2'-O-methylcytidine-3'-phosphate
  modified_base 15: mod_base = OTHER; note = 2'-O-methyluridine-3'-phosphate
  modified_base 16: mod_base = OTHER; note = 2'-O-methylcytidine-3'-phosphate
  modified_base 17: mod_base = OTHER; note = 2'-O-methyladenosine-3'-phosphate
  modified_base 18: mod_base = OTHER; note = 2'-O-methylguanosine-3'-phosphate
  modified_base 19: mod_base = OTHER; note = 2'-O-methyladenosine-3'-phosphorothioate
  modified_base 20: mod_base = OTHER; note = 2'-O-methylguanosine-3'-phosphorothioate
  modified_base 21: mod_base = OTHER; note = 2'-O-methyladenosine
aataatttactcactcagaga

SEQ ID NO: 11634 - RNA, 21 nt, synthetic construct
  source 1..21: mol_type = other RNA
  modified_base 1: mod_base = OTHER; note = 2'-O-methyladenosine-3'-phosphorothioate
  modified_base 2: mod_base = OTHER; note = 2'-O-methyluridine-3'-phosphorothioate
  modified_base 3: mod_base = OTHER; note = 2'-O-methyladenosine-3'-phosphate
  modified_base 4: mod_base = OTHER; note = 2'-O-methyladenosine-3'-phosphate
  modified_base 5: mod_base = OTHER; note = 2'-O-methyluridine-3'-phosphate
  modified_base 6: mod_base = OTHER; note = 2'-O-docosanyl-uridine-3'-phosphate
  modified_base 7: mod_base = OTHER; note = 2'-deoxy-2'-fluorouridine-3'-phosphate
  modified_base 8: mod_base = OTHER; note = 2'-O-methyladenosine-3'-phosphate
  modified_base 9: mod_base = OTHER; note = 2'-deoxy-2'-fluorocytidine-3'-phosphate
  modified_base 10: mod_base = OTHER; note = 2'-deoxy-2'-fluorouridine-3'-phosphate
  modified_base 11: mod_base = OTHER; note = 2'-deoxy-2'-fluorocytidine-3'-phosphate
  modified_base 12: mod_base = OTHER; note = 2'-O-methyladenosine-3'-phosphate
  modified_base 13: mod_base = OTHER; note = 2'-O-methylcytidine-3'-phosphate
  modified_base 14: mod_base = OTHER; note = 2'-O-methyluridine-3'-phosphate
  modified_base 15: mod_base = OTHER; note = 2'-O-methylcytidine-3'-phosphate
  modified_base 16: mod_base = OTHER; note = 2'-O-methyladenosine-3'-phosphate
  modified_base 17: mod_base = OTHER; note = 2'-O-methylguanosine-3'-phosphate
  modified_base 18: mod_base = OTHER; note = 2'-O-methyladenosine-3'-phosphate
  modified_base 19: mod_base = OTHER; note = 2'-O-methylguanosine-3'-phosphorothioate
  modified_base 20: mod_base = OTHER; note = 2'-O-methyluridine-3'-phosphorothioate
  modified_base 21: mod_base = OTHER; note = 2'-O-methyladenosine
ataatttactcactcagagta

SEQ ID NO: 11635 - RNA, 21 nt, synthetic construct
  source 1..21: mol_type = other RNA
  modified_base 1: mod_base = OTHER; note = 2'-O-methyluridine-3'-phosphorothioate
  modified_base 2: mod_base = OTHER; note = 2'-O-methyladenosine-3'-phosphorothioate
  modified_base 3: mod_base = OTHER; note = 2'-O-methyladenosine-3'-phosphate
  modified_base 4: mod_base = OTHER; note = 2'-O-methyluridine-3'-phosphate
  modified_base 5: mod_base = OTHER; note = 2'-O-methyluridine-3'-phosphate
  modified_base 6: mod_base = OTHER; note = 2'-O-docosanyl-uridine-3'-phosphate
  modified_base 7: mod_base = OTHER; note = 2'-deoxy-2'-fluoroadenosine-3'-phosphate
  modified_base 8: mod_base = OTHER; note = 2'-O-methylcytidine-3'-phosphate
  modified_base 9: mod_base = OTHER; note = 2'-deoxy-2'-fluorouridine-3'-phosphate
  modified_base 10: mod_base = OTHER; note = 2'-deoxy-2'-fluorocytidine-3'-phosphate
  modified_base 11: mod_base = OTHER; note = 2'-deoxy-2'-fluoroadenosine-3'-phosphate
  modified_base 12: mod_base = OTHER; note = 2'-O-methylcytidine-3'-phosphate
  modified_base 13: mod_base = OTHER; note = 2'-O-methyluridine-3'-phosphate
  modified_base 14: mod_base = OTHER; note = 2'-O-methylcytidine-3'-phosphate
  modified_base 15: mod_base = OTHER; note = 2'-O-methyladenosine-3'-phosphate
  modified_base 16: mod_base = OTHER; note = 2'-O-methylguanosine-3'-phosphate
  modified_base 17: mod_base = OTHER; note = 2'-O-methyladenosine-3'-phosphate
  modified_base 18: mod_base = OTHER; note = 2'-O-methylguanosine-3'-phosphate
  modified_base 19: mod_base = OTHER; note = 2'-O-methyluridine-3'-phosphorothioate
  modified_base 20: mod_base = OTHER; note = 2'-O-methylguanosine-3'-phosphorothioate
  modified_base 21: mod_base = OTHER; note = 2'-O-methyladenosine
taatttactcactcagagtga

SEQ ID NO: 11636 - RNA, 21 nt, synthetic construct
  source 1..21: mol_type = other RNA
  modified_base 1: mod_base = OTHER; note = 2'-O-methyladenosine-3'-phosphorothioate
  modified_base 2: mod_base = OTHER; note = 2'-O-methyladenosine-3'-phosphorothioate
  modified_base 3: mod_base = OTHER; note = 2'-O-methyluridine-3'-phosphate
  modified_base 4: mod_base = OTHER; note = 2'-O-methyluridine-3'-phosphate
  modified_base 5: mod_base = OTHER; note = 2'-O-methyluridine-3'-phosphate
  modified_base 6: mod_base = OTHER; note = 2'-O-docosanyl-adenosine-3'-phosphate
  modified_base 7: mod_base = OTHER; note = 2'-deoxy-2'-fluorocytidine-3'-phosphate
  modified_base 8: mod_base = OTHER; note = 2'-O-methyluridine-3'-phosphate
  modified_base 9: mod_base = OTHER; note = 2'-deoxy-2'-fluorocytidine-3'-phosphate
  modified_base 10: mod_base = OTHER; note = 2'-deoxy-2'-fluoroadenosine-3'-phosphate
  modified_base 11: mod_base = OTHER; note = 2'-deoxy-2'-fluorocytidine-3'-phosphate
  modified_base 12: mod_base = OTHER; note = 2'-O-methyluridine-3'-phosphate
  modified_base 13: mod_base = OTHER; note = 2'-O-methylcytidine-3'-phosphate
  modified_base 14: mod_base = OTHER; note = 2'-O-methyladenosine-3'-phosphate
  modified_base 15: mod_base = OTHER; note = 2'-O-methylguanosine-3'-phosphate
  modified_base 16: mod_base = OTHER; note = 2'-O-methyladenosine-3'-phosphate
  modified_base 17: mod_base = OTHER; note = 2'-O-methylguanosine-3'-phosphate
  modified_base 18: mod_base = OTHER; note = 2'-O-methyluridine-3'-phosphate
  modified_base 19: mod_base = OTHER; note = 2'-O-methylguanosine-3'-phosphorothioate
  modified_base 20: mod_base = OTHER; note = 2'-O-methyladenosine-3'-phosphorothioate
  modified_base 21: mod_base = OTHER; note = 2'-O-methyladenosine
aatttactcactcagagtgaa

SEQ ID NO: 11637 - RNA, 21 nt, synthetic construct
  source 1..21: mol_type = other RNA
  modified_base 1: mod_base = OTHER; note = 2'-O-methyladenosine-3'-phosphorothioate
  modified_base 2: mod_base = OTHER; note = 2'-O-methyluridine-3'-phosphorothioate
  modified_base 3: mod_base = OTHER; note = 2'-O-methyluridine-3'-phosphate
  modified_base 4: mod_base = OTHER; note = 2'-O-methyluridine-3'-phosphate
  modified_base 5: mod_base = OTHER; note = 2'-O-methyladenosine-3'-phosphate
  modified_base 6: mod_base = OTHER; note = 2'-O-docosanyl-cytidine-3'-phosphate
  modified_base 7: mod_base = OTHER; note = 2'-deoxy-2'-fluorouridine-3'-phosphate
  modified_base 8: mod_base = OTHER; note = 2'-O-methylcytidine-3'-phosphate
  modified_base 9: mod_base = OTHER; note = 2'-deoxy-2'-fluoroadenosine-3'-phosphate
  modified_base 10: mod_base = OTHER; note = 2'-deoxy-2'-fluorocytidine-3'-phosphate
  modified_base 11: mod_base = OTHER; note = 2'-deoxy-2'-fluorouridine-3'-phosphate
  modified_base 12: mod_base = OTHER; note = 2'-O-methylcytidine-3'-phosphate
  modified_base 13: mod_base = OTHER; note = 2'-O-methyladenosine-3'-phosphate
  modified_base 14: mod_base = OTHER; note = 2'-O-methylguanosine-3'-phosphate
  modified_base 15: mod_base = OTHER; note = 2'-O-methyladenosine-3'-phosphate
  modified_base 16: mod_base = OTHER; note = 2'-O-methylguanosine-3'-phosphate
  modified_base 17: mod_base = OTHER; note = 2'-O-methyluridine-3'-phosphate
  modified_base 18: mod_base = OTHER; note = 2'-O-methylguanosine-3'-phosphate
  modified_base 19: mod_base = OTHER; note = 2'-O-methyladenosine-3'-phosphorothioate
  modified_base 20: mod_base = OTHER; note = 2'-O-methylguanosine-3'-phosphorothioate
  modified_base 21: mod_base = OTHER; note = 2'-O-methyladenosine
atttactcactcagagtgaga

SEQ ID NO: 11638 - RNA, 21 nt, synthetic construct
  source 1..21: mol_type = other RNA
  modified_base 1: mod_base = OTHER; note = 2'-O-methyladenosine-3'-phosphorothioate
  modified_base 2: mod_base = OTHER; note = 2'-O-methylguanosine-3'-phosphorothioate
  modified_base 3: mod_base = OTHER; note = 2'-O-methyluridine-3'-phosphate
  modified_base 4: mod_base = OTHER; note = 2'-O-methylguanosine-3'-phosphate
  modified_base 5: mod_base = OTHER; note = 2'-O-methyladenosine-3'-phosphate
  modified_base 6: mod_base = OTHER; note = 2'-O-docosanyl-guanosine-3'-phosphate
  modified_base 7: mod_base = OTHER; note = 2'-deoxy-2'-fluoroguanosine-3'-phosphate
  modified_base 8: mod_base = OTHER; note = 2'-O-methyluridine-3'-phosphate
  modified_base 9: mod_base = OTHER; note = 2'-deoxy-2'-fluorocytidine-3'-phosphate
  modified_base 10: mod_base = OTHER; note = 2'-deoxy-2'-fluoroadenosine-3'-phosphate
  modified_base 11: mod_base = OTHER; note = 2'-deoxy-2'-fluoroadenosine-3'-phosphate
  modified_base 12: mod_base = OTHER; note = 2'-O-methyluridine-3'-phosphate
  modified_base 13: mod_base = OTHER; note = 2'-O-methylguanosine-3'-phosphate
  modified_base 14: mod_base = OTHER; note = 2'-O-methyladenosine-3'-phosphate
  modified_base 15: mod_base = OTHER; note = 2'-O-methylguanosine-3'-phosphate
  modified_base 16: mod_base = OTHER; note = 2'-O-methyladenosine-3'-phosphate
  modified_base 17: mod_base = OTHER; note = 2'-O-methyladenosine-3'-phosphate
  modified_base 18: mod_base = OTHER; note = 2'-O-methyladenosine-3'-phosphate
  modified_base 19: mod_base = OTHER; note = 2'-O-methyladenosine-3'-phosphorothioate
  modified_base 20: mod_base = OTHER; note = 2'-O-methyladenosine-3'-phosphorothioate
  modified_base 21: mod_base = OTHER; note = 2'-O-methyladenosine
agtgaggtcaatgagaaaaaa

SEQ ID NO: 11639 - RNA, 21 nt, synthetic construct
  source 1..21: mol_type = other RNA
  modified_base 1: mod_base = OTHER; note = 2'-O-methylguanosine-3'-phosphorothioate
  modified_base 2: mod_base = OTHER; note = 2'-O-methylcytidine-3'-phosphorothioate
  modified_base 3: mod_base = OTHER; note = 2'-O-methyluridine-3'-phosphate
  modified_base 4: mod_base = OTHER; note = 2'-O-methylguanosine-3'-phosphate
  modified_base 5: mod_base = OTHER; note = 2'-O-methyladenosine-3'-phosphate
  modified_base 6: mod_base = OTHER; note = 2'-O-docosanyl-uridine-3'-phosphate
  modified_base 7: mod_base = OTHER; note = 2'-deoxy-2'-fluoroadenosine-3'-phosphate
  modified_base 8: mod_base = OTHER; note = 2'-O-methyladenosine-3'-phosphate
  modified_base 9: mod_base = OTHER; note = 2'-deoxy-2'-fluoroadenosine-3'-phosphate
  modified_base 10: mod_base = OTHER; note = 2'-deoxy-2'-fluoroadenosine-3'-phosphate
  modified_base 11: mod_base = OTHER; note = 2'-deoxy-2'-fluorouridine-3'-phosphate
  modified_base 12: mod_base = OTHER; note = 2'-O-methyluridine-3'-phosphate
  modified_base 13: mod_base = OTHER; note = 2'-O-methyladenosine-3'-phosphate
  modified_base 14: mod_base = OTHER; note = 2'-O-methyladenosine-3'-phosphate
  modified_base 15: mod_base = OTHER; note = 2'-O-methyluridine-3'-phosphate
  modified_base 16: mod_base = OTHER; note = 2'-O-methylguanosine-3'-phosphate
  modified_base 17: mod_base = OTHER; note = 2'-O-methylguanosine-3'-phosphate
  modified_base 18: mod_base = OTHER; note = 2'-O-methyladenosine-3'-phosphate
  modified_base 19: mod_base = OTHER; note = 2'-O-methyluridine-3'-phosphorothioate
  modified_base 20: mod_base = OTHER; note = 2'-O-methyladenosine-3'-phosphorothioate
  modified_base 21: mod_base = OTHER; note = 2'-O-methyladenosine
gctgataaaattaatggataa

SEQ ID NO: 11640 - RNA, 21 nt, synthetic construct
  source 1..21: mol_type = other RNA
  modified_base 1: mod_base = OTHER; note = 2'-O-methylcytidine-3'-phosphorothioate
  modified_base 2: mod_base = OTHER; note = 2'-O-methyluridine-3'-phosphorothioate
  modified_base 3: mod_base = OTHER; note = 2'-O-methyladenosine-3'-phosphate
  modified_base 4: mod_base = OTHER; note = 2'-O-methyladenosine-3'-phosphate
  modified_base 5: mod_base = OTHER; note = 2'-O-methylguanosine-3'-phosphate
  modified_base 6: mod_base = OTHER; note = 2'-O-docosanyl-adenosine-3'-phosphate
  modified_base 7: mod_base = OTHER; note = 2'-deoxy-2'-fluoroadenosine-3'-phosphate
  modified_base 8: mod_base = OTHER; note = 2'-O-methyladenosine-3'-phosphate
  modified_base 9: mod_base = OTHER; note = 2'-deoxy-2'-fluoroguanosine-3'-phosphate
  modified_base 10: mod_base = OTHER; note = 2'-deoxy-2'-fluoroadenosine-3'-phosphate
  modified_base 11: mod_base = OTHER; note = 2'-deoxy-2'-fluoroguanosine-3'-phosphate
  modified_base 12: mod_base = OTHER; note = 2'-O-methyluridine-3'-phosphate
  modified_base 13: mod_base = OTHER; note = 2'-O-methyluridine-3'-phosphate
  modified_base 14: mod_base = OTHER; note = 2'-O-methylguanosine-3'-phosphate
  modified_base 15: mod_base = OTHER; note = 2'-O-methyluridine-3'-phosphate
  modified_base 16: mod_base = OTHER; note = 2'-O-methyladenosine-3'-phosphate
  modified_base 17: mod_base = OTHER; note = 2'-O-methylguanosine-3'-phosphate
  modified_base 18: mod_base = OTHER; note = 2'-O-methyladenosine-3'-phosphate
  modified_base 19: mod_base = OTHER; note = 2'-O-methyladenosine-3'-phosphorothioate
  modified_base 20: mod_base = OTHER; note = 2'-O-methyluridine-3'-phosphorothioate
  modified_base 21: mod_base = OTHER; note = 2'-O-methyladenosine
ctaagaaagagttgtagaata

SEQ ID NO: 11641 - RNA, 21 nt, synthetic construct
  source 1..21: mol_type = other RNA
  modified_base 1: mod_base = OTHER; note = 2'-O-methylguanosine-3'-phosphorothioate
  modified_base 2: mod_base = OTHER; note = 2'-O-methyladenosine-3'-phosphorothioate
  modified_base 3: mod_base = OTHER; note = 2'-O-methyladenosine-3'-phosphate
  modified_base 4: mod_base = OTHER; note = 2'-O-methyladenosine-3'-phosphate
  modified_base 5: mod_base = OTHER; note = 2'-O-methylguanosine-3'-phosphate
  modified_base 6: mod_base = OTHER; note = 2'-O-docosanyl-adenosine-3'-phosphate
  modified_base 7: mod_base = OTHER; note = 2'-deoxy-2'-fluoroguanosine-3'-phosphate
  modified_base 8: mod_base = OTHER; note = 2'-O-methyluridine-3'-phosphate
  modified_base 9: mod_base = OTHER; note = 2'-deoxy-2'-fluorouridine-3'-phosphate
  modified_base 10: mod_base = OTHER; note = 2'-deoxy-2'-fluoroguanosine-3'-phosphate
  modified_base 11: mod_base = OTHER; note = 2'-deoxy-2'-fluorouridine-3'-phosphate
  modified_base 12: mod_base = OTHER; note = 2'-O-methyladenosine-3'-phosphate
  modified_base 13: mod_base = OTHER; note = 2'-O-methylguanosine-3'-phosphate
  modified_base 14: mod_base = OTHER; note = 2'-O-methyladenosine-3'-phosphate
  modified_base 15: mod_base = OTHER; note = 2'-O-methyladenosine-3'-phosphate
  modified_base 16: mod_base = OTHER; note = 2'-O-methyluridine-3'-phosphate
  modified_base 17: mod_base = OTHER; note = 2'-O-methylguanosine-3'-phosphate
  modified_base 18: mod_base = OTHER; note = 2'-O-methylguanosine-3'-phosphate
  modified_base 19: mod_base = OTHER; note = 2'-O-methyluridine-3'-phosphorothioate
  modified_base 20: mod_base = OTHER; note = 2'-O-methyluridine-3'-phosphorothioate
  modified_base 21: mod_base = OTHER; note = 2'-O-methyladenosine
gaaagagttgtagaatggtta

SEQ ID NO: 11642 - RNA, 21 nt, synthetic construct
  source 1..21: mol_type = other RNA
  modified_base 1: mod_base = OTHER; note = 2'-O-methylguanosine-3'-phosphorothioate
  modified_base 2: mod_base = OTHER; note = 2'-O-methyluridine-3'-phosphorothioate
  modified_base 3: mod_base = OTHER; note = 2'-O-methylguanosine-3'-phosphate
  modified_base 4: mod_base = OTHER; note = 2'-O-methylcytidine-3'-phosphate
  modified_base 5: mod_base = OTHER; note = 2'-O-methyluridine-3'-phosphate
  modified_base 6: mod_base = OTHER; note = 2'-O-docosanyl-guanosine-3'-phosphate
  modified_base 7: mod_base = OTHER; note = 2'-deoxy-2'-fluoroadenosine-3'-phosphate
  modified_base 8: mod_base = OTHER; note = 2'-O-methyluridine-3'-phosphate
  modified_base 9: mod_base = OTHER; note = 2'-deoxy-2'-fluoroadenosine-3'-phosphate
  modified_base 10: mod_base = OTHER; note = 2'-deoxy-2'-fluoroadenosine-3'-phosphate
  modified_base 11: mod_base = OTHER; note = 2'-deoxy-2'-fluoroadenosine-3'-phosphate
  modified_base 12: mod_base = OTHER; note = 2'-O-methyladenosine-3'-phosphate
  modified_base 13: mod_base = OTHER; note = 2'-O-methyluridine-3'-phosphate
  modified_base 14: mod_base = OTHER; note = 2'-O-methyluridine-3'-phosphate
  modified_base 15: mod_base = OTHER; note = 2'-O-methyladenosine-3'-phosphate
  modified_base 16: mod_base = OTHER; note = 2'-O-methyladenosine-3'-phosphate
  modified_base 17: mod_base = OTHER; note = 2'-O-methyluridine-3'-phosphate
  modified_base 18: mod_base = OTHER; note = 2'-O-methylguanosine-3'-phosphate
  modified_base 19: mod_base = OTHER; note = 2'-O-methylguanosine-3'-phosphorothioate
  modified_base 20: mod_base = OTHER; note = 2'-O-methyladenosine-3'-phosphorothioate
  modified_base 21: mod_base = OTHER; note = 2'-O-methyladenosine
gtgctgataaaattaatggaa

SEQ ID NO: 11643 - RNA, 21 nt, synthetic construct
  source 1..21: mol_type = other RNA
  modified_base 1: mod_base = OTHER; note = 2'-O-methyluridine-3'-phosphorothioate
  modified_base 2: mod_base = OTHER; note = 2'-O-methylguanosine-3'-phosphorothioate
  modified_base 3: mod_base = OTHER; note = 2'-O-methylcytidine-3'-phosphate
  modified_base 4: mod_base = OTHER; note = 2'-O-methyluridine-3'-phosphate
  modified_base 5: mod_base = OTHER; note = 2'-O-methylguanosine-3'-phosphate
  modified_base 6: mod_base = OTHER; note = 2'-O-docosanyl-adenosine-3'-phosphate
  modified_base 7: mod_base = OTHER; note = 2'-deoxy-2'-fluorouridine-3'-phosphate
  modified_base 8: mod_base = OTHER; note = 2'-O-methyladenosine-3'-phosphate
  modified_base 9: mod_base = OTHER; note = 2'-deoxy-2'-fluoroadenosine-3'-phosphate
  modified_base 10: mod_base = OTHER; note = 2'-deoxy-2'-fluoroadenosine-3'-phosphate
  modified_base 11: mod_base = OTHER; note = 2'-deoxy-2'-fluoroadenosine-3'-phosphate
  modified_base 12: mod_base = OTHER; note = 2'-O-methyluridine-3'-phosphate
  modified_base 13: mod_base = OTHER; note = 2'-O-methyluridine-3'-phosphate
  modified_base 14: mod_base = OTHER; note = 2'-O-methyladenosine-3'-phosphate
  modified_base 15: mod_base = OTHER; note = 2'-O-methyladenosine-3'-phosphate
  modified_base 16: mod_base = OTHER; note = 2'-O-methyluridine-3'-phosphate
  modified_base 17: mod_base = OTHER; note = 2'-O-methylguanosine-3'-phosphate
  modified_base 18: mod_base = OTHER; note = 2'-O-methylguanosine-3'-phosphate
  modified_base 19: mod_base = OTHER; note = 2'-O-methyladenosine-3'-phosphorothioate
  modified_base 20: mod_base = OTHER; note = 2'-O-methyluridine-3'-phosphorothioate
  modified_base 21: mod_base = OTHER; note = 2'-O-methyladenosine
tgctgataaaattaatggata

SEQ ID NO: 11644 - RNA, 21 nt, synthetic construct
  source 1..21: mol_type = other RNA
  modified_base 1: mod_base = OTHER; note = 2'-O-methyluridine-3'-phosphorothioate
  modified_base 2: mod_base = OTHER; note = 2'-O-methylguanosine-3'-phosphorothioate
  modified_base 3: mod_base = OTHER; note = 2'-O-methyluridine-3'-phosphate
  modified_base 4: mod_base = OTHER; note = 2'-O-methylguanosine-3'-phosphate
  modified_base 5: mod_base = OTHER; note = 2'-O-methyladenosine-3'-phosphate
  modified_base 6: mod_base = OTHER; note = 2'-O-docosanyl-guanosine-3'-phosphate
  modified_base 7: mod_base = OTHER; note = 2'-deoxy-2'-fluoroadenosine-3'-phosphate
  modified_base 8: mod_base = OTHER; note = 2'-O-methylguanosine-3'-phosphate
  modified_base 9: mod_base = OTHER; note = 2'-deoxy-2'-fluorouridine-3'-phosphate
  modified_base 10: mod_base = OTHER; note = 2'-deoxy-2'-fluoroadenosine-3'-phosphate
  modified_base 11: mod_base = OTHER; note = 2'-deoxy-2'-fluorouridine-3'-phosphate
  modified_base 12: mod_base = OTHER; note = 2'-O-methyladenosine-3'-phosphate
  modified_base 13: mod_base = OTHER; note = 2'-O-methylguanosine-3'-phosphate
  modified_base 14: mod_base = OTHER; note = 2'-O-methyladenosine-3'-phosphate
  modified_base 15: mod_base = OTHER; note = 2'-O-methyladenosine-3'-phosphate
  modified_base 16: mod_base = OTHER; note = 2'-O-methyluridine-3'-phosphate
  modified_base 17: mod_base = OTHER; note = 2'-O-methyluridine-3'-phosphate
  modified_base 18: mod_base = OTHER; note = 2'-O-methyluridine-3'-phosphate
  modified_base 19: mod_base = OTHER; note = 2'-O-methylcytidine-3'-phosphorothioate
  modified_base 20: mod_base = OTHER; note = 2'-O-methyluridine-3'-phosphorothioate
  modified_base 21: mod_base = OTHER; note = 2'-O-methyladenosine
tgtgagagtatagaatttcta

SEQ ID NO: 11645 - RNA, 21 nt, synthetic construct
  source 1..21: mol_type = other RNA
  modified_base 1: mod_base = OTHER; note = 2'-O-methylguanosine-3'-phosphorothioate
  modified_base 2: mod_base = OTHER; note = 2'-O-methylguanosine-3'-phosphorothioate
  modified_base 3: mod_base = OTHER; note = 2'-O-methyladenosine-3'-phosphate
  modified_base 4: mod_base = OTHER; note = 2'-O-methyladenosine-3'-phosphate
  modified_base 5: mod_base = OTHER; note = 2'-O-methylcytidine-3'-phosphate
  modified_base 6: mod_base = OTHER; note = 2'-O-docosanyl-uridine-3'-phosphate
  modified_base 7: mod_base = OTHER; note = 2'-deoxy-2'-fluoroguanosine-3'-phosphate
  modified_base 8: mod_base = OTHER; note = 2'-O-methyluridine-3'-phosphate
  modified_base 9: mod_base = OTHER; note = 2'-deoxy-2'-fluoroguanosine-3'-phosphate
  modified_base 10: mod_base = OTHER; note = 2'-deoxy-2'-fluoroadenosine-3'-phosphate
  modified_base 11: mod_base = OTHER; note = 2'-deoxy-2'-fluoroguanosine-3'-phosphate
  modified_base 12: mod_base = OTHER; note = 2'-O-methyladenosine-3'-phosphate
  modified_base 13: mod_base = OTHER; note = 2'-O-methylguanosine-3'-phosphate
  modified_base 14: mod_base = OTHER; note = 2'-O-methyluridine-3'-phosphate
  modified_base 15: mod_base = OTHER; note = 2'-O-methyladenosine-3'-phosphate
  modified_base 16: mod_base = OTHER; note = 2'-O-methyluridine-3'-phosphate
  modified_base 17: mod_base = OTHER; note = 2'-O-methyladenosine-3'-phosphate
  modified_base 18: mod_base = OTHER; note = 2'-O-methylguanosine-3'-phosphate
  modified_base 19: mod_base = OTHER; note = 2'-O-methyladenosine-3'-phosphorothioate
  modified_base 20: mod_base = OTHER; note = 2'-O-methyladenosine-3'-phosphorothioate
  modified_base 21: mod_base = OTHER; note = 2'-O-methyladenosine
ggaactgtgagagtatagaaa

SEQ ID NO: 11646 - RNA, 21 nt, synthetic construct
  source 1..21: mol_type = other RNA
  modified_base 1: mod_base = OTHER; note = 2'-O-methylguanosine-3'-phosphorothioate
  modified_base 2: mod_base = OTHER; note = 2'-O-methyladenosine-3'-phosphorothioate
  modified_base 3: mod_base = OTHER; note = 2'-O-methyladenosine-3'-phosphate
  modified_base 4: mod_base = OTHER; note = 2'-O-methylcytidine-3'-phosphate
  modified_base 5: mod_base = OTHER; note = 2'-O-methyluridine-3'-phosphate
  modified_base 6: mod_base = OTHER; note = 2'-O-docosanyl-guanosine-3'-phosphate
  modified_base 7: mod_base = OTHER; note = 2'-deoxy-2'-fluorouridine-3'-phosphate
  modified_base 8: mod_base = OTHER; note = 2'-O-methylguanosine-3'-phosphate
  modified_base 9: mod_base = OTHER; note = 2'-deoxy-2'-fluoroadenosine-3'-phosphate
  modified_base 10: mod_base = OTHER; note = 2'-deoxy-2'-fluoroguanosine-3'-phosphate
  modified_base 11: mod_base = OTHER; note = 2'-deoxy-2'-fluoroadenosine-3'-phosphate
  modified_base 12: mod_base = OTHER; note = 2'-O-methylguanosine-3'-phosphate
  modified_base 13: mod_base = OTHER; note = 2'-O-methyluridine-3'-phosphate
  modified_base 14: mod_base = OTHER; note = 2'-O-methyladenosine-3'-phosphate
  modified_base 15: mod_base = OTHER; note = 2'-O-methyluridine-3'-phosphate
  modified_base 16: mod_base = OTHER; note = 2'-O-methyladenosine-3'-phosphate
  modified_base 17: mod_base = OTHER; note = 2'-O-methylguanosine-3'-phosphate
  modified_base 18: mod_base = OTHER; note = 2'-O-methyladenosine-3'-phosphate
  modified_base 19: mod_base = OTHER; note = 2'-O-methyladenosine-3'-phosphorothioate
  modified_base 20: mod_base = OTHER; note = 2'-O-methyluridine-3'-phosphorothioate
  modified_base 21: mod_base = OTHER; note = 2'-O-methyladenosine
gaactgtgagagtatagaata

SEQ ID NO: 11647 - RNA, 21 nt, synthetic construct
  source 1..21: mol_type = other RNA
  modified_base 1: mod_base = OTHER; note = 2'-O-methyladenosine-3'-phosphorothioate
  modified_base 2: mod_base = OTHER; note = 2'-O-methyladenosine-3'-phosphorothioate
  modified_base 3: mod_base = OTHER; note = 2'-O-methylcytidine-3'-phosphate
  modified_base 4: mod_base = OTHER; note = 2'-O-methyluridine-3'-phosphate
  modified_base 5: mod_base = OTHER; note = 2'-O-methylguanosine-3'-phosphate
  modified_base 6: mod_base = OTHER; note = 2'-O-docosanyl-uridine-3'-phosphate
  modified_base 7: mod_base = OTHER; note = 2'-deoxy-2'-fluoroguanosine-3'-phosphate
  modified_base 8: mod_base = OTHER; note = 2'-O-methyladenosine-3'-phosphate
  modified_base 9: mod_base = OTHER; note = 2'-deoxy-2'-fluoroguanosine-3'-phosphate
  modified_base 10: mod_base = OTHER; note = 2'-deoxy-2'-fluoroadenosine-3'-phosphate
  modified_base 11: mod_base = OTHER; note = 2'-deoxy-2'-fluoroguanosine-3'-phosphate
  modified_base 12: mod_base = OTHER; note = 2'-O-methyluridine-3'-phosphate
  modified_base 13: mod_base = OTHER; note = 2'-O-methyladenosine-3'-phosphate
  modified_base 14: mod_base = OTHER; note = 2'-O-methyluridine-3'-phosphate
  modified_base 15: mod_base = OTHER; note = 2'-O-methyladenosine-3'-phosphate
  modified_base 16: mod_base = OTHER; note = 2'-O-methylguanosine-3'-phosphate
  modified_base 17: mod_base = OTHER; note = 2'-O-methyladenosine-3'-phosphate
  modified_base 18: mod_base = OTHER; note = 2'-O-methyladenosine-3'-phosphate
  modified_base 19: mod_base = OTHER; note = 2'-O-methyluridine-3'-phosphorothioate
  modified_base 20: mod_base = OTHER; note = 2'-O-methyluridine-3'-phosphorothioate
  modified_base 21: mod_base = OTHER; note = 2'-O-methyladenosine
aactgtgagagtatagaatta

SEQ ID NO: 11648 - RNA, 21 nt, synthetic construct
  source 1..21: mol_type = other RNA
  modified_base 1: mod_base = OTHER; note = 2'-O-methyladenosine-3'-phosphorothioate
  modified_base 2: mod_base = OTHER; note = 2'-O-methylcytidine-3'-phosphorothioate
  modified_base 3: mod_base = OTHER; note = 2'-O-methyluridine-3'-phosphate
  modified_base 4: mod_base = OTHER; note = 2'-O-methylguanosine-3'-phosphate
  modified_base 5: mod_base = OTHER; note = 2'-O-methyluridine-3'-phosphate
  modified_base 6: mod_base = OTHER; note = 2'-O-docosanyl-guanosine-3'-phosphate
  modified_base 7: mod_base = OTHER; note = 2'-deoxy-2'-fluoroadenosine-3'-phosphate
  modified_base 8: mod_base = OTHER; note = 2'-O-methylguanosine-3'-phosphate
  modified_base 9: mod_base = OTHER; note = 2'-deoxy-2'-fluoroadenosine-3'-phosphate
  modified_base 10: mod_base = OTHER; note = 2'-deoxy-2'-fluoroguanosine-3'-phosphate
  modified_base 11: mod_base = OTHER; note = 2'-deoxy-2'-fluorouridine-3'-phosphate
  modified_base 12: mod_base = OTHER; note = 2'-O-methyladenosine-3'-phosphate
  modified_base 13: mod_base = OTHER; note = 2'-O-methyluridine-3'-phosphate
  modified_base 14: mod_base = OTHER; note = 2'-O-methyladenosine-3'-phosphate
  modified_base 15: mod_base = OTHER; note = 2'-O-methylguanosine-3'-phosphate
  modified_base 16: mod_base = OTHER; note = 2'-O-methyladenosine-3'-phosphate
  modified_base 17: mod_base = OTHER; note = 2'-O-methyladenosine-3'-phosphate
  modified_base 18: mod_base = OTHER; note = 2'-O-methyluridine-3'-phosphate
  modified_base 19: mod_base = OTHER; note = 2'-O-methyluridine-3'-phosphorothioate
  modified_base 20: mod_base = OTHER; note = 2'-O-methyluridine-3'-phosphorothioate
  modified_base 21: mod_base = OTHER; note = 2'-O-methyladenosine
actgtgagagtatagaattta

SEQ ID NO: 11649 - RNA, 21 nt, synthetic construct
  source 1..21: mol_type = other RNA
  modified_base 1: mod_base = OTHER; note = 2'-O-methylcytidine-3'-phosphorothioate
  modified_base 2: mod_base = OTHER; note = 2'-O-methyluridine-3'-phosphorothioate
  modified_base 3: mod_base = OTHER; note = 2'-O-methylguanosine-3'-phosphate
  modified_base 4: mod_base = OTHER; note = 2'-O-methyluridine-3'-phosphate
  modified_base 5: mod_base = OTHER; note = 2'-O-methylguanosine-3'-phosphate
  modified_base 6: mod_base = OTHER; note = 2'-O-docosanyl-adenosine-3'-phosphate
  modified_base 7: mod_base = OTHER; note = 2'-deoxy-2'-fluoroguanosine-3'-phosphate
  modified_base 8: mod_base = OTHER; note = 2'-O-methyladenosine-3'-phosphate
  modified_base 9: mod_base = OTHER; note = 2'-deoxy-2'-fluoroguanosine-3'-phosphate
  modified_base 10: mod_base = OTHER; note = 2'-deoxy-2'-fluorouridine-3'-phosphate
  modified_base 11: mod_base = OTHER; note = 2'-deoxy-2'-fluoroadenosine-3'-phosphate
  modified_base 12: mod_base = OTHER; note = 2'-O-methyluridine-3'-phosphate
  modified_base 13: mod_base = OTHER; note = 2'-O-methyladenosine-3'-phosphate
  modified_base 14: mod_base = OTHER; note = 2'-O-methylguanosine-3'-phosphate
  modified_base 15: mod_base = OTHER; note = 2'-O-methyladenosine-3'-phosphate
  modified_base 16: mod_base = OTHER; note = 2'-O-methyladenosine-3'-phosphate
  modified_base 17: mod_base = OTHER; note = 2'-O-methyluridine-3'-phosphate
  modified_base 18: mod_base = OTHER; note = 2'-O-methyluridine-3'-phosphate
  modified_base 19: mod_base = OTHER; note = 2'-O-methyluridine-3'-phosphorothioate
  modified_base 20: mod_base = OTHER; note = 2'-O-methylcytidine-3'-phosphorothioate
  modified_base 21: mod_base = OTHER; note = 2'-O-methyladenosine
ctgtgagagtatagaatttca

SEQ ID NO: 11650 - RNA, 21 nt, synthetic construct
  source 1..21: mol_type = other RNA
  modified_base 1: mod_base = OTHER; note = 2'-O-methylguanosine-3'-phosphorothioate
  modified_base 2: mod_base = OTHER; note = 2'-O-methyluridine-3'-phosphorothioate
  modified_base 3: mod_base = OTHER; note = 2'-O-methylguanosine-3'-phosphate
  modified_base 4: mod_base = OTHER; note = 2'-O-methyladenosine-3'-phosphate
  modified_base 5: mod_base = OTHER; note = 2'-O-methylguanosine-3'-phosphate
  modified_base 6: mod_base = OTHER; note = 2'-O-docosanyl-adenosine-3'-phosphate
  modified_base 7: mod_base = OTHER; note = 2'-deoxy-2'-fluoroguanosine-3'-phosphate
  modified_base 8: mod_base = OTHER; note = 2'-O-methyluridine-3'-phosphate
  modified_base 9: mod_base = OTHER; note = 2'-deoxy-2'-fluoroadenosine-3'-phosphate
  modified_base 10: mod_base = OTHER; note = 2'-deoxy-2'-fluorouridine-3'-phosphate
  modified_base 11: mod_base = OTHER; note = 2'-deoxy-2'-fluoroadenosine-3'-phosphate
  modified_base 12: mod_base = OTHER; note = 2'-O-methylguanosine-3'-phosphate
  modified_base 13: mod_base = OTHER; note = 2'-O-methyladenosine-3'-phosphate
  modified_base 14: mod_base = OTHER; note = 2'-O-methyladenosine-3'-phosphate
  modified_base 15: mod_base = OTHER; note = 2'-O-methyluridine-3'-phosphate
  modified_base 16: mod_base = OTHER; note = 2'-O-methyluridine-3'-phosphate
  modified_base 17: mod_base = OTHER; note = 2'-O-methyluridine-3'-phosphate
  modified_base 18: mod_base = OTHER; note = 2'-O-methylcytidine-3'-phosphate
  modified_base 19: mod_base = OTHER; note = 2'-O-methyluridine-3'-phosphorothioate
  modified_base 20: mod_base = OTHER; note = 2'-O-methyluridine-3'-phosphorothioate
  modified_base 21: mod_base = OTHER; note = 2'-O-methyladenosine
gtgagagtatagaatttctta

SEQ ID NO: 11651 - RNA, 21 nt, synthetic construct
  source 1..21: mol_type = other RNA
  modified_base 1: mod_base = OTHER; note = 2'-O-methyluridine-3'-phosphorothioate
  modified_base 2: mod_base = OTHER; note = 2'-O-methylguanosine-3'-phosphorothioate
  modified_base 3: mod_base = OTHER; note = 2'-O-methyladenosine-3'-phosphate
  modified_base 4: mod_base = OTHER; note = 2'-O-methylguanosine-3'-phosphate
  modified_base 5: mod_base = OTHER; note = 2'-O-methyladenosine-3'-phosphate
  modified_base 6: mod_base = OTHER; note = 2'-O-docosanyl-guanosine-3'-phosphate
  modified_base 7: mod_base = OTHER; note = 2'-deoxy-2'-fluorouridine-3'-phosphate
  modified_base 8: mod_base = OTHER; note = 2'-O-methyladenosine-3'-phosphate
  modified_base 9: mod_base = OTHER; note = 2'-deoxy-2'-fluorouridine-3'-phosphate
  modified_base 10: mod_base = OTHER; note = 2'-deoxy-2'-fluoroadenosine-3'-phosphate
  modified_base 11: mod_base = OTHER; note = 2'-deoxy-2'-fluoroguanosine-3'-phosphate
  modified_base 12: mod_base = OTHER; note = 2'-O-methyladenosine-3'-phosphate
  modified_base 13: mod_base = OTHER; note = 2'-O-methyladenosine-3'-phosphate
  modified_base 14: mod_base = OTHER; note = 2'-O-methyluridine-3'-phosphate
  modified_base 15: mod_base = OTHER; note = 2'-O-methyluridine-3'-phosphate
  modified_base 16: mod_base = OTHER; note = 2'-O-methyluridine-3'-phosphate
  modified_base 17: mod_base = OTHER; note = 2'-O-methylcytidine-3'-phosphate
  modified_base 18: mod_base = OTHER; note = 2'-O-methyluridine-3'-phosphate
  modified_base 19: mod_base = OTHER; note = 2'-O-methyluridine-3'-phosphorothioate
  modified_base 20: mod_base = OTHER; note = 2'-O-methyladenosine-3'-phosphorothioate
  modified_base 21: mod_base = OTHER; note = 2'-O-methyladenosine
tgagagtatagaatttcttaa

SEQ ID NO: 11652 - RNA, 21 nt, synthetic construct
  source 1..21: mol_type = other RNA
  modified_base 1: mod_base = OTHER; note = 2'-O-methylguanosine-3'-phosphorothioate
  modified_base 2: mod_base = OTHER; note = 2'-O-methyladenosine-3'-phosphorothioate
  modified_base 3: mod_base = OTHER; note = 2'-O-methylguanosine-3'-phosphate
  modified_base 4: mod_base = OTHER; note = 2'-O-methyladenosine-3'-phosphate
  modified_base 5: mod_base = OTHER; note = 2'-O-methylguanosine-3'-phosphate
  modified_base 6: mod_base = OTHER; note = 2'-O-docosanyl-uridine-3'-phosphate
  modified_base 7: mod_base = OTHER; note = 2'-deoxy-2'-fluoroadenosine-3'-phosphate
  modified_base 8: mod_base = OTHER; note = 2'-O-methyluridine-3'-phosphate
  modified_base 9: mod_base = OTHER; note = 2'-deoxy-2'-fluoroadenosine-3'-phosphate
  modified_base 10: mod_base = OTHER; note = 2'-deoxy-2'-fluoroguanosine-3'-phosphate
  modified_base 11: mod_base = OTHER; note = 2'-deoxy-2'-fluoroadenosine-3'-phosphate
  modified_base 12: mod_base = OTHER; note = 2'-O-methyladenosine-3'-phosphate
  modified_base 13: mod_base = OTHER; note = 2'-O-methyluridine-3'-phosphate
  modified_base 14: mod_base = OTHER; note = 2'-O-methyluridine-3'-phosphate
  modified_base 15: mod_base = OTHER; note = 2'-O-methyluridine-3'-phosphate
  modified_base 16: mod_base = OTHER; note = 2'-O-methylcytidine-3'-phosphate
  modified_base 17: mod_base = OTHER; note = 2'-O-methyluridine-3'-phosphate
  modified_base 18: mod_base = OTHER; note = 2'-O-methyluridine-3'-phosphate
  modified_base 19: mod_base = OTHER; note = 2'-O-methyladenosine-3'-phosphorothioate
  modified_base 20: mod_base = OTHER; note = 2'-O-methylguanosine-3'-phosphorothioate
  modified_base 21: mod_base = OTHER; note = 2'-O-methyladenosine
gagagtatagaatttcttaga

SEQ ID NO: 11653 - RNA, 21 nt, synthetic construct
  source 1..21: mol_type = other RNA
  modified_base 1: mod_base = OTHER; note = 2'-O-methyladenosine-3'-phosphorothioate
  modified_base 2: mod_base = OTHER; note = 2'-O-methylguanosine-3'-phosphorothioate
  modified_base 3: mod_base = OTHER; note = 2'-O-methyladenosine-3'-phosphate
  modified_base 4: mod_base = OTHER; note = 2'-O-methylguanosine-3'-phosphate
  modified_base 5: mod_base = OTHER; note = 2'-O-methyluridine-3'-phosphate
  modified_base 6: mod_base = OTHER; note = 2'-O-docosanyl-adenosine-3'-phosphate
  modified_base 7: mod_base = OTHER; note = 2'-deoxy-2'-fluorouridine-3'-phosphate
  modified_base 8: mod_base = OTHER; note = 2'-O-methyladenosine-3'-phosphate
  modified_base 9: mod_base = OTHER; note = 2'-deoxy-2'-fluoroguanosine-3'-phosphate
  modified_base 10: mod_base = OTHER; note = 2'-deoxy-2'-fluoroadenosine-3'-phosphate
  modified_base 11: mod_base = OTHER; note = 2'-deoxy-2'-fluoroadenosine-3'-phosphate
  modified_base 12: mod_base = OTHER; note = 2'-O-methyluridine-3'-phosphate
  modified_base 13: mod_base = OTHER; note = 2'-O-methyluridine-3'-phosphate
  modified_base 14: mod_base = OTHER; note = 2'-O-methyluridine-3'-phosphate
  modified_base 15: mod_base = OTHER; note = 2'-O-methylcytidine-3'-phosphate
  modified_base 16: mod_base = OTHER; note = 2'-O-methyluridine-3'-phosphate
  modified_base 17: mod_base = OTHER; note = 2'-O-methyluridine-3'-phosphate
  modified_base 18: mod_base = OTHER; note = 2'-O-methyladenosine-3'-phosphate
  modified_base 19: mod_base = OTHER; note = 2'-O-methylguanosine-3'-phosphorothioate
  modified_base 20: mod_base = OTHER; note = 2'-O-methyluridine-3'-phosphorothioate
  modified_base 21: mod_base = OTHER; note = 2'-O-methyladenosine
agagtatagaatttcttagta

SEQ ID NO: 11654 - RNA, 21 nt, synthetic construct
  source 1..21: mol_type = other RNA
  modified_base 1: mod_base = OTHER; note = 2'-O-methylguanosine-3'-phosphorothioate
  modified_base 2: mod_base = OTHER; note = 2'-O-methyladenosine-3'-phosphorothioate
  modified_base 3: mod_base = OTHER; note = 2'-O-methylguanosine-3'-phosphate
  modified_base 4: mod_base = OTHER; note = 2'-O-methyluridine-3'-phosphate
  modified_base 5: mod_base = OTHER; note = 2'-O-methyladenosine-3'-phosphate
  modified_base 6: mod_base = OTHER; note = 2'-O-docosanyl-uridine-3'-phosphate
  modified_base 7: mod_base = OTHER; note = 2'-deoxy-2'-fluoroadenosine-3'-phosphate
  modified_base 8: mod_base = OTHER; note = 2'-O-methylguanosine-3'-phosphate
  modified_base 9: mod_base = OTHER; note = 2'-deoxy-2'-fluoroadenosine-3'-phosphate
  modified_base 10: mod_base = OTHER; note = 2'-deoxy-2'-fluoroadenosine-3'-phosphate
  modified_base 11: mod_base = OTHER; note = 2'-deoxy-2'-fluorouridine-3'-phosphate
  modified_base 12: mod_base = OTHER; note = 2'-O-methyluridine-3'-phosphate
  modified_base 13: mod_base = OTHER; note = 2'-O-methyluridine-3'-phosphate
  modified_base 14: mod_base = OTHER; note = 2'-O-methylcytidine-3'-phosphate
  modified_base 15: mod_base = OTHER; note = 2'-O-methyluridine-3'-phosphate
  modified_base 16: mod_base = OTHER; note = 2'-O-methyluridine-3'-phosphate
  modified_base 17: mod_base = OTHER; note = 2'-O-methyladenosine-3'-phosphate
  modified_base 18: mod_base = OTHER; note = 2'-O-methylguanosine-3'-phosphate
  modified_base 19: mod_base = OTHER; note = 2'-O-methyluridine-3'-phosphorothioate
  modified_base 20: mod_base = OTHER; note = 2'-O-methylguanosine-3'-phosphorothioate
  modified_base 21: mod_base = OTHER; note = 2'-O-methyladenosine
gagtatagaatttcttagtga

SEQ ID NO: 11655 - RNA, 21 nt, synthetic construct
  source 1..21: mol_type = other RNA
  modified_base 1: mod_base = OTHER; note = 2'-O-methyladenosine-3'-phosphorothioate
  modified_base 2: mod_base = OTHER; note = 2'-O-methylguanosine-3'-phosphorothioate
  modified_base 3: mod_base = OTHER; note = 2'-O-methyluridine-3'-phosphate
  modified_base 4: mod_base = OTHER; note = 2'-O-methyladenosine-3'-phosphate
  modified_base 5: mod_base = OTHER; note = 2'-O-methyluridine-3'-phosphate
  modified_base 6: mod_base = OTHER; note = 2'-O-docosanyl-adenosine-3'-phosphate
  modified_base 7: mod_base = OTHER; note = 2'-deoxy-2'-fluoroguanosine-3'-phosphate
  modified_base 8: mod_base = OTHER; note = 2'-O-methyladenosine-3'-phosphate
  modified_base 9: mod_base = OTHER; note = 2'-deoxy-2'-fluoroadenosine-3'-phosphate
  modified_base 10: mod_base = OTHER; note = 2'-deoxy-2'-fluorouridine-3'-phosphate
  modified_base 11: mod_base = OTHER; note = 2'-deoxy-2'-fluorouridine-3'-phosphate
  modified_base 12: mod_base = OTHER; note = 2'-O-methyluridine-3'-phosphate
  modified_base 13: mod_base = OTHER; note = 2'-O-methylcytidine-3'-phosphate
  modified_base 14: mod_base = OTHER; note = 2'-O-methyluridine-3'-phosphate
  modified_base 15: mod_base = OTHER; note = 2'-O-methyluridine-3'-phosphate
  modified_base 16: mod_base = OTHER; note = 2'-O-methyladenosine-3'-phosphate
  modified_base 17: mod_base = OTHER; note = 2'-O-methylguanosine-3'-phosphate
  modified_base 18: mod_base = OTHER; note = 2'-O-methyluridine-3'-phosphate
  modified_base 19: mod_base = OTHER; note = 2'-O-methylguanosine-3'-phosphorothioate
  modified_base 20: mod_base = OTHER; note = 2'-O-methylcytidine-3'-phosphorothioate
  modified_base 21: mod_base = OTHER; note = 2'-O-methyladenosine
agtatagaatttcttagtgca

SEQ ID NO: 11656 - RNA, 21 nt, synthetic construct
  source 1..21: mol_type = other RNA
  modified_base 1: mod_base = OTHER; note = 2'-O-methylguanosine-3'-phosphorothioate
  modified_base 2: mod_base = OTHER; note = 2'-O-methyluridine-3'-phosphorothioate
  modified_base 3: mod_base = OTHER; note = 2'-O-methyladenosine-3'-phosphate
  modified_base 4: mod_base = OTHER; note = 2'-O-methyluridine-3'-phosphate
  modified_base 5: mod_base = OTHER; note = 2'-O-methyladenosine-3'-phosphate
  modified_base 6: mod_base = OTHER; note = 2'-O-docosanyl-guanosine-3'-phosphate
  modified_base 7: mod_base = OTHER; note = 2'-deoxy-2'-fluoroadenosine-3'-phosphate
  modified_base 8: mod_base = OTHER; note = 2'-O-methyladenosine-3'-phosphate
  modified_base 9: mod_base = OTHER; note = 2'-deoxy-2'-fluorouridine-3'-phosphate
  modified_base 10: mod_base = OTHER; note = 2'-deoxy-2'-fluorouridine-3'-phosphate
  modified_base 11: mod_base = OTHER; note = 2'-deoxy-2'-fluorouridine-3'-phosphate
  modified_base 12: mod_base = OTHER; note = 2'-O-methylcytidine-3'-phosphate
  modified_base 13: mod_base = OTHER; note = 2'-O-methyluridine-3'-phosphate
  modified_base 14: mod_base = OTHER; note = 2'-O-methyluridine-3'-phosphate
  modified_base 15: mod_base = OTHER; note = 2'-O-methyladenosine-3'-phosphate
  modified_base 16: mod_base = OTHER; note = 2'-O-methylguanosine-3'-phosphate
  modified_base 17: mod_base = OTHER; note = 2'-O-methyluridine-3'-phosphate
  modified_base 18: mod_base = OTHER; note = 2'-O-methylguanosine-3'-phosphate
  modified_base 19: mod_base = OTHER; note = 2'-O-methylcytidine-3'-phosphorothioate
  modified_base 20: mod_base = OTHER; note = 2'-O-methyladenosine-3'-phosphorothioate
  modified_base 21: mod_base = OTHER; note = 2'-O-methyladenosine
gtatagaatttcttagtgcaa

SEQ ID NO: 11657 - RNA, 21 nt, synthetic construct
  source 1..21: mol_type = other RNA
  modified_base 1: mod_base = OTHER; note = 2'-O-methyluridine-3'-phosphorothioate
  modified_base 2: mod_base = OTHER; note = 2'-O-methylguanosine-3'-phosphorothioate
  modified_base 3: mod_base = OTHER; note = 2'-O-methyluridine-3'-phosphate
  modified_base 4: mod_base = OTHER; note = 2'-O-methyladenosine-3'-phosphate
  modified_base 5: mod_base = OTHER; note = 2'-O-methyladenosine-3'-phosphate
  modified_base 6: mod_base = OTHER; note = 2'-O-docosanyl-guanosine-3'-phosphate
  modified_base 7: mod_base = OTHER; note = 2'-deoxy-2'-fluoroguanosine-3'-phosphate
  modified_base 8: mod_base = OTHER; note = 2'-O-methyladenosine-3'-phosphate
  modified_base 9: mod_base = OTHER; note = 2'-deoxy-2'-fluorocytidine-3'-phosphate
  modified_base 10: mod_base = OTHER; note = 2'-deoxy-2'-fluorouridine-3'-phosphate
  modified_base 11: mod_base = OTHER; note = 2'-deoxy-2'-fluoroguanosine-3'-phosphate
  modified_base 12: mod_base = OTHER; note = 2'-O-methyluridine-3'-phosphate
  modified_base 13: mod_base = OTHER; note = 2'-O-methyluridine-3'-phosphate
  modified_base 14: mod_base = OTHER; note = 2'-O-methylcytidine-3'-phosphate
  modified_base 15: mod_base = OTHER; note = 2'-O-methyluridine-3'-phosphate
  modified_base 16: mod_base = OTHER; note = 2'-O-methyluridine-3'-phosphate
  modified_base 17: mod_base = OTHER; note = 2'-O-methyluridine-3'-phosphate
  modified_base 18: mod_base = OTHER; note = 2'-O-methylcytidine-3'-phosphate
  modified_base 19: mod_base = OTHER; note = 2'-O-methyluridine-3'-phosphorothioate
  modified_base 20: mod_base = OTHER; note = 2'-O-methylcytidine-3'-phosphorothioate
  modified_base 21: mod_base = OTHER; note = 2'-O-methyladenosine
tgtaaggactgttctttctca

SEQ ID NO: 11658 - RNA, 21 nt, synthetic construct
  source 1..21: mol_type = other RNA
  modified_base 1: mod_base = OTHER; note = 2'-O-methyluridine-3'-phosphorothioate
  modified_base 2: mod_base = OTHER; note = 2'-O-methylguanosine-3'-phosphorothioate
  modified_base 3: mod_base = OTHER; note = 2'-O-methylguanosine-3'-phosphate
  modified_base 4: mod_base = OTHER; note = 2'-O-methylguanosine-3'-phosphate
  modified_base 5: mod_base = OTHER; note = 2'-O-methyladenosine-3'-phosphate
  modified_base 6: mod_base = OTHER; note = 2'-O-docosanyl-uridine-3'-phosphate
  modified_base 7: mod_base = OTHER; note = 2'-deoxy-2'-fluoroadenosine-3'-phosphate
  modified_base 8: mod_base = OTHER; note = 2'-O-methyluridine-3'-phosphate
  modified_base 9: mod_base = OTHER; note = 2'-deoxy-2'-fluorouridine-3'-phosphate
  modified_base 10: mod_base = OTHER; note = 2'-deoxy-2'-fluoroadenosine-3'-phosphate
  modified_base 11: mod_base = OTHER; note = 2'-deoxy-2'-fluorouridine-3'-phosphate
  modified_base 12: mod_base = OTHER; note = 2'-O-methylcytidine-3'-phosphate
  modified_base 13: mod_base = OTHER; note = 2'-O-methyluridine-3'-phosphate
  modified_base 14: mod_base = OTHER; note = 2'-O-methyladenosine-3'-phosphate
  modified_base 15: mod_base = OTHER; note = 2'-O-methyladenosine-3'-phosphate
  modified_base 16: mod_base = OTHER; note = 2'-O-methylcytidine-3'-phosphate
  modified_base 17: mod_base = OTHER; note = 2'-O-methyluridine-3'-phosphate
  modified_base 18: mod_base = OTHER; note = 2'-O-methyluridine-3'-phosphate
  modified_base 19: mod_base = OTHER; note = 2'-O-methyluridine-3'-phosphorothioate
  modified_base 20: mod_base = OTHER; note = 2'-O-methyluridine-3'-phosphorothioate
  modified_base 21: mod_base = OTHER; note = 2'-O-methyladenosine
tgggatattatctaactttta

SEQ ID NO: 11659 - RNA, 21 nt, synthetic construct
  source 1..21: mol_type = other RNA
  modified_base 1: mod_base = OTHER; note = 2'-O-methyluridine-3'-phosphorothioate
  modified_base 2: mod_base = OTHER; note = 2'-O-methylguanosine-3'-phosphorothioate
  modified_base 3: mod_base = OTHER; note = 2'-O-methyluridine-3'-phosphate
  modified_base 4: mod_base = OTHER; note = 2'-O-methylcytidine-3'-phosphate
  modified_base 5: mod_base = OTHER; note = 2'-O-methyluridine-3'-phosphate
  modified_base 6: mod_base = OTHER; note = 2'-O-docosanyl-uridine-3'-phosphate
  modified_base 7: mod_base = OTHER; note = 2'-deoxy-2'-fluorouridine-3'-phosphate
  modified_base 8: mod_base = OTHER; note = 2'-O-methylguanosine-3'-phosphate
  modified_base 9: mod_base = OTHER; note = 2'-deoxy-2'-fluoroguanosine-3'-phosphate
  modified_base 10: mod_base = OTHER; note = 2'-deoxy-2'-fluorocytidine-3'-phosphate
  modified_base 11: mod_base = OTHER; note = 2'-deoxy-2'-fluoroadenosine-3'-phosphate
  modified_base 12: mod_base = OTHER; note = 2'-O-methyluridine-3'-phosphate
  modified_base 13: mod_base = OTHER; note = 2'-O-methyluridine-3'-phosphate
  modified_base 14: mod_base = OTHER; note = 2'-O-methylcytidine-3'-phosphate
  modified_base 15: mod_base = OTHER; note = 2'-O-methyladenosine-3'-phosphate
  modified_base 16: mod_base = OTHER; note = 2'-O-methyluridine-3'-phosphate
  modified_base 17: mod_base = OTHER; note = 2'-O-methylcytidine-3'-phosphate
  modified_base 18: mod_base = OTHER; note = 2'-O-methyluridine-3'-phosphate
  modified_base 19: mod_base = OTHER; note = 2'-O-methyluridine-3'-phosphorothioate
  modified_base 20: mod_base = OTHER; note = 2'-O-methylcytidine-3'-phosphorothioate
  modified_base 21: mod_base = OTHER; note = 2'-O-methyladenosine
tgtctttggcattcatcttca

SEQ ID NO: 11660 - RNA, 21 nt, synthetic construct
  source 1..21: mol_type = other RNA
  modified_base 1: mod_base = OTHER; note = 2'-O-methyluridine-3'-phosphorothioate
  modified_base 2: mod_base = OTHER; note = 2'-O-methyluridine-3'-phosphorothioate
  modified_base 3: mod_base = OTHER; note = 2'-O-methyluridine-3'-phosphate
  modified_base 4: mod_base = OTHER; note = 2'-O-methylguanosine-3'-phosphate
  modified_base 5: mod_base = OTHER; note = 2'-O-methylguanosine-3'-phosphate
  modified_base 6: mod_base = OTHER; note = 2'-O-docosanyl-cytidine-3'-phosphate
  modified_base 7: mod_base = OTHER; note = 2'-deoxy-2'-fluoroadenosine-3'-phosphate
  modified_base 8: mod_base = OTHER; note = 2'-O-methyluridine-3'-phosphate
  modified_base 9: mod_base = OTHER; note = 2'-deoxy-2'-fluorouridine-3'-phosphate
  modified_base 10: mod_base = OTHER; note = 2'-deoxy-2'-fluorocytidine-3'-phosphate
  modified_base 11: mod_base = OTHER; note = 2'-deoxy-2'-fluoroadenosine-3'-phosphate
  modified_base 12: mod_base = OTHER; note = 2'-O-methyluridine-3'-phosphate
  modified_base 13: mod_base = OTHER; note = 2'-O-methylcytidine-3'-phosphate
  modified_base 14: mod_base = OTHER; note = 2'-O-methyluridine-3'-phosphate
  modified_base 15: mod_base = OTHER; note = 2'-O-methyluridine-3'-phosphate
  modified_base 16: mod_base = OTHER; note = 2'-O-methylcytidine-3'-phosphate
  modified_base 17: mod_base = OTHER; note = 2'-O-methyluridine-3'-phosphate
  modified_base 18: mod_base = OTHER; note = 2'-O-methyluridine-3'-phosphate
  modified_base 19: mod_base = OTHER; note = 2'-O-methyluridine-3'-phosphorothioate
  modified_base 20: mod_base = OTHER; note = 2'-O-methyluridine-3'-phosphorothioate
  modified_base 21: mod_base = OTHER; note = 2'-O-methyladenosine
tttggcattcatcttctttta

SEQ ID NO: 11661 - RNA, 21 nt, synthetic construct
  source 1..21: mol_type = other RNA
  modified_base 1: mod_base = OTHER; note = 2'-O-methylguanosine-3'-phosphorothioate
  modified_base 2: mod_base = OTHER; note = 2'-O-methylcytidine-3'-phosphorothioate
  modified_base 3: mod_base = OTHER; note = 2'-O-methyladenosine-3'-phosphate
  modified_base 4: mod_base = OTHER; note = 2'-O-methyluridine-3'-phosphate
  modified_base 5: mod_base = OTHER; note = 2'-O-methyluridine-3'-phosphate
  modified_base 6: mod_base = OTHER; note = 2'-O-docosanyl-adenosine-3'-phosphate
  modified_base 7: mod_base = OTHER; note = 2'-deoxy-2'-fluoroadenosine-3'-phosphate
  modified_base 8: mod_base = OTHER; note = 2'-O-methyladenosine-3'-phosphate
  modified_base 9: mod_base = OTHER; note = 2'-deoxy-2'-fluoroadenosine-3'-phosphate
  modified_base 10: mod_base = OTHER; note = 2'-deoxy-2'-fluoroadenosine-3'-phosphate
  modified_base 11: mod_base = OTHER; note = 2'-deoxy-2'-fluoroadenosine-3'-phosphate
  modified_base 12: mod_base = OTHER; note = 2'-O-methyluridine-3'-phosphate
  modified_base 13: mod_base = OTHER; note = 2'-O-methylguanosine-3'-phosphate
  modified_base 14: mod_base = OTHER; note = 2'-O-methyluridine-3'-phosphate
  modified_base 15: mod_base = OTHER; note = 2'-O-methyluridine-3'-phosphate
  modified_base 16: mod_base = OTHER; note = 2'-O-methyluridine-3'-phosphate
  modified_base 17: mod_base = OTHER; note = 2'-O-methylguanosine-3'-phosphate
  modified_base 18: mod_base = OTHER; note = 2'-O-methylguanosine-3'-phosphate
  modified_base 19: mod_base = OTHER; note = 2'-O-methylcytidine-3'-phosphorothioate
  modified_base 20: mod_base = OTHER; note = 2'-O-methyladenosine-3'-phosphorothioate
  modified_base 21: mod_base = OTHER; note = 2'-O-methyladenosine
gcattaaaaaatgtttggcaa

SEQ ID NO: 11662 - RNA, 21 nt, synthetic construct
  source 1..21: mol_type = other RNA
  modified_base 1: mod_base = OTHER; note = 2'-O-methyluridine-3'-phosphorothioate
  modified_base 2: mod_base = OTHER; note = 2'-O-methylcytidine-3'-phosphorothioate
  modified_base 3: mod_base = OTHER; note = 2'-O-methyladenosine-3'-phosphate
  modified_base 4: mod_base = OTHER; note = 2'-O-methylcytidine-3'-phosphate
  modified_base 5: mod_base = OTHER; note = 2'-O-methyluridine-3'-phosphate
  modified_base 6: mod_base = OTHER; note = 2'-O-docosanyl-cytidine-3'-phosphate
  modified_base 7: mod_base = OTHER; note = 2'-deoxy-2'-fluorouridine-3'-phosphate
  modified_base 8: mod_base = OTHER; note = 2'-O-methyladenosine-3'-phosphate
  modified_base 9: mod_base = OTHER; note = 2'-deoxy-2'-fluorouridine-3'-phosphate
  modified_base 10: mod_base = OTHER; note = 2'-deoxy-2'-fluoroadenosine-3'-phosphate
  modified_base 11: mod_base = OTHER; note = 2'-deoxy-2'-fluoroadenosine-3'-phosphate
  modified_base 12: mod_base = OTHER; note = 2'-O-methyluridine-3'-phosphate
  modified_base 13: mod_base = OTHER; note = 2'-O-methyluridine-3'-phosphate
  modified_base 14: mod_base = OTHER; note = 2'-O-methylcytidine-3'-phosphate
  modified_base 15: mod_base = OTHER; note = 2'-O-methylcytidine-3'-phosphate
  modified_base 16: mod_base = OTHER; note = 2'-O-methyluridine-3'-phosphate
  modified_base 17: mod_base = OTHER; note = 2'-O-methylguanosine-3'-phosphate
  modified_base 18: mod_base = OTHER; note = 2'-O-methyluridine-3'-phosphate
  modified_base 19: mod_base = OTHER; note = 2'-O-methyladenosine-3'-phosphorothioate
  modified_base 20: mod_base = OTHER; note = 2'-O-methyluridine-3'-phosphorothioate
  modified_base 21: mod_base = OTHER; note = 2'-O-methyladenosine
tcactctataattcctgtata

SEQ ID NO: 11663 - RNA, 21 nt, synthetic construct
  source 1..21: mol_type = other RNA
  modified_base 1: mod_base = OTHER; note = 2'-O-methyluridine-3'-phosphorothioate
  modified_base 2: mod_base = OTHER; note = 2'-O-methyladenosine-3'-phosphorothioate
  modified_base 3: mod_base = OTHER; note = 2'-O-methylguanosine-3'-phosphate
  modified_base 4: mod_base = OTHER; note = 2'-O-methyluridine-3'-phosphate
  modified_base 5: mod_base = OTHER; note = 2'-O-methyluridine-3'-phosphate
  modified_base 6: mod_base = OTHER; note = 2'-O-docosanyl-guanosine-3'-phosphate
  modified_base 7: mod_base = OTHER; note = 2'-deoxy-2'-fluorouridine-3'-phosphate
  modified_base 8: mod_base = OTHER; note = 2'-O-methylcytidine-3'-phosphate
  modified_base 9: mod_base = OTHER; note = 2'-deoxy-2'-fluoroguanosine-3'-phosphate
  modified_base 10: mod_base = OTHER; note = 2'-deoxy-2'-fluorouridine-3'-phosphate
  modified_base 11: mod_base = OTHER; note = 2'-deoxy-2'-fluorouridine-3'-phosphate
  modified_base 12: mod_base = OTHER; note = 2'-O-methyluridine-3'-phosphate
  modified_base 13: mod_base = OTHER; note = 2'-O-methyladenosine-3'-phosphate
  modified_base 14: mod_base = OTHER; note = 2'-O-methyladenosine-3'-phosphate
  modified_base 15: mod_base = OTHER; note = 2'-O-methylcytidine-3'-phosphate
  modified_base 16: mod_base = OTHER; note = 2'-O-methylcytidine-3'-phosphate
  modified_base 17: mod_base = OTHER; note = 2'-O-methyluridine-3'-phosphate
  modified_base 18: mod_base = OTHER; note = 2'-O-methylguanosine-3'-phosphate
  modified_base 19: mod_base = OTHER; note = 2'-O-methyluridine-3'-phosphorothioate
  modified_base 20: mod_base = OTHER; note = 2'-O-methylcytidine-3'-phosphorothioate
  modified_base 21: mod_base = OTHER; note = 2'-O-methyladenosine
tagttgtcgtttaacctgtca

SEQ ID NO: 11664 - RNA, 21 nt, synthetic construct
  source 1..21: mol_type = other RNA
  modified_base 1: mod_base = OTHER; note = 2'-O-methyladenosine-3'-phosphorothioate
  modified_base 2: mod_base = OTHER; note = 2'-O-methylguanosine-3'-phosphorothioate
  modified_base 3: mod_base = OTHER; note = 2'-O-methyluridine-3'-phosphate
  modified_base 4: mod_base = OTHER; note = 2'-O-methyluridine-3'-phosphate
  modified_base 5: mod_base = OTHER; note = 2'-O-methylguanosine-3'-phosphate
  modified_base 6: mod_base = OTHER; note = 2'-O-docosanyl-uridine-3'-phosphate
  modified_base 7: mod_base = OTHER; note = 2'-deoxy-2'-fluorocytidine-3'-phosphate
  modified_base 8: mod_base = OTHER; note = 2'-O-methylguanosine-3'-phosphate
  modified_base 9: mod_base = OTHER; note = 2'-deoxy-2'-fluorouridine-3'-phosphate
  modified_base 10: mod_base = OTHER; note = 2'-deoxy-2'-fluorouridine-3'-phosphate
  modified_base 11: mod_base = OTHER; note = 2'-deoxy-2'-fluorouridine-3'-phosphate
  modified_base 12: mod_base = OTHER; note = 2'-O-methyladenosine-3'-phosphate
  modified_base 13: mod_base = OTHER; note = 2'-O-methyladenosine-3'-phosphate
  modified_base 14: mod_base = OTHER; note = 2'-O-methylcytidine-3'-phosphate
  modified_base 15: mod_base = OTHER; note = 2'-O-methylcytidine-3'-phosphate
  modified_base 16: mod_base = OTHER; note = 2'-O-methyluridine-3'-phosphate
  modified_base 17: mod_base = OTHER; note = 2'-O-methylguanosine-3'-phosphate
  modified_base 18: mod_base = OTHER; note = 2'-O-methyluridine-3'-phosphate
  modified_base 19: mod_base = OTHER; note = 2'-O-methylcytidine-3'-phosphorothioate
  modified_base 20: mod_base = OTHER; note = 2'-O-methylcytidine-3'-phosphorothioate
  modified_base 21: mod_base = OTHER; note = 2'-O-methyladenosine
agttgtcgtttaacctgtcca

SEQ ID NO: 11665 - RNA, 21 nt, synthetic construct
  source 1..21: mol_type = other RNA
  modified_base 1: mod_base = OTHER; note = 2'-O-methylguanosine-3'-phosphorothioate
  modified_base 2: mod_base = OTHER; note = 2'-O-methyluridine-3'-phosphorothioate
  modified_base 3: mod_base = OTHER; note = 2'-O-methyluridine-3'-phosphate
  modified_base 4: mod_base = OTHER; note = 2'-O-methylguanosine-3'-phosphate
  modified_base 5: mod_base = OTHER; note = 2'-O-methyluridine-3'-phosphate
  modified_base 6: mod_base = OTHER; note = 2'-O-docosanyl-cytidine-3'-phosphate
  modified_base 7: mod_base = OTHER; note = 2'-deoxy-2'-fluoroguanosine-3'-phosphate
  modified_base 8: mod_base = OTHER; note = 2'-O-methyluridine-3'-phosphate
  modified_base 9: mod_base = OTHER; note = 2'-deoxy-2'-fluorouridine-3'-phosphate
  modified_base 10: mod_base = OTHER; note = 2'-deoxy-2'-fluorouridine-3'-phosphate
  modified_base 11: mod_base = OTHER; note = 2'-deoxy-2'-fluoroadenosine-3'-phosphate
  modified_base 12: mod_base = OTHER; note = 2'-O-methyladenosine-3'-phosphate
  modified_base 13: mod_base = OTHER; note = 2'-O-methylcytidine-3'-phosphate
  modified_base 14: mod_base = OTHER; note = 2'-O-methylcytidine-3'-phosphate
  modified_base 15: mod_base = OTHER; note = 2'-O-methyluridine-3'-phosphate
  modified_base 16: mod_base = OTHER; note = 2'-O-methylguanosine-3'-phosphate
  modified_base 17: mod_base = OTHER; note = 2'-O-methyluridine-3'-phosphate
  modified_base 18: mod_base = OTHER; note = 2'-O-methylcytidine-3'-phosphate
  modified_base 19: mod_base = OTHER; note = 2'-O-methylcytidine-3'-phosphorothioate
  modified_base 20: mod_base = OTHER; note = 2'-O-methyladenosine-3'-phosphorothioate
  modified_base 21: mod_base = OTHER; note = 2'-O-methyladenosine
gttgtcgtttaacctgtccaa

SEQ ID NO: 11666 - RNA, 21 nt, synthetic construct
  source 1..21: mol_type = other RNA
  modified_base 1: mod_base = OTHER; note = 2'-O-methylguanosine-3'-phosphorothioate
  modified_base 2: mod_base = OTHER; note = 2'-O-methyluridine-3'-phosphorothioate
  modified_base 3: mod_base = OTHER; note = 2'-O-methyluridine-3'-phosphate
  modified_base 4: mod_base = OTHER; note = 2'-O-methyluridine-3'-phosphate
  modified_base 5: mod_base = OTHER; note = 2'-O-methyladenosine-3'-phosphate
  modified_base 6: mod_base = OTHER; note = 2'-O-docosanyl-adenosine-3'-phosphate
  modified_base 7: mod_base = OTHER; note = 2'-deoxy-2'-fluorocytidine-3'-phosphate
  modified_base 8: mod_base = OTHER; note = 2'-O-methylcytidine-3'-phosphate
  modified_base 9: mod_base = OTHER; note = 2'-deoxy-2'-fluorouridine-3'-phosphate
  modified_base 10: mod_base = OTHER; note = 2'-deoxy-2'-fluoroguanosine-3'-phosphate
  modified_base 11: mod_base = OTHER; note = 2'-deoxy-2'-fluorouridine-3'-phosphate
  modified_base 12: mod_base = OTHER; note = 2'-O-methylcytidine-3'-phosphate
  modified_base 13: mod_base = OTHER; note = 2'-O-methylcytidine-3'-phosphate
  modified_base 14: mod_base = OTHER; note = 2'-O-methyladenosine-3'-phosphate
  modified_base 15: mod_base = OTHER; note = 2'-O-methyladenosine-3'-phosphate
  modified_base 16: mod_base = OTHER; note = 2'-O-methyladenosine-3'-phosphate
  modified_base 17: mod_base = OTHER; note = 2'-O-methylcytidine-3'-phosphate
  modified_base 18: mod_base = OTHER; note = 2'-O-methyluridine-3'-phosphate
  modified_base 19: mod_base = OTHER; note = 2'-O-methyluridine-3'-phosphorothioate
  modified_base 20: mod_base = OTHER; note = 2'-O-methylcytidine-3'-phosphorothioate
  modified_base 21: mod_base = OTHER; note = 2'-O-methyladenosine
gtttaacctgtccaaacttca

SEQ ID NO: 11667 - RNA, 21 nt, synthetic construct
  source 1..21: mol_type = other RNA
  modified_base 1: mod_base = OTHER; note = 2'-O-methylcytidine-3'-phosphorothioate
  modified_base 2: mod_base = OTHER; note = 2'-O-methyluridine-3'-phosphorothioate
  modified_base 3: mod_base = OTHER; note = 2'-O-methyladenosine-3'-phosphate
  modified_base 4: mod_base = OTHER; note = 2'-O-methylcytidine-3'-phosphate
  modified_base 5: mod_base = OTHER; note = 2'-O-methyladenosine-3'-phosphate
  modified_base 6: mod_base = OTHER; note = 2'-O-docosanyl-cytidine-3'-phosphate
  modified_base 7: mod_base = OTHER; note = 2'-deoxy-2'-fluoroadenosine-3'-phosphate
  modified_base 8: mod_base = OTHER; note = 2'-O-methyladenosine-3'-phosphate
  modified_base 9: mod_base = OTHER; note = 2'-deoxy-2'-fluorouridine-3'-phosphate
  modified_base 10: mod_base = OTHER; note = 2'-deoxy-2'-fluoroguanosine-3'-phosphate
  modified_base 11: mod_base = OTHER; note = 2'-deoxy-2'-fluoroadenosine-3'-phosphate
  modified_base 12: mod_base = OTHER; note = 2'-O-methyladenosine-3'-phosphate
  modified_base 13: mod_base = OTHER; note = 2'-O-methylcytidine-3'-phosphate
  modified_base 14: mod_base = OTHER; note = 2'-O-methyluridine-3'-phosphate
  modified_base 15: mod_base = OTHER; note = 2'-O-methyluridine-3'-phosphate
  modified_base 16: mod_base = OTHER; note = 2'-O-methylcytidine-3'-phosphate
  modified_base 17: mod_base = OTHER; note = 2'-O-methyluridine-3'-phosphate
  modified_base 18: mod_base = OTHER; note = 2'-O-methyluridine-3'-phosphate
  modified_base 19: mod_base = OTHER; note = 2'-O-methyladenosine-3'-phosphorothioate
  modified_base 20: mod_base = OTHER; note = 2'-O-methyladenosine-3'-phosphorothioate
  modified_base 21: mod_base = OTHER; note = 2'-O-methyladenosine
ctacacaatgaacttcttaaa

SEQ ID NO: 11668 - RNA, 21 nt, synthetic construct
  source 1..21: mol_type = other RNA
  modified_base 1: mod_base = OTHER; note = 2'-O-methyluridine-3'-phosphorothioate
  modified_base 2: mod_base = OTHER; note = 2'-O-methyluridine-3'-phosphorothioate
  modified_base 3: mod_base = OTHER; note = 2'-O-methylguanosine-3'-phosphate
  modified_base 4: mod_base = OTHER; note = 2'-O-methyluridine-3'-phosphate
  modified_base 5: mod_base = OTHER; note = 2'-O-methylcytidine-3'-phosphate
  modified_base 6: mod_base = OTHER; note = 2'-O-docosanyl-guanosine-3'-phosphate
  modified_base 7: mod_base = OTHER; note = 2'-deoxy-2'-fluorouridine-3'-phosphate
  modified_base 8: mod_base = OTHER; note = 2'-O-methyluridine-3'-phosphate
  modified_base 9: mod_base = OTHER; note = 2'-deoxy-2'-fluorouridine-3'-phosphate
  modified_base 10: mod_base = OTHER; note = 2'-deoxy-2'-fluoroadenosine-3'-phosphate
  modified_base 11: mod_base = OTHER; note = 2'-deoxy-2'-fluoroadenosine-3'-phosphate
  modified_base 12: mod_base = OTHER; note = 2'-O-methylcytidine-3'-phosphate
  modified_base 13: mod_base = OTHER; note = 2'-O-methylcytidine-3'-phosphate
  modified_base 14: mod_base = OTHER; note = 2'-O-methyluridine-3'-phosphate
  modified_base 15: mod_base = OTHER; note = 2'-O-methylguanosine-3'-phosphate
  modified_base 16: mod_base = OTHER; note = 2'-O-methyluridine-3'-phosphate
  modified_base 17: mod_base = OTHER; note = 2'-O-methylcytidine-3'-phosphate
  modified_base 18: mod_base = OTHER; note = 2'-O-methylcytidine-3'-phosphate
  modified_base 19: mod_base = OTHER; note = 2'-O-methyladenosine-3'-phosphorothioate
  modified_base 20: mod_base = OTHER; note = 2'-O-methyladenosine-3'-phosphorothioate
  modified_base 21: mod_base = OTHER; note = 2'-O-methyladenosine
ttgtcgtttaacctgtccaaa

SEQ ID NO: 11669 - RNA, 21 nt, synthetic construct
  source 1..21: mol_type = other RNA
  modified_base 1: mod_base = OTHER; note = 2'-O-methyluridine-3'-phosphorothioate
  modified_base 2: mod_base = OTHER; note = 2'-O-methylguanosine-3'-phosphorothioate
  modified_base 3: mod_base = OTHER; note = 2'-O-methyluridine-3'-phosphate
  modified_base 4: mod_base = OTHER; note = 2'-O-methylcytidine-3'-phosphate
  modified_base 5: mod_base = OTHER; note = 2'-O-methylguanosine-3'-phosphate
  modified_base 6: mod_base = OTHER; note = 2'-O-docosanyl-uridine-3'-phosphate
  modified_base 7: mod_base = OTHER; note = 2'-deoxy-2'-fluorouridine-3'-phosphate
  modified_base 8: mod_base = OTHER; note = 2'-O-methyluridine-3'-phosphate
  modified_base 9: mod_base = OTHER; note = 2'-deoxy-2'-fluoroadenosine-3'-phosphate
  modified_base 10: mod_base = OTHER; note = 2'-deoxy-2'-fluoroadenosine-3'-phosphate
  modified_base 11: mod_base = OTHER; note = 2'-deoxy-2'-fluorocytidine-3'-phosphate
  modified_base 12: mod_base = OTHER; note = 2'-O-methylcytidine-3'-phosphate
  modified_base 13: mod_base = OTHER; note = 2'-O-methyluridine-3'-phosphate
  modified_base 14: mod_base = OTHER; note = 2'-O-methylguanosine-3'-phosphate
  modified_base 15: mod_base = OTHER; note = 2'-O-methyluridine-3'-phosphate
  modified_base 16: mod_base = OTHER; note = 2'-O-methylcytidine-3'-phosphate
  modified_base 17: mod_base = OTHER; note = 2'-O-methylcytidine-3'-phosphate
  modified_base 18: mod_base = OTHER; note = 2'-O-methyladenosine-3'-phosphate
  modified_base 19: mod_base = OTHER; note = 2'-O-methyladenosine-3'-phosphorothioate
  modified_base 20: mod_base = OTHER; note = 2'-O-methyladenosine-3'-phosphorothioate
  modified_base 21: mod_base = OTHER; note = 2'-O-methyladenosine
tgtcgtttaacctgtccaaaa

SEQ ID NO: 11670 - RNA, 21 nt, synthetic construct
  source 1..21: mol_type = other RNA
  modified_base 1: mod_base = OTHER; note = 2'-O-methylguanosine-3'-phosphorothioate
  modified_base 2: mod_base = OTHER; note = 2'-O-methyluridine-3'-phosphorothioate
  modified_base 3: mod_base = OTHER; note = 2'-O-methylcytidine-3'-phosphate
  modified_base 4: mod_base = OTHER; note = 2'-O-methylguanosine-3'-phosphate
  modified_base 5: mod_base = OTHER; note = 2'-O-methyluridine-3'-phosphate
  modified_base 6: mod_base = OTHER; note = 2'-O-docosanyl-uridine-3'-phosphate
  modified_base 7: mod_base = OTHER; note = 2'-deoxy-2'-fluorouridine-3'-phosphate
  modified_base 8: mod_base = OTHER; note = 2'-O-methyladenosine-3'-phosphate
  modified_base 9: mod_base = OTHER; note = 2'-deoxy-2'-fluoroadenosine-3'-phosphate
  modified_base 10: mod_base = OTHER; note = 2'-deoxy-2'-fluorocytidine-3'-phosphate
  modified_base 11: mod_base = OTHER; note = 2'-deoxy-2'-fluorocytidine-3'-phosphate
  modified_base 12: mod_base = OTHER; note = 2'-O-methyluridine-3'-phosphate
  modified_base 13: mod_base = OTHER; note = 2'-O-methylguanosine-3'-phosphate
  modified_base 14: mod_base = OTHER; note = 2'-O-methyluridine-3'-phosphate
  modified_base 15: mod_base = OTHER; note = 2'-O-methylcytidine-3'-phosphate
  modified_base 16: mod_base = OTHER; note = 2'-O-methylcytidine-3'-phosphate
  modified_base 17: mod_base = OTHER; note = 2'-O-methyladenosine-3'-phosphate
  modified_base 18: mod_base = OTHER; note = 2'-O-methyladenosine-3'-phosphate
  modified_base 19: mod_base = OTHER; note = 2'-O-methyladenosine-3'-phosphorothioate
  modified_base 20: mod_base = OTHER; note = 2'-O-methylcytidine-3'-phosphorothioate
  modified_base 21: mod_base = OTHER; note = 2'-O-methyladenosine
gtcgtttaacctgtccaaaca

SEQ ID NO: 11671 - RNA, 21 nt, synthetic construct
  source 1..21: mol_type = other RNA
  modified_base 1: mod_base = OTHER; note = 2'-O-methyluridine-3'-phosphorothioate
  modified_base 2: mod_base = OTHER; note = 2'-O-methylcytidine-3'-phosphorothioate
  modified_base 3: mod_base = OTHER; note = 2'-O-methylguanosine-3'-phosphate
  modified_base 4: mod_base = OTHER; note = 2'-O-methyluridine-3'-phosphate
  modified_base 5: mod_base = OTHER; note = 2'-O-methyluridine-3'-phosphate
  modified_base 6: mod_base = OTHER; note = 2'-O-docosanyl-uridine-3'-phosphate
  modified_base 7: mod_base = OTHER; note = 2'-deoxy-2'-fluoroadenosine-3'-phosphate
  modified_base 8: mod_base = OTHER; note = 2'-O-methyladenosine-3'-phosphate
  modified_base 9: mod_base = OTHER; note = 2'-deoxy-2'-fluorocytidine-3'-phosphate
  modified_base 10: mod_base = OTHER; note = 2'-deoxy-2'-fluorocytidine-3'-phosphate
  modified_base 11: mod_base = OTHER; note = 2'-deoxy-2'-fluorouridine-3'-phosphate
  modified_base 12: mod_base = OTHER; note = 2'-O-methylguanosine-3'-phosphate
  modified_base 13: mod_base = OTHER; note = 2'-O-methyluridine-3'-phosphate
  modified_base 14: mod_base = OTHER; note = 2'-O-methylcytidine-3'-phosphate
  modified_base 15: mod_base = OTHER; note = 2'-O-methylcytidine-3'-phosphate
  modified_base 16: mod_base = OTHER; note = 2'-O-methyladenosine-3'-phosphate
  modified_base 17: mod_base = OTHER; note = 2'-O-methyladenosine-3'-phosphate
  modified_base 18: mod_base = OTHER; note = 2'-O-methyladenosine-3'-phosphate
  modified_base 19: mod_base = OTHER; note = 2'-O-methylcytidine-3'-phosphorothioate
  modified_base 20: mod_base = OTHER; note = 2'-O-methyluridine-3'-phosphorothioate
  modified_base 21: mod_base = OTHER; note = 2'-O-methyladenosine
tcgtttaacctgtccaaacta

SEQ ID NO: 11672 - RNA, 21 nt, synthetic construct
  source 1..21: mol_type = other RNA
  modified_base 1: mod_base = OTHER; note = 2'-O-methylcytidine-3'-phosphorothioate
  modified_base 2: mod_base = OTHER; note = 2'-O-methylguanosine-3'-phosphorothioate
  modified_base 3: mod_base = OTHER; note = 2'-O-methyluridine-3'-phosphate
  modified_base 4: mod_base = OTHER; note = 2'-O-methyluridine-3'-phosphate
  modified_base 5: mod_base = OTHER; note = 2'-O-methyluridine-3'-phosphate
  modified_base 6: mod_base = OTHER; note = 2'-O-docosanyl-adenosine-3'-phosphate
  modified_base 7: mod_base = OTHER; note = 2'-deoxy-2'-fluoroadenosine-3'-phosphate
  modified_base 8: mod_base = OTHER; note = 2'-O-methylcytidine-3'-phosphate
  modified_base 9: mod_base = OTHER; note = 2'-deoxy-2'-fluorocytidine-3'-phosphate
  modified_base 10: mod_base = OTHER; note = 2'-deoxy-2'-fluorouridine-3'-phosphate
  modified_base 11: mod_base = OTHER; note = 2'-deoxy-2'-fluoroguanosine-3'-phosphate
  modified_base 12: mod_base = OTHER; note = 2'-O-methyluridine-3'-phosphate
  modified_base 13: mod_base = OTHER; note = 2'-O-methylcytidine-3'-phosphate
  modified_base 14: mod_base = OTHER; note = 2'-O-methylcytidine-3'-phosphate
  modified_base 15: mod_base = OTHER; note = 2'-O-methyladenosine-3'-phosphate
  modified_base 16: mod_base = OTHER; note = 2'-O-methyladenosine-3'-phosphate
  modified_base 17: mod_base = OTHER; note = 2'-O-methyladenosine-3'-phosphate
  modified_base 18: mod_base = OTHER; note = 2'-O-methylcytidine-3'-phosphate
  modified_base 19: mod_base = OTHER; note = 2'-O-methyluridine-3'-phosphorothioate
  modified_base 20: mod_base = OTHER; note = 2'-O-methyluridine-3'-phosphorothioate
  modified_base 21: mod_base = OTHER; note = 2'-O-methyladenosine
cgtttaacctgtccaaactta

SEQ ID NO: 11673 - RNA, 21 nt, synthetic construct
  source 1..21: mol_type = other RNA
  modified_base 1: mod_base = OTHER; note = 2'-O-methyluridine-3'-phosphorothioate
  modified_base 2: mod_base = OTHER; note = 2'-O-methyluridine-3'-phosphorothioate
  modified_base 3: mod_base = OTHER; note = 2'-O-methyluridine-3'-phosphate
  modified_base 4: mod_base = OTHER; note = 2'-O-methyladenosine-3'-phosphate
  modified_base 5: mod_base = OTHER; note = 2'-O-methyladenosine-3'-phosphate
  modified_base 6: mod_base = OTHER; note = 2'-O-docosanyl-cytidine-3'-phosphate
  modified_base 7: mod_base = OTHER; note = 2'-deoxy-2'-fluorocytidine-3'-phosphate
  modified_base 8: mod_base = OTHER; note = 2'-O-methyluridine-3'-phosphate
  modified_base 9: mod_base = OTHER; note = 2'-deoxy-2'-fluoroguanosine-3'-phosphate
  modified_base 10: mod_base = OTHER; note = 2'-deoxy-2'-fluorouridine-3'-phosphate
  modified_base 11: mod_base = OTHER; note = 2'-deoxy-2'-fluorocytidine-3'-phosphate
  modified_base 12: mod_base = OTHER; note = 2'-O-methylcytidine-3'-phosphate
  modified_base 13: mod_base = OTHER; note = 2'-O-methyladenosine-3'-phosphate
  modified_base 14: mod_base = OTHER; note = 2'-O-methyladenosine-3'-phosphate
  modified_base 15: mod_base = OTHER; note = 2'-O-methyladenosine-3'-phosphate
  modified_base 16: mod_base = OTHER; note = 2'-O-methylcytidine-3'-phosphate
  modified_base 17: mod_base = OTHER; note = 2'-O-methyluridine-3'-phosphate
  modified_base 18: mod_base = OTHER; note = 2'-O-methyluridine-3'-phosphate
  modified_base 19: mod_base = OTHER; note = 2'-O-methylcytidine-3'-phosphorothioate
  modified_base 20: mod_base = OTHER; note = 2'-O-methyluridine-3'-phosphorothioate
  modified_base 21: mod_base = OTHER; note = 2'-O-methyladenosine
tttaacctgtccaaacttcta

SEQ ID NO: 11674 - RNA, 21 nt, synthetic construct
  source 1..21: mol_type = other RNA
  modified_base 1: mod_base = OTHER; note = 2'-O-methyluridine-3'-phosphorothioate
  modified_base 2: mod_base = OTHER; note = 2'-O-methyluridine-3'-phosphorothioate
  modified_base 3: mod_base = OTHER; note = 2'-O-methyladenosine-3'-phosphate
  modified_base 4: mod_base = OTHER; note = 2'-O-methyladenosine-3'-phosphate
  modified_base 5: mod_base = OTHER; note = 2'-O-methylcytidine-3'-phosphate
  modified_base 6: mod_base = OTHER; note = 2'-O-docosanyl-cytidine-3'-phosphate
  modified_base 7: mod_base = OTHER; note = 2'-deoxy-2'-fluorouridine-3'-phosphate
  modified_base 8: mod_base = OTHER; note = 2'-O-methylguanosine-3'-phosphate
  modified_base 9: mod_base = OTHER; note = 2'-deoxy-2'-fluorouridine-3'-phosphate
  modified_base 10: mod_base = OTHER; note = 2'-deoxy-2'-fluorocytidine-3'-phosphate
  modified_base 11: mod_base = OTHER; note = 2'-deoxy-2'-fluorocytidine-3'-phosphate
  modified_base 12: mod_base = OTHER; note = 2'-O-methyladenosine-3'-phosphate
  modified_base 13: mod_base = OTHER; note = 2'-O-methyladenosine-3'-phosphate
  modified_base 14: mod_base = OTHER; note = 2'-O-methyladenosine-3'-phosphate
  modified_base 15: mod_base = OTHER; note = 2'-O-methylcytidine-3'-phosphate
  modified_base 16: mod_base = OTHER; note = 2'-O-methyluridine-3'-phosphate
  modified_base 17: mod_base = OTHER; note = 2'-O-methyluridine-3'-phosphate
  modified_base 18: mod_base = OTHER; note = 2'-O-methylcytidine-3'-phosphate
  modified_base 19: mod_base = OTHER; note = 2'-O-methyluridine-3'-phosphorothioate
  modified_base 20: mod_base = OTHER; note = 2'-O-methyladenosine-3'-phosphorothioate
  modified_base 21: mod_base = OTHER; note = 2'-O-methyladenosine
ttaacctgtccaaacttctaa

SEQ ID NO: 11675 - RNA, 21 nt, synthetic construct
  source 1..21: mol_type = other RNA
  modified_base 1: mod_base = OTHER; note = 2'-O-methyluridine-3'-phosphorothioate
  modified_base 2: mod_base = OTHER; note = 2'-O-methyladenosine-3'-phosphorothioate
  modified_base 3: mod_base = OTHER; note = 2'-O-methyladenosine-3'-phosphate
  modified_base 4: mod_base = OTHER; note = 2'-O-methylcytidine-3'-phosphate
  modified_base 5: mod_base = OTHER; note = 2'-O-methylcytidine-3'-phosphate
  modified_base 6: mod_base = OTHER; note = 2'-O-docosanyl-uridine-3'-phosphate
  modified_base 7: mod_base = OTHER; note = 2'-deoxy-2'-fluoroguanosine-3'-phosphate
  modified_base 8: mod_base = OTHER; note = 2'-O-methyluridine-3'-phosphate
  modified_base 9: mod_base = OTHER; note = 2'-deoxy-2'-fluorocytidine-3'-phosphate
  modified_base 10: mod_base = OTHER; note = 2'-deoxy-2'-fluorocytidine-3'-phosphate
  modified_base 11: mod_base = OTHER; note = 2'-deoxy-2'-fluoroadenosine-3'-phosphate
  modified_base 12: mod_base = OTHER; note = 2'-O-methyladenosine-3'-phosphate
  modified_base 13: mod_base = OTHER; note = 2'-O-methyladenosine-3'-phosphate
  modified_base 14: mod_base = OTHER; note = 2'-O-methylcytidine-3'-phosphate
  modified_base 15: mod_base = OTHER; note = 2'-O-methyluridine-3'-phosphate
  modified_base 16: mod_base = OTHER; note = 2'-O-methyluridine-3'-phosphate
  modified_base 17: mod_base = OTHER; note = 2'-O-methylcytidine-3'-phosphate
  modified_base 18: mod_base = OTHER; note = 2'-O-methyluridine-3'-phosphate
  modified_base 19: mod_base = OTHER; note = 2'-O-methyladenosine-3'-phosphorothioate
  modified_base 20: mod_base = OTHER; note = 2'-O-methylcytidine-3'-phosphorothioate
  modified_base 21: mod_base = OTHER; note = 2'-O-methyladenosine
taacctgtccaaacttctaca

SEQ ID NO: 11676 - RNA, 21 nt, synthetic construct
  source 1..21: mol_type = other RNA
  modified_base 1: mod_base = OTHER; note = 2'-O-methyladenosine-3'-phosphorothioate
  modified_base 2: mod_base = OTHER; note = 2'-O-methyladenosine-3'-phosphorothioate
  modified_base 3: mod_base = OTHER; note = 2'-O-methylcytidine-3'-phosphate
  modified_base 4: mod_base = OTHER; note = 2'-O-methylcytidine-3'-phosphate
  modified_base 5: mod_base = OTHER; note = 2'-O-methyluridine-3'-phosphate
  modified_base 6: mod_base = OTHER; note = 2'-O-docosanyl-guanosine-3'-phosphate
  modified_base 7: mod_base = OTHER; note = 2'-deoxy-2'-fluorouridine-3'-phosphate
  modified_base 8: mod_base = OTHER; note = 2'-O-methylcytidine-3'-phosphate
  modified_base 9: mod_base = OTHER; note = 2'-deoxy-2'-fluorocytidine-3'-phosphate
  modified_base 10: mod_base = OTHER; note = 2'-deoxy-2'-fluoroadenosine-3'-phosphate
  modified_base 11: mod_base = OTHER; note = 2'-deoxy-2'-fluoroadenosine-3'-phosphate
  modified_base 12: mod_base = OTHER; note = 2'-O-methyladenosine-3'-phosphate
  modified_base 13: mod_base = OTHER; note = 2'-O-methylcytidine-3'-phosphate
  modified_base 14: mod_base = OTHER; note = 2'-O-methyluridine-3'-phosphate
  modified_base 15: mod_base = OTHER; note = 2'-O-methyluridine-3'-phosphate
  modified_base 16: mod_base = OTHER; note = 2'-O-methylcytidine-3'-phosphate
  modified_base 17: mod_base = OTHER; note = 2'-O-methyluridine-3'-phosphate
  modified_base 18: mod_base = OTHER; note = 2'-O-methyladenosine-3'-phosphate
  modified_base 19: mod_base = OTHER; note = 2'-O-methylcytidine-3'-phosphorothioate
  modified_base 20: mod_base = OTHER; note = 2'-O-methyladenosine-3'-phosphorothioate
  modified_base 21: mod_base = OTHER; note = 2'-O-methyladenosine
aacctgtccaaacttctacaa

SEQ ID NO: 11677 - RNA, 21 nt, synthetic construct
  source 1..21: mol_type = other RNA
  modified_base 1: mod_base = OTHER; note = 2'-O-methyladenosine-3'-phosphorothioate
  modified_base 2: mod_base = OTHER; note = 2'-O-methylcytidine-3'-phosphorothioate
  modified_base 3: mod_base = OTHER; note = 2'-O-methylcytidine-3'-phosphate
  modified_base 4: mod_base = OTHER; note = 2'-O-methyluridine-3'-phosphate
  modified_base 5: mod_base = OTHER; note = 2'-O-methylguanosine-3'-phosphate
  modified_base 6: mod_base = OTHER; note = 2'-O-docosanyl-uridine-3'-phosphate
  modified_base 7: mod_base = OTHER; note = 2'-deoxy-2'-fluorocytidine-3'-phosphate
  modified_base 8: mod_base = OTHER; note = 2'-O-methylcytidine-3'-phosphate
  modified_base 9: mod_base = OTHER; note = 2'-deoxy-2'-fluoroadenosine-3'-phosphate
  modified_base 10: mod_base = OTHER; note = 2'-deoxy-2'-fluoroadenosine-3'-phosphate
  modified_base 11: mod_base = OTHER; note = 2'-deoxy-2'-fluoroadenosine-3'-phosphate
  modified_base 12: mod_base = OTHER; note = 2'-O-methylcytidine-3'-phosphate
  modified_base 13: mod_base = OTHER; note = 2'-O-methyluridine-3'-phosphate
  modified_base 14: mod_base = OTHER; note = 2'-O-methyluridine-3'-phosphate
  modified_base 15: mod_base = OTHER; note = 2'-O-methylcytidine-3'-phosphate
  modified_base 16: mod_base = OTHER; note = 2'-O-methyluridine-3'-phosphate
  modified_base 17: mod_base = OTHER; note = 2'-O-methyladenosine-3'-phosphate
  modified_base 18: mod_base = OTHER; note = 2'-O-methylcytidine-3'-phosphate
  modified_base 19: mod_base = OTHER; note = 2'-O-methyladenosine-3'-phosphorothioate
  modified_base 20: mod_base = OTHER; note = 2'-O-methylcytidine-3'-phosphorothioate
  modified_base 21: mod_base = OTHER; note = 2'-O-methyladenosine
acctgtccaaacttctacaca

SEQ ID NO: 11678 - RNA, 21 nt, synthetic construct
  source 1..21: mol_type = other RNA
  modified_base 1: mod_base = OTHER; note = 2'-O-methylcytidine-3'-phosphorothioate
  modified_base 2: mod_base = OTHER; note = 2'-O-methylcytidine-3'-phosphorothioate
  modified_base 3: mod_base = OTHER; note = 2'-O-methyluridine-3'-phosphate
  modified_base 4: mod_base = OTHER; note = 2'-O-methylguanosine-3'-phosphate
  modified_base 5: mod_base = OTHER; note = 2'-O-methyluridine-3'-phosphate
  modified_base 6: mod_base = OTHER; note = 2'-O-docosanyl-cytidine-3'-phosphate
  modified_base 7: mod_base = OTHER; note = 2'-deoxy-2'-fluorocytidine-3'-phosphate
  modified_base 8: mod_base = OTHER; note = 2'-O-methyladenosine-3'-phosphate
  modified_base 9: mod_base = OTHER; note = 2'-deoxy-2'-fluoroadenosine-3'-phosphate
  modified_base 10: mod_base = OTHER; note = 2'-deoxy-2'-fluoroadenosine-3'-phosphate
  modified_base 11: mod_base = OTHER; note = 2'-deoxy-2'-fluorocytidine-3'-phosphate
  modified_base 12: mod_base = OTHER; note = 2'-O-methyluridine-3'-phosphate
  modified_base 13: mod_base = OTHER; note = 2'-O-methyluridine-3'-phosphate
  modified_base 14: mod_base = OTHER; note = 2'-O-methylcytidine-3'-phosphate
  modified_base 15: mod_base = OTHER; note = 2'-O-methyluridine-3'-phosphate
  modified_base 16: mod_base = OTHER; note = 2'-O-methyladenosine-3'-phosphate
  modified_base 17: mod_base = OTHER; note = 2'-O-methylcytidine-3'-phosphate
  modified_base 18: mod_base = OTHER; note = 2'-O-methyladenosine-3'-phosphate
  modified_base 19: mod_base = OTHER; note = 2'-O-methylcytidine-3'-phosphorothioate
  modified_base 20: mod_base = OTHER; note = 2'-O-methyladenosine-3'-phosphorothioate
  modified_base 21: mod_base = OTHER; note = 2'-O-methyladenosine
cctgtccaaacttctacacaa

SEQ ID NO: 11679 - RNA, 21 nt, synthetic construct
  source 1..21: mol_type = other RNA
  modified_base 1: mod_base = OTHER; note = 2'-O-methylcytidine-3'-phosphorothioate
  modified_base 2: mod_base = OTHER; note = 2'-O-methyluridine-3'-phosphorothioate
  modified_base 3: mod_base = OTHER; note = 2'-O-methylguanosine-3'-phosphate
  modified_base 4: mod_base = OTHER; note = 2'-O-methyluridine-3'-phosphate
  modified_base 5: mod_base = OTHER; note = 2'-O-methylcytidine-3'-phosphate
  modified_base 6: mod_base = OTHER; note = 2'-O-docosanyl-cytidine-3'-phosphate
  modified_base 7: mod_base = OTHER; note = 2'-deoxy-2'-fluoroadenosine-3'-phosphate
  modified_base 8: mod_base = OTHER; note = 2'-O-methyladenosine-3'-phosphate
  modified_base 9: mod_base = OTHER; note = 2'-deoxy-2'-fluoroadenosine-3'-phosphate
  modified_base 10: mod_base = OTHER; note = 2'-deoxy-2'-fluorocytidine-3'-phosphate
  modified_base 11: mod_base = OTHER; note = 2'-deoxy-2'-fluorouridine-3'-phosphate
  modified_base 12: mod_base = OTHER; note = 2'-O-methyluridine-3'-phosphate
  modified_base 13: mod_base = OTHER; note = 2'-O-methylcytidine-3'-phosphate
  modified_base 14: mod_base = OTHER; note = 2'-O-methyluridine-3'-phosphate
  modified_base 15: mod_base = OTHER; note = 2'-O-methyladenosine-3'-phosphate
  modified_base 16: mod_base = OTHER; note = 2'-O-methylcytidine-3'-phosphate
  modified_base 17: mod_base = OTHER; note = 2'-O-methyladenosine-3'-phosphate
  modified_base 18: mod_base = OTHER; note = 2'-O-methylcytidine-3'-phosphate
  modified_base 19: mod_base = OTHER; note = 2'-O-methyladenosine-3'-phosphorothioate
  modified_base 20: mod_base = OTHER; note = 2'-O-methyladenosine-3'-phosphorothioate
  modified_base 21: mod_base = OTHER; note = 2'-O-methyladenosine
ctgtccaaacttctacacaaa

SEQ ID NO: 11680 - RNA, 21 nt, synthetic construct
  source 1..21: mol_type = other RNA
  modified_base 1: mod_base = OTHER; note = 2'-O-methyluridine-3'-phosphorothioate
  modified_base 2: mod_base = OTHER; note = 2'-O-methylguanosine-3'-phosphorothioate
  modified_base 3: mod_base = OTHER; note = 2'-O-methyluridine-3'-phosphate
  modified_base 4: mod_base = OTHER; note = 2'-O-methylcytidine-3'-phosphate
  modified_base 5: mod_base = OTHER; note = 2'-O-methylcytidine-3'-phosphate
  modified_base 6: mod_base = OTHER; note = 2'-O-docosanyl-adenosine-3'-phosphate
  modified_base 7: mod_base = OTHER; note = 2'-deoxy-2'-fluoroadenosine-3'-phosphate
  modified_base 8: mod_base = OTHER; note = 2'-O-methyladenosine-3'-phosphate
  modified_base 9: mod_base = OTHER; note = 2'-deoxy-2'-fluorocytidine-3'-phosphate
  modified_base 10: mod_base = OTHER; note = 2'-deoxy-2'-fluorouridine-3'-phosphate
  modified_base 11: mod_base = OTHER; note = 2'-deoxy-2'-fluorouridine-3'-phosphate
  modified_base 12: mod_base = OTHER; note = 2'-O-methylcytidine-3'-phosphate
  modified_base 13: mod_base = OTHER; note = 2'-O-methyluridine-3'-phosphate
  modified_base 14: mod_base = OTHER; note = 2'-O-methyladenosine-3'-phosphate
  modified_base 15: mod_base = OTHER; note = 2'-O-methylcytidine-3'-phosphate
  modified_base 16: mod_base = OTHER; note = 2'-O-methyladenosine-3'-phosphate
  modified_base 17: mod_base = OTHER; note = 2'-O-methylcytidine-3'-phosphate
  modified_base 18: mod_base = OTHER; note = 2'-O-methyladenosine-3'-phosphate
  modified_base 19: mod_base = OTHER; note = 2'-O-methyladenosine-3'-phosphorothioate
  modified_base 20: mod_base = OTHER; note = 2'-O-methyluridine-3'-phosphorothioate
  modified_base 21: mod_base = OTHER; note = 2'-O-methyladenosine
tgtccaaacttctacacaata

SEQ ID NO: 11681 - RNA, 21 nt, synthetic construct
  source 1..21: mol_type = other RNA
  modified_base 1: mod_base = OTHER; note = 2'-O-methylguanosine-3'-phosphorothioate
  modified_base 2: mod_base = OTHER; note = 2'-O-methyluridine-3'-phosphorothioate
  modified_base 3: mod_base = OTHER; note = 2'-O-methylcytidine-3'-phosphate
  modified_base 4: mod_base = OTHER; note = 2'-O-methylcytidine-3'-phosphate
  modified_base 5: mod_base = OTHER; note = 2'-O-methyladenosine-3'-phosphate
  modified_base 6: mod_base = OTHER; note = 2'-O-docosanyl-adenosine-3'-phosphate
  modified_base 7: mod_base = OTHER; note = 2'-deoxy-2'-fluoroadenosine-3'-phosphate
  modified_base 8: mod_base = OTHER; note = 2'-O-methylcytidine-3'-phosphate
  modified_base 9: mod_base = OTHER; note = 2'-deoxy-2'-fluorouridine-3'-phosphate
  modified_base 10: mod_base = OTHER; note = 2'-deoxy-2'-fluorouridine-3'-phosphate
  modified_base 11: mod_base = OTHER; note = 2'-deoxy-2'-fluorocytidine-3'-phosphate
  modified_base 12: mod_base = OTHER; note = 2'-O-methyluridine-3'-phosphate
  modified_base 13: mod_base = OTHER; note = 2'-O-methyladenosine-3'-phosphate
  modified_base 14: mod_base = OTHER; note = 2'-O-methylcytidine-3'-phosphate
  modified_base 15: mod_base = OTHER; note = 2'-O-methyladenosine-3'-phosphate
  modified_base 16: mod_base = OTHER; note = 2'-O-methylcytidine-3'-phosphate
  modified_base 17: mod_base = OTHER; note = 2'-O-methyladenosine-3'-phosphate
  modified_base 18: mod_base = OTHER; note = 2'-O-methyladenosine-3'-phosphate
  modified_base 19: mod_base = OTHER; note = 2'-O-methyluridine-3'-phosphorothioate
  modified_base 20: mod_base = OTHER; note = 2'-O-methylguanosine-3'-phosphorothioate
  modified_base 21: mod_base = OTHER; note = 2'-O-methyladenosine
gtccaaacttctacacaatga

SEQ ID NO: 11682 - RNA, 21 nt, synthetic construct
  source 1..21: mol_type = other RNA
  modified_base 1: mod_base = OTHER; note = 2'-O-methyluridine-3'-phosphorothioate
  modified_base 2: mod_base = OTHER; note = 2'-O-methylcytidine-3'-phosphorothioate
  modified_base 3: mod_base = OTHER; note = 2'-O-methylcytidine-3'-phosphate
  modified_base 4: mod_base = OTHER; note = 2'-O-methyladenosine-3'-phosphate
  modified_base 5: mod_base = OTHER; note = 2'-O-methyladenosine-3'-phosphate
  modified_base 6: mod_base = OTHER; note = 2'-O-docosanyl-adenosine-3'-phosphate
  modified_base 7: mod_base = OTHER; note = 2'-deoxy-2'-fluorocytidine-3'-phosphate
  modified_base 8: mod_base = OTHER; note = 2'-O-methyluridine-3'-phosphate
  modified_base 9: mod_base = OTHER; note = 2'-deoxy-2'-fluorouridine-3'-phosphate
  modified_base 10: mod_base = OTHER; note = 2'-deoxy-2'-fluorocytidine-3'-phosphate
  modified_base 11: mod_base = OTHER; note = 2'-deoxy-2'-fluorouridine-3'-phosphate
  modified_base 12: mod_base = OTHER; note = 2'-O-methyladenosine-3'-phosphate
  modified_base 13: mod_base = OTHER; note = 2'-O-methylcytidine-3'-phosphate
  modified_base 14: mod_base = OTHER; note = 2'-O-methyladenosine-3'-phosphate
  modified_base 15: mod_base = OTHER; note = 2'-O-methylcytidine-3'-phosphate
  modified_base 16: mod_base = OTHER; note = 2'-O-methyladenosine-3'-phosphate
  modified_base 17: mod_base = OTHER; note = 2'-O-methyladenosine-3'-phosphate
  modified_base 18: mod_base = OTHER; note = 2'-O-methyluridine-3'-phosphate
  modified_base 19: mod_base = OTHER; note = 2'-O-methylguanosine-3'-phosphorothioate
  modified_base 20: mod_base = OTHER; note = 2'-O-methyladenosine-3'-phosphorothioate
  modified_base 21: mod_base = OTHER; note = 2'-O-methyladenosine
tccaaacttctacacaatgaa

SEQ ID NO: 11683 - RNA, 21 nt, synthetic construct
  source 1..21: mol_type = other RNA
  modified_base 1: mod_base = OTHER; note = 2'-O-methylcytidine-3'-phosphorothioate
  modified_base 2: mod_base = OTHER; note = 2'-O-methylcytidine-3'-phosphorothioate
  modified_base 3: mod_base = OTHER; note = 2'-O-methyladenosine-3'-phosphate
  modified_base 4: mod_base = OTHER; note = 2'-O-methyladenosine-3'-phosphate
  modified_base 5: mod_base = OTHER; note = 2'-O-methyladenosine-3'-phosphate
  modified_base 6: mod_base = OTHER; note = 2'-O-docosanyl-cytidine-3'-phosphate
  modified_base 7: mod_base = OTHER; note = 2'-deoxy-2'-fluorouridine-3'-phosphate
  modified_base 8: mod_base = OTHER; note = 2'-O-methyluridine-3'-phosphate
  modified_base 9: mod_base = OTHER; note = 2'-deoxy-2'-fluorocytidine-3'-phosphate
  modified_base 10: mod_base = OTHER; note = 2'-deoxy-2'-fluorouridine-3'-phosphate
  modified_base 11: mod_base = OTHER; note = 2'-deoxy-2'-fluoroadenosine-3'-phosphate
  modified_base 12: mod_base = OTHER; note = 2'-O-methylcytidine-3'-phosphate
  modified_base 13: mod_base = OTHER; note = 2'-O-methyladenosine-3'-phosphate
  modified_base 14: mod_base = OTHER; note = 2'-O-methylcytidine-3'-phosphate
  modified_base 15: mod_base = OTHER; note = 2'-O-methyladenosine-3'-phosphate
  modified_base 16: mod_base = OTHER; note = 2'-O-methyladenosine-3'-phosphate
  modified_base 17: mod_base = OTHER; note = 2'-O-methyluridine-3'-phosphate
  modified_base 18: mod_base = OTHER; note = 2'-O-methylguanosine-3'-phosphate
  modified_base 19: mod_base = OTHER; note = 2'-O-methyladenosine-3'-phosphorothioate
  modified_base 20: mod_base = OTHER; note = 2'-O-methyladenosine-3'-phosphorothioate
  modified_base 21: mod_base = OTHER; note = 2'-O-methyladenosine
ccaaacttctacacaatgaaa

SEQ ID NO: 11684 - RNA, 21 nt, synthetic construct
  source 1..21: mol_type = other RNA
  modified_base 1: mod_base = OTHER; note = 2'-O-methylcytidine-3'-phosphorothioate
  modified_base 2: mod_base = OTHER; note = 2'-O-methyladenosine-3'-phosphorothioate
  modified_base 3: mod_base = OTHER; note = 2'-O-methyladenosine-3'-phosphate
  modified_base 4: mod_base = OTHER; note = 2'-O-methyladenosine-3'-phosphate
  modified_base 5: mod_base = OTHER; note = 2'-O-methylcytidine-3'-phosphate
  modified_base 6: mod_base = OTHER; note = 2'-O-docosanyl-uridine-3'-phosphate
  modified_base 7: mod_base = OTHER; note = 2'-deoxy-2'-fluorouridine-3'-phosphate
  modified_base 8: mod_base = OTHER; note = 2'-O-methylcytidine-3'-phosphate
  modified_base 9: mod_base = OTHER; note = 2'-deoxy-2'-fluorouridine-3'-phosphate
  modified_base 10: mod_base = OTHER; note = 2'-deoxy-2'-fluoroadenosine-3'-phosphate
  modified_base 11: mod_base = OTHER; note = 2'-deoxy-2'-fluorocytidine-3'-phosphate
  modified_base 12: mod_base = OTHER; note = 2'-O-methyladenosine-3'-phosphate
  modified_base 13: mod_base = OTHER; note = 2'-O-methylcytidine-3'-phosphate
  modified_base 14: mod_base = OTHER; note = 2'-O-methyladenosine-3'-phosphate
  modified_base 15: mod_base = OTHER; note = 2'-O-methyladenosine-3'-phosphate
  modified_base 16: mod_base = OTHER; note = 2'-O-methyluridine-3'-phosphate
  modified_base 17: mod_base = OTHER; note = 2'-O-methylguanosine-3'-phosphate
  modified_base 18: mod_base = OTHER; note = 2'-O-methyladenosine-3'-phosphate
  modified_base 19: mod_base = OTHER; note = 2'-O-methyladenosine-3'-phosphorothioate
  modified_base 20: mod_base = OTHER; note = 2'-O-methylcytidine-3'-phosphorothioate
  modified_base 21: mod_base = OTHER; note = 2'-O-methyladenosine
caaacttctacacaatgaaca

SEQ ID NO: 11685 - RNA, 21 nt, synthetic construct
  source 1..21: mol_type = other RNA
  modified_base 1: mod_base = OTHER; note = 2'-O-methyladenosine-3'-phosphorothioate
  modified_base 2: mod_base = OTHER; note = 2'-O-methyladenosine-3'-phosphorothioate
  modified_base 3: mod_base = OTHER; note = 2'-O-methyladenosine-3'-phosphate
  modified_base 4: mod_base = OTHER; note = 2'-O-methylcytidine-3'-phosphate
  modified_base 5: mod_base = OTHER; note = 2'-O-methyluridine-3'-phosphate
  modified_base 6: mod_base = OTHER; note = 2'-O-docosanyl-uridine-3'-phosphate
  modified_base 7: mod_base = OTHER; note = 2'-deoxy-2'-fluorocytidine-3'-phosphate
  modified_base 8: mod_base = OTHER; note = 2'-O-methyluridine-3'-phosphate
  modified_base 9: mod_base = OTHER; note = 2'-deoxy-2'-fluoroadenosine-3'-phosphate
  modified_base 10: mod_base = OTHER; note = 2'-deoxy-2'-fluorocytidine-3'-phosphate
  modified_base 11: mod_base = OTHER; note = 2'-deoxy-2'-fluoroadenosine-3'-phosphate
  modified_base 12: mod_base = OTHER; note = 2'-O-methylcytidine-3'-phosphate
  modified_base 13: mod_base = OTHER; note = 2'-O-methyladenosine-3'-phosphate
  modified_base 14: mod_base = OTHER; note = 2'-O-methyladenosine-3'-phosphate
  modified_base 15: mod_base = OTHER; note = 2'-O-methyluridine-3'-phosphate
  modified_base 16: mod_base = OTHER; note = 2'-O-methylguanosine-3'-phosphate
  modified_base 17: mod_base = OTHER; note = 2'-O-methyladenosine-3'-phosphate
  modified_base 18: mod_base = OTHER; note = 2'-O-methyladenosine-3'-phosphate
  modified_base 19: mod_base = OTHER; note = 2'-O-methylcytidine-3'-phosphorothioate
  modified_base 20: mod_base = OTHER; note = 2'-O-methyluridine-3'-phosphorothioate
  modified_base 21: mod_base = OTHER; note = 2'-O-methyladenosine
aaacttctacacaatgaacta

SEQ ID NO: 11686 - RNA, 21 nt, synthetic construct
  source 1..21: mol_type = other RNA
  modified_base 1: mod_base = OTHER; note = 2'-O-methyladenosine-3'-phosphorothioate
  modified_base 2: mod_base = OTHER; note = 2'-O-methyladenosine-3'-phosphorothioate
  modified_base 3: mod_base = OTHER; note = 2'-O-methylcytidine-3'-phosphate
  modified_base 4: mod_base = OTHER; note = 2'-O-methyluridine-3'-phosphate
  modified_base 5: mod_base = OTHER; note = 2'-O-methyluridine-3'-phosphate
  modified_base 6: mod_base = OTHER; note = 2'-O-docosanyl-cytidine-3'-phosphate
  modified_base 7: mod_base = OTHER; note = 2'-deoxy-2'-fluorouridine-3'-phosphate
  modified_base 8: mod_base = OTHER; note = 2'-O-methyladenosine-3'-phosphate
  modified_base 9: mod_base = OTHER; note = 2'-deoxy-2'-fluorocytidine-3'-phosphate
  modified_base 10: mod_base = OTHER; note = 2'-deoxy-2'-fluoroadenosine-3'-phosphate
  modified_base 11: mod_base = OTHER; note = 2'-deoxy-2'-fluorocytidine-3'-phosphate
  modified_base 12: mod_base = OTHER; note = 2'-O-methyladenosine-3'-phosphate
  modified_base 13: mod_base = OTHER; note = 2'-O-methyladenosine-3'-phosphate
  modified_base 14: mod_base = OTHER; note = 2'-O-methyluridine-3'-phosphate
  modified_base 15: mod_base = OTHER; note = 2'-O-methylguanosine-3'-phosphate
  modified_base 16: mod_base = OTHER; note = 2'-O-methyladenosine-3'-phosphate
  modified_base 17: mod_base = OTHER; note = 2'-O-methyladenosine-3'-phosphate
  modified_base 18: mod_base = OTHER; note = 2'-O-methylcytidine-3'-phosphate
  modified_base 19: mod_base = OTHER; note = 2'-O-methyluridine-3'-phosphorothioate
  modified_base 20: mod_base = OTHER; note = 2'-O-methyluridine-3'-phosphorothioate
  modified_base 21: mod_base = OTHER; note = 2'-O-methyladenosine
aacttctacacaatgaactta

SEQ ID NO: 11687 - RNA, 21 nt, synthetic construct
  source 1..21: mol_type = other RNA
  modified_base 1: mod_base = OTHER; note = 2'-O-methyladenosine-3'-phosphorothioate
  modified_base 2: mod_base = OTHER; note = 2'-O-methylcytidine-3'-phosphorothioate
  modified_base 3: mod_base = OTHER; note = 2'-O-methyluridine-3'-phosphate
  modified_base 4: mod_base = OTHER; note = 2'-O-methyluridine-3'-phosphate
  modified_base 5: mod_base = OTHER; note = 2'-O-methylcytidine-3'-phosphate
  modified_base 6: mod_base = OTHER; note = 2'-O-docosanyl-uridine-3'-phosphate
  modified_base 7: mod_base = OTHER; note = 2'-deoxy-2'-fluoroadenosine-3'-phosphate
  modified_base 8: mod_base = OTHER; note = 2'-O-methylcytidine-3'-phosphate
  modified_base 9: mod_base = OTHER; note = 2'-deoxy-2'-fluoroadenosine-3'-phosphate
  modified_base 10: mod_base = OTHER; note = 2'-deoxy-2'-fluorocytidine-3'-phosphate
  modified_base 11: mod_base = OTHER; note = 2'-deoxy-2'-fluoroadenosine-3'-phosphate
  modified_base 12: mod_base = OTHER; note = 2'-O-methyladenosine-3'-phosphate
  modified_base 13: mod_base = OTHER; note = 2'-O-methyluridine-3'-phosphate
  modified_base 14: mod_base = OTHER; note = 2'-O-methylguanosine-3'-phosphate
  modified_base 15: mod_base = OTHER; note = 2'-O-methyladenosine-3'-phosphate
  modified_base 16: mod_base = OTHER; note = 2'-O-methyladenosine-3'-phosphate
  modified_base 17: mod_base = OTHER; note = 2'-O-methylcytidine-3'-phosphate
  modified_base 18: mod_base = OTHER; note = 2'-O-methyluridine-3'-phosphate
  modified_base 19: mod_base = OTHER; note = 2'-O-methyluridine-3'-phosphorothioate
  modified_base 20: mod_base = OTHER; note = 2'-O-methylcytidine-3'-phosphorothioate
  modified_base 21: mod_base = OTHER; note = 2'-O-methyladenosine
acttctacacaatgaacttca

SEQ ID NO: 11688 - RNA, 21 nt, synthetic construct
  source 1..21: mol_type = other RNA
  modified_base 1: mod_base = OTHER; note = 2'-O-methylcytidine-3'-phosphorothioate
  modified_base 2: mod_base = OTHER; note = 2'-O-methyluridine-3'-phosphorothioate
  modified_base 3: mod_base = OTHER; note = 2'-O-methyluridine-3'-phosphate
  modified_base 4: mod_base = OTHER; note = 2'-O-methylcytidine-3'-phosphate
  modified_base 5: mod_base = OTHER; note = 2'-O-methyluridine-3'-phosphate
  modified_base 6: mod_base = OTHER; note = 2'-O-docosanyl-adenosine-3'-phosphate
  modified_base 7: mod_base = OTHER; note = 2'-deoxy-2'-fluorocytidine-3'-phosphate
  modified_base 8: mod_base = OTHER; note = 2'-O-methyladenosine-3'-phosphate
  modified_base 9: mod_base = OTHER; note = 2'-deoxy-2'-fluorocytidine-3'-phosphate
  modified_base 10: mod_base = OTHER; note = 2'-deoxy-2'-fluoroadenosine-3'-phosphate
  modified_base 11: mod_base = OTHER; note = 2'-deoxy-2'-fluoroadenosine-3'-phosphate
  modified_base 12: mod_base = OTHER; note = 2'-O-methyluridine-3'-phosphate
  modified_base 13: mod_base = OTHER; note = 2'-O-methylguanosine-3'-phosphate
  modified_base 14: mod_base = OTHER; note = 2'-O-methyladenosine-3'-phosphate
  modified_base 15: mod_base = OTHER; note = 2'-O-methyladenosine-3'-phosphate
  modified_base 16: mod_base = OTHER; note = 2'-O-methylcytidine-3'-phosphate
  modified_base 17: mod_base = OTHER; note = 2'-O-methyluridine-3'-phosphate
  modified_base 18: mod_base = OTHER; note = 2'-O-methyluridine-3'-phosphate
  modified_base 19: mod_base = OTHER; note = 2'-O-methylcytidine-3'-phosphorothioate
  modified_base 20: mod_base = OTHER; note = 2'-O-methyluridine-3'-phosphorothioate
  modified_base 21: mod_base = OTHER; note = 2'-O-methyladenosine
cttctacacaatgaacttcta

SEQ ID NO: 11689 - RNA, 21 nt, synthetic construct
  source 1..21: mol_type = other RNA
  modified_base 1: mod_base = OTHER; note = 2'-O-methyluridine-3'-phosphorothioate
  modified_base 2: mod_base = OTHER; note = 2'-O-methyluridine-3'-phosphorothioate
  modified_base 3: mod_base = OTHER; note = 2'-O-methylcytidine-3'-phosphate
  modified_base 4: mod_base = OTHER; note = 2'-O-methyluridine-3'-phosphate
  modified_base 5: mod_base = OTHER; note = 2'-O-methyladenosine-3'-phosphate
  modified_base 6: mod_base = OTHER; note = 2'-O-docosanyl-cytidine-3'-phosphate
  modified_base 7: mod_base = OTHER; note = 2'-deoxy-2'-fluoroadenosine-3'-phosphate
  modified_base 8: mod_base = OTHER; note = 2'-O-methylcytidine-3'-phosphate
  modified_base 9: mod_base = OTHER; note = 2'-deoxy-2'-fluoroadenosine-3'-phosphate
  modified_base 10: mod_base = OTHER; note = 2'-deoxy-2'-fluoroadenosine-3'-phosphate
  modified_base 11: mod_base = OTHER; note = 2'-deoxy-2'-fluorouridine-3'-phosphate
  modified_base 12: mod_base = OTHER; note = 2'-O-methylguanosine-3'-phosphate
  modified_base 13: mod_base = OTHER; note = 2'-O-methyladenosine-3'-phosphate
  modified_base 14: mod_base = OTHER; note = 2'-O-methyladenosine-3'-phosphate
  modified_base 15: mod_base = OTHER; note = 2'-O-methylcytidine-3'-phosphate
  modified_base 16: mod_base = OTHER; note = 2'-O-methyluridine-3'-phosphate
  modified_base 17: mod_base = OTHER; note = 2'-O-methyluridine-3'-phosphate
  modified_base 18: mod_base = OTHER; note = 2'-O-methylcytidine-3'-phosphate
  modified_base 19: mod_base = OTHER; note = 2'-O-methyluridine-3'-phosphorothioate
  modified_base 20: mod_base = OTHER; note = 2'-O-methyluridine-3'-phosphorothioate
  modified_base 21: mod_base = OTHER; note = 2'-O-methyladenosine
ttctacacaatgaacttctta

SEQ ID NO: 11690 - RNA, 21 nt, synthetic construct
  source 1..21: mol_type = other RNA
  modified_base 1: mod_base = OTHER; note = 2'-O-methyluridine-3'-phosphorothioate
  modified_base 2: mod_base = OTHER; note = 2'-O-methylcytidine-3'-phosphorothioate
  modified_base 3: mod_base = OTHER; note = 2'-O-methyluridine-3'-phosphate
  modified_base 4: mod_base = OTHER; note = 2'-O-methyladenosine-3'-phosphate
  modified_base 5: mod_base = OTHER; note = 2'-O-methylcytidine-3'-phosphate
  modified_base 6: mod_base = OTHER; note = 2'-O-docosanyl-adenosine-3'-phosphate
  modified_base 7: mod_base = OTHER; note = 2'-deoxy-2'-fluorocytidine-3'-phosphate
  modified_base 8: mod_base = OTHER; note = 2'-O-methyladenosine-3'-phosphate
  modified_base 9: mod_base = OTHER; note = 2'-deoxy-2'-fluoroadenosine-3'-phosphate
  modified_base 10: mod_base = OTHER; note = 2'-deoxy-2'-fluorouridine-3'-phosphate
  modified_base 11: mod_base = OTHER; note = 2'-deoxy-2'-fluoroguanosine-3'-phosphate
  modified_base 12: mod_base = OTHER; note = 2'-O-methyladenosine-3'-phosphate
  modified_base 13: mod_base = OTHER; note = 2'-O-methyladenosine-3'-phosphate
  modified_base 14: mod_base = OTHER; note = 2'-O-methylcytidine-3'-phosphate
  modified_base 15: mod_base = OTHER; note = 2'-O-methyluridine-3'-phosphate
  modified_base 16: mod_base = OTHER; note = 2'-O-methyluridine-3'-phosphate
  modified_base 17: mod_base = OTHER; note = 2'-O-methylcytidine-3'-phosphate
  modified_base 18: mod_base = OTHER; note = 2'-O-methyluridine-3'-phosphate
  modified_base 19: mod_base = OTHER; note = 2'-O-methyluridine-3'-phosphorothioate
  modified_base 20: mod_base = OTHER; note = 2'-O-methyladenosine-3'-phosphorothioate
  modified_base 21: mod_base = OTHER; note = 2'-O-methyladenosine
tctacacaatgaacttcttaa

SEQ ID NO: 11691 - RNA, 21 nt, synthetic construct
  source 1..21: mol_type = other RNA
  modified_base 1: mod_base = OTHER; note = 2'-O-methyluridine-3'-phosphorothioate
  modified_base 2: mod_base = OTHER; note = 2'-O-methyladenosine-3'-phosphorothioate
  modified_base 3: mod_base = OTHER; note = 2'-O-methylcytidine-3'-phosphate
  modified_base 4: mod_base = OTHER; note = 2'-O-methyladenosine-3'-phosphate
  modified_base 5: mod_base = OTHER; note = 2'-O-methylcytidine-3'-phosphate
  modified_base 6: mod_base = OTHER; note = 2'-O-docosanyl-adenosine-3'-phosphate
  modified_base 7: mod_base = OTHER; note = 2'-deoxy-2'-fluoroadenosine-3'-phosphate
  modified_base 8: mod_base = OTHER; note = 2'-O-methyluridine-3'-phosphate
  modified_base 9: mod_base = OTHER; note = 2'-deoxy-2'-fluoroguanosine-3'-phosphate
  modified_base 10: mod_base = OTHER; note = 2'-deoxy-2'-fluoroadenosine-3'-phosphate
  modified_base 11: mod_base = OTHER; note = 2'-deoxy-2'-fluoroadenosine-3'-phosphate
  modified_base 12: mod_base = OTHER; note = 2'-O-methylcytidine-3'-phosphate
  modified_base 13: mod_base = OTHER; note = 2'-O-methyluridine-3'-phosphate
  modified_base 14: mod_base = OTHER; note = 2'-O-methyluridine-3'-phosphate
  modified_base 15: mod_base = OTHER; note = 2'-O-methylcytidine-3'-phosphate
  modified_base 16: mod_base = OTHER; note = 2'-O-methyluridine-3'-phosphate
  modified_base 17: mod_base = OTHER; note = 2'-O-methyluridine-3'-phosphate
  modified_base 18: mod_base = OTHER; note = 2'-O-methyladenosine-3'-phosphate
  modified_base 19: mod_base = OTHER; note = 2'-O-methyladenosine-3'-phosphorothioate
  modified_base 20: mod_base = OTHER; note = 2'-O-methylcytidine-3'-phosphorothioate
  modified_base 21: mod_base = OTHER; note = 2'-O-methyladenosine
tacacaatgaacttcttaaca

SEQ ID NO: 11692 - RNA, 21 nt, synthetic construct
  source 1..21: mol_type = other RNA
  modified_base 1: mod_base = OTHER; note = 2'-O-methyladenosine-3'-phosphorothioate
  modified_base 2: mod_base = OTHER; note = 2'-O-methylcytidine-3'-phosphorothioate
  modified_base 3: mod_base = OTHER; note = 2'-O-methyladenosine-3'-phosphate
  modified_base 4: mod_base = OTHER; note = 2'-O-methylcytidine-3'-phosphate
  modified_base 5: mod_base = OTHER; note = 2'-O-methyladenosine-3'-phosphate
  modified_base 6: mod_base = OTHER; note = 2'-O-docosanyl-adenosine-3'-phosphate
  modified_base 7: mod_base = OTHER; note = 2'-deoxy-2'-fluorouridine-3'-phosphate
  modified_base 8: mod_base = OTHER; note = 2'-O-methylguanosine-3'-phosphate
  modified_base 9: mod_base = OTHER; note = 2'-deoxy-2'-fluoroadenosine-3'-phosphate
  modified_base 10: mod_base = OTHER; note = 2'-deoxy-2'-fluoroadenosine-3'-phosphate
  modified_base 11: mod_base = OTHER; note = 2'-deoxy-2'-fluorocytidine-3'-phosphate
  modified_base 12: mod_base = OTHER; note = 2'-O-methyluridine-3'-phosphate
  modified_base 13: mod_base = OTHER; note = 2'-O-methyluridine-3'-phosphate
  modified_base 14: mod_base = OTHER; note = 2'-O-methylcytidine-3'-phosphate
  modified_base 15: mod_base = OTHER; note = 2'-O-methyluridine-3'-phosphate
  modified_base 16: mod_base = OTHER; note = 2'-O-methyluridine-3'-phosphate
  modified_base 17: mod_base = OTHER; note = 2'-O-methyladenosine-3'-phosphate
  modified_base 18: mod_base = OTHER; note = 2'-O-methyladenosine-3'-phosphate
  modified_base 19: mod_base = OTHER; note = 2'-O-methylcytidine-3'-phosphorothioate
  modified_base 20: mod_base = OTHER; note = 2'-O-methyladenosine-3'-phosphorothioate
  modified_base 21: mod_base = OTHER; note = 2'-O-methyladenosine
acacaatgaacttcttaacaa

SEQ ID NO: 11693 - RNA, 21 nt, synthetic construct
  source 1..21: mol_type = other RNA
  modified_base 1: mod_base = OTHER; note = 2'-O-methylcytidine-3'-phosphorothioate
  modified_base 2: mod_base = OTHER; note = 2'-O-methyladenosine-3'-phosphorothioate
  modified_base 3: mod_base = OTHER; note = 2'-O-methylcytidine-3'-phosphate
  modified_base 4: mod_base = OTHER; note = 2'-O-methyladenosine-3'-phosphate
  modified_base 5: mod_base = OTHER; note = 2'-O-methyladenosine-3'-phosphate
  modified_base 6: mod_base = OTHER; note = 2'-O-docosanyl-uridine-3'-phosphate
  modified_base 7: mod_base = OTHER; note = 2'-deoxy-2'-fluoroguanosine-3'-phosphate
  modified_base 8: mod_base = OTHER; note = 2'-O-methyladenosine-3'-phosphate
  modified_base 9: mod_base = OTHER; note = 2'-deoxy-2'-fluoroadenosine-3'-phosphate
  modified_base 10: mod_base = OTHER; note = 2'-deoxy-2'-fluorocytidine-3'-phosphate
  modified_base 11: mod_base = OTHER; note = 2'-deoxy-2'-fluorouridine-3'-phosphate
  modified_base 12: mod_base = OTHER; note = 2'-O-methyluridine-3'-phosphate
  modified_base 13: mod_base = OTHER; note = 2'-O-methylcytidine-3'-phosphate
  modified_base 14: mod_base = OTHER; note = 2'-O-methyluridine-3'-phosphate
  modified_base 15: mod_base = OTHER; note = 2'-O-methyluridine-3'-phosphate
  modified_base 16: mod_base = OTHER; note = 2'-O-methyladenosine-3'-phosphate
  modified_base 17: mod_base = OTHER; note = 2'-O-methyladenosine-3'-phosphate
  modified_base 18: mod_base = OTHER; note = 2'-O-methylcytidine-3'-phosphate
  modified_base 19: mod_base = OTHER; note = 2'-O-methyladenosine-3'-phosphorothioate
  modified_base 20: mod_base = OTHER; note = 2'-O-methyladenosine-3'-phosphorothioate
  modified_base 21: mod_base = OTHER; note = 2'-O-methyladenosine
cacaatgaacttcttaacaaa

SEQ ID NO: 11694 - RNA, 21 nt, synthetic construct
  source 1..21: mol_type = other RNA
  modified_base 1: mod_base = OTHER; note = 2'-O-methyladenosine-3'-phosphorothioate
  modified_base 2: mod_base = OTHER; note = 2'-O-methylcytidine-3'-phosphorothioate
  modified_base 3: mod_base = OTHER; note = 2'-O-methyladenosine-3'-phosphate
  modified_base 4: mod_base = OTHER; note = 2'-O-methyladenosine-3'-phosphate
  modified_base 5: mod_base = OTHER; note = 2'-O-methyluridine-3'-phosphate
  modified_base 6: mod_base = OTHER; note = 2'-O-docosanyl-guanosine-3'-phosphate
  modified_base 7: mod_base = OTHER; note = 2'-deoxy-2'-fluoroadenosine-3'-phosphate
  modified_base 8: mod_base = OTHER; note = 2'-O-methyladenosine-3'-phosphate
  modified_base 9: mod_base = OTHER; note = 2'-deoxy-2'-fluorocytidine-3'-phosphate
  modified_base 10: mod_base = OTHER; note = 2'-deoxy-2'-fluorouridine-3'-phosphate
  modified_base 11: mod_base = OTHER; note = 2'-deoxy-2'-fluorouridine-3'-phosphate
  modified_base 12: mod_base = OTHER; note = 2'-O-methylcytidine-3'-phosphate
  modified_base 13: mod_base = OTHER; note = 2'-O-methyluridine-3'-phosphate
  modified_base 14: mod_base = OTHER; note = 2'-O-methyluridine-3'-phosphate
  modified_base 15: mod_base = OTHER; note = 2'-O-methyladenosine-3'-phosphate
  modified_base 16: mod_base = OTHER; note = 2'-O-methyladenosine-3'-phosphate
  modified_base 17: mod_base = OTHER; note = 2'-O-methylcytidine-3'-phosphate
  modified_base 18: mod_base = OTHER; note = 2'-O-methyladenosine-3'-phosphate
  modified_base 19: mod_base = OTHER; note = 2'-O-methyladenosine-3'-phosphorothioate
  modified_base 20: mod_base = OTHER; note = 2'-O-methylguanosine-3'-phosphorothioate
  modified_base 21: mod_base = OTHER; note = 2'-O-methyladenosine
acaatgaacttcttaacaaga

SEQ ID NO: 11695 - RNA, 21 nt, synthetic construct
  source 1..21: mol_type = other RNA
  modified_base 1: mod_base = OTHER; note = 2'-O-methylcytidine-3'-phosphorothioate
  modified_base 2: mod_base = OTHER; note = 2'-O-methyladenosine-3'-phosphorothioate
  modified_base 3: mod_base = OTHER; note = 2'-O-methyladenosine-3'-phosphate
  modified_base 4: mod_base = OTHER; note = 2'-O-methyluridine-3'-phosphate
  modified_base 5: mod_base = OTHER; note = 2'-O-methylguanosine-3'-phosphate
  modified_base 6: mod_base = OTHER; note = 2'-O-docosanyl-adenosine-3'-phosphate
  modified_base 7: mod_base = OTHER; note = 2'-deoxy-2'-fluoroadenosine-3'-phosphate
  modified_base 8: mod_base = OTHER; note = 2'-O-methylcytidine-3'-phosphate
  modified_base 9: mod_base = OTHER; note = 2'-deoxy-2'-fluorouridine-3'-phosphate
  modified_base 10: mod_base = OTHER; note = 2'-deoxy-2'-fluorouridine-3'-phosphate
  modified_base 11: mod_base = OTHER; note = 2'-deoxy-2'-fluorocytidine-3'-phosphate
  modified_base 12: mod_base = OTHER; note = 2'-O-methyluridine-3'-phosphate
  modified_base 13: mod_base = OTHER; note = 2'-O-methyluridine-3'-phosphate
  modified_base 14: mod_base = OTHER; note = 2'-O-methyladenosine-3'-phosphate
  modified_base 15: mod_base = OTHER; note = 2'-O-methyladenosine-3'-phosphate
  modified_base 16: mod_base = OTHER; note = 2'-O-methylcytidine-3'-phosphate
  modified_base 17: mod_base = OTHER; note = 2'-O-methyladenosine-3'-phosphate
  modified_base 18: mod_base = OTHER; note = 2'-O-methyladenosine-3'-phosphate
  modified_base 19: mod_base = OTHER; note = 2'-O-methylguanosine-3'-phosphorothioate
  modified_base 20: mod_base = OTHER; note = 2'-O-methyladenosine-3'-phosphorothioate
  modified_base 21: mod_base = OTHER; note = 2'-O-methyladenosine
caatgaacttcttaacaagaa

SEQ ID NO: 11696 - RNA, 21 nt, synthetic construct
  source 1..21: mol_type = other RNA
  modified_base 1: mod_base = OTHER; note = 2'-O-methyladenosine-3'-phosphorothioate
  modified_base 2: mod_base = OTHER; note = 2'-O-methyladenosine-3'-phosphorothioate
  modified_base 3: mod_base = OTHER; note = 2'-O-methyluridine-3'-phosphate
  modified_base 4: mod_base = OTHER; note = 2'-O-methylguanosine-3'-phosphate
  modified_base 5: mod_base = OTHER; note = 2'-O-methyladenosine-3'-phosphate
  modified_base 6: mod_base = OTHER; note = 2'-O-docosanyl-adenosine-3'-phosphate
  modified_base 7: mod_base = OTHER; note = 2'-deoxy-2'-fluorocytidine-3'-phosphate
  modified_base 8: mod_base = OTHER; note = 2'-O-methyluridine-3'-phosphate
  modified_base 9: mod_base = OTHER; note = 2'-deoxy-2'-fluorouridine-3'-phosphate
  modified_base 10: mod_base = OTHER; note = 2'-deoxy-2'-fluorocytidine-3'-phosphate
  modified_base 11: mod_base = OTHER; note = 2'-deoxy-2'-fluorouridine-3'-phosphate
  modified_base 12: mod_base = OTHER; note = 2'-O-methyluridine-3'-phosphate
  modified_base 13: mod_base = OTHER; note = 2'-O-methyladenosine-3'-phosphate
  modified_base 14: mod_base = OTHER; note = 2'-O-methyladenosine-3'-phosphate
  modified_base 15: mod_base = OTHER; note = 2'-O-methylcytidine-3'-phosphate
  modified_base 16: mod_base = OTHER; note = 2'-O-methyladenosine-3'-phosphate
  modified_base 17: mod_base = OTHER; note = 2'-O-methyladenosine-3'-phosphate
  modified_base 18: mod_base = OTHER; note = 2'-O-methylguanosine-3'-phosphate
  modified_base 19: mod_base = OTHER; note = 2'-O-methyladenosine-3'-phosphorothioate
  modified_base 20: mod_base = OTHER; note = 2'-O-methyluridine-3'-phosphorothioate
  modified_base 21: mod_base = OTHER; note = 2'-O-methyladenosine
aatgaacttcttaacaagata

SEQ ID NO: 11697 - RNA, 21 nt, synthetic construct
  source 1..21: mol_type = other RNA
  modified_base 1: mod_base = OTHER; note = 2'-O-methyladenosine-3'-phosphorothioate
  modified_base 2: mod_base = OTHER; note = 2'-O-methyluridine-3'-phosphorothioate
  modified_base 3: mod_base = OTHER; note = 2'-O-methylguanosine-3'-phosphate
  modified_base 4: mod_base = OTHER; note = 2'-O-methyladenosine-3'-phosphate
  modified_base 5: mod_base = OTHER; note = 2'-O-methyladenosine-3'-phosphate
  modified_base 6: mod_base = OTHER; note = 2'-O-docosanyl-cytidine-3'-phosphate
  modified_base 7: mod_base = OTHER; note = 2'-deoxy-2'-fluorouridine-3'-phosphate
  modified_base 8: mod_base = OTHER; note = 2'-O-methyluridine-3'-phosphate
  modified_base 9: mod_base = OTHER; note = 2'-deoxy-2'-fluorocytidine-3'-phosphate
  modified_base 10: mod_base = OTHER; note = 2'-deoxy-2'-fluorouridine-3'-phosphate
  modified_base 11: mod_base = OTHER; note = 2'-deoxy-2'-fluorouridine-3'-phosphate
  modified_base 12: mod_base = OTHER; note = 2'-O-methyladenosine-3'-phosphate
  modified_base 13: mod_base = OTHER; note = 2'-O-methyladenosine-3'-phosphate
  modified_base 14: mod_base = OTHER; note = 2'-O-methylcytidine-3'-phosphate
  modified_base 15: mod_base = OTHER; note = 2'-O-methyladenosine-3'-phosphate
  modified_base 16: mod_base = OTHER; note = 2'-O-methyladenosine-3'-phosphate
  modified_base 17: mod_base = OTHER; note = 2'-O-methylguanosine-3'-phosphate
  modified_base 18: mod_base = OTHER; note = 2'-O-methyladenosine-3'-phosphate
  modified_base 19: mod_base = OTHER; note = 2'-O-methyluridine-3'-phosphorothioate
  modified_base 20: mod_base = OTHER; note = 2'-O-methyluridine-3'-phosphorothioate
  modified_base 21: mod_base = OTHER; note = 2'-O-methyladenosine
atgaacttcttaacaagatta

SEQ ID NO: 11698 - RNA, 21 nt, synthetic construct
  source 1..21: mol_type = other RNA
  modified_base 1: mod_base = OTHER; note = 2'-O-methyluridine-3'-phosphorothioate
  modified_base 2: mod_base = OTHER; note = 2'-O-methyladenosine-3'-phosphorothioate
  modified_base 3: mod_base = OTHER; note = 2'-O-methyladenosine-3'-phosphate
  modified_base 4: mod_base = OTHER; note = 2'-O-methylcytidine-3'-phosphate
  modified_base 5: mod_base = OTHER; note = 2'-O-methyladenosine-3'-phosphate
  modified_base 6: mod_base = OTHER; note = 2'-O-docosanyl-adenosine-3'-phosphate
  modified_base 7: mod_base = OTHER; note = 2'-deoxy-2'-fluoroguanosine-3'-phosphate
  modified_base 8: mod_base = OTHER; note = 2'-O-methyladenosine-3'-phosphate
  modified_base 9: mod_base = OTHER; note = 2'-deoxy-2'-fluorouridine-3'-phosphate
  modified_base 10: mod_base = OTHER; note = 2'-deoxy-2'-fluorouridine-3'-phosphate
  modified_base 11: mod_base = OTHER; note = 2'-deoxy-2'-fluorouridine-3'-phosphate
  modified_base 12: mod_base = OTHER; note = 2'-O-methyluridine-3'-phosphate
  modified_base 13: mod_base = OTHER; note = 2'-O-methyladenosine-3'-phosphate
  modified_base 14: mod_base = OTHER; note = 2'-O-methyladenosine-3'-phosphate
  modified_base 15: mod_base = OTHER; note = 2'-O-methylguanosine-3'-phosphate
  modified_base 16: mod_base = OTHER; note = 2'-O-methyluridine-3'-phosphate
  modified_base 17: mod_base = OTHER; note = 2'-O-methyluridine-3'-phosphate
  modified_base 18: mod_base = OTHER; note = 2'-O-methylcytidine-3'-phosphate
  modified_base 19: mod_base = OTHER; note = 2'-O-methyluridine-3'-phosphorothioate
  modified_base 20: mod_base = OTHER; note = 2'-O-methylcytidine-3'-phosphorothioate
  modified_base 21: mod_base = OTHER; note = 2'-O-methyladenosine
taacaagattttaagttctca

SEQ ID NO: 11699 - RNA, 21 nt, synthetic construct
  source 1..21: mol_type = other RNA
  modified_base 1: mod_base = OTHER; note = 2'-O-methyladenosine-3'-phosphorothioate
  modified_base 2: mod_base = OTHER; note = 2'-O-methylcytidine-3'-phosphorothioate
  modified_base 3: mod_base = OTHER; note = 2'-O-methyladenosine-3'-phosphate
  modified_base 4: mod_base = OTHER; note = 2'-O-methyladenosine-3'-phosphate
  modified_base 5: mod_base = OTHER; note = 2'-O-methylguanosine-3'-phosphate
  modified_base 6: mod_base = OTHER; note = 2'-O-docosanyl-adenosine-3'-phosphate
  modified_base 7: mod_base = OTHER; note = 2'-deoxy-2'-fluorouridine-3'-phosphate
  modified_base 8: mod_base = OTHER; note = 2'-O-methyluridine-3'-phosphate
  modified_base 9: mod_base = OTHER; note = 2'-deoxy-2'-fluorouridine-3'-phosphate
  modified_base 10: mod_base = OTHER; note = 2'-deoxy-2'-fluorouridine-3'-phosphate
  modified_base 11: mod_base = OTHER; note = 2'-deoxy-2'-fluoroadenosine-3'-phosphate
  modified_base 12: mod_base = OTHER; note = 2'-O-methyladenosine-3'-phosphate
  modified_base 13: mod_base = OTHER; note = 2'-O-methylguanosine-3'-phosphate
  modified_base 14: mod_base = OTHER; note = 2'-O-methyluridine-3'-phosphate
  modified_base 15: mod_base = OTHER; note = 2'-O-methyluridine-3'-phosphate
  modified_base 16: mod_base = OTHER; note = 2'-O-methylcytidine-3'-phosphate
  modified_base 17: mod_base = OTHER; note = 2'-O-methyluridine-3'-phosphate
  modified_base 18: mod_base = OTHER; note = 2'-O-methylcytidine-3'-phosphate
  modified_base 19: mod_base = OTHER; note = 2'-O-methyluridine-3'-phosphorothioate
  modified_base 20: mod_base = OTHER; note = 2'-O-methylguanosine-3'-phosphorothioate
  modified_base 21: mod_base = OTHER; note = 2'-O-methyladenosine
acaagattttaagttctctga

SEQ ID NO: 11700 - RNA, 21 nt, synthetic construct
  source 1..21: mol_type = other RNA
  modified_base 1: mod_base = OTHER; note = 2'-O-methyladenosine-3'-phosphorothioate
  modified_base 2: mod_base = OTHER; note = 2'-O-methylguanosine-3'-phosphorothioate
  modified_base 3: mod_base = OTHER; note = 2'-O-methyluridine-3'-phosphate
  modified_base 4: mod_base = OTHER; note = 2'-O-methyluridine-3'-phosphate
  modified_base 5: mod_base = OTHER; note = 2'-O-methylcytidine-3'-phosphate
  modified_base 6: mod_base = OTHER; note = 2'-O-docosanyl-uridine-3'-phosphate
  modified_base 7: mod_base = OTHER; note = 2'-deoxy-2'-fluorocytidine-3'-phosphate
  modified_base 8: mod_base = OTHER; note = 2'-O-methyluridine-3'-phosphate
  modified_base 9: mod_base = OTHER; note = 2'-deoxy-2'-fluoroguanosine-3'-phosphate
  modified_base 10: mod_base = OTHER; note = 2'-deoxy-2'-fluorouridine-3'-phosphate
  modified_base 11: mod_base = OTHER; note = 2'-deoxy-2'-fluoroadenosine-3'-phosphate
  modified_base 12: mod_base = OTHER; note = 2'-O-methyluridine-3'-phosphate
  modified_base 13: mod_base = OTHER; note = 2'-O-methyladenosine-3'-phosphate
  modified_base 14: mod_base = OTHER; note = 2'-O-methyladenosine-3'-phosphate
  modified_base 15: mod_base = OTHER; note = 2'-O-methylguanosine-3'-phosphate
  modified_base 16: mod_base = OTHER; note = 2'-O-methyladenosine-3'-phosphate
  modified_base 17: mod_base = OTHER; note = 2'-O-methylguanosine-3'-phosphate
  modified_base 18: mod_base = OTHER; note = 2'-O-methylguanosine-3'-phosphate
  modified_base 19: mod_base = OTHER; note = 2'-O-methyluridine-3'-phosphorothioate
  modified_base 20: mod_base = OTHER; note = 2'-O-methyluridine-3'-phosphorothioate
  modified_base 21: mod_base = OTHER; note = 2'-O-methyladenosine
agttctctgtataagaggtta

SEQ ID NO: 11701 - RNA, 21 nt, synthetic construct
  source 1..21: mol_type = other RNA
  modified_base 1: mod_base = OTHER; note = 2'-O-methylguanosine-3'-phosphorothioate
  modified_base 2: mod_base = OTHER; note = 2'-O-methyluridine-3'-phosphorothioate
  modified_base 3: mod_base = OTHER; note = 2'-O-methyladenosine-3'-phosphate
  modified_base 4: mod_base = OTHER; note = 2'-O-methyluridine-3'-phosphate
  modified_base 5: mod_base = OTHER; note = 2'-O-methyladenosine-3'-phosphate
  modified_base 6: mod_base = OTHER; note = 2'-O-docosanyl-adenosine-3'-phosphate
  modified_base 7: mod_base = OTHER; note = 2'-deoxy-2'-fluoroguanosine-3'-phosphate
  modified_base 8: mod_base = OTHER; note = 2'-O-methyladenosine-3'-phosphate
  modified_base 9: mod_base = OTHER; note = 2'-deoxy-2'-fluoroguanosine-3'-phosphate
  modified_base 10: mod_base = OTHER; note = 2'-deoxy-2'-fluoroguanosine-3'-phosphate
  modified_base 11: mod_base = OTHER; note = 2'-deoxy-2'-fluorouridine-3'-phosphate
  modified_base 12: mod_base = OTHER; note = 2'-O-methyluridine-3'-phosphate
  modified_base 13: mod_base = OTHER; note = 2'-O-methyluridine-3'-phosphate
  modified_base 14: mod_base = OTHER; note = 2'-O-methylcytidine-3'-phosphate
  modified_base 15: mod_base = OTHER; note = 2'-O-methyladenosine-3'-phosphate
  modified_base 16: mod_base = OTHER; note = 2'-O-methylcytidine-3'-phosphate
  modified_base 17: mod_base = OTHER; note = 2'-O-methylcytidine-3'-phosphate
  modified_base 18: mod_base = OTHER; note = 2'-O-methyluridine-3'-phosphate
  modified_base 19: mod_base = OTHER; note = 2'-O-methylcytidine-3'-phosphorothioate
  modified_base 20: mod_base = OTHER; note = 2'-O-methyladenosine-3'-phosphorothioate
  modified_base 21: mod_base = OTHER; note = 2'-O-methyladenosine
gtataagaggtttcacctcaa

SEQ ID NO: 11702 - RNA, 21 nt, synthetic construct
  source 1..21: mol_type = other RNA
  modified_base 1: mod_base = OTHER; note = 2'-O-methyladenosine-3'-phosphorothioate
  modified_base 2: mod_base = OTHER; note = 2'-O-methyluridine-3'-phosphorothioate
  modified_base 3: mod_base = OTHER; note = 2'-O-methyluridine-3'-phosphate
  modified_base 4: mod_base = OTHER; note = 2'-O-methyluridine-3'-phosphate
  modified_base 5: mod_base = OTHER; note = 2'-O-methylguanosine-3'-phosphate
  modified_base 6: mod_base = OTHER; note = 2'-O-docosanyl-guanosine-3'-phosphate
  modified_base 7: mod_base = OTHER; note = 2'-deoxy-2'-fluorocytidine-3'-phosphate
  modified_base 8: mod_base = OTHER; note = 2'-O-methyladenosine-3'-phosphate
  modified_base 9: mod_base = OTHER; note = 2'-deoxy-2'-fluorocytidine-3'-phosphate
  modified_base 10: mod_base = OTHER; note = 2'-deoxy-2'-fluorouridine-3'-phosphate
  modified_base 11: mod_base = OTHER; note = 2'-deoxy-2'-fluoroadenosine-3'-phosphate
  modified_base 12: mod_base = OTHER; note = 2'-O-methyluridine-3'-phosphate
  modified_base 13: mod_base = OTHER; note = 2'-O-methyladenosine-3'-phosphate
  modified_base 14: mod_base = OTHER; note = 2'-O-methylguanosine-3'-phosphate
  modified_base 15: mod_base = OTHER; note = 2'-O-methyladenosine-3'-phosphate
  modified_base 16: mod_base = OTHER; note = 2'-O-methylguanosine-3'-phosphate
  modified_base 17: mod_base = OTHER; note = 2'-O-methyluridine-3'-phosphate
  modified_base 18: mod_base = OTHER; note = 2'-O-methyladenosine-3'-phosphate
  modified_base 19: mod_base = OTHER; note = 2'-O-methyluridine-3'-phosphorothioate
  modified_base 20: mod_base = OTHER; note = 2'-O-methyluridine-3'-phosphorothioate
  modified_base 21: mod_base = OTHER; note = 2'-O-methyladenosine
atttggcactatagagtatta

SEQ ID NO: 11703 - RNA, 21 nt, synthetic construct
  source 1..21: mol_type = other RNA
  modified_base 1: mod_base = OTHER; note = 2'-O-methyluridine-3'-phosphorothioate
  modified_base 2: mod_base = OTHER; note = 2'-O-methyluridine-3'-phosphorothioate
  modified_base 3: mod_base = OTHER; note = 2'-O-methyluridine-3'-phosphate
  modified_base 4: mod_base = OTHER; note = 2'-O-methylguanosine-3'-phosphate
  modified_base 5: mod_base = OTHER; note = 2'-O-methylguanosine-3'-phosphate
  modified_base 6: mod_base = OTHER; note = 2'-O-docosanyl-cytidine-3'-phosphate
  modified_base 7: mod_base = OTHER; note = 2'-deoxy-2'-fluoroadenosine-3'-phosphate
  modified_base 8: mod_base = OTHER; note = 2'-O-methylcytidine-3'-phosphate
  modified_base 9: mod_base = OTHER; note = 2'-deoxy-2'-fluorouridine-3'-phosphate
  modified_base 10: mod_base = OTHER; note = 2'-deoxy-2'-fluoroadenosine-3'-phosphate
  modified_base 11: mod_base = OTHER; note = 2'-deoxy-2'-fluorouridine-3'-phosphate
  modified_base 12: mod_base = OTHER; note = 2'-O-methyladenosine-3'-phosphate
  modified_base 13: mod_base = OTHER; note = 2'-O-methylguanosine-3'-phosphate
  modified_base 14: mod_base = OTHER; note = 2'-O-methyladenosine-3'-phosphate
  modified_base 15: mod_base = OTHER; note = 2'-O-methylguanosine-3'-phosphate
  modified_base 16: mod_base = OTHER; note = 2'-O-methyluridine-3'-phosphate
  modified_base 17: mod_base = OTHER; note = 2'-O-methyladenosine-3'-phosphate
  modified_base 18: mod_base = OTHER; note = 2'-O-methyluridine-3'-phosphate
  modified_base 19: mod_base = OTHER; note = 2'-O-methyluridine-3'-phosphorothioate
  modified_base 20: mod_base = OTHER; note = 2'-O-methyluridine-3'-phosphorothioate
  modified_base 21: mod_base = OTHER; note = 2'-O-methyladenosine
tttggcactatagagtattta

SEQ ID NO: 11704 - RNA, 21 nt, synthetic construct
  source 1..21: mol_type = other RNA
  modified_base 1: mod_base = OTHER; note = 2'-O-methylcytidine-3'-phosphorothioate
  modified_base 2: mod_base = OTHER; note = 2'-O-methyladenosine-3'-phosphorothioate
  modified_base 3: mod_base = OTHER; note = 2'-O-methylguanosine-3'-phosphate
  modified_base 4: mod_base = OTHER; note = 2'-O-methyladenosine-3'-phosphate
  modified_base 5: mod_base = OTHER; note = 2'-O-methylguanosine-3'-phosphate
  modified_base 6: mod_base = OTHER; note = 2'-O-docosanyl-adenosine-3'-phosphate
  modified_base 7: mod_base = OTHER; note = 2'-deoxy-2'-fluorouridine-3'-phosphate
  modified_base 8: mod_base = OTHER; note = 2'-O-methylguanosine-3'-phosphate
  modified_base 9: mod_base = OTHER; note = 2'-deoxy-2'-fluoroadenosine-3'-phosphate
  modified_base 10: mod_base = OTHER; note = 2'-deoxy-2'-fluorouridine-3'-phosphate
  modified_base 11: mod_base = OTHER; note = 2'-deoxy-2'-fluorouridine-3'-phosphate
  modified_base 12: mod_base = OTHER; note = 2'-O-methyluridine-3'-phosphate
  modified_base 13: mod_base = OTHER; note = 2'-O-methyluridine-3'-phosphate
  modified_base 14: mod_base = OTHER; note = 2'-O-methyluridine-3'-phosphate
  modified_base 15: mod_base = OTHER; note = 2'-O-methylcytidine-3'-phosphate
  modified_base 16: mod_base = OTHER; note = 2'-O-methyluridine-3'-phosphate
  modified_base 17: mod_base = OTHER; note = 2'-O-methyluridine-3'-phosphate
  modified_base 18: mod_base = OTHER; note = 2'-O-methyluridine-3'-phosphate
  modified_base 19: mod_base = OTHER; note = 2'-O-methyluridine-3'-phosphorothioate
  modified_base 20: mod_base = OTHER; note = 2'-O-methyladenosine-3'-phosphorothioate
  modified_base 21: mod_base = OTHER; note = 2'-O-methyladenosine
cagagatgatttttcttttaa

SEQ ID NO: 11705 - RNA, 21 nt, synthetic construct
  source 1..21: mol_type = other RNA
  modified_base 1: mod_base = OTHER; note = 2'-O-methyluridine-3'-phosphorothioate
  modified_base 2: mod_base = OTHER; note = 2'-O-methyluridine-3'-phosphorothioate
  modified_base 3: mod_base = OTHER; note = 2'-O-methylguanosine-3'-phosphate
  modified_base 4: mod_base = OTHER; note = 2'-O-methylguanosine-3'-phosphate
  modified_base 5: mod_base = OTHER; note = 2'-O-methylcytidine-3'-phosphate
  modified_base 6: mod_base = OTHER; note = 2'-O-docosanyl-adenosine-3'-phosphate
  modified_base 7: mod_base = OTHER; note = 2'-deoxy-2'-fluorocytidine-3'-phosphate
  modified_base 8: mod_base = OTHER; note = 2'-O-methyluridine-3'-phosphate
  modified_base 9: mod_base = OTHER; note = 2'-deoxy-2'-fluoroadenosine-3'-phosphate
  modified_base 10: mod_base = OTHER; note = 2'-deoxy-2'-fluorouridine-3'-phosphate
  modified_base 11: mod_base = OTHER; note = 2'-deoxy-2'-fluoroadenosine-3'-phosphate
  modified_base 12: mod_base = OTHER; note = 2'-O-methylguanosine-3'-phosphate
  modified_base 13: mod_base = OTHER; note = 2'-O-methyladenosine-3'-phosphate
  modified_base 14: mod_base = OTHER; note = 2'-O-methylguanosine-3'-phosphate
  modified_base 15: mod_base = OTHER; note = 2'-O-methyluridine-3'-phosphate
  modified_base 16: mod_base = OTHER; note = 2'-O-methyladenosine-3'-phosphate
  modified_base 17: mod_base = OTHER; note = 2'-O-methyluridine-3'-phosphate
  modified_base 18: mod_base = OTHER; note = 2'-O-methyluridine-3'-phosphate
  modified_base 19: mod_base = OTHER; note = 2'-O-methyluridine-3'-phosphorothioate
  modified_base 20: mod_base = OTHER; note = 2'-O-methylguanosine-3'-phosphorothioate
  modified_base 21: mod_base = OTHER; note = 2'-O-methyladenosine
ttggcactatagagtatttga

SEQ ID NO: 11706 - RNA, 21 nt, synthetic construct
  source 1..21: mol_type = other RNA
  modified_base 1: mod_base = OTHER; note = 2'-O-methyluridine-3'-phosphorothioate
  modified_base 2: mod_base = OTHER; note = 2'-O-methylguanosine-3'-phosphorothioate
  modified_base 3: mod_base = OTHER; note = 2'-O-methylguanosine-3'-phosphate
  modified_base 4: mod_base = OTHER; note = 2'-O-methylcytidine-3'-phosphate
  modified_base 5: mod_base = OTHER; note = 2'-O-methyladenosine-3'-phosphate
  modified_base 6: mod_base = OTHER; note = 2'-O-docosanyl-cytidine-3'-phosphate
  modified_base 7: mod_base = OTHER; note = 2'-deoxy-2'-fluorouridine-3'-phosphate
  modified_base 8: mod_base = OTHER; note = 2'-O-methyladenosine-3'-phosphate
  modified_base 9: mod_base = OTHER; note = 2'-deoxy-2'-fluorouridine-3'-phosphate
  modified_base 10: mod_base = OTHER; note = 2'-deoxy-2'-fluoroadenosine-3'-phosphate
  modified_base 11: mod_base = OTHER; note = 2'-deoxy-2'-fluoroguanosine-3'-phosphate
  modified_base 12: mod_base = OTHER; note = 2'-O-methyladenosine-3'-phosphate
  modified_base 13: mod_base = OTHER; note = 2'-O-methylguanosine-3'-phosphate
  modified_base 14: mod_base = OTHER; note = 2'-O-methyluridine-3'-phosphate
  modified_base 15: mod_base = OTHER; note = 2'-O-methyladenosine-3'-phosphate
  modified_base 16: mod_base = OTHER; note = 2'-O-methyluridine-3'-phosphate
  modified_base 17: mod_base = OTHER; note = 2'-O-methyluridine-3'-phosphate
  modified_base 18: mod_base = OTHER; note = 2'-O-methyluridine-3'-phosphate
  modified_base 19: mod_base = OTHER; note = 2'-O-methylguanosine-3'-phosphorothioate
  modified_base 20: mod_base = OTHER; note = 2'-O-methyluridine-3'-phosphorothioate
  modified_base 21: mod_base = OTHER; note = 2'-O-methyladenosine
tggcactatagagtatttgta

SEQ ID NO: 11707 - RNA, 21 nt, synthetic construct
  source 1..21: mol_type = other RNA
  modified_base 1: mod_base = OTHER; note = 2'-O-methylguanosine-3'-phosphorothioate
  modified_base 2: mod_base = OTHER; note = 2'-O-methylguanosine-3'-phosphorothioate
  modified_base 3: mod_base = OTHER; note = 2'-O-methylcytidine-3'-phosphate
  modified_base 4: mod_base = OTHER; note = 2'-O-methyladenosine-3'-phosphate
  modified_base 5: mod_base = OTHER; note = 2'-O-methylcytidine-3'-phosphate
  modified_base 6: mod_base = OTHER; note = 2'-O-docosanyl-uridine-3'-phosphate
  modified_base 7: mod_base = OTHER; note = 2'-deoxy-2'-fluoroadenosine-3'-phosphate
  modified_base 8: mod_base = OTHER; note = 2'-O-methyluridine-3'-phosphate
  modified_base 9: mod_base = OTHER; note = 2'-deoxy-2'-fluoroadenosine-3'-phosphate
  modified_base 10: mod_base = OTHER; note = 2'-deoxy-2'-fluoroguanosine-3'-phosphate
  modified_base 11: mod_base = OTHER; note = 2'-deoxy-2'-fluoroadenosine-3'-phosphate
  modified_base 12: mod_base = OTHER; note = 2'-O-methylguanosine-3'-phosphate
  modified_base 13: mod_base = OTHER; note = 2'-O-methyluridine-3'-phosphate
  modified_base 14: mod_base = OTHER; note = 2'-O-methyladenosine-3'-phosphate
  modified_base 15: mod_base = OTHER; note = 2'-O-methyluridine-3'-phosphate
  modified_base 16: mod_base = OTHER; note = 2'-O-methyluridine-3'-phosphate
  modified_base 17: mod_base = OTHER; note = 2'-O-methyluridine-3'-phosphate
  modified_base 18: mod_base = OTHER; note = 2'-O-methylguanosine-3'-phosphate
  modified_base 19: mod_base = OTHER; note = 2'-O-methyluridine-3'-phosphorothioate
  modified_base 20: mod_base = OTHER; note = 2'-O-methyluridine-3'-phosphorothioate
  modified_base 21: mod_base = OTHER; note = 2'-O-methyladenosine
ggcactatagagtatttgtta

SEQ ID NO: 11708 - RNA, 21 nt, synthetic construct
  source 1..21: mol_type = other RNA
  modified_base 1: mod_base = OTHER; note = 2'-O-methylguanosine-3'-phosphorothioate
  modified_base 2: mod_base = OTHER; note = 2'-O-methylcytidine-3'-phosphorothioate
  modified_base 3: mod_base = OTHER; note = 2'-O-methyladenosine-3'-phosphate
  modified_base 4: mod_base = OTHER; note = 2'-O-methylcytidine-3'-phosphate
  modified_base 5: mod_base = OTHER; note = 2'-O-methyluridine-3'-phosphate
  modified_base 6: mod_base = OTHER; note = 2'-O-docosanyl-adenosine-3'-phosphate
  modified_base 7: mod_base = OTHER; note = 2'-deoxy-2'-fluorouridine-3'-phosphate
  modified_base 8: mod_base = OTHER; note = 2'-O-methyladenosine-3'-phosphate
  modified_base 9: mod_base = OTHER; note = 2'-deoxy-2'-fluoroguanosine-3'-phosphate
  modified_base 10: mod_base = OTHER; note = 2'-deoxy-2'-fluoroadenosine-3'-phosphate
  modified_base 11: mod_base = OTHER; note = 2'-deoxy-2'-fluoroguanosine-3'-phosphate
  modified_base 12: mod_base = OTHER; note = 2'-O-methyluridine-3'-phosphate
  modified_base 13: mod_base = OTHER; note = 2'-O-methyladenosine-3'-phosphate
  modified_base 14: mod_base = OTHER; note = 2'-O-methyluridine-3'-phosphate
  modified_base 15: mod_base = OTHER; note = 2'-O-methyluridine-3'-phosphate
  modified_base 16: mod_base = OTHER; note = 2'-O-methyluridine-3'-phosphate
  modified_base 17: mod_base = OTHER; note = 2'-O-methylguanosine-3'-phosphate
  modified_base 18: mod_base = OTHER; note = 2'-O-methyluridine-3'-phosphate
  modified_base 19: mod_base = OTHER; note = 2'-O-methyluridine-3'-phosphorothioate
  modified_base 20: mod_base = OTHER; note = 2'-O-methyladenosine-3'-phosphorothioate
  modified_base 21: mod_base = OTHER; note = 2'-O-methyladenosine
gcactatagagtatttgttaa

SEQ ID NO: 11709 - RNA, 21 nt, synthetic construct
  source 1..21: mol_type = other RNA
  modified_base 1: mod_base = OTHER; note = 2'-O-methylcytidine-3'-phosphorothioate
  modified_base 2: mod_base = OTHER; note = 2'-O-methyladenosine-3'-phosphorothioate
  modified_base 3: mod_base = OTHER; note = 2'-O-methylcytidine-3'-phosphate
  modified_base 4: mod_base = OTHER; note = 2'-O-methyluridine-3'-phosphate
  modified_base 5: mod_base = OTHER; note = 2'-O-methyladenosine-3'-phosphate
  modified_base 6: mod_base = OTHER; note = 2'-O-docosanyl-uridine-3'-phosphate
  modified_base 7: mod_base = OTHER; note = 2'-deoxy-2'-fluoroadenosine-3'-phosphate
  modified_base 8: mod_base = OTHER; note = 2'-O-methylguanosine-3'-phosphate
  modified_base 9: mod_base = OTHER; note = 2'-deoxy-2'-fluoroadenosine-3'-phosphate
  modified_base 10: mod_base = OTHER; note = 2'-deoxy-2'-fluoroguanosine-3'-phosphate
  modified_base 11: mod_base = OTHER; note = 2'-deoxy-2'-fluorouridine-3'-phosphate
  modified_base 12: mod_base = OTHER; note = 2'-O-methyladenosine-3'-phosphate
  modified_base 13: mod_base = OTHER; note = 2'-O-methyluridine-3'-phosphate
  modified_base 14: mod_base = OTHER; note = 2'-O-methyluridine-3'-phosphate
  modified_base 15: mod_base = OTHER; note = 2'-O-methyluridine-3'-phosphate
  modified_base 16: mod_base = OTHER; note = 2'-O-methylguanosine-3'-phosphate
  modified_base 17: mod_base = OTHER; note = 2'-O-methyluridine-3'-phosphate
  modified_base 18: mod_base = OTHER; note = 2'-O-methyluridine-3'-phosphate
  modified_base 19: mod_base = OTHER; note = 2'-O-methyladenosine-3'-phosphorothioate
  modified_base 20: mod_base = OTHER; note = 2'-O-methyladenosine-3'-phosphorothioate
  modified_base 21: mod_base = OTHER; note = 2'-O-methyladenosine
cactatagagtatttgttaaa

SEQ ID NO: 11710 - RNA, 21 nt, synthetic construct
  source 1..21: mol_type = other RNA
  modified_base 1: mod_base = OTHER; note = 2'-O-methyladenosine-3'-phosphorothioate
  modified_base 2: mod_base = OTHER; note = 2'-O-methylcytidine-3'-phosphorothioate
  modified_base 3: mod_base = OTHER; note = 2'-O-methyluridine-3'-phosphate
  modified_base 4: mod_base = OTHER; note = 2'-O-methyladenosine-3'-phosphate
  modified_base 5: mod_base = OTHER; note = 2'-O-methyluridine-3'-phosphate
  modified_base 6: mod_base = OTHER; note = 2'-O-docosanyl-adenosine-3'-phosphate
  modified_base 7: mod_base = OTHER; note = 2'-deoxy-2'-fluoroguanosine-3'-phosphate
  modified_base 8: mod_base = OTHER; note = 2'-O-methyladenosine-3'-phosphate
  modified_base 9: mod_base = OTHER; note = 2'-deoxy-2'-fluoroguanosine-3'-phosphate
  modified_base 10: mod_base = OTHER; note = 2'-deoxy-2'-fluorouridine-3'-phosphate
  modified_base 11: mod_base = OTHER; note = 2'-deoxy-2'-fluoroadenosine-3'-phosphate
  modified_base 12: mod_base = OTHER; note = 2'-O-methyluridine-3'-phosphate
  modified_base 13: mod_base = OTHER; note = 2'-O-methyluridine-3'-phosphate
  modified_base 14: mod_base = OTHER; note = 2'-O-methyluridine-3'-phosphate
  modified_base 15: mod_base = OTHER; note = 2'-O-methylguanosine-3'-phosphate
  modified_base 16: mod_base = OTHER; note = 2'-O-methyluridine-3'-phosphate
  modified_base 17: mod_base = OTHER; note = 2'-O-methyluridine-3'-phosphate
  modified_base 18: mod_base = OTHER; note = 2'-O-methyladenosine-3'-phosphate
  modified_base 19: mod_base = OTHER; note = 2'-O-methyladenosine-3'-phosphorothioate
  modified_base 20: mod_base = OTHER; note = 2'-O-methyluridine-3'-phosphorothioate
  modified_base 21: mod_base = OTHER; note = 2'-O-methyladenosine
actatagagtatttgttaata

SEQ ID NO: 11711 - RNA, 21 nt, synthetic construct
  source 1..21: mol_type = other RNA
  modified_base 1: mod_base = OTHER; note = 2'-O-methylcytidine-3'-phosphorothioate
  modified_base 2: mod_base = OTHER; note = 2'-O-methyluridine-3'-phosphorothioate
  modified_base 3: mod_base = OTHER; note = 2'-O-methyladenosine-3'-phosphate
  modified_base 4: mod_base = OTHER; note = 2'-O-methyluridine-3'-phosphate
  modified_base 5: mod_base = OTHER; note = 2'-O-methyladenosine-3'-phosphate
  modified_base 6: mod_base = OTHER; note = 2'-O-docosanyl-guanosine-3'-phosphate
  modified_base 7: mod_base = OTHER; note = 2'-deoxy-2'-fluoroadenosine-3'-phosphate
  modified_base 8: mod_base = OTHER; note = 2'-O-methylguanosine-3'-phosphate
  modified_base 9: mod_base = OTHER; note = 2'-deoxy-2'-fluorouridine-3'-phosphate
  modified_base 10: mod_base = OTHER; note = 2'-deoxy-2'-fluoroadenosine-3'-phosphate
  modified_base 11: mod_base = OTHER; note = 2'-deoxy-2'-fluorouridine-3'-phosphate
  modified_base 12: mod_base = OTHER; note = 2'-O-methyluridine-3'-phosphate
  modified_base 13: mod_base = OTHER; note = 2'-O-methyluridine-3'-phosphate
  modified_base 14: mod_base = OTHER; note = 2'-O-methylguanosine-3'-phosphate
  modified_base 15: mod_base = OTHER; note = 2'-O-methyluridine-3'-phosphate
  modified_base 16: mod_base = OTHER; note = 2'-O-methyluridine-3'-phosphate
  modified_base 17: mod_base = OTHER; note = 2'-O-methyladenosine-3'-phosphate
  modified_base 18: mod_base = OTHER; note = 2'-O-methyladenosine-3'-phosphate
  modified_base 19: mod_base = OTHER; note = 2'-O-methyluridine-3'-phosphorothioate
  modified_base 20: mod_base = OTHER; note = 2'-O-methylguanosine-3'-phosphorothioate
  modified_base 21: mod_base = OTHER; note = 2'-O-methyladenosine
ctatagagtatttgttaatga

SEQ ID NO: 11712 - RNA, 21 nt, synthetic construct
  source 1..21: mol_type = other RNA
  modified_base 1: mod_base = OTHER; note = 2'-O-methyluridine-3'-phosphorothioate
  modified_base 2: mod_base = OTHER; note = 2'-O-methyladenosine-3'-phosphorothioate
  modified_base 3: mod_base = OTHER; note = 2'-O-methyluridine-3'-phosphate
  modified_base 4: mod_base = OTHER; note = 2'-O-methyladenosine-3'-phosphate
  modified_base 5: mod_base = OTHER; note = 2'-O-methylguanosine-3'-phosphate
  modified_base 6: mod_base = OTHER; note = 2'-O-docosanyl-adenosine-3'-phosphate
  modified_base 7: mod_base = OTHER; note = 2'-deoxy-2'-fluoroguanosine-3'-phosphate
  modified_base 8: mod_base = OTHER; note = 2'-O-methyluridine-3'-phosphate
  modified_base 9: mod_base = OTHER; note = 2'-deoxy-2'-fluoroadenosine-3'-phosphate
  modified_base 10: mod_base = OTHER; note = 2'-deoxy-2'-fluorouridine-3'-phosphate
  modified_base 11: mod_base = OTHER; note = 2'-deoxy-2'-fluorouridine-3'-phosphate
  modified_base 12: mod_base = OTHER; note = 2'-O-methyluridine-3'-phosphate
  modified_base 13: mod_base = OTHER; note = 2'-O-methylguanosine-3'-phosphate
  modified_base 14: mod_base = OTHER; note = 2'-O-methyluridine-3'-phosphate
  modified_base 15: mod_base = OTHER; note = 2'-O-methyluridine-3'-phosphate
  modified_base 16: mod_base = OTHER; note = 2'-O-methyladenosine-3'-phosphate
  modified_base 17: mod_base = OTHER; note = 2'-O-methyladenosine-3'-phosphate
  modified_base 18: mod_base = OTHER; note = 2'-O-methyluridine-3'-phosphate
  modified_base 19: mod_base = OTHER; note = 2'-O-methylguanosine-3'-phosphorothioate
  modified_base 20: mod_base = OTHER; note = 2'-O-methylguanosine-3'-phosphorothioate
  modified_base 21: mod_base = OTHER; note = 2'-O-methyladenosine
tatagagtatttgttaatgga

SEQ ID NO: 11713 - RNA, 21 nt, synthetic construct
  source 1..21: mol_type = other RNA
  modified_base 1: mod_base = OTHER; note = 2'-O-methyladenosine-3'-phosphorothioate
  modified_base 2: mod_base = OTHER; note = 2'-O-methyluridine-3'-phosphorothioate
  modified_base 3: mod_base = OTHER; note = 2'-O-methyladenosine-3'-phosphate
  modified_base 4: mod_base = OTHER; note = 2'-O-methylguanosine-3'-phosphate
  modified_base 5: mod_base = OTHER; note = 2'-O-methyladenosine-3'-phosphate
  modified_base 6: mod_base = OTHER; note = 2'-O-docosanyl-guanosine-3'-phosphate
  modified_base 7: mod_base = OTHER; note = 2'-deoxy-2'-fluorouridine-3'-phosphate
  modified_base 8: mod_base = OTHER; note = 2'-O-methyladenosine-3'-phosphate
  modified_base 9: mod_base = OTHER; note = 2'-deoxy-2'-fluorouridine-3'-phosphate
  modified_base 10: mod_base = OTHER; note = 2'-deoxy-2'-fluorouridine-3'-phosphate
  modified_base 11: mod_base = OTHER; note = 2'-deoxy-2'-fluorouridine-3'-phosphate
  modified_base 12: mod_base = OTHER; note = 2'-O-methylguanosine-3'-phosphate
  modified_base 13: mod_base = OTHER; note = 2'-O-methyluridine-3'-phosphate
  modified_base 14: mod_base = OTHER; note = 2'-O-methyluridine-3'-phosphate
  modified_base 15: mod_base = OTHER; note = 2'-O-methyladenosine-3'-phosphate
  modified_base 16: mod_base = OTHER; note = 2'-O-methyladenosine-3'-phosphate
  modified_base 17: mod_base = OTHER; note = 2'-O-methyluridine-3'-phosphate
  modified_base 18: mod_base = OTHER; note = 2'-O-methylguanosine-3'-phosphate
  modified_base 19: mod_base = OTHER; note = 2'-O-methylguanosine-3'-phosphorothioate
  modified_base 20: mod_base = OTHER; note = 2'-O-methylcytidine-3'-phosphorothioate
  modified_base 21: mod_base = OTHER; note = 2'-O-methyladenosine
atagagtatttgttaatggca

SEQ ID NO: 11714 - RNA, 21 nt, synthetic construct
  source 1..21: mol_type = other RNA
  modified_base 1: mod_base = OTHER; note = 2'-O-methyluridine-3'-phosphorothioate
  modified_base 2: mod_base = OTHER; note = 2'-O-methyladenosine-3'-phosphorothioate
  modified_base 3: mod_base = OTHER; note = 2'-O-methylguanosine-3'-phosphate
  modified_base 4: mod_base = OTHER; note = 2'-O-methyladenosine-3'-phosphate
  modified_base 5: mod_base = OTHER; note = 2'-O-methylguanosine-3'-phosphate
  modified_base 6: mod_base = OTHER; note = 2'-O-docosanyl-uridine-3'-phosphate
  modified_base 7: mod_base = OTHER; note = 2'-deoxy-2'-fluoroadenosine-3'-phosphate
  modified_base 8: mod_base = OTHER; note = 2'-O-methyluridine-3'-phosphate
  modified_base 9: mod_base = OTHER; note = 2'-deoxy-2'-fluorouridine-3'-phosphate
  modified_base 10: mod_base = OTHER; note = 2'-deoxy-2'-fluorouridine-3'-phosphate
  modified_base 11: mod_base = OTHER; note = 2'-deoxy-2'-fluoroguanosine-3'-phosphate
  modified_base 12: mod_base = OTHER; note = 2'-O-methyluridine-3'-phosphate
  modified_base 13: mod_base = OTHER; note = 2'-O-methyluridine-3'-phosphate
  modified_base 14: mod_base = OTHER; note = 2'-O-methyladenosine-3'-phosphate
  modified_base 15: mod_base = OTHER; note = 2'-O-methyladenosine-3'-phosphate
  modified_base 16: mod_base = OTHER; note = 2'-O-methyluridine-3'-phosphate
  modified_base 17: mod_base = OTHER; note = 2'-O-methylguanosine-3'-phosphate
  modified_base 18: mod_base = OTHER; note = 2'-O-methylguanosine-3'-phosphate
  modified_base 19: mod_base = OTHER; note = 2'-O-methylcytidine-3'-phosphorothioate
  modified_base 20: mod_base = OTHER; note = 2'-O-methyladenosine-3'-phosphorothioate
  modified_base 21: mod_base = OTHER; note = 2'-O-methyladenosine
tagagtatttgttaatggcaa

SEQ ID NO: 11715 - RNA, 21 nt, synthetic construct
  source 1..21: mol_type = other RNA
  modified_base 1: mod_base = OTHER; note = 2'-O-methyladenosine-3'-phosphorothioate
  modified_base 2: mod_base = OTHER; note = 2'-O-methylguanosine-3'-phosphorothioate
  modified_base 3: mod_base = OTHER; note = 2'-O-methyladenosine-3'-phosphate
  modified_base 4: mod_base = OTHER; note = 2'-O-methylguanosine-3'-phosphate
  modified_base 5: mod_base = OTHER; note = 2'-O-methyluridine-3'-phosphate
  modified_base 6: mod_base = OTHER; note = 2'-O-docosanyl-adenosine-3'-phosphate
  modified_base 7: mod_base = OTHER; note = 2'-deoxy-2'-fluorouridine-3'-phosphate
  modified_base 8: mod_base = OTHER; note = 2'-O-methyluridine-3'-phosphate
  modified_base 9: mod_base = OTHER; note = 2'-deoxy-2'-fluorouridine-3'-phosphate
  modified_base 10: mod_base = OTHER; note = 2'-deoxy-2'-fluoroguanosine-3'-phosphate
  modified_base 11: mod_base = OTHER; note = 2'-deoxy-2'-fluorouridine-3'-phosphate
  modified_base 12: mod_base = OTHER; note = 2'-O-methyluridine-3'-phosphate
  modified_base 13: mod_base = OTHER; note = 2'-O-methyladenosine-3'-phosphate
  modified_base 14: mod_base = OTHER; note = 2'-O-methyladenosine-3'-phosphate
  modified_base 15: mod_base = OTHER; note = 2'-O-methyluridine-3'-phosphate
  modified_base 16: mod_base = OTHER; note = 2'-O-methylguanosine-3'-phosphate
  modified_base 17: mod_base = OTHER; note = 2'-O-methylguanosine-3'-phosphate
  modified_base 18: mod_base = OTHER; note = 2'-O-methylcytidine-3'-phosphate
  modified_base 19: mod_base = OTHER; note = 2'-O-methyladenosine-3'-phosphorothioate
  modified_base 20: mod_base = OTHER; note = 2'-O-methylguanosine-3'-phosphorothioate
  modified_base 21: mod_base = OTHER; note = 2'-O-methyladenosine
agagtatttgttaatggcaga

SEQ ID NO: 11716 - RNA, 21 nt, synthetic construct
  source 1..21: mol_type = other RNA
  modified_base 1: mod_base = OTHER; note = 2'-O-methylguanosine-3'-phosphorothioate
  modified_base 2: mod_base = OTHER; note = 2'-O-methyladenosine-3'-phosphorothioate
  modified_base 3: mod_base = OTHER; note = 2'-O-methylguanosine-3'-phosphate
  modified_base 4: mod_base = OTHER; note = 2'-O-methyluridine-3'-phosphate
  modified_base 5: mod_base = OTHER; note = 2'-O-methyladenosine-3'-phosphate
  modified_base 6: mod_base = OTHER; note = 2'-O-docosanyl-uridine-3'-phosphate
  modified_base 7: mod_base = OTHER; note = 2'-deoxy-2'-fluorouridine-3'-phosphate
  modified_base 8: mod_base = OTHER; note = 2'-O-methyluridine-3'-phosphate
  modified_base 9: mod_base = OTHER; note = 2'-deoxy-2'-fluoroguanosine-3'-phosphate
  modified_base 10: mod_base = OTHER; note = 2'-deoxy-2'-fluorouridine-3'-phosphate
  modified_base 11: mod_base = OTHER; note = 2'-deoxy-2'-fluorouridine-3'-phosphate
  modified_base 12: mod_base = OTHER; note = 2'-O-methyladenosine-3'-phosphate
  modified_base 13: mod_base = OTHER; note = 2'-O-methyladenosine-3'-phosphate
  modified_base 14: mod_base = OTHER; note = 2'-O-methyluridine-3'-phosphate
  modified_base 15: mod_base = OTHER; note = 2'-O-methylguanosine-3'-phosphate
  modified_base 16: mod_base = OTHER; note = 2'-O-methylguanosine-3'-phosphate
  modified_base 17: mod_base = OTHER; note = 2'-O-methylcytidine-3'-phosphate
  modified_base 18: mod_base = OTHER; note = 2'-O-methyladenosine-3'-phosphate
  modified_base 19: mod_base = OTHER; note = 2'-O-methylguanosine-3'-phosphorothioate
  modified_base 20: mod_base = OTHER; note = 2'-O-methyladenosine-3'-phosphorothioate
  modified_base 21: mod_base = OTHER; note = 2'-O-methyladenosine
gagtatttgttaatggcagaa

SEQ ID NO: 11717 - RNA, 21 nt, synthetic construct
  source 1..21: mol_type = other RNA
  modified_base 1: mod_base = OTHER; note = 2'-O-methylguanosine-3'-phosphorothioate
  modified_base 2: mod_base = OTHER; note = 2'-O-methylcytidine-3'-phosphorothioate
  modified_base 3: mod_base = OTHER; note = 2'-O-methyladenosine-3'-phosphate
  modified_base 4: mod_base = OTHER; note = 2'-O-methylguanosine-3'-phosphate
  modified_base 5: mod_base = OTHER; note = 2'-O-methyladenosine-3'-phosphate
  modified_base 6: mod_base = OTHER; note = 2'-O-docosanyl-guanosine-3'-phosphate
  modified_base 7: mod_base = OTHER; note = 2'-deoxy-2'-fluoroadenosine-3'-phosphate
  modified_base 8: mod_base = OTHER; note = 2'-O-methyluridine-3'-phosphate
  modified_base 9: mod_base = OTHER; note = 2'-deoxy-2'-fluoroguanosine-3'-phosphate
  modified_base 10: mod_base = OTHER; note = 2'-deoxy-2'-fluoroadenosine-3'-phosphate
  modified_base 11: mod_base = OTHER; note = 2'-deoxy-2'-fluorouridine-3'-phosphate
  modified_base 12: mod_base = OTHER; note = 2'-O-methyluridine-3'-phosphate
  modified_base 13: mod_base = OTHER; note = 2'-O-methyluridine-3'-phosphate
  modified_base 14: mod_base = OTHER; note = 2'-O-methyluridine-3'-phosphate
  modified_base 15: mod_base = OTHER; note = 2'-O-methyluridine-3'-phosphate
  modified_base 16: mod_base = OTHER; note = 2'-O-methylcytidine-3'-phosphate
  modified_base 17: mod_base = OTHER; note = 2'-O-methyluridine-3'-phosphate
  modified_base 18: mod_base = OTHER; note = 2'-O-methyluridine-3'-phosphate
  modified_base 19: mod_base = OTHER; note = 2'-O-methyluridine-3'-phosphorothioate
  modified_base 20: mod_base = OTHER; note = 2'-O-methyluridine-3'-phosphorothioate
  modified_base 21: mod_base = OTHER; note = 2'-O-methyladenosine
gcagagatgatttttctttta

SEQ ID NO: 11718 - RNA, 21 nt, synthetic construct
  source 1..21: mol_type = other RNA
  modified_base 1: mod_base = OTHER; note = 2'-O-methyladenosine-3'-phosphorothioate
  modified_base 2: mod_base = OTHER; note = 2'-O-methylguanosine-3'-phosphorothioate
  modified_base 3: mod_base = OTHER; note = 2'-O-methyladenosine-3'-phosphate
  modified_base 4: mod_base = OTHER; note = 2'-O-methylguanosine-3'-phosphate
  modified_base 5: mod_base = OTHER; note = 2'-O-methyladenosine-3'-phosphate
  modified_base 6: mod_base = OTHER; note = 2'-O-docosanyl-uridine-3'-phosphate
  modified_base 7: mod_base = OTHER; note = 2'-deoxy-2'-fluoroguanosine-3'-phosphate
  modified_base 8: mod_base = OTHER; note = 2'-O-methyladenosine-3'-phosphate
  modified_base 9: mod_base = OTHER; note = 2'-deoxy-2'-fluorouridine-3'-phosphate
  modified_base 10: mod_base = OTHER; note = 2'-deoxy-2'-fluorouridine-3'-phosphate
  modified_base 11: mod_base = OTHER; note = 2'-deoxy-2'-fluorouridine-3'-phosphate
  modified_base 12: mod_base = OTHER; note = 2'-O-methyluridine-3'-phosphate
  modified_base 13: mod_base = OTHER; note = 2'-O-methyluridine-3'-phosphate
  modified_base 14: mod_base = OTHER; note = 2'-O-methylcytidine-3'-phosphate
  modified_base 15: mod_base = OTHER; note = 2'-O-methyluridine-3'-phosphate
  modified_base 16: mod_base = OTHER; note = 2'-O-methyluridine-3'-phosphate
  modified_base 17: mod_base = OTHER; note = 2'-O-methyluridine-3'-phosphate
  modified_base 18: mod_base = OTHER; note = 2'-O-methyluridine-3'-phosphate
  modified_base 19: mod_base = OTHER; note = 2'-O-methyladenosine-3'-phosphorothioate
  modified_base 20: mod_base = OTHER; note = 2'-O-methyladenosine-3'-phosphorothioate
  modified_base 21: mod_base = OTHER; note = 2'-O-methyladenosine
agagatgatttttcttttaaa

SEQ ID NO: 11719 - RNA, 21 nt, synthetic construct
  source 1..21: mol_type = other RNA
  modified_base 1: mod_base = OTHER; note = 2'-O-methyladenosine-3'-phosphorothioate
  modified_base 2: mod_base = OTHER; note = 2'-O-methylguanosine-3'-phosphorothioate
  modified_base 3: mod_base = OTHER; note = 2'-O-methyladenosine-3'-phosphate
  modified_base 4: mod_base = OTHER; note = 2'-O-methylcytidine-3'-phosphate
  modified_base 5: mod_base = OTHER; note = 2'-O-methyluridine-3'-phosphate
  modified_base 6: mod_base = OTHER; note = 2'-O-docosanyl-adenosine-3'-phosphate
  modified_base 7: mod_base = OTHER; note = 2'-deoxy-2'-fluoroguanosine-3'-phosphate
  modified_base 8: mod_base = OTHER; note = 2'-O-methylcytidine-3'-phosphate
  modified_base 9: mod_base = OTHER; note = 2'-deoxy-2'-fluorouridine-3'-phosphate
  modified_base 10: mod_base = OTHER; note = 2'-deoxy-2'-fluoroguanosine-3'-phosphate
  modified_base 11: mod_base = OTHER; note = 2'-deoxy-2'-fluorouridine-3'-phosphate
  modified_base 12: mod_base = OTHER; note = 2'-O-methyluridine-3'-phosphate
  modified_base 13: mod_base = OTHER; note = 2'-O-methyladenosine-3'-phosphate
  modified_base 14: mod_base = OTHER; note = 2'-O-methyluridine-3'-phosphate
  modified_base 15: mod_base = OTHER; note = 2'-O-methyluridine-3'-phosphate
  modified_base 16: mod_base = OTHER; note = 2'-O-methyluridine-3'-phosphate
  modified_base 17: mod_base = OTHER; note = 2'-O-methylguanosine-3'-phosphate
  modified_base 18: mod_base = OTHER; note = 2'-O-methyluridine-3'-phosphate
  modified_base 19: mod_base = OTHER; note = 2'-O-methyladenosine-3'-phosphorothioate
  modified_base 20: mod_base = OTHER; note = 2'-O-methyluridine-3'-phosphorothioate
  modified_base 21: mod_base = OTHER; note = 2'-O-methyladenosine
agactagctgttatttgtata

SEQ ID NO: 11720 - RNA, 21 nt, synthetic construct
  source 1..21: mol_type = other RNA
  modified_base 1: mod_base = OTHER; note = 2'-O-methylguanosine-3'-phosphorothioate
  modified_base 2: mod_base = OTHER; note = 2'-O-methylcytidine-3'-phosphorothioate
  modified_base 3: mod_base = OTHER; note = 2'-O-methyluridine-3'-phosphate
  modified_base 4: mod_base = OTHER; note = 2'-O-methyladenosine-3'-phosphate
  modified_base 5: mod_base = OTHER; note = 2'-O-methyladenosine-3'-phosphate
  modified_base 6: mod_base = OTHER; note = 2'-O-docosanyl-cytidine-3'-phosphate
  modified_base 7: mod_base = OTHER; note = 2'-deoxy-2'-fluoroadenosine-3'-phosphate
  modified_base 8: mod_base = OTHER; note = 2'-O-methyluridine-3'-phosphate
  modified_base 9: mod_base = OTHER; note = 2'-deoxy-2'-fluoroadenosine-3'-phosphate
  modified_base 10: mod_base = OTHER; note = 2'-deoxy-2'-fluorouridine-3'-phosphate
  modified_base 11: mod_base = OTHER; note = 2'-deoxy-2'-fluoroadenosine-3'-phosphate
  modified_base 12: mod_base = OTHER; note = 2'-O-methyladenosine-3'-phosphate
  modified_base 13: mod_base = OTHER; note = 2'-O-methyladenosine-3'-phosphate
  modified_base 14: mod_base = OTHER; note = 2'-O-methylguanosine-3'-phosphate
  modified_base 15: mod_base = OTHER; note = 2'-O-methyladenosine-3'-phosphate
  modified_base 16: mod_base = OTHER; note = 2'-O-methyladenosine-3'-phosphate
  modified_base 17: mod_base = OTHER; note = 2'-O-methyluridine-3'-phosphate
  modified_base 18: mod_base = OTHER; note = 2'-O-methylguanosine-3'-phosphate
  modified_base 19: mod_base = OTHER; note = 2'-O-methyluridine-3'-phosphorothioate
  modified_base 20: mod_base = OTHER; note = 2'-O-methylcytidine-3'-phosphorothioate
  modified_base 21: mod_base = OTHER; note = 2'-O-methyladenosine
gctaacatataaagaatgtca

SEQ ID NO: 11721 - RNA, 21 nt, synthetic construct
  source 1..21: mol_type = other RNA
  modified_base 1: mod_base = OTHER; note = 2'-O-methyladenosine-3'-phosphorothioate
  modified_base 2: mod_base = OTHER; note = 2'-O-methyladenosine-3'-phosphorothioate
  modified_base 3: mod_base = OTHER; note = 2'-O-methylguanosine-3'-phosphate
  modified_base 4: mod_base = OTHER; note = 2'-O-methyladenosine-3'-phosphate
  modified_base 5: mod_base = OTHER; note = 2'-O-methyladenosine-3'-phosphate
  modified_base 6: mod_base = OTHER; note = 2'-O-docosanyl-uridine-3'-phosphate
  modified_base 7: mod_base = OTHER; note = 2'-deoxy-2'-fluoroguanosine-3'-phosphate
  modified_base 8: mod_base = OTHER; note = 2'-O-methyluridine-3'-phosphate
  modified_base 9: mod_base = OTHER; note = 2'-deoxy-2'-fluorocytidine-3'-phosphate
  modified_base 10: mod_base = OTHER; note = 2'-deoxy-2'-fluorouridine-3'-phosphate
  modified_base 11: mod_base = OTHER; note = 2'-deoxy-2'-fluoroadenosine-3'-phosphate
  modified_base 12: mod_base = OTHER; note = 2'-O-methylcytidine-3'-phosphate
  modified_base 13: mod_base = OTHER; note = 2'-O-methyluridine-3'-phosphate
  modified_base 14: mod_base = OTHER; note = 2'-O-methyluridine-3'-phosphate
  modified_base 15: mod_base = OTHER; note = 2'-O-methyluridine-3'-phosphate
  modified_base 16: mod_base = OTHER; note = 2'-O-methyluridine-3'-phosphate
  modified_base 17: mod_base = OTHER; note = 2'-O-methylguanosine-3'-phosphate
  modified_base 18: mod_base = OTHER; note = 2'-O-methylcytidine-3'-phosphate
  modified_base 19: mod_base = OTHER; note = 2'-O-methyluridine-3'-phosphorothioate
  modified_base 20: mod_base = OTHER; note = 2'-O-methyluridine-3'-phosphorothioate
  modified_base 21: mod_base = OTHER; note = 2'-O-methyladenosine
aagaatgtctacttttgctta

SEQ ID NO: 11722 - RNA, 21 nt, synthetic construct
  source 1..21: mol_type = other RNA
  modified_base 1: mod_base = OTHER; note = 2'-O-methyladenosine-3'-phosphorothioate
  modified_base 2: mod_base = OTHER; note = 2'-O-methyladenosine-3'-phosphorothioate
  modified_base 3: mod_base = OTHER; note = 2'-O-methyluridine-3'-phosphate
  modified_base 4: mod_base = OTHER; note = 2'-O-methylguanosine-3'-phosphate
  modified_base 5: mod_base = OTHER; note = 2'-O-methyluridine-3'-phosphate
  modified_base 6: mod_base = OTHER; note = 2'-O-docosanyl-cytidine-3'-phosphate
  modified_base 7: mod_base = OTHER; note = 2'-deoxy-2'-fluorouridine-3'-phosphate
  modified_base 8: mod_base = OTHER; note = 2'-O-methyladenosine-3'-phosphate
  modified_base 9: mod_base = OTHER; note = 2'-deoxy-2'-fluorocytidine-3'-phosphate
  modified_base 10: mod_base = OTHER; note = 2'-deoxy-2'-fluorouridine-3'-phosphate
  modified_base 11: mod_base = OTHER; note = 2'-deoxy-2'-fluorouridine-3'-phosphate
  modified_base 12: mod_base = OTHER; note = 2'-O-methyluridine-3'-phosphate
  modified_base 13: mod_base = OTHER; note = 2'-O-methyluridine-3'-phosphate
  modified_base 14: mod_base = OTHER; note = 2'-O-methylguanosine-3'-phosphate
  modified_base 15: mod_base = OTHER; note = 2'-O-methylcytidine-3'-phosphate
  modified_base 16: mod_base = OTHER; note = 2'-O-methyluridine-3'-phosphate
  modified_base 17: mod_base = OTHER; note = 2'-O-methyluridine-3'-phosphate
  modified_base 18: mod_base = OTHER; note = 2'-O-methyluridine-3'-phosphate
  modified_base 19: mod_base = OTHER; note = 2'-O-methyladenosine-3'-phosphorothioate
  modified_base 20: mod_base = OTHER; note = 2'-O-methyladenosine-3'-phosphorothioate
  modified_base 21: mod_base = OTHER; note = 2'-O-methyladenosine
aatgtctacttttgctttaaa

SEQ ID NO: 11723 - RNA, 21 nt, synthetic construct
  source 1..21: mol_type = other RNA
  modified_base 1: mod_base = OTHER; note = 2'-O-methylcytidine-3'-phosphorothioate
  modified_base 2: mod_base = OTHER; note = 2'-O-methyluridine-3'-phosphorothioate
  modified_base 3: mod_base = OTHER; note = 2'-O-methyladenosine-3'-phosphate
  modified_base 4: mod_base = OTHER; note = 2'-O-methyladenosine-3'-phosphate
  modified_base 5: mod_base = OTHER; note = 2'-O-methylguanosine-3'-phosphate
  modified_base 6: mod_base = OTHER; note = 2'-O-docosanyl-cytidine-3'-phosphate
  modified_base 7: mod_base = OTHER; note = 2'-deoxy-2'-fluorocytidine-3'-phosphate
  modified_base 8: mod_base = OTHER; note = 2'-O-methyladenosine-3'-phosphate
  modified_base 9: mod_base = OTHER; note = 2'-deoxy-2'-fluorouridine-3'-phosphate
  modified_base 10: mod_base = OTHER; note = 2'-deoxy-2'-fluorouridine-3'-phosphate
  modified_base 11: mod_base = OTHER; note = 2'-deoxy-2'-fluoroadenosine-3'-phosphate
  modified_base 12: mod_base = OTHER; note = 2'-O-methyluridine-3'-phosphate
  modified_base 13: mod_base = OTHER; note = 2'-O-methylguanosine-3'-phosphate
  modified_base 14: mod_base = OTHER; note = 2'-O-methylcytidine-3'-phosphate
  modified_base 15: mod_base = OTHER; note = 2'-O-methyluridine-3'-phosphate
  modified_base 16: mod_base = OTHER; note = 2'-O-methyladenosine-3'-phosphate
  modified_base 17: mod_base = OTHER; note = 2'-O-methyluridine-3'-phosphate
  modified_base 18: mod_base = OTHER; note = 2'-O-methyluridine-3'-phosphate
  modified_base 19: mod_base = OTHER; note = 2'-O-methyladenosine-3'-phosphorothioate
  modified_base 20: mod_base = OTHER; note = 2'-O-methylguanosine-3'-phosphorothioate
  modified_base 21: mod_base = OTHER; note = 2'-O-methyladenosine
ctaagccattatgctattaga

SEQ ID NO: 11724 - RNA, 21 nt, synthetic construct
  source 1..21: mol_type = other RNA
  modified_base 1: mod_base = OTHER; note = 2'-O-methyladenosine-3'-phosphorothioate
  modified_base 2: mod_base = OTHER; note = 2'-O-methyladenosine-3'-phosphorothioate
  modified_base 3: mod_base = OTHER; note = 2'-O-methyluridine-3'-phosphate
  modified_base 4: mod_base = OTHER; note = 2'-O-methylcytidine-3'-phosphate
  modified_base 5: mod_base = OTHER; note = 2'-O-methylcytidine-3'-phosphate
  modified_base 6: mod_base = OTHER; note = 2'-O-docosanyl-cytidine-3'-phosphate
  modified_base 7: mod_base = OTHER; note = 2'-deoxy-2'-fluorouridine-3'-phosphate
  modified_base 8: mod_base = OTHER; note = 2'-O-methyladenosine-3'-phosphate
  modified_base 9: mod_base = OTHER; note = 2'-deoxy-2'-fluorouridine-3'-phosphate
  modified_base 10: mod_base = OTHER; note = 2'-deoxy-2'-fluorouridine-3'-phosphate
  modified_base 11: mod_base = OTHER; note = 2'-deoxy-2'-fluorouridine-3'-phosphate
  modified_base 12: mod_base = OTHER; note = 2'-O-methyluridine-3'-phosphate
  modified_base 13: mod_base = OTHER; note = 2'-O-methyladenosine-3'-phosphate
  modified_base 14: mod_base = OTHER; note = 2'-O-methyladenosine-3'-phosphate
  modified_base 15: mod_base = OTHER; note = 2'-O-methyladenosine-3'-phosphate
  modified_base 16: mod_base = OTHER; note = 2'-O-methyladenosine-3'-phosphate
  modified_base 17: mod_base = OTHER; note = 2'-O-methyluridine-3'-phosphate
  modified_base 18: mod_base = OTHER; note = 2'-O-methyluridine-3'-phosphate
  modified_base 19: mod_base = OTHER; note = 2'-O-methylcytidine-3'-phosphorothioate
  modified_base 20: mod_base = OTHER; note = 2'-O-methylcytidine-3'-phosphorothioate
  modified_base 21: mod_base = OTHER; note = 2'-O-methyladenosine
aatccctattttaaaattcca

SEQ ID NO: 11725 - RNA, 21 nt, synthetic construct
  source 1..21: mol_type = other RNA
  modified_base 1: mod_base = OTHER; note = 2'-O-methyluridine-3'-phosphorothioate
  modified_base 2: mod_base = OTHER; note = 2'-O-methyladenosine-3'-phosphorothioate
  modified_base 3: mod_base = OTHER; note = 2'-O-methyladenosine-3'-phosphate
  modified_base 4: mod_base = OTHER; note = 2'-O-methylcytidine-3'-phosphate
  modified_base 5: mod_base = OTHER; note = 2'-O-methyladenosine-3'-phosphate
  modified_base 6: mod_base = OTHER; note = 2'-O-docosanyl-adenosine-3'-phosphate
  modified_base 7: mod_base = OTHER; note = 2'-deoxy-2'-fluorouridine-3'-phosphate
  modified_base 8: mod_base = OTHER; note = 2'-O-methyladenosine-3'-phosphate
  modified_base 9: mod_base = OTHER; note = 2'-deoxy-2'-fluoroadenosine-3'-phosphate
  modified_base 10: mod_base = OTHER; note = 2'-deoxy-2'-fluorouridine-3'-phosphate
  modified_base 11: mod_base = OTHER; note = 2'-deoxy-2'-fluoroadenosine-3'-phosphate
  modified_base 12: mod_base = OTHER; note = 2'-O-methylguanosine-3'-phosphate
  modified_base 13: mod_base = OTHER; note = 2'-O-methyladenosine-3'-phosphate
  modified_base 14: mod_base = OTHER; note = 2'-O-methyladenosine-3'-phosphate
  modified_base 15: mod_base = OTHER; note = 2'-O-methylcytidine-3'-phosphate
  modified_base 16: mod_base = OTHER; note = 2'-O-methyluridine-3'-phosphate
  modified_base 17: mod_base = OTHER; note = 2'-O-methylguanosine-3'-phosphate
  modified_base 18: mod_base = OTHER; note = 2'-O-methylcytidine-3'-phosphate
  modified_base 19: mod_base = OTHER; note = 2'-O-methylcytidine-3'-phosphorothioate
  modified_base 20: mod_base = OTHER; note = 2'-O-methyladenosine-3'-phosphorothioate
  modified_base 21: mod_base = OTHER; note = 2'-O-methyladenosine
taacaataatagaactgccaa

SEQ ID NO: 11726 - RNA, 21 nt, synthetic construct
  source 1..21: mol_type = other RNA
  modified_base 1: mod_base = OTHER; note = 2'-O-methyladenosine-3'-phosphorothioate
  modified_base 2: mod_base = OTHER; note = 2'-O-methylcytidine-3'-phosphorothioate
  modified_base 3: mod_base = OTHER; note = 2'-O-methyluridine-3'-phosphate
  modified_base 4: mod_base = OTHER; note = 2'-O-methyluridine-3'-phosphate
  modified_base 5: mod_base = OTHER; note = 2'-O-methyluridine-3'-phosphate
  modified_base 6: mod_base = OTHER; note = 2'-O-docosanyl-uridine-3'-phosphate
  modified_base 7: mod_base = OTHER; note = 2'-deoxy-2'-fluorocytidine-3'-phosphate
  modified_base 8: mod_base = OTHER; note = 2'-O-methyluridine-3'-phosphate
  modified_base 9: mod_base = OTHER; note = 2'-deoxy-2'-fluorocytidine-3'-phosphate
  modified_base 10: mod_base = OTHER; note = 2'-deoxy-2'-fluorouridine-3'-phosphate
  modified_base 11: mod_base = OTHER; note = 2'-deoxy-2'-fluorouridine-3'-phosphate
  modified_base 12: mod_base = OTHER; note = 2'-O-methyluridine-3'-phosphate
  modified_base 13: mod_base = OTHER; note = 2'-O-methylcytidine-3'-phosphate
  modified_base 14: mod_base = OTHER; note = 2'-O-methyladenosine-3'-phosphate
  modified_base 15: mod_base = OTHER; note = 2'-O-methylguanosine-3'-phosphate
  modified_base 16: mod_base = OTHER; note = 2'-O-methyluridine-3'-phosphate
  modified_base 17: mod_base = OTHER; note = 2'-O-methyluridine-3'-phosphate
  modified_base 18: mod_base = OTHER; note = 2'-O-methylguanosine-3'-phosphate
  modified_base 19: mod_base = OTHER; note = 2'-O-methyluridine-3'-phosphorothioate
  modified_base 20: mod_base = OTHER; note = 2'-O-methyladenosine-3'-phosphorothioate
  modified_base 21: mod_base = OTHER; note = 2'-O-methyladenosine
acttttctctttcagttgtaa

SEQ ID NO: 11727 - RNA, 21 nt, synthetic construct
  source 1..21: mol_type = other RNA
  modified_base 1: mod_base = OTHER; note = 2'-O-methyluridine-3'-phosphorothioate
  modified_base 2: mod_base = OTHER; note = 2'-O-methyluridine-3'-phosphorothioate
  modified_base 3: mod_base = OTHER; note = 2'-O-methyladenosine-3'-phosphate
  modified_base 4: mod_base = OTHER; note = 2'-O-methylguanosine-3'-phosphate
  modified_base 5: mod_base = OTHER; note = 2'-O-methylguanosine-3'-phosphate
  modified_base 6: mod_base = OTHER; note = 2'-O-docosanyl-uridine-3'-phosphate
  modified_base 7: mod_base = OTHER; note = 2'-deoxy-2'-fluoroadenosine-3'-phosphate
  modified_base 8: mod_base = OTHER; note = 2'-O-methyladenosine-3'-phosphate
  modified_base 9: mod_base = OTHER; note = 2'-deoxy-2'-fluorocytidine-3'-phosphate
  modified_base 10: mod_base = OTHER; note = 2'-deoxy-2'-fluoroadenosine-3'-phosphate
  modified_base 11: mod_base = OTHER; note = 2'-deoxy-2'-fluoroadenosine-3'-phosphate
  modified_base 12: mod_base = OTHER; note = 2'-O-methyluridine-3'-phosphate
  modified_base 13: mod_base = OTHER; note = 2'-O-methylcytidine-3'-phosphate
  modified_base 14: mod_base = OTHER; note = 2'-O-methylcytidine-3'-phosphate
  modified_base 15: mod_base = OTHER; note = 2'-O-methylcytidine-3'-phosphate
  modified_base 16: mod_base = OTHER; note = 2'-O-methyluridine-3'-phosphate
  modified_base 17: mod_base = OTHER; note = 2'-O-methyladenosine-3'-phosphate
  modified_base 18: mod_base = OTHER; note = 2'-O-methyluridine-3'-phosphate
  modified_base 19: mod_base = OTHER; note = 2'-O-methyluridine-3'-phosphorothioate
  modified_base 20: mod_base = OTHER; note = 2'-O-methyluridine-3'-phosphorothioate
  modified_base 21: mod_base = OTHER; note = 2'-O-methyladenosine
ttaggtaacaatccctattta

SEQ ID NO: 11728 - RNA, 21 nt, synthetic construct
  source 1..21: mol_type = other RNA
  modified_base 1: mod_base = OTHER; note = 2'-O-methyluridine-3'-phosphorothioate
  modified_base 2: mod_base = OTHER; note = 2'-O-methyladenosine-3'-phosphorothioate
  modified_base 3: mod_base = OTHER; note = 2'-O-methylguanosine-3'-phosphate
  modified_base 4: mod_base = OTHER; note = 2'-O-methylguanosine-3'-phosphate
  modified_base 5: mod_base = OTHER; note = 2'-O-methyluridine-3'-phosphate
  modified_base 6: mod_base = OTHER; note = 2'-O-docosanyl-adenosine-3'-phosphate
  modified_base 7: mod_base = OTHER; note = 2'-deoxy-2'-fluoroadenosine-3'-phosphate
  modified_base 8: mod_base = OTHER; note = 2'-O-methylcytidine-3'-phosphate
  modified_base 9: mod_base = OTHER; note = 2'-deoxy-2'-fluoroadenosine-3'-phosphate
  modified_base 10: mod_base = OTHER; note = 2'-deoxy-2'-fluoroadenosine-3'-phosphate
  modified_base 11: mod_base = OTHER; note = 2'-deoxy-2'-fluorouridine-3'-phosphate
  modified_base 12: mod_base = OTHER; note = 2'-O-methylcytidine-3'-phosphate
  modified_base 13: mod_base = OTHER; note = 2'-O-methylcytidine-3'-phosphate
  modified_base 14: mod_base = OTHER; note = 2'-O-methylcytidine-3'-phosphate
  modified_base 15: mod_base = OTHER; note = 2'-O-methyluridine-3'-phosphate
  modified_base 16: mod_base = OTHER; note = 2'-O-methyladenosine-3'-phosphate
  modified_base 17: mod_base = OTHER; note = 2'-O-methyluridine-3'-phosphate
  modified_base 18: mod_base = OTHER; note = 2'-O-methyluridine-3'-phosphate
  modified_base 19: mod_base = OTHER; note = 2'-O-methyluridine-3'-phosphorothioate
  modified_base 20: mod_base = OTHER; note = 2'-O-methyluridine-3'-phosphorothioate
  modified_base 21: mod_base = OTHER; note = 2'-O-methyladenosine
taggtaacaatccctatttta

SEQ ID NO: 11729 - RNA, 21 nt, synthetic construct
  source 1..21: mol_type = other RNA
  modified_base 1: mod_base = OTHER; note = 2'-O-methyladenosine-3'-phosphorothioate
  modified_base 2: mod_base = OTHER; note = 2'-O-methylguanosine-3'-phosphorothioate
  modified_base 3: mod_base = OTHER; note = 2'-O-methylguanosine-3'-phosphate
  modified_base 4: mod_base = OTHER; note = 2'-O-methyluridine-3'-phosphate
  modified_base 5: mod_base = OTHER; note = 2'-O-methyladenosine-3'-phosphate
  modified_base 6: mod_base = OTHER; note = 2'-O-docosanyl-adenosine-3'-phosphate
  modified_base 7: mod_base = OTHER; note = 2'-deoxy-2'-fluorocytidine-3'-phosphate
  modified_base 8: mod_base = OTHER; note = 2'-O-methyladenosine-3'-phosphate
  modified_base 9: mod_base = OTHER; note = 2'-deoxy-2'-fluoroadenosine-3'-phosphate
  modified_base 10: mod_base = OTHER; note = 2'-deoxy-2'-fluorouridine-3'-phosphate
  modified_base 11: mod_base = OTHER; note = 2'-deoxy-2'-fluorocytidine-3'-phosphate
  modified_base 12: mod_base = OTHER; note = 2'-O-methylcytidine-3'-phosphate
  modified_base 13: mod_base = OTHER; note = 2'-O-methylcytidine-3'-phosphate
  modified_base 14: mod_base = OTHER; note = 2'-O-methyluridine-3'-phosphate
  modified_base 15: mod_base = OTHER; note = 2'-O-methyladenosine-3'-phosphate
  modified_base 16: mod_base = OTHER; note = 2'-O-methyluridine-3'-phosphate
  modified_base 17: mod_base = OTHER; note = 2'-O-methyluridine-3'-phosphate
  modified_base 18: mod_base = OTHER; note = 2'-O-methyluridine-3'-phosphate
  modified_base 19: mod_base = OTHER; note = 2'-O-methyluridine-3'-phosphorothioate
  modified_base 20: mod_base = OTHER; note = 2'-O-methyladenosine-3'-phosphorothioate
  modified_base 21: mod_base = OTHER; note = 2'-O-methyladenosine
aggtaacaatccctattttaa

SEQ ID NO: 11730 - RNA, 21 nt, synthetic construct
  source 1..21: mol_type = other RNA
  modified_base 1: mod_base = OTHER; note = 2'-O-methylguanosine-3'-phosphorothioate
  modified_base 2: mod_base = OTHER; note = 2'-O-methylguanosine-3'-phosphorothioate
  modified_base 3: mod_base = OTHER; note = 2'-O-methyluridine-3'-phosphate
  modified_base 4: mod_base = OTHER; note = 2'-O-methyladenosine-3'-phosphate
  modified_base 5: mod_base = OTHER; note = 2'-O-methyladenosine-3'-phosphate
  modified_base 6: mod_base = OTHER; note = 2'-O-docosanyl-cytidine-3'-phosphate
  modified_base 7: mod_base = OTHER; note = 2'-deoxy-2'-fluoroadenosine-3'-phosphate
  modified_base 8: mod_base = OTHER; note = 2'-O-methyladenosine-3'-phosphate
  modified_base 9: mod_base = OTHER; note = 2'-deoxy-2'-fluorouridine-3'-phosphate
  modified_base 10: mod_base = OTHER; note = 2'-deoxy-2'-fluorocytidine-3'-phosphate
  modified_base 11: mod_base = OTHER; note = 2'-deoxy-2'-fluorocytidine-3'-phosphate
  modified_base 12: mod_base = OTHER; note = 2'-O-methylcytidine-3'-phosphate
  modified_base 13: mod_base = OTHER; note = 2'-O-methyluridine-3'-phosphate
  modified_base 14: mod_base = OTHER; note = 2'-O-methyladenosine-3'-phosphate
  modified_base 15: mod_base = OTHER; note = 2'-O-methyluridine-3'-phosphate
  modified_base 16: mod_base = OTHER; note = 2'-O-methyluridine-3'-phosphate
  modified_base 17: mod_base = OTHER; note = 2'-O-methyluridine-3'-phosphate
  modified_base 18: mod_base = OTHER; note = 2'-O-methyluridine-3'-phosphate
  modified_base 19: mod_base = OTHER; note = 2'-O-methyladenosine-3'-phosphorothioate
  modified_base 20: mod_base = OTHER; note = 2'-O-methyladenosine-3'-phosphorothioate
  modified_base 21: mod_base = OTHER; note = 2'-O-methyladenosine
ggtaacaatccctattttaaa

SEQ ID NO: 11731 - RNA, 21 nt, synthetic construct
  source 1..21: mol_type = other RNA
  modified_base 1: mod_base = OTHER; note = 2'-O-methylguanosine-3'-phosphorothioate
  modified_base 2: mod_base = OTHER; note = 2'-O-methyluridine-3'-phosphorothioate
  modified_base 3: mod_base = OTHER; note = 2'-O-methyladenosine-3'-phosphate
  modified_base 4: mod_base = OTHER; note = 2'-O-methyladenosine-3'-phosphate
  modified_base 5: mod_base = OTHER; note = 2'-O-methylcytidine-3'-phosphate
  modified_base 6: mod_base = OTHER; note = 2'-O-docosanyl-adenosine-3'-phosphate
  modified_base 7: mod_base = OTHER; note = 2'-deoxy-2'-fluoroadenosine-3'-phosphate
  modified_base 8: mod_base = OTHER; note = 2'-O-methyluridine-3'-phosphate
  modified_base 9: mod_base = OTHER; note = 2'-deoxy-2'-fluorocytidine-3'-phosphate
  modified_base 10: mod_base = OTHER; note = 2'-deoxy-2'-fluorocytidine-3'-phosphate
  modified_base 11: mod_base = OTHER; note = 2'-deoxy-2'-fluorocytidine-3'-phosphate
  modified_base 12: mod_base = OTHER; note = 2'-O-methyluridine-3'-phosphate
  modified_base 13: mod_base = OTHER; note = 2'-O-methyladenosine-3'-phosphate
  modified_base 14: mod_base = OTHER; note = 2'-O-methyluridine-3'-phosphate
  modified_base 15: mod_base = OTHER; note = 2'-O-methyluridine-3'-phosphate
  modified_base 16: mod_base = OTHER; note = 2'-O-methyluridine-3'-phosphate
  modified_base 17: mod_base = OTHER; note = 2'-O-methyluridine-3'-phosphate
  modified_base 18: mod_base = OTHER; note = 2'-O-methyladenosine-3'-phosphate
  modified_base 19: mod_base = OTHER; note = 2'-O-methyladenosine-3'-phosphorothioate
  modified_base 20: mod_base = OTHER; note = 2'-O-methyladenosine-3'-phosphorothioate
  modified_base 21: mod_base = OTHER; note = 2'-O-methyladenosine
gtaacaatccctattttaaaa

SEQ ID NO: 11732 - RNA, 21 nt, synthetic construct
  source 1..21: mol_type = other RNA
  modified_base 1: mod_base = OTHER; note = 2'-O-methyluridine-3'-phosphorothioate
  modified_base 2: mod_base = OTHER; note = 2'-O-methyladenosine-3'-phosphorothioate
  modified_base 3: mod_base = OTHER; note = 2'-O-methyladenosine-3'-phosphate
  modified_base 4: mod_base = OTHER; note = 2'-O-methylcytidine-3'-phosphate
  modified_base 5: mod_base = OTHER; note = 2'-O-methyladenosine-3'-phosphate
  modified_base 6: mod_base = OTHER; note = 2'-O-docosanyl-adenosine-3'-phosphate
  modified_base 7: mod_base = OTHER; note = 2'-deoxy-2'-fluorouridine-3'-phosphate
  modified_base 8: mod_base = OTHER; note = 2'-O-methylcytidine-3'-phosphate
  modified_base 9: mod_base = OTHER; note = 2'-deoxy-2'-fluorocytidine-3'-phosphate
  modified_base 10: mod_base = OTHER; note = 2'-deoxy-2'-fluorocytidine-3'-phosphate
  modified_base 11: mod_base = OTHER; note = 2'-deoxy-2'-fluorouridine-3'-phosphate
  modified_base 12: mod_base = OTHER; note = 2'-O-methyladenosine-3'-phosphate
  modified_base 13: mod_base = OTHER; note = 2'-O-methyluridine-3'-phosphate
  modified_base 14: mod_base = OTHER; note = 2'-O-methyluridine-3'-phosphate
  modified_base 15: mod_base = OTHER; note = 2'-O-methyluridine-3'-phosphate
  modified_base 16: mod_base = OTHER; note = 2'-O-methyluridine-3'-phosphate
  modified_base 17: mod_base = OTHER; note = 2'-O-methyladenosine-3'-phosphate
  modified_base 18: mod_base = OTHER; note = 2'-O-methyladenosine-3'-phosphate
  modified_base 19: mod_base = OTHER; note = 2'-O-methyladenosine-3'-phosphorothioate
  modified_base 20: mod_base = OTHER; note = 2'-O-methyladenosine-3'-phosphorothioate
  modified_base 21: mod_base = OTHER; note = 2'-O-methyladenosine
taacaatccctattttaaaaa

SEQ ID NO: 11733 - RNA, 21 nt, synthetic construct
  source 1..21: mol_type = other RNA
  modified_base 1: mod_base = OTHER; note = 2'-O-methylcytidine-3'-phosphorothioate
  modified_base 2: mod_base = OTHER; note = 2'-O-methyluridine-3'-phosphorothioate
  modified_base 3: mod_base = OTHER; note = 2'-O-methyladenosine-3'-phosphate
  modified_base 4: mod_base = OTHER; note = 2'-O-methyladenosine-3'-phosphate
  modified_base 5: mod_base = OTHER; note = 2'-O-methylcytidine-3'-phosphate
  modified_base 6: mod_base = OTHER; note = 2'-O-docosanyl-adenosine-3'-phosphate
  modified_base 7: mod_base = OTHER; note = 2'-deoxy-2'-fluoroadenosine-3'-phosphate
  modified_base 8: mod_base = OTHER; note = 2'-O-methyluridine-3'-phosphate
  modified_base 9: mod_base = OTHER; note = 2'-deoxy-2'-fluoroadenosine-3'-phosphate
  modified_base 10: mod_base = OTHER; note = 2'-deoxy-2'-fluoroadenosine-3'-phosphate
  modified_base 11: mod_base = OTHER; note = 2'-deoxy-2'-fluorouridine-3'-phosphate
  modified_base 12: mod_base = OTHER; note = 2'-O-methyladenosine-3'-phosphate
  modified_base 13: mod_base = OTHER; note = 2'-O-methylguanosine-3'-phosphate
  modified_base 14: mod_base = OTHER; note = 2'-O-methyladenosine-3'-phosphate
  modified_base 15: mod_base = OTHER; note = 2'-O-methyladenosine-3'-phosphate
  modified_base 16: mod_base = OTHER; note = 2'-O-methylcytidine-3'-phosphate
  modified_base 17: mod_base = OTHER; note = 2'-O-methyluridine-3'-phosphate
  modified_base 18: mod_base = OTHER; note = 2'-O-methylguanosine-3'-phosphate
  modified_base 19: mod_base = OTHER; note = 2'-O-methylcytidine-3'-phosphorothioate
  modified_base 20: mod_base = OTHER; note = 2'-O-methylcytidine-3'-phosphorothioate
  modified_base 21: mod_base = OTHER; note = 2'-O-methyladenosine
ctaacaataatagaactgcca

SEQ ID NO: 11734 - RNA, 21 nt, synthetic construct
  source 1..21: mol_type = other RNA
  modified_base 1: mod_base = OTHER; note = 2'-O-methyladenosine-3'-phosphorothioate
  modified_base 2: mod_base = OTHER; note = 2'-O-methyladenosine-3'-phosphorothioate
  modified_base 3: mod_base = OTHER; note = 2'-O-methylcytidine-3'-phosphate
  modified_base 4: mod_base = OTHER; note = 2'-O-methyladenosine-3'-phosphate
  modified_base 5: mod_base = OTHER; note = 2'-O-methyladenosine-3'-phosphate
  modified_base 6: mod_base = OTHER; note = 2'-O-docosanyl-uridine-3'-phosphate
  modified_base 7: mod_base = OTHER; note = 2'-deoxy-2'-fluoroadenosine-3'-phosphate
  modified_base 8: mod_base = OTHER; note = 2'-O-methyladenosine-3'-phosphate
  modified_base 9: mod_base = OTHER; note = 2'-deoxy-2'-fluorouridine-3'-phosphate
  modified_base 10: mod_base = OTHER; note = 2'-deoxy-2'-fluoroadenosine-3'-phosphate
  modified_base 11: mod_base = OTHER; note = 2'-deoxy-2'-fluoroguanosine-3'-phosphate
  modified_base 12: mod_base = OTHER; note = 2'-O-methyladenosine-3'-phosphate
  modified_base 13: mod_base = OTHER; note = 2'-O-methyladenosine-3'-phosphate
  modified_base 14: mod_base = OTHER; note = 2'-O-methylcytidine-3'-phosphate
  modified_base 15: mod_base = OTHER; note = 2'-O-methyluridine-3'-phosphate
  modified_base 16: mod_base = OTHER; note = 2'-O-methylguanosine-3'-phosphate
  modified_base 17: mod_base = OTHER; note = 2'-O-methylcytidine-3'-phosphate
  modified_base 18: mod_base = OTHER; note = 2'-O-methylcytidine-3'-phosphate
  modified_base 19: mod_base = OTHER; note = 2'-O-methyladenosine-3'-phosphorothioate
  modified_base 20: mod_base = OTHER; note = 2'-O-methylguanosine-3'-phosphorothioate
  modified_base 21: mod_base = OTHER; note = 2'-O-methyladenosine
aacaataatagaactgccaga

SEQ ID NO: 11735 - RNA, 21 nt, synthetic construct
  source 1..21: mol_type = other RNA
  modified_base 1: mod_base = OTHER; note = 2'-O-methyladenosine-3'-phosphorothioate
  modified_base 2: mod_base = OTHER; note = 2'-O-methylcytidine-3'-phosphorothioate
  modified_base 3: mod_base = OTHER; note = 2'-O-methyladenosine-3'-phosphate
  modified_base 4: mod_base = OTHER; note = 2'-O-methyladenosine-3'-phosphate
  modified_base 5: mod_base = OTHER; note = 2'-O-methyluridine-3'-phosphate
  modified_base 6: mod_base = OTHER; note = 2'-O-docosanyl-adenosine-3'-phosphate
  modified_base 7: mod_base = OTHER; note = 2'-deoxy-2'-fluoroadenosine-3'-phosphate
  modified_base 8: mod_base = OTHER; note = 2'-O-methyluridine-3'-phosphate
  modified_base 9: mod_base = OTHER; note = 2'-deoxy-2'-fluoroadenosine-3'-phosphate
  modified_base 10: mod_base = OTHER; note = 2'-deoxy-2'-fluoroguanosine-3'-phosphate
  modified_base 11: mod_base = OTHER; note = 2'-deoxy-2'-fluoroadenosine-3'-phosphate
  modified_base 12: mod_base = OTHER; note = 2'-O-methyladenosine-3'-phosphate
  modified_base 13: mod_base = OTHER; note = 2'-O-methylcytidine-3'-phosphate
  modified_base 14: mod_base = OTHER; note = 2'-O-methyluridine-3'-phosphate
  modified_base 15: mod_base = OTHER; note = 2'-O-methylguanosine-3'-phosphate
  modified_base 16: mod_base = OTHER; note = 2'-O-methylcytidine-3'-phosphate
  modified_base 17: mod_base = OTHER; note = 2'-O-methylcytidine-3'-phosphate
  modified_base 18: mod_base = OTHER; note = 2'-O-methyladenosine-3'-phosphate
  modified_base 19: mod_base = OTHER; note = 2'-O-methylguanosine-3'-phosphorothioate
  modified_base 20: mod_base = OTHER; note = 2'-O-methylcytidine-3'-phosphorothioate
  modified_base 21: mod_base = OTHER; note = 2'-O-methyladenosine
acaataatagaactgccagca

SEQ ID NO: 11736 - RNA, 21 nt, synthetic construct
  source 1..21: mol_type = other RNA
  modified_base 1: mod_base = OTHER; note = 2'-O-methyladenosine-3'-phosphorothioate
  modified_base 2: mod_base = OTHER; note = 2'-O-methyladenosine-3'-phosphorothioate
  modified_base 3: mod_base = OTHER; note = 2'-O-methylcytidine-3'-phosphate
  modified_base 4: mod_base = OTHER; note = 2'-O-methyluridine-3'-phosphate
  modified_base 5: mod_base = OTHER; note = 2'-O-methylguanosine-3'-phosphate
  modified_base 6: mod_base = OTHER; note = 2'-O-docosanyl-cytidine-3'-phosphate
  modified_base 7: mod_base = OTHER; note = 2'-deoxy-2'-fluorocytidine-3'-phosphate
  modified_base 8: mod_base = OTHER; note = 2'-O-methyladenosine-3'-phosphate
  modified_base 9: mod_base = OTHER; note = 2'-deoxy-2'-fluoroguanosine-3'-phosphate
  modified_base 10: mod_base = OTHER; note = 2'-deoxy-2'-fluorocytidine-3'-phosphate
  modified_base 11: mod_base = OTHER; note = 2'-deoxy-2'-fluoroadenosine-3'-phosphate
  modified_base 12: mod_base = OTHER; note = 2'-O-methyluridine-3'-phosphate
  modified_base 13: mod_base = OTHER; note = 2'-O-methyladenosine-3'-phosphate
  modified_base 14: mod_base = OTHER; note = 2'-O-methylcytidine-3'-phosphate
  modified_base 15: mod_base = OTHER; note = 2'-O-methyluridine-3'-phosphate
  modified_base 16: mod_base = OTHER; note = 2'-O-methyluridine-3'-phosphate
  modified_base 17: mod_base = OTHER; note = 2'-O-methyluridine-3'-phosphate
  modified_base 18: mod_base = OTHER; note = 2'-O-methyluridine-3'-phosphate
  modified_base 19: mod_base = OTHER; note = 2'-O-methylcytidine-3'-phosphorothioate
  modified_base 20: mod_base = OTHER; note = 2'-O-methyluridine-3'-phosphorothioate
  modified_base 21: mod_base = OTHER; note = 2'-O-methyladenosine
aactgccagcatacttttcta

SEQ ID NO: 11737 - RNA, 21 nt, synthetic construct
  source 1..21: mol_type = other RNA
  modified_base 1: mod_base = OTHER; note = 2'-O-methyladenosine-3'-phosphorothioate
  modified_base 2: mod_base = OTHER; note = 2'-O-methylcytidine-3'-phosphorothioate
  modified_base 3: mod_base = OTHER; note = 2'-O-methyluridine-3'-phosphate
  modified_base 4: mod_base = OTHER; note = 2'-O-methylguanosine-3'-phosphate
  modified_base 5: mod_base = OTHER; note = 2'-O-methylcytidine-3'-phosphate
  modified_base 6: mod_base = OTHER; note = 2'-O-docosanyl-cytidine-3'-phosphate
  modified_base 7: mod_base = OTHER; note = 2'-deoxy-2'-fluoroadenosine-3'-phosphate
  modified_base 8: mod_base = OTHER; note = 2'-O-methylguanosine-3'-phosphate
  modified_base 9: mod_base = OTHER; note = 2'-deoxy-2'-fluorocytidine-3'-phosphate
  modified_base 10: mod_base = OTHER; note = 2'-deoxy-2'-fluoroadenosine-3'-phosphate
  modified_base 11: mod_base = OTHER; note = 2'-deoxy-2'-fluorouridine-3'-phosphate
  modified_base 12: mod_base = OTHER; note = 2'-O-methyladenosine-3'-phosphate
  modified_base 13: mod_base = OTHER; note = 2'-O-methylcytidine-3'-phosphate
  modified_base 14: mod_base = OTHER; note = 2'-O-methyluridine-3'-phosphate
  modified_base 15: mod_base = OTHER; note = 2'-O-methyluridine-3'-phosphate
  modified_base 16: mod_base = OTHER; note = 2'-O-methyluridine-3'-phosphate
  modified_base 17: mod_base = OTHER; note = 2'-O-methyluridine-3'-phosphate
  modified_base 18: mod_base = OTHER; note = 2'-O-methylcytidine-3'-phosphate
  modified_base 19: mod_base = OTHER; note = 2'-O-methyluridine-3'-phosphorothioate
  modified_base 20: mod_base = OTHER; note = 2'-O-methylcytidine-3'-phosphorothioate
  modified_base 21: mod_base = OTHER; note = 2'-O-methyladenosine
actgccagcatacttttctca

SEQ ID NO: 11738 - RNA, 21 nt, synthetic construct
  source 1..21: mol_type = other RNA
  modified_base 1: mod_base = OTHER; note = 2'-O-methylcytidine-3'-phosphorothioate
  modified_base 2: mod_base = OTHER; note = 2'-O-methyluridine-3'-phosphorothioate
  modified_base 3: mod_base = OTHER; note = 2'-O-methylguanosine-3'-phosphate
  modified_base 4: mod_base = OTHER; note = 2'-O-methylcytidine-3'-phosphate
  modified_base 5: mod_base = OTHER; note = 2'-O-methylcytidine-3'-phosphate
  modified_base 6: mod_base = OTHER; note = 2'-O-docosanyl-adenosine-3'-phosphate
  modified_base 7: mod_base = OTHER; note = 2'-deoxy-2'-fluoroguanosine-3'-phosphate
  modified_base 8: mod_base = OTHER; note = 2'-O-methylcytidine-3'-phosphate
  modified_base 9: mod_base = OTHER; note = 2'-deoxy-2'-fluoroadenosine-3'-phosphate
  modified_base 10: mod_base = OTHER; note = 2'-deoxy-2'-fluorouridine-3'-phosphate
  modified_base 11: mod_base = OTHER; note = 2'-deoxy-2'-fluoroadenosine-3'-phosphate
  modified_base 12: mod_base = OTHER; note = 2'-O-methylcytidine-3'-phosphate
  modified_base 13: mod_base = OTHER; note = 2'-O-methyluridine-3'-phosphate
  modified_base 14: mod_base = OTHER; note = 2'-O-methyluridine-3'-phosphate
  modified_base 15: mod_base = OTHER; note = 2'-O-methyluridine-3'-phosphate
  modified_base 16: mod_base = OTHER; note = 2'-O-methyluridine-3'-phosphate
  modified_base 17: mod_base = OTHER; note = 2'-O-methylcytidine-3'-phosphate
  modified_base 18: mod_base = OTHER; note = 2'-O-methyluridine-3'-phosphate
  modified_base 19: mod_base = OTHER; note = 2'-O-methylcytidine-3'-phosphorothioate
  modified_base 20: mod_base = OTHER; note = 2'-O-methyluridine-3'-phosphorothioate
  modified_base 21: mod_base = OTHER; note = 2'-O-methyladenosine
ctgccagcatacttttctcta

SEQ ID NO: 11739 - RNA, 21 nt, synthetic construct
  source 1..21: mol_type = other RNA
  modified_base 1: mod_base = OTHER; note = 2'-O-methyluridine-3'-phosphorothioate
  modified_base 2: mod_base = OTHER; note = 2'-O-methylguanosine-3'-phosphorothioate
  modified_base 3: mod_base = OTHER; note = 2'-O-methylcytidine-3'-phosphate
  modified_base 4: mod_base = OTHER; note = 2'-O-methylcytidine-3'-phosphate
  modified_base 5: mod_base = OTHER; note = 2'-O-methyladenosine-3'-phosphate
  modified_base 6: mod_base = OTHER; note = 2'-O-docosanyl-guanosine-3'-phosphate
  modified_base 7: mod_base = OTHER; note = 2'-deoxy-2'-fluorocytidine-3'-phosphate
  modified_base 8: mod_base = OTHER; note = 2'-O-methyladenosine-3'-phosphate
  modified_base 9: mod_base = OTHER; note = 2'-deoxy-2'-fluorouridine-3'-phosphate
  modified_base 10: mod_base = OTHER; note = 2'-deoxy-2'-fluoroadenosine-3'-phosphate
  modified_base 11: mod_base = OTHER; note = 2'-deoxy-2'-fluorocytidine-3'-phosphate
  modified_base 12: mod_base = OTHER; note = 2'-O-methyluridine-3'-phosphate
  modified_base 13: mod_base = OTHER; note = 2'-O-methyluridine-3'-phosphate
  modified_base 14: mod_base = OTHER; note = 2'-O-methyluridine-3'-phosphate
  modified_base 15: mod_base = OTHER; note = 2'-O-methyluridine-3'-phosphate
  modified_base 16: mod_base = OTHER; note = 2'-O-methylcytidine-3'-phosphate
  modified_base 17: mod_base = OTHER; note = 2'-O-methyluridine-3'-phosphate
  modified_base 18: mod_base = OTHER; note = 2'-O-methylcytidine-3'-phosphate
  modified_base 19: mod_base = OTHER; note = 2'-O-methyluridine-3'-phosphorothioate
  modified_base 20: mod_base = OTHER; note = 2'-O-methyluridine-3'-phosphorothioate
  modified_base 21: mod_base = OTHER; note = 2'-O-methyladenosine
tgccagcatacttttctctta

SEQ ID NO: 11740 - RNA, 21 nt, synthetic construct
  source 1..21: mol_type = other RNA
  modified_base 1: mod_base = OTHER; note = 2'-O-methylguanosine-3'-phosphorothioate
  modified_base 2: mod_base = OTHER; note = 2'-O-methylcytidine-3'-phosphorothioate
  modified_base 3: mod_base = OTHER; note = 2'-O-methylcytidine-3'-phosphate
  modified_base 4: mod_base = OTHER; note = 2'-O-methyladenosine-3'-phosphate
  modified_base 5: mod_base = OTHER; note = 2'-O-methylguanosine-3'-phosphate
  modified_base 6: mod_base = OTHER; note = 2'-O-docosanyl-cytidine-3'-phosphate
  modified_base 7: mod_base = OTHER; note = 2'-deoxy-2'-fluoroadenosine-3'-phosphate
  modified_base 8: mod_base = OTHER; note = 2'-O-methyluridine-3'-phosphate
  modified_base 9: mod_base = OTHER; note = 2'-deoxy-2'-fluoroadenosine-3'-phosphate
  modified_base 10: mod_base = OTHER; note = 2'-deoxy-2'-fluorocytidine-3'-phosphate
  modified_base 11: mod_base = OTHER; note = 2'-deoxy-2'-fluorouridine-3'-phosphate
  modified_base 12: mod_base = OTHER; note = 2'-O-methyluridine-3'-phosphate
  modified_base 13: mod_base = OTHER; note = 2'-O-methyluridine-3'-phosphate
  modified_base 14: mod_base = OTHER; note = 2'-O-methyluridine-3'-phosphate
  modified_base 15: mod_base = OTHER; note = 2'-O-methylcytidine-3'-phosphate
  modified_base 16: mod_base = OTHER; note = 2'-O-methyluridine-3'-phosphate
  modified_base 17: mod_base = OTHER; note = 2'-O-methylcytidine-3'-phosphate
  modified_base 18: mod_base = OTHER; note = 2'-O-methyluridine-3'-phosphate
  modified_base 19: mod_base = OTHER; note = 2'-O-methyluridine-3'-phosphorothioate
  modified_base 20: mod_base = OTHER; note = 2'-O-methyluridine-3'-phosphorothioate
  modified_base 21: mod_base = OTHER; note = 2'-O-methyladenosine
gccagcatacttttctcttta

SEQ ID NO: 11741 - RNA, 21 nt, synthetic construct
  source 1..21: mol_type = other RNA
  modified_base 1: mod_base = OTHER; note = 2'-O-methylcytidine-3'-phosphorothioate
  modified_base 2: mod_base = OTHER; note = 2'-O-methylcytidine-3'-phosphorothioate
  modified_base 3: mod_base = OTHER; note = 2'-O-methyladenosine-3'-phosphate
  modified_base 4: mod_base = OTHER; note = 2'-O-methylguanosine-3'-phosphate
  modified_base 5: mod_base = OTHER; note = 2'-O-methylcytidine-3'-phosphate
  modified_base 6: mod_base = OTHER; note = 2'-O-docosanyl-adenosine-3'-phosphate
  modified_base 7: mod_base = OTHER; note = 2'-deoxy-2'-fluorouridine-3'-phosphate
  modified_base 8: mod_base = OTHER; note = 2'-O-methyladenosine-3'-phosphate
  modified_base 9: mod_base = OTHER; note = 2'-deoxy-2'-fluorocytidine-3'-phosphate
  modified_base 10: mod_base = OTHER; note = 2'-deoxy-2'-fluorouridine-3'-phosphate
  modified_base 11: mod_base = OTHER; note = 2'-deoxy-2'-fluorouridine-3'-phosphate
  modified_base 12: mod_base = OTHER; note = 2'-O-methyluridine-3'-phosphate
  modified_base 13: mod_base = OTHER; note = 2'-O-methyluridine-3'-phosphate
  modified_base 14: mod_base = OTHER; note = 2'-O-methylcytidine-3'-phosphate
  modified_base 15: mod_base = OTHER; note = 2'-O-methyluridine-3'-phosphate
  modified_base 16: mod_base = OTHER; note = 2'-O-methylcytidine-3'-phosphate
  modified_base 17: mod_base = OTHER; note = 2'-O-methyluridine-3'-phosphate
  modified_base 18: mod_base = OTHER; note = 2'-O-methyluridine-3'-phosphate
  modified_base 19: mod_base = OTHER; note = 2'-O-methyluridine-3'-phosphorothioate
  modified_base 20: mod_base = OTHER; note = 2'-O-methylcytidine-3'-phosphorothioate
  modified_base 21: mod_base = OTHER; note = 2'-O-methyladenosine
ccagcatacttttctctttca

SEQ ID NO: 11742 - RNA, 21 nt, synthetic construct
  source 1..21: mol_type = other RNA
  modified_base 1: mod_base = OTHER; note = 2'-O-methylcytidine-3'-phosphorothioate
  modified_base 2: mod_base = OTHER; note = 2'-O-methyladenosine-3'-phosphorothioate
  modified_base 3: mod_base = OTHER; note = 2'-O-methylguanosine-3'-phosphate
  modified_base 4: mod_base = OTHER; note = 2'-O-methylcytidine-3'-phosphate
  modified_base 5: mod_base = OTHER; note = 2'-O-methyladenosine-3'-phosphate
  modified_base 6: mod_base = OTHER; note = 2'-O-docosanyl-uridine-3'-phosphate
  modified_base 7: mod_base = OTHER; note = 2'-deoxy-2'-fluoroadenosine-3'-phosphate
  modified_base 8: mod_base = OTHER; note = 2'-O-methylcytidine-3'-phosphate
  modified_base 9: mod_base = OTHER; note = 2'-deoxy-2'-fluorouridine-3'-phosphate
  modified_base 10: mod_base = OTHER; note = 2'-deoxy-2'-fluorouridine-3'-phosphate
  modified_base 11: mod_base = OTHER; note = 2'-deoxy-2'-fluorouridine-3'-phosphate
  modified_base 12: mod_base = OTHER; note = 2'-O-methyluridine-3'-phosphate
  modified_base 13: mod_base = OTHER; note = 2'-O-methylcytidine-3'-phosphate
  modified_base 14: mod_base = OTHER; note = 2'-O-methyluridine-3'-phosphate
  modified_base 15: mod_base = OTHER; note = 2'-O-methylcytidine-3'-phosphate
  modified_base 16: mod_base = OTHER; note = 2'-O-methyluridine-3'-phosphate
  modified_base 17: mod_base = OTHER; note = 2'-O-methyluridine-3'-phosphate
  modified_base 18: mod_base = OTHER; note = 2'-O-methyluridine-3'-phosphate
  modified_base 19: mod_base = OTHER; note = 2'-O-methylcytidine-3'-phosphorothioate
  modified_base 20: mod_base = OTHER; note = 2'-O-methyladenosine-3'-phosphorothioate
  modified_base 21: mod_base = OTHER; note = 2'-O-methyladenosine
cagcatacttttctctttcaa

SEQ ID NO: 11743 - RNA, 21 nt, synthetic construct
  source 1..21: mol_type = other RNA
  modified_base 1: mod_base = OTHER; note = 2'-O-methyladenosine-3'-phosphorothioate
  modified_base 2: mod_base = OTHER; note = 2'-O-methylguanosine-3'-phosphorothioate
  modified_base 3: mod_base = OTHER; note = 2'-O-methylcytidine-3'-phosphate
  modified_base 4: mod_base = OTHER; note = 2'-O-methyladenosine-3'-phosphate
  modified_base 5: mod_base = OTHER; note = 2'-O-methyluridine-3'-phosphate
  modified_base 6: mod_base = OTHER; note = 2'-O-docosanyl-adenosine-3'-phosphate
  modified_base 7: mod_base = OTHER; note = 2'-deoxy-2'-fluorocytidine-3'-phosphate
  modified_base 8: mod_base = OTHER; note = 2'-O-methyluridine-3'-phosphate
  modified_base 9: mod_base = OTHER; note = 2'-deoxy-2'-fluorouridine-3'-phosphate
  modified_base 10: mod_base = OTHER; note = 2'-deoxy-2'-fluorouridine-3'-phosphate
  modified_base 11: mod_base = OTHER; note = 2'-deoxy-2'-fluorouridine-3'-phosphate
  modified_base 12: mod_base = OTHER; note = 2'-O-methylcytidine-3'-phosphate
  modified_base 13: mod_base = OTHER; note = 2'-O-methyluridine-3'-phosphate
  modified_base 14: mod_base = OTHER; note = 2'-O-methylcytidine-3'-phosphate
  modified_base 15: mod_base = OTHER; note = 2'-O-methyluridine-3'-phosphate
  modified_base 16: mod_base = OTHER; note = 2'-O-methyluridine-3'-phosphate
  modified_base 17: mod_base = OTHER; note = 2'-O-methyluridine-3'-phosphate
  modified_base 18: mod_base = OTHER; note = 2'-O-methylcytidine-3'-phosphate
  modified_base 19: mod_base = OTHER; note = 2'-O-methyladenosine-3'-phosphorothioate
  modified_base 20: mod_base = OTHER; note = 2'-O-methylguanosine-3'-phosphorothioate
  modified_base 21: mod_base = OTHER; note = 2'-O-methyladenosine
agcatacttttctctttcaga

SEQ ID NO: 11744 - RNA, 21 nt, synthetic construct
  source 1..21: mol_type = other RNA
  modified_base 1: mod_base = OTHER; note = 2'-O-methylguanosine-3'-phosphorothioate
  modified_base 2: mod_base = OTHER; note = 2'-O-methylcytidine-3'-phosphorothioate
  modified_base 3: mod_base = OTHER; note = 2'-O-methyladenosine-3'-phosphate
  modified_base 4: mod_base = OTHER; note = 2'-O-methyluridine-3'-phosphate
  modified_base 5: mod_base = OTHER; note = 2'-O-methyladenosine-3'-phosphate
  modified_base 6: mod_base = OTHER; note = 2'-O-docosanyl-cytidine-3'-phosphate
  modified_base 7: mod_base = OTHER; note = 2'-deoxy-2'-fluorouridine-3'-phosphate
  modified_base 8: mod_base = OTHER; note = 2'-O-methyluridine-3'-phosphate
  modified_base 9: mod_base = OTHER; note = 2'-deoxy-2'-fluorouridine-3'-phosphate
  modified_base 10: mod_base = OTHER; note = 2'-deoxy-2'-fluorouridine-3'-phosphate
  modified_base 11: mod_base = OTHER; note = 2'-deoxy-2'-fluorocytidine-3'-phosphate
  modified_base 12: mod_base = OTHER; note = 2'-O-methyluridine-3'-phosphate
  modified_base 13: mod_base = OTHER; note = 2'-O-methylcytidine-3'-phosphate
  modified_base 14: mod_base = OTHER; note = 2'-O-methyluridine-3'-phosphate
  modified_base 15: mod_base = OTHER; note = 2'-O-methyluridine-3'-phosphate
  modified_base 16: mod_base = OTHER; note = 2'-O-methyluridine-3'-phosphate
  modified_base 17: mod_base = OTHER; note = 2'-O-methylcytidine-3'-phosphate
  modified_base 18: mod_base = OTHER; note = 2'-O-methyladenosine-3'-phosphate
  modified_base 19: mod_base = OTHER; note = 2'-O-methylguanosine-3'-phosphorothioate
  modified_base 20: mod_base = OTHER; note = 2'-O-methyluridine-3'-phosphorothioate
  modified_base 21: mod_base = OTHER; note = 2'-O-methyladenosine
gcatacttttctctttcagta

SEQ ID NO: 11745 - RNA, 21 nt, synthetic construct
  source 1..21: mol_type = other RNA
  modified_base 1: mod_base = OTHER; note = 2'-O-methylcytidine-3'-phosphorothioate
  modified_base 2: mod_base = OTHER; note = 2'-O-methyladenosine-3'-phosphorothioate
  modified_base 3: mod_base = OTHER; note = 2'-O-methyluridine-3'-phosphate
  modified_base 4: mod_base = OTHER; note = 2'-O-methyladenosine-3'-phosphate
  modified_base 5: mod_base = OTHER; note = 2'-O-methylcytidine-3'-phosphate
  modified_base 6: mod_base = OTHER; note = 2'-O-docosanyl-uridine-3'-phosphate
  modified_base 7: mod_base = OTHER; note = 2'-deoxy-2'-fluorouridine-3'-phosphate
  modified_base 8: mod_base = OTHER; note = 2'-O-methyluridine-3'-phosphate
  modified_base 9: mod_base = OTHER; note = 2'-deoxy-2'-fluorouridine-3'-phosphate
  modified_base 10: mod_base = OTHER; note = 2'-deoxy-2'-fluorocytidine-3'-phosphate
  modified_base 11: mod_base = OTHER; note = 2'-deoxy-2'-fluorouridine-3'-phosphate
  modified_base 12: mod_base = OTHER; note = 2'-O-methylcytidine-3'-phosphate
  modified_base 13: mod_base = OTHER; note = 2'-O-methyluridine-3'-phosphate
  modified_base 14: mod_base = OTHER; note = 2'-O-methyluridine-3'-phosphate
  modified_base 15: mod_base = OTHER; note = 2'-O-methyluridine-3'-phosphate
  modified_base 16: mod_base = OTHER; note = 2'-O-methylcytidine-3'-phosphate
  modified_base 17: mod_base = OTHER; note = 2'-O-methyladenosine-3'-phosphate
  modified_base 18: mod_base = OTHER; note = 2'-O-methylguanosine-3'-phosphate
  modified_base 19: mod_base = OTHER; note = 2'-O-methyluridine-3'-phosphorothioate
  modified_base 20: mod_base = OTHER; note = 2'-O-methyluridine-3'-phosphorothioate
  modified_base 21: mod_base = OTHER; note = 2'-O-methyladenosine
catacttttctctttcagtta

SEQ ID NO: 11746 - RNA, 21 nt, synthetic construct
  source 1..21: mol_type = other RNA
  modified_base 1: mod_base = OTHER; note = 2'-O-methyladenosine-3'-phosphorothioate
  modified_base 2: mod_base = OTHER; note = 2'-O-methyluridine-3'-phosphorothioate
  modified_base 3: mod_base = OTHER; note = 2'-O-methyladenosine-3'-phosphate
  modified_base 4: mod_base = OTHER; note = 2'-O-methylcytidine-3'-phosphate
  modified_base 5: mod_base = OTHER; note = 2'-O-methyluridine-3'-phosphate
  modified_base 6: mod_base = OTHER; note = 2'-O-docosanyl-uridine-3'-phosphate
  modified_base 7: mod_base = OTHER; note = 2'-deoxy-2'-fluorouridine-3'-phosphate
  modified_base 8: mod_base = OTHER; note = 2'-O-methyluridine-3'-phosphate
  modified_base 9: mod_base = OTHER; note = 2'-deoxy-2'-fluorocytidine-3'-phosphate
  modified_base 10: mod_base = OTHER; note = 2'-deoxy-2'-fluorouridine-3'-phosphate
  modified_base 11: mod_base = OTHER; note = 2'-deoxy-2'-fluorocytidine-3'-phosphate
  modified_base 12: mod_base = OTHER; note = 2'-O-methyluridine-3'-phosphate
  modified_base 13: mod_base = OTHER; note = 2'-O-methyluridine-3'-phosphate
  modified_base 14: mod_base = OTHER; note = 2'-O-methyluridine-3'-phosphate
  modified_base 15: mod_base = OTHER; note = 2'-O-methylcytidine-3'-phosphate
  modified_base 16: mod_base = OTHER; note = 2'-O-methyladenosine-3'-phosphate
  modified_base 17: mod_base = OTHER; note = 2'-O-methylguanosine-3'-phosphate
  modified_base 18: mod_base = OTHER; note = 2'-O-methyluridine-3'-phosphate
  modified_base 19: mod_base = OTHER; note = 2'-O-methyluridine-3'-phosphorothioate
  modified_base 20: mod_base = OTHER; note = 2'-O-methylguanosine-3'-phosphorothioate
  modified_base 21: mod_base = OTHER; note = 2'-O-methyladenosine
atacttttctctttcagttga

SEQ ID NO: 11747 - RNA, 21 nt, synthetic construct
  source 1..21: mol_type = other RNA
  modified_base 1: mod_base = OTHER; note = 2'-O-methyluridine-3'-phosphorothioate
  modified_base 2: mod_base = OTHER; note = 2'-O-methyladenosine-3'-phosphorothioate
  modified_base 3: mod_base = OTHER; note = 2'-O-methylcytidine-3'-phosphate
  modified_base 4: mod_base = OTHER; note = 2'-O-methyluridine-3'-phosphate
  modified_base 5: mod_base = OTHER; note = 2'-O-methyluridine-3'-phosphate
  modified_base 6: mod_base = OTHER; note = 2'-O-docosanyl-uridine-3'-phosphate
  modified_base 7: mod_base = OTHER; note = 2'-deoxy-2'-fluorouridine-3'-phosphate
  modified_base 8: mod_base = OTHER; note = 2'-O-methylcytidine-3'-phosphate
  modified_base 9: mod_base = OTHER; note = 2'-deoxy-2'-fluorouridine-3'-phosphate
  modified_base 10: mod_base = OTHER; note = 2'-deoxy-2'-fluorocytidine-3'-phosphate
  modified_base 11: mod_base = OTHER; note = 2'-deoxy-2'-fluorouridine-3'-phosphate
  modified_base 12: mod_base = OTHER; note = 2'-O-methyluridine-3'-phosphate
  modified_base 13: mod_base = OTHER; note = 2'-O-methyluridine-3'-phosphate
  modified_base 14: mod_base = OTHER; note = 2'-O-methylcytidine-3'-phosphate
  modified_base 15: mod_base = OTHER; note = 2'-O-methyladenosine-3'-phosphate
  modified_base 16: mod_base = OTHER; note = 2'-O-methylguanosine-3'-phosphate
  modified_base 17: mod_base = OTHER; note = 2'-O-methyluridine-3'-phosphate
  modified_base 18: mod_base = OTHER; note = 2'-O-methyluridine-3'-phosphate
  modified_base 19: mod_base = OTHER; note = 2'-O-methylguanosine-3'-phosphorothioate
  modified_base 20: mod_base = OTHER; note = 2'-O-methyluridine-3'-phosphorothioate
  modified_base 21: mod_base = OTHER; note = 2'-O-methyladenosine
tacttttctctttcagttgta

SEQ ID NO: 11748 - RNA, 21 nt, synthetic construct
  source 1..21: mol_type = other RNA
  modified_base 1: mod_base = OTHER; note = 2'-O-methyluridine-3'-phosphorothioate
  modified_base 2: mod_base = OTHER; note = 2'-O-methylcytidine-3'-phosphorothioate
  modified_base 3: mod_base = OTHER; note = 2'-O-methyladenosine-3'-phosphate
  modified_base 4: mod_base = OTHER; note = 2'-O-methylguanosine-3'-phosphate
  modified_base 5: mod_base = OTHER; note = 2'-O-methyluridine-3'-phosphate
  modified_base 6: mod_base = OTHER; note = 2'-O-docosanyl-uridine-3'-phosphate
  modified_base 7: mod_base = OTHER; note = 2'-deoxy-2'-fluoroguanosine-3'-phosphate
  modified_base 8: mod_base = OTHER; note = 2'-O-methyluridine-3'-phosphate
  modified_base 9: mod_base = OTHER; note = 2'-deoxy-2'-fluoroadenosine-3'-phosphate
  modified_base 10: mod_base = OTHER; note = 2'-deoxy-2'-fluoroguanosine-3'-phosphate
  modified_base 11: mod_base = OTHER; note = 2'-deoxy-2'-fluoroadenosine-3'-phosphate
  modified_base 12: mod_base = OTHER; note = 2'-O-methyluridine-3'-phosphate
  modified_base 13: mod_base = OTHER; note = 2'-O-methylguanosine-3'-phosphate
  modified_base 14: mod_base = OTHER; note = 2'-O-methyladenosine-3'-phosphate
  modified_base 15: mod_base = OTHER; note = 2'-O-methyladenosine-3'-phosphate
  modified_base 16: mod_base = OTHER; note = 2'-O-methyluridine-3'-phosphate
  modified_base 17: mod_base = OTHER; note = 2'-O-methyladenosine-3'-phosphate
  modified_base 18: mod_base = OTHER; note = 2'-O-methylcytidine-3'-phosphate
  modified_base 19: mod_base = OTHER; note = 2'-O-methyladenosine-3'-phosphorothioate
  modified_base 20: mod_base = OTHER; note = 2'-O-methyluridine-3'-phosphorothioate
  modified_base 21: mod_base = OTHER; note = 2'-O-methyladenosine
tcagttgtagatgaatacata

SEQ ID NO: 11749 - RNA, 21 nt, synthetic construct
  source 1..21: mol_type = other RNA
  modified_base 1: mod_base = OTHER; note = 2'-O-methylcytidine-3'-phosphorothioate
  modified_base 2: mod_base = OTHER; note = 2'-O-methyladenosine-3'-phosphorothioate
  modified_base 3: mod_base = OTHER; note = 2'-O-methylguanosine-3'-phosphate
  modified_base 4: mod_base = OTHER; note = 2'-O-methyluridine-3'-phosphate
  modified_base 5: mod_base = OTHER; note = 2'-O-methyluridine-3'-phosphate
  modified_base 6: mod_base = OTHER; note = 2'-O-docosanyl-guanosine-3'-phosphate
  modified_base 7: mod_base = OTHER; note = 2'-deoxy-2'-fluorouridine-3'-phosphate
  modified_base 8: mod_base = OTHER; note = 2'-O-methyladenosine-3'-phosphate
  modified_base 9: mod_base = OTHER; note = 2'-deoxy-2'-fluoroguanosine-3'-phosphate
  modified_base 10: mod_base = OTHER; note = 2'-deoxy-2'-fluoroadenosine-3'-phosphate
  modified_base 11: mod_base = OTHER; note = 2'-deoxy-2'-fluorouridine-3'-phosphate
  modified_base 12: mod_base = OTHER; note = 2'-O-methylguanosine-3'-phosphate
  modified_base 13: mod_base = OTHER; note = 2'-O-methyladenosine-3'-phosphate
  modified_base 14: mod_base = OTHER; note = 2'-O-methyladenosine-3'-phosphate
  modified_base 15: mod_base = OTHER; note = 2'-O-methyluridine-3'-phosphate
  modified_base 16: mod_base = OTHER; note = 2'-O-methyladenosine-3'-phosphate
  modified_base 17: mod_base = OTHER; note = 2'-O-methylcytidine-3'-phosphate
  modified_base 18: mod_base = OTHER; note = 2'-O-methyladenosine-3'-phosphate
  modified_base 19: mod_base = OTHER; note = 2'-O-methyluridine-3'-phosphorothioate
  modified_base 20: mod_base = OTHER; note = 2'-O-methyluridine-3'-phosphorothioate
  modified_base 21: mod_base = OTHER; note = 2'-O-methyladenosine
cagttgtagatgaatacatta

SEQ ID NO: 11750 - RNA, 21 nt, synthetic construct
  source 1..21: mol_type = other RNA
  modified_base 1: mod_base = OTHER; note = 2'-O-methyluridine-3'-phosphorothioate
  modified_base 2: mod_base = OTHER; note = 2'-O-methylguanosine-3'-phosphorothioate
  modified_base 3: mod_base = OTHER; note = 2'-O-methyladenosine-3'-phosphate
  modified_base 4: mod_base = OTHER; note = 2'-O-methylcytidine-3'-phosphate
  modified_base 5: mod_base = OTHER; note = 2'-O-methyluridine-3'-phosphate
  modified_base 6: mod_base = OTHER; note = 2'-O-docosanyl-guanosine-3'-phosphate
  modified_base 7: mod_base = OTHER; note = 2'-deoxy-2'-fluorouridine-3'-phosphate
  modified_base 8: mod_base = OTHER; note = 2'-O-methyladenosine-3'-phosphate
  modified_base 9: mod_base = OTHER; note = 2'-deoxy-2'-fluorouridine-3'-phosphate
  modified_base 10: mod_base = OTHER; note = 2'-deoxy-2'-fluorouridine-3'-phosphate
  modified_base 11: mod_base = OTHER; note = 2'-deoxy-2'-fluorouridine-3'-phosphate
  modified_base 12: mod_base = OTHER; note = 2'-O-methylcytidine-3'-phosphate
  modified_base 13: mod_base = OTHER; note = 2'-O-methylcytidine-3'-phosphate
  modified_base 14: mod_base = OTHER; note = 2'-O-methyluridine-3'-phosphate
  modified_base 15: mod_base = OTHER; note = 2'-O-methylguanosine-3'-phosphate
  modified_base 16: mod_base = OTHER; note = 2'-O-methyladenosine-3'-phosphate
  modified_base 17: mod_base = OTHER; note = 2'-O-methyluridine-3'-phosphate
  modified_base 18: mod_base = OTHER; note = 2'-O-methylcytidine-3'-phosphate
  modified_base 19: mod_base = OTHER; note = 2'-O-methyladenosine-3'-phosphorothioate
  modified_base 20: mod_base = OTHER; note = 2'-O-methyluridine-3'-phosphorothioate
  modified_base 21: mod_base = OTHER; note = 2'-O-methyladenosine
tgactgtatttcctgatcata

SEQ ID NO: 11751 - RNA, 21 nt, synthetic construct
  source 1..21: mol_type = other RNA
  modified_base 1: mod_base = OTHER; note = 2'-O-methyluridine-3'-phosphorothioate
  modified_base 2: mod_base = OTHER; note = 2'-O-methyluridine-3'-phosphorothioate
  modified_base 3: mod_base = OTHER; note = 2'-O-methyluridine-3'-phosphate
  modified_base 4: mod_base = OTHER; note = 2'-O-methyluridine-3'-phosphate
  modified_base 5: mod_base = OTHER; note = 2'-O-methylcytidine-3'-phosphate
  modified_base 6: mod_base = OTHER; note = 2'-O-docosanyl-adenosine-3'-phosphate
  modified_base 7: mod_base = OTHER; note = 2'-deoxy-2'-fluoroguanosine-3'-phosphate
  modified_base 8: mod_base = OTHER; note = 2'-O-methyladenosine-3'-phosphate
  modified_base 9: mod_base = OTHER; note = 2'-deoxy-2'-fluorouridine-3'-phosphate
  modified_base 10: mod_base = OTHER; note = 2'-deoxy-2'-fluoroguanosine-3'-phosphate
  modified_base 11: mod_base = OTHER; note = 2'-deoxy-2'-fluorouridine-3'-phosphate
  modified_base 12: mod_base = OTHER; note = 2'-O-methylguanosine-3'-phosphate
  modified_base 13: mod_base = OTHER; note = 2'-O-methyladenosine-3'-phosphate
  modified_base 14: mod_base = OTHER; note = 2'-O-methylcytidine-3'-phosphate
  modified_base 15: mod_base = OTHER; note = 2'-O-methyluridine-3'-phosphate
  modified_base 16: mod_base = OTHER; note = 2'-O-methylguanosine-3'-phosphate
  modified_base 17: mod_base = OTHER; note = 2'-O-methyluridine-3'-phosphate
  modified_base 18: mod_base = OTHER; note = 2'-O-methyladenosine-3'-phosphate
  modified_base 19: mod_base = OTHER; note = 2'-O-methyluridine-3'-phosphorothioate
  modified_base 20: mod_base = OTHER; note = 2'-O-methyluridine-3'-phosphorothioate
  modified_base 21: mod_base = OTHER; note = 2'-O-methyladenosine
ttttcagatgtgactgtatta

SEQ ID NO: 11752 - RNA, 21 nt, synthetic construct
  source 1..21: mol_type = other RNA
  modified_base 1: mod_base = OTHER; note = 2'-O-methyluridine-3'-phosphorothioate
  modified_base 2: mod_base = OTHER; note = 2'-O-methyluridine-3'-phosphorothioate
  modified_base 3: mod_base = OTHER; note = 2'-O-methyluridine-3'-phosphate
  modified_base 4: mod_base = OTHER; note = 2'-O-methylcytidine-3'-phosphate
  modified_base 5: mod_base = OTHER; note = 2'-O-methyladenosine-3'-phosphate
  modified_base 6: mod_base = OTHER; note = 2'-O-docosanyl-guanosine-3'-phosphate
  modified_base 7: mod_base = OTHER; note = 2'-deoxy-2'-fluoroadenosine-3'-phosphate
  modified_base 8: mod_base = OTHER; note = 2'-O-methyluridine-3'-phosphate
  modified_base 9: mod_base = OTHER; note = 2'-deoxy-2'-fluoroguanosine-3'-phosphate
  modified_base 10: mod_base = OTHER; note = 2'-deoxy-2'-fluorouridine-3'-phosphate
  modified_base 11: mod_base = OTHER; note = 2'-deoxy-2'-fluoroguanosine-3'-phosphate
  modified_base 12: mod_base = OTHER; note = 2'-O-methyladenosine-3'-phosphate
  modified_base 13: mod_base = OTHER; note = 2'-O-methylcytidine-3'-phosphate
  modified_base 14: mod_base = OTHER; note = 2'-O-methyluridine-3'-phosphate
  modified_base 15: mod_base = OTHER; note = 2'-O-methylguanosine-3'-phosphate
  modified_base 16: mod_base = OTHER; note = 2'-O-methyluridine-3'-phosphate
  modified_base 17: mod_base = OTHER; note = 2'-O-methyladenosine-3'-phosphate
  modified_base 18: mod_base = OTHER; note = 2'-O-methyluridine-3'-phosphate
  modified_base 19: mod_base = OTHER; note = 2'-O-methyluridine-3'-phosphorothioate
  modified_base 20: mod_base = OTHER; note = 2'-O-methyluridine-3'-phosphorothioate
  modified_base 21: mod_base = OTHER; note = 2'-O-methyladenosine
tttcagatgtgactgtattta

SEQ ID NO: 11753 - RNA, 21 nt, synthetic construct
  source 1..21: mol_type = other RNA
  modified_base 1: mod_base = OTHER; note = 2'-O-methyluridine-3'-phosphorothioate
  modified_base 2: mod_base = OTHER; note = 2'-O-methyluridine-3'-phosphorothioate
  modified_base 3: mod_base = OTHER; note = 2'-O-methylcytidine-3'-phosphate
  modified_base 4: mod_base = OTHER; note = 2'-O-methyladenosine-3'-phosphate
  modified_base 5: mod_base = OTHER; note = 2'-O-methylguanosine-3'-phosphate
  modified_base 6: mod_base = OTHER; note = 2'-O-docosanyl-adenosine-3'-phosphate
  modified_base 7: mod_base = OTHER; note = 2'-deoxy-2'-fluorouridine-3'-phosphate
  modified_base 8: mod_base = OTHER; note = 2'-O-methylguanosine-3'-phosphate
  modified_base 9: mod_base = OTHER; note = 2'-deoxy-2'-fluorouridine-3'-phosphate
  modified_base 10: mod_base = OTHER; note = 2'-deoxy-2'-fluoroguanosine-3'-phosphate
  modified_base 11: mod_base = OTHER; note = 2'-deoxy-2'-fluoroadenosine-3'-phosphate
  modified_base 12: mod_base = OTHER; note = 2'-O-methylcytidine-3'-phosphate
  modified_base 13: mod_base = OTHER; note = 2'-O-methyluridine-3'-phosphate
  modified_base 14: mod_base = OTHER; note = 2'-O-methylguanosine-3'-phosphate
  modified_base 15: mod_base = OTHER; note = 2'-O-methyluridine-3'-phosphate
  modified_base 16: mod_base = OTHER; note = 2'-O-methyladenosine-3'-phosphate
  modified_base 17: mod_base = OTHER; note = 2'-O-methyluridine-3'-phosphate
  modified_base 18: mod_base = OTHER; note = 2'-O-methyluridine-3'-phosphate
  modified_base 19: mod_base = OTHER; note = 2'-O-methyluridine-3'-phosphorothioate
  modified_base 20: mod_base = OTHER; note = 2'-O-methylcytidine-3'-phosphorothioate
  modified_base 21: mod_base = OTHER; note = 2'-O-methyladenosine
ttcagatgtgactgtatttca

SEQ ID NO: 11754 - RNA, 21 nt, synthetic construct
  source 1..21: mol_type = other RNA
  modified_base 1: mod_base = OTHER; note = 2'-O-methyluridine-3'-phosphorothioate
  modified_base 2: mod_base = OTHER; note = 2'-O-methylcytidine-3'-phosphorothioate
  modified_base 3: mod_base = OTHER; note = 2'-O-methyladenosine-3'-phosphate
  modified_base 4: mod_base = OTHER; note = 2'-O-methylguanosine-3'-phosphate
  modified_base 5: mod_base = OTHER; note = 2'-O-methyladenosine-3'-phosphate
  modified_base 6: mod_base = OTHER; note = 2'-O-docosanyl-uridine-3'-phosphate
  modified_base 7: mod_base = OTHER; note = 2'-deoxy-2'-fluoroguanosine-3'-phosphate
  modified_base 8: mod_base = OTHER; note = 2'-O-methyluridine-3'-phosphate
  modified_base 9: mod_base = OTHER; note = 2'-deoxy-2'-fluoroguanosine-3'-phosphate
  modified_base 10: mod_base = OTHER; note = 2'-deoxy-2'-fluoroadenosine-3'-phosphate
  modified_base 11: mod_base = OTHER; note = 2'-deoxy-2'-fluorocytidine-3'-phosphate
  modified_base 12: mod_base = OTHER; note = 2'-O-methyluridine-3'-phosphate
  modified_base 13: mod_base = OTHER; note = 2'-O-methylguanosine-3'-phosphate
  modified_base 14: mod_base = OTHER; note = 2'-O-methyluridine-3'-phosphate
  modified_base 15: mod_base = OTHER; note = 2'-O-methyladenosine-3'-phosphate
  modified_base 16: mod_base = OTHER; note = 2'-O-methyluridine-3'-phosphate
  modified_base 17: mod_base = OTHER; note = 2'-O-methyluridine-3'-phosphate
  modified_base 18: mod_base = OTHER; note = 2'-O-methyluridine-3'-phosphate
  modified_base 19: mod_base = OTHER; note = 2'-O-methylcytidine-3'-phosphorothioate
  modified_base 20: mod_base = OTHER; note = 2'-O-methylcytidine-3'-phosphorothioate
  modified_base 21: mod_base = OTHER; note = 2'-O-methyladenosine
tcagatgtgactgtatttcca

SEQ ID NO: 11755 - RNA, 21 nt, synthetic construct
  source 1..21: mol_type = other RNA
  modified_base 1: mod_base = OTHER; note = 2'-O-methylcytidine-3'-phosphorothioate
  modified_base 2: mod_base = OTHER; note = 2'-O-methyladenosine-3'-phosphorothioate
  modified_base 3: mod_base = OTHER; note = 2'-O-methylguanosine-3'-phosphate
  modified_base 4: mod_base = OTHER; note = 2'-O-methyladenosine-3'-phosphate
  modified_base 5: mod_base = OTHER; note = 2'-O-methyluridine-3'-phosphate
  modified_base 6: mod_base = OTHER; note = 2'-O-docosanyl-guanosine-3'-phosphate
  modified_base 7: mod_base = OTHER; note = 2'-deoxy-2'-fluorouridine-3'-phosphate
  modified_base 8: mod_base = OTHER; note = 2'-O-methylguanosine-3'-phosphate
  modified_base 9: mod_base = OTHER; note = 2'-deoxy-2'-fluoroadenosine-3'-phosphate
  modified_base 10: mod_base = OTHER; note = 2'-deoxy-2'-fluorocytidine-3'-phosphate
  modified_base 11: mod_base = OTHER; note = 2'-deoxy-2'-fluorouridine-3'-phosphate
  modified_base 12: mod_base = OTHER; note = 2'-O-methylguanosine-3'-phosphate
  modified_base 13: mod_base = OTHER; note = 2'-O-methyluridine-3'-phosphate
  modified_base 14: mod_base = OTHER; note = 2'-O-methyladenosine-3'-phosphate
  modified_base 15: mod_base = OTHER; note = 2'-O-methyluridine-3'-phosphate
  modified_base 16: mod_base = OTHER; note = 2'-O-methyluridine-3'-phosphate
  modified_base 17: mod_base = OTHER; note = 2'-O-methyluridine-3'-phosphate
  modified_base 18: mod_base = OTHER; note = 2'-O-methylcytidine-3'-phosphate
  modified_base 19: mod_base = OTHER; note = 2'-O-methylcytidine-3'-phosphorothioate
  modified_base 20: mod_base = OTHER; note = 2'-O-methyluridine-3'-phosphorothioate
  modified_base 21: mod_base = OTHER; note = 2'-O-methyladenosine
cagatgtgactgtatttccta

SEQ ID NO: 11756 - RNA, 21 nt, synthetic construct
  source 1..21: mol_type = other RNA
  modified_base 1: mod_base = OTHER; note = 2'-O-methyladenosine-3'-phosphorothioate
  modified_base 2: mod_base = OTHER; note = 2'-O-methylguanosine-3'-phosphorothioate
  modified_base 3: mod_base = OTHER; note = 2'-O-methyladenosine-3'-phosphate
  modified_base 4: mod_base = OTHER; note = 2'-O-methyluridine-3'-phosphate
  modified_base 5: mod_base = OTHER; note = 2'-O-methylguanosine-3'-phosphate
  modified_base 6: mod_base = OTHER; note = 2'-O-docosanyl-uridine-3'-phosphate
  modified_base 7: mod_base = OTHER; note = 2'-deoxy-2'-fluoroguanosine-3'-phosphate
  modified_base 8: mod_base = OTHER; note = 2'-O-methyladenosine-3'-phosphate
  modified_base 9: mod_base = OTHER; note = 2'-deoxy-2'-fluorocytidine-3'-phosphate
  modified_base 10: mod_base = OTHER; note = 2'-deoxy-2'-fluorouridine-3'-phosphate
  modified_base 11: mod_base = OTHER; note = 2'-deoxy-2'-fluoroguanosine-3'-phosphate
  modified_base 12: mod_base = OTHER; note = 2'-O-methyluridine-3'-phosphate
  modified_base 13: mod_base = OTHER; note = 2'-O-methyladenosine-3'-phosphate
  modified_base 14: mod_base = OTHER; note = 2'-O-methyluridine-3'-phosphate
  modified_base 15: mod_base = OTHER; note = 2'-O-methyluridine-3'-phosphate
  modified_base 16: mod_base = OTHER; note = 2'-O-methyluridine-3'-phosphate
  modified_base 17: mod_base = OTHER; note = 2'-O-methylcytidine-3'-phosphate
  modified_base 18: mod_base = OTHER; note = 2'-O-methylcytidine-3'-phosphate
  modified_base 19: mod_base = OTHER; note = 2'-O-methyluridine-3'-phosphorothioate
  modified_base 20: mod_base = OTHER; note = 2'-O-methylguanosine-3'-phosphorothioate
  modified_base 21: mod_base = OTHER; note = 2'-O-methyladenosine
agatgtgactgtatttcctga

SEQ ID NO: 11757 - RNA, 21 nt, synthetic construct
  source 1..21: mol_type = other RNA
  modified_base 1: mod_base = OTHER; note = 2'-O-methylguanosine-3'-phosphorothioate
  modified_base 2: mod_base = OTHER; note = 2'-O-methyladenosine-3'-phosphorothioate
  modified_base 3: mod_base = OTHER; note = 2'-O-methyluridine-3'-phosphate
  modified_base 4: mod_base = OTHER; note = 2'-O-methylguanosine-3'-phosphate
  modified_base 5: mod_base = OTHER; note = 2'-O-methyluridine-3'-phosphate
  modified_base 6: mod_base = OTHER; note = 2'-O-docosanyl-guanosine-3'-phosphate
  modified_base 7: mod_base = OTHER; note = 2'-deoxy-2'-fluoroadenosine-3'-phosphate
  modified_base 8: mod_base = OTHER; note = 2'-O-methylcytidine-3'-phosphate
  modified_base 9: mod_base = OTHER; note = 2'-deoxy-2'-fluorouridine-3'-phosphate
  modified_base 10: mod_base = OTHER; note = 2'-deoxy-2'-fluoroguanosine-3'-phosphate
  modified_base 11: mod_base = OTHER; note = 2'-deoxy-2'-fluorouridine-3'-phosphate
  modified_base 12: mod_base = OTHER; note = 2'-O-methyladenosine-3'-phosphate
  modified_base 13: mod_base = OTHER; note = 2'-O-methyluridine-3'-phosphate
  modified_base 14: mod_base = OTHER; note = 2'-O-methyluridine-3'-phosphate
  modified_base 15: mod_base = OTHER; note = 2'-O-methyluridine-3'-phosphate
  modified_base 16: mod_base = OTHER; note = 2'-O-methylcytidine-3'-phosphate
  modified_base 17: mod_base = OTHER; note = 2'-O-methylcytidine-3'-phosphate
  modified_base 18: mod_base = OTHER; note = 2'-O-methyluridine-3'-phosphate
  modified_base 19: mod_base = OTHER; note = 2'-O-methylguanosine-3'-phosphorothioate
  modified_base 20: mod_base = OTHER; note = 2'-O-methyladenosine-3'-phosphorothioate
  modified_base 21: mod_base = OTHER; note = 2'-O-methyladenosine
gatgtgactgtatttcctgaa

SEQ ID NO: 11758 - RNA, 21 nt, synthetic construct
  source 1..21: mol_type = other RNA
  modified_base 1: mod_base = OTHER; note = 2'-O-methyladenosine-3'-phosphorothioate
  modified_base 2: mod_base = OTHER; note = 2'-O-methyluridine-3'-phosphorothioate
  modified_base 3: mod_base = OTHER; note = 2'-O-methylguanosine-3'-phosphate
  modified_base 4: mod_base = OTHER; note = 2'-O-methyluridine-3'-phosphate
  modified_base 5: mod_base = OTHER; note = 2'-O-methylguanosine-3'-phosphate
  modified_base 6: mod_base = OTHER; note = 2'-O-docosanyl-adenosine-3'-phosphate
  modified_base 7: mod_base = OTHER; note = 2'-deoxy-2'-fluorocytidine-3'-phosphate
  modified_base 8: mod_base = OTHER; note = 2'-O-methyluridine-3'-phosphate
  modified_base 9: mod_base = OTHER; note = 2'-deoxy-2'-fluoroguanosine-3'-phosphate
  modified_base 10: mod_base = OTHER; note = 2'-deoxy-2'-fluorouridine-3'-phosphate
  modified_base 11: mod_base = OTHER; note = 2'-deoxy-2'-fluoroadenosine-3'-phosphate
  modified_base 12: mod_base = OTHER; note = 2'-O-methyluridine-3'-phosphate
  modified_base 13: mod_base = OTHER; note = 2'-O-methyluridine-3'-phosphate
  modified_base 14: mod_base = OTHER; note = 2'-O-methyluridine-3'-phosphate
  modified_base 15: mod_base = OTHER; note = 2'-O-methylcytidine-3'-phosphate
  modified_base 16: mod_base = OTHER; note = 2'-O-methylcytidine-3'-phosphate
  modified_base 17: mod_base = OTHER; note = 2'-O-methyluridine-3'-phosphate
  modified_base 18: mod_base = OTHER; note = 2'-O-methylguanosine-3'-phosphate
  modified_base 19: mod_base = OTHER; note = 2'-O-methyladenosine-3'-phosphorothioate
  modified_base 20: mod_base = OTHER; note = 2'-O-methyluridine-3'-phosphorothioate
  modified_base 21: mod_base = OTHER; note = 2'-O-methyladenosine
atgtgactgtatttcctgata

SEQ ID NO: 11759 - RNA, 21 nt, synthetic construct
  source 1..21: mol_type = other RNA
  modified_base 1: mod_base = OTHER; note = 2'-O-methyluridine-3'-phosphorothioate
  modified_base 2: mod_base = OTHER; note = 2'-O-methylguanosine-3'-phosphorothioate
  modified_base 3: mod_base = OTHER; note = 2'-O-methyluridine-3'-phosphate
  modified_base 4: mod_base = OTHER; note = 2'-O-methylguanosine-3'-phosphate
  modified_base 5: mod_base = OTHER; note = 2'-O-methyladenosine-3'-phosphate
  modified_base 6: mod_base = OTHER; note = 2'-O-docosanyl-cytidine-3'-phosphate
  modified_base 7: mod_base = OTHER; note = 2'-deoxy-2'-fluorouridine-3'-phosphate
  modified_base 8: mod_base = OTHER; note = 2'-O-methylguanosine-3'-phosphate
  modified_base 9: mod_base = OTHER; note = 2'-deoxy-2'-fluorouridine-3'-phosphate
  modified_base 10: mod_base = OTHER; note = 2'-deoxy-2'-fluoroadenosine-3'-phosphate
  modified_base 11: mod_base = OTHER; note = 2'-deoxy-2'-fluorouridine-3'-phosphate
  modified_base 12: mod_base = OTHER; note = 2'-O-methyluridine-3'-phosphate
  modified_base 13: mod_base = OTHER; note = 2'-O-methyluridine-3'-phosphate
  modified_base 14: mod_base = OTHER; note = 2'-O-methylcytidine-3'-phosphate
  modified_base 15: mod_base = OTHER; note = 2'-O-methylcytidine-3'-phosphate
  modified_base 16: mod_base = OTHER; note = 2'-O-methyluridine-3'-phosphate
  modified_base 17: mod_base = OTHER; note = 2'-O-methylguanosine-3'-phosphate
  modified_base 18: mod_base = OTHER; note = 2'-O-methyladenosine-3'-phosphate
  modified_base 19: mod_base = OTHER; note = 2'-O-methyluridine-3'-phosphorothioate
  modified_base 20: mod_base = OTHER; note = 2'-O-methylcytidine-3'-phosphorothioate
  modified_base 21: mod_base = OTHER; note = 2'-O-methyladenosine
tgtgactgtatttcctgatca

SEQ ID NO: 11760 - RNA, 21 nt, synthetic construct
  source 1..21: mol_type = other RNA
  modified_base 1: mod_base = OTHER; note = 2'-O-methylguanosine-3'-phosphorothioate
  modified_base 2: mod_base = OTHER; note = 2'-O-methyluridine-3'-phosphorothioate
  modified_base 3: mod_base = OTHER; note = 2'-O-methylguanosine-3'-phosphate
  modified_base 4: mod_base = OTHER; note = 2'-O-methyladenosine-3'-phosphate
  modified_base 5: mod_base = OTHER; note = 2'-O-methylcytidine-3'-phosphate
  modified_base 6: mod_base = OTHER; note = 2'-O-docosanyl-uridine-3'-phosphate
  modified_base 7: mod_base = OTHER; note = 2'-deoxy-2'-fluoroguanosine-3'-phosphate
  modified_base 8: mod_base = OTHER; note = 2'-O-methyluridine-3'-phosphate
  modified_base 9: mod_base = OTHER; note = 2'-deoxy-2'-fluoroadenosine-3'-phosphate
  modified_base 10: mod_base = OTHER; note = 2'-deoxy-2'-fluorouridine-3'-phosphate
  modified_base 11: mod_base = OTHER; note = 2'-deoxy-2'-fluorouridine-3'-phosphate
  modified_base 12: mod_base = OTHER; note = 2'-O-methyluridine-3'-phosphate
  modified_base 13: mod_base = OTHER; note = 2'-O-methylcytidine-3'-phosphate
  modified_base 14: mod_base = OTHER; note = 2'-O-methylcytidine-3'-phosphate
  modified_base 15: mod_base = OTHER; note = 2'-O-methyluridine-3'-phosphate
  modified_base 16: mod_base = OTHER; note = 2'-O-methylguanosine-3'-phosphate
  modified_base 17: mod_base = OTHER; note = 2'-O-methyladenosine-3'-phosphate
  modified_base 18: mod_base = OTHER; note = 2'-O-methyluridine-3'-phosphate
  modified_base 19: mod_base = OTHER; note = 2'-O-methylcytidine-3'-phosphorothioate
  modified_base 20: mod_base = OTHER; note = 2'-O-methyladenosine-3'-phosphorothioate
  modified_base 21: mod_base = OTHER; note = 2'-O-methyladenosine
gtgactgtatttcctgatcaa

SEQ ID NO: 11761 - RNA, 21 nt, synthetic construct
  source 1..21: mol_type = other RNA
  modified_base 1: mod_base = OTHER; note = 2'-O-methylguanosine-3'-phosphorothioate
  modified_base 2: mod_base = OTHER; note = 2'-O-methyladenosine-3'-phosphorothioate
  modified_base 3: mod_base = OTHER; note = 2'-O-methylcytidine-3'-phosphate
  modified_base 4: mod_base = OTHER; note = 2'-O-methyluridine-3'-phosphate
  modified_base 5: mod_base = OTHER; note = 2'-O-methylguanosine-3'-phosphate
  modified_base 6: mod_base = OTHER; note = 2'-O-docosanyl-uridine-3'-phosphate
  modified_base 7: mod_base = OTHER; note = 2'-deoxy-2'-fluoroadenosine-3'-phosphate
  modified_base 8: mod_base = OTHER; note = 2'-O-methyluridine-3'-phosphate
  modified_base 9: mod_base = OTHER; note = 2'-deoxy-2'-fluorouridine-3'-phosphate
  modified_base 10: mod_base = OTHER; note = 2'-deoxy-2'-fluorouridine-3'-phosphate
  modified_base 11: mod_base = OTHER; note = 2'-deoxy-2'-fluorocytidine-3'-phosphate
  modified_base 12: mod_base = OTHER; note = 2'-O-methylcytidine-3'-phosphate
  modified_base 13: mod_base = OTHER; note = 2'-O-methyluridine-3'-phosphate
  modified_base 14: mod_base = OTHER; note = 2'-O-methylguanosine-3'-phosphate
  modified_base 15: mod_base = OTHER; note = 2'-O-methyladenosine-3'-phosphate
  modified_base 16: mod_base = OTHER; note = 2'-O-methyluridine-3'-phosphate
  modified_base 17: mod_base = OTHER; note = 2'-O-methylcytidine-3'-phosphate
  modified_base 18: mod_base = OTHER; note = 2'-O-methyladenosine-3'-phosphate
  modified_base 19: mod_base = OTHER; note = 2'-O-methyluridine-3'-phosphorothioate
  modified_base 20: mod_base = OTHER; note = 2'-O-methyluridine-3'-phosphorothioate
  modified_base 21: mod_base = OTHER; note = 2'-O-methyladenosine
gactgtatttcctgatcatta

SEQ ID NO: 11762 - RNA, 21 nt, synthetic construct
  source 1..21: mol_type = other RNA
  modified_base 1: mod_base = OTHER; note = 2'-O-methyladenosine-3'-phosphorothioate
  modified_base 2: mod_base = OTHER; note = 2'-O-methylcytidine-3'-phosphorothioate
  modified_base 3: mod_base = OTHER; note = 2'-O-methyluridine-3'-phosphate
  modified_base 4: mod_base = OTHER; note = 2'-O-methylguanosine-3'-phosphate
  modified_base 5: mod_base = OTHER; note = 2'-O-methyluridine-3'-phosphate
  modified_base 6: mod_base = OTHER; note = 2'-O-docosanyl-adenosine-3'-phosphate
  modified_base 7: mod_base = OTHER; note = 2'-deoxy-2'-fluorouridine-3'-phosphate
  modified_base 8: mod_base = OTHER; note = 2'-O-methyluridine-3'-phosphate
  modified_base 9: mod_base = OTHER; note = 2'-deoxy-2'-fluorouridine-3'-phosphate
  modified_base 10: mod_base = OTHER; note = 2'-deoxy-2'-fluorocytidine-3'-phosphate
  modified_base 11: mod_base = OTHER; note = 2'-deoxy-2'-fluorocytidine-3'-phosphate
  modified_base 12: mod_base = OTHER; note = 2'-O-methyluridine-3'-phosphate
  modified_base 13: mod_base = OTHER; note = 2'-O-methylguanosine-3'-phosphate
  modified_base 14: mod_base = OTHER; note = 2'-O-methyladenosine-3'-phosphate
  modified_base 15: mod_base = OTHER; note = 2'-O-methyluridine-3'-phosphate
  modified_base 16: mod_base = OTHER; note = 2'-O-methylcytidine-3'-phosphate
  modified_base 17: mod_base = OTHER; note = 2'-O-methyladenosine-3'-phosphate
  modified_base 18: mod_base = OTHER; note = 2'-O-methyluridine-3'-phosphate
  modified_base 19: mod_base = OTHER; note = 2'-O-methyluridine-3'-phosphorothioate
  modified_base 20: mod_base = OTHER; note = 2'-O-methylguanosine-3'-phosphorothioate
  modified_base 21: mod_base = OTHER; note = 2'-O-methyladenosine
actgtatttcctgatcattga

SEQ ID NO: 11763 - RNA, 21 nt, synthetic construct
  source 1..21: mol_type = other RNA
  modified_base 1: mod_base = OTHER; note = 2'-O-methylcytidine-3'-phosphorothioate
  modified_base 2: mod_base = OTHER; note = 2'-O-methyluridine-3'-phosphorothioate
  modified_base 3: mod_base = OTHER; note = 2'-O-methylguanosine-3'-phosphate
  modified_base 4: mod_base = OTHER; note = 2'-O-methyluridine-3'-phosphate
  modified_base 5: mod_base = OTHER; note = 2'-O-methyladenosine-3'-phosphate
  modified_base 6: mod_base = OTHER; note = 2'-O-docosanyl-uridine-3'-phosphate
  modified_base 7: mod_base = OTHER; note = 2'-deoxy-2'-fluorouridine-3'-phosphate
  modified_base 8: mod_base = OTHER; note = 2'-O-methyluridine-3'-phosphate
  modified_base 9: mod_base = OTHER; note = 2'-deoxy-2'-fluorocytidine-3'-phosphate
  modified_base 10: mod_base = OTHER; note = 2'-deoxy-2'-fluorocytidine-3'-phosphate
  modified_base 11: mod_base = OTHER; note = 2'-deoxy-2'-fluorouridine-3'-phosphate
  modified_base 12: mod_base = OTHER; note = 2'-O-methylguanosine-3'-phosphate
  modified_base 13: mod_base = OTHER; note = 2'-O-methyladenosine-3'-phosphate
  modified_base 14: mod_base = OTHER; note = 2'-O-methyluridine-3'-phosphate
  modified_base 15: mod_base = OTHER; note = 2'-O-methylcytidine-3'-phosphate
  modified_base 16: mod_base = OTHER; note = 2'-O-methyladenosine-3'-phosphate
  modified_base 17: mod_base = OTHER; note = 2'-O-methyluridine-3'-phosphate
  modified_base 18: mod_base = OTHER; note = 2'-O-methyluridine-3'-phosphate
  modified_base 19: mod_base = OTHER; note = 2'-O-methylguanosine-3'-phosphorothioate
  modified_base 20: mod_base = OTHER; note = 2'-O-methylguanosine-3'-phosphorothioate
  modified_base 21: mod_base = OTHER; note = 2'-O-methyladenosine
ctgtatttcctgatcattgga

SEQ ID NO: 11764 - RNA, 21 nt, synthetic construct
  source 1..21: mol_type = other RNA
  modified_base 1: mod_base = OTHER; note = 2'-O-methyluridine-3'-phosphorothioate
  modified_base 2: mod_base = OTHER; note = 2'-O-methylguanosine-3'-phosphorothioate
  modified_base 3: mod_base = OTHER; note = 2'-O-methyluridine-3'-phosphate
  modified_base 4: mod_base = OTHER; note = 2'-O-methyladenosine-3'-phosphate
  modified_base 5: mod_base = OTHER; note = 2'-O-methyluridine-3'-phosphate
  modified_base 6: mod_base = OTHER; note = 2'-O-docosanyl-uridine-3'-phosphate
  modified_base 7: mod_base = OTHER; note = 2'-deoxy-2'-fluorouridine-3'-phosphate
  modified_base 8: mod_base = OTHER; note = 2'-O-methylcytidine-3'-phosphate
  modified_base 9: mod_base = OTHER; note = 2'-deoxy-2'-fluorocytidine-3'-phosphate
  modified_base 10: mod_base = OTHER; note = 2'-deoxy-2'-fluorouridine-3'-phosphate
  modified_base 11: mod_base = OTHER; note = 2'-deoxy-2'-fluoroguanosine-3'-phosphate
  modified_base 12: mod_base = OTHER; note = 2'-O-methyladenosine-3'-phosphate
  modified_base 13: mod_base = OTHER; note = 2'-O-methyluridine-3'-phosphate
  modified_base 14: mod_base = OTHER; note = 2'-O-methylcytidine-3'-phosphate
  modified_base 15: mod_base = OTHER; note = 2'-O-methyladenosine-3'-phosphate
  modified_base 16: mod_base = OTHER; note = 2'-O-methyluridine-3'-phosphate
  modified_base 17: mod_base = OTHER; note = 2'-O-methyluridine-3'-phosphate
  modified_base 18: mod_base = OTHER; note = 2'-O-methylguanosine-3'-phosphate
  modified_base 19: mod_base = OTHER; note = 2'-O-methylguanosine-3'-phosphorothioate
  modified_base 20: mod_base = OTHER; note = 2'-O-methyluridine-3'-phosphorothioate
  modified_base 21: mod_base = OTHER; note = 2'-O-methyladenosine
tgtatttcctgatcattggta

SEQ ID NO: 11765 - RNA, 21 nt, synthetic construct
  source 1..21: mol_type = other RNA
  modified_base 1: mod_base = OTHER; note = 2'-O-methylguanosine-3'-phosphorothioate
  modified_base 2: mod_base = OTHER; note = 2'-O-methyluridine-3'-phosphorothioate
  modified_base 3: mod_base = OTHER; note = 2'-O-methyladenosine-3'-phosphate
  modified_base 4: mod_base = OTHER; note = 2'-O-methyluridine-3'-phosphate
  modified_base 5: mod_base = OTHER; note = 2'-O-methyluridine-3'-phosphate
  modified_base 6: mod_base = OTHER; note = 2'-O-docosanyl-uridine-3'-phosphate
  modified_base 7: mod_base = OTHER; note = 2'-deoxy-2'-fluorocytidine-3'-phosphate
  modified_base 8: mod_base = OTHER; note = 2'-O-methylcytidine-3'-phosphate
  modified_base 9: mod_base = OTHER; note = 2'-deoxy-2'-fluorouridine-3'-phosphate
  modified_base 10: mod_base = OTHER; note = 2'-deoxy-2'-fluoroguanosine-3'-phosphate
  modified_base 11: mod_base = OTHER; note = 2'-deoxy-2'-fluoroadenosine-3'-phosphate
  modified_base 12: mod_base = OTHER; note = 2'-O-methyluridine-3'-phosphate
  modified_base 13: mod_base = OTHER; note = 2'-O-methylcytidine-3'-phosphate
  modified_base 14: mod_base = OTHER; note = 2'-O-methyladenosine-3'-phosphate
  modified_base 15: mod_base = OTHER; note = 2'-O-methyluridine-3'-phosphate
  modified_base 16: mod_base = OTHER; note = 2'-O-methyluridine-3'-phosphate
  modified_base 17: mod_base = OTHER; note = 2'-O-methylguanosine-3'-phosphate
  modified_base 18: mod_base = OTHER; note = 2'-O-methylguanosine-3'-phosphate
  modified_base 19: mod_base = OTHER; note = 2'-O-methyluridine-3'-phosphorothioate
  modified_base 20: mod_base = OTHER; note = 2'-O-methylcytidine-3'-phosphorothioate
  modified_base 21: mod_base = OTHER; note = 2'-O-methyladenosine
gtatttcctgatcattggtca

SEQ ID NO: 11766 - RNA, 21 nt, synthetic construct
  source 1..21: mol_type = other RNA
  modified_base 1: mod_base = OTHER; note = 2'-O-methylguanosine-3'-phosphorothioate
  modified_base 2: mod_base = OTHER; note = 2'-O-methylguanosine-3'-phosphorothioate
  modified_base 3: mod_base = OTHER; note = 2'-O-methyladenosine-3'-phosphate
  modified_base 4: mod_base = OTHER; note = 2'-O-methylguanosine-3'-phosphate
  modified_base 5: mod_base = OTHER; note = 2'-O-methyladenosine-3'-phosphate
  modified_base 6: mod_base = OTHER; note = 2'-O-docosanyl-uridine-3'-phosphate
  modified_base 7: mod_base = OTHER; note = 2'-deoxy-2'-fluorouridine-3'-phosphate
  modified_base 8: mod_base = OTHER; note = 2'-O-methyladenosine-3'-phosphate
  modified_base 9: mod_base = OTHER; note = 2'-deoxy-2'-fluorocytidine-3'-phosphate
  modified_base 10: mod_base = OTHER; note = 2'-deoxy-2'-fluorocytidine-3'-phosphate
  modified_base 11: mod_base = OTHER; note = 2'-deoxy-2'-fluorocytidine-3'-phosphate
  modified_base 12: mod_base = OTHER; note = 2'-O-methyluridine-3'-phosphate
  modified_base 13: mod_base = OTHER; note = 2'-O-methyluridine-3'-phosphate
  modified_base 14: mod_base = OTHER; note = 2'-O-methyladenosine-3'-phosphate
  modified_base 15: mod_base = OTHER; note = 2'-O-methyluridine-3'-phosphate
  modified_base 16: mod_base = OTHER; note = 2'-O-methyladenosine-3'-phosphate
  modified_base 17: mod_base = OTHER; note = 2'-O-methylcytidine-3'-phosphate
  modified_base 18: mod_base = OTHER; note = 2'-O-methylcytidine-3'-phosphate
  modified_base 19: mod_base = OTHER; note = 2'-O-methylcytidine-3'-phosphorothioate
  modified_base 20: mod_base = OTHER; note = 2'-O-methyladenosine-3'-phosphorothioate
  modified_base 21: mod_base = OTHER; note = 2'-O-methyladenosine
ggagattacccttatacccaa

SEQ ID NO: 11767 - RNA, 21 nt, synthetic construct
  source 1..21: mol_type = other RNA
  modified_base 1: mod_base = OTHER; note = 2'-O-methylguanosine-3'-phosphorothioate
  modified_base 2: mod_base = OTHER; note = 2'-O-methylcytidine-3'-phosphorothioate
  modified_base 3: mod_base = OTHER; note = 2'-O-methyluridine-3'-phosphate
  modified_base 4: mod_base = OTHER; note = 2'-O-methyladenosine-3'-phosphate
  modified_base 5: mod_base = OTHER; note = 2'-O-methyladenosine-3'-phosphate
  modified_base 6: mod_base = OTHER; note = 2'-O-docosanyl-adenosine-3'-phosphate
  modified_base 7: mod_base = OTHER; note = 2'-deoxy-2'-fluoroadenosine-3'-phosphate
  modified_base 8: mod_base = OTHER; note = 2'-O-methyluridine-3'-phosphate
  modified_base 9: mod_base = OTHER; note = 2'-deoxy-2'-fluorocytidine-3'-phosphate
  modified_base 10: mod_base = OTHER; note = 2'-deoxy-2'-fluorocytidine-3'-phosphate
  modified_base 11: mod_base = OTHER; note = 2'-deoxy-2'-fluoroadenosine-3'-phosphate
  modified_base 12: mod_base = OTHER; note = 2'-O-methyladenosine-3'-phosphate
  modified_base 13: mod_base = OTHER; note = 2'-O-methylcytidine-3'-phosphate
  modified_base 14: mod_base = OTHER; note = 2'-O-methyluridine-3'-phosphate
  modified_base 15: mod_base = OTHER; note = 2'-O-methylguanosine-3'-phosphate
  modified_base 16: mod_base = OTHER; note = 2'-O-methylcytidine-3'-phosphate
  modified_base 17: mod_base = OTHER; note = 2'-O-methyladenosine-3'-phosphate
  modified_base 18: mod_base = OTHER; note = 2'-O-methyladenosine-3'-phosphate
  modified_base 19: mod_base = OTHER; note = 2'-O-methyluridine-3'-phosphorothioate
  modified_base 20: mod_base = OTHER; note = 2'-O-methyluridine-3'-phosphorothioate
  modified_base 21: mod_base = OTHER; note = 2'-O-methyladenosine
gctaaaatccaactgcaatta

SEQ ID NO: 11768 - RNA, 21 nt, synthetic construct
  source 1..21: mol_type = other RNA
  modified_base 1: mod_base = OTHER; note = 2'-O-methylguanosine-3'-phosphorothioate
  modified_base 2: mod_base = OTHER; note = 2'-O-methyluridine-3'-phosphorothioate
  modified_base 3: mod_base = OTHER; note = 2'-O-methylguanosine-3'-phosphate
  modified_base 4: mod_base = OTHER; note = 2'-O-methylcytidine-3'-phosphate
  modified_base 5: mod_base = OTHER; note = 2'-O-methylguanosine-3'-phosphate
  modified_base 6: mod_base = OTHER; note = 2'-O-docosanyl-guanosine-3'-phosphate
  modified_base 7: mod_base = OTHER; note = 2'-deoxy-2'-fluoroguanosine-3'-phosphate
  modified_base 8: mod_base = OTHER; note = 2'-O-methylcytidine-3'-phosphate
  modified_base 9: mod_base = OTHER; note = 2'-deoxy-2'-fluorouridine-3'-phosphate
  modified_base 10: mod_base = OTHER; note = 2'-deoxy-2'-fluoroadenosine-3'-phosphate
  modified_base 11: mod_base = OTHER; note = 2'-deoxy-2'-fluoroadenosine-3'-phosphate
  modified_base 12: mod_base = OTHER; note = 2'-O-methyladenosine-3'-phosphate
  modified_base 13: mod_base = OTHER; note = 2'-O-methyladenosine-3'-phosphate
  modified_base 14: mod_base = OTHER; note = 2'-O-methyluridine-3'-phosphate
  modified_base 15: mod_base = OTHER; note = 2'-O-methylcytidine-3'-phosphate
  modified_base 16: mod_base = OTHER; note = 2'-O-methylcytidine-3'-phosphate
  modified_base 17: mod_base = OTHER; note = 2'-O-methyladenosine-3'-phosphate
  modified_base 18: mod_base = OTHER; note = 2'-O-methyladenosine-3'-phosphate
  modified_base 19: mod_base = OTHER; note = 2'-O-methylcytidine-3'-phosphorothioate
  modified_base 20: mod_base = OTHER; note = 2'-O-methyluridine-3'-phosphorothioate
  modified_base 21: mod_base = OTHER; note = 2'-O-methyladenosine
gtgcgggctaaaatccaacta

SEQ ID NO: 11769 - RNA, 21 nt, synthetic construct
  source 1..21: mol_type = other RNA
  modified_base 1: mod_base = OTHER; note = 2'-O-methyluridine-3'-phosphorothioate
  modified_base 2: mod_base = OTHER; note = 2'-O-methylguanosine-3'-phosphorothioate
  modified_base 3: mod_base = OTHER; note = 2'-O-methylcytidine-3'-phosphate
  modified_base 4: mod_base = OTHER; note = 2'-O-methylguanosine-3'-phosphate
  modified_base 5: mod_base = OTHER; note = 2'-O-methylguanosine-3'-phosphate
  modified_base 6: mod_base = OTHER; note = 2'-O-docosanyl-guanosine-3'-phosphate
  modified_base 7: mod_base = OTHER; note = 2'-deoxy-2'-fluorocytidine-3'-phosphate
  modified_base 8: mod_base = OTHER; note = 2'-O-methyluridine-3'-phosphate
  modified_base 9: mod_base = OTHER; note = 2'-deoxy-2'-fluoroadenosine-3'-phosphate
  modified_base 10: mod_base = OTHER; note = 2'-deoxy-2'-fluoroadenosine-3'-phosphate
  modified_base 11: mod_base = OTHER; note = 2'-deoxy-2'-fluoroadenosine-3'-phosphate
  modified_base 12: mod_base = OTHER; note = 2'-O-methyladenosine-3'-phosphate
  modified_base 13: mod_base = OTHER; note = 2'-O-methyluridine-3'-phosphate
  modified_base 14: mod_base = OTHER; note = 2'-O-methylcytidine-3'-phosphate
  modified_base 15: mod_base = OTHER; note = 2'-O-methylcytidine-3'-phosphate
  modified_base 16: mod_base = OTHER; note = 2'-O-methyladenosine-3'-phosphate
  modified_base 17: mod_base = OTHER; note = 2'-O-methyladenosine-3'-phosphate
  modified_base 18: mod_base = OTHER; note = 2'-O-methylcytidine-3'-phosphate
  modified_base 19: mod_base = OTHER; note = 2'-O-methyluridine-3'-phosphorothioate
  modified_base 20: mod_base = OTHER; note = 2'-O-methylguanosine-3'-phosphorothioate
  modified_base 21: mod_base = OTHER; note = 2'-O-methyladenosine
tgcgggctaaaatccaactga

SEQ ID NO: 11770 - RNA, 21 nt, synthetic construct
  source 1..21: mol_type = other RNA
  modified_base 1: mod_base = OTHER; note = 2'-O-methylguanosine-3'-phosphorothioate
  modified_base 2: mod_base = OTHER; note = 2'-O-methylcytidine-3'-phosphorothioate
  modified_base 3: mod_base = OTHER; note = 2'-O-methylguanosine-3'-phosphate
  modified_base 4: mod_base = OTHER; note = 2'-O-methylguanosine-3'-phosphate
  modified_base 5: mod_base = OTHER; note = 2'-O-methylguanosine-3'-phosphate
  modified_base 6: mod_base = OTHER; note = 2'-O-docosanyl-cytidine-3'-phosphate
  modified_base 7: mod_base = OTHER; note = 2'-deoxy-2'-fluorouridine-3'-phosphate
  modified_base 8: mod_base = OTHER; note = 2'-O-methyladenosine-3'-phosphate
  modified_base 9: mod_base = OTHER; note = 2'-deoxy-2'-fluoroadenosine-3'-phosphate
  modified_base 10: mod_base = OTHER; note = 2'-deoxy-2'-fluoroadenosine-3'-phosphate
  modified_base 11: mod_base = OTHER; note = 2'-deoxy-2'-fluoroadenosine-3'-phosphate
  modified_base 12: mod_base = OTHER; note = 2'-O-methyluridine-3'-phosphate
  modified_base 13: mod_base = OTHER; note = 2'-O-methylcytidine-3'-phosphate
  modified_base 14: mod_base = OTHER; note = 2'-O-methylcytidine-3'-phosphate
  modified_base 15: mod_base = OTHER; note = 2'-O-methyladenosine-3'-phosphate
  modified_base 16: mod_base = OTHER; note = 2'-O-methyladenosine-3'-phosphate
  modified_base 17: mod_base = OTHER; note = 2'-O-methylcytidine-3'-phosphate
  modified_base 18: mod_base = OTHER; note = 2'-O-methyluridine-3'-phosphate
  modified_base 19: mod_base = OTHER; note = 2'-O-methylguanosine-3'-phosphorothioate
  modified_base 20: mod_base = OTHER; note = 2'-O-methylcytidine-3'-phosphorothioate
  modified_base 21: mod_base = OTHER; note = 2'-O-methyladenosine
gcgggctaaaatccaactgca

SEQ ID NO: 11771 - RNA, 21 nt, synthetic construct
  source 1..21: mol_type = other RNA
  modified_base 1: mod_base = OTHER; note = 2'-O-methylcytidine-3'-phosphorothioate
  modified_base 2: mod_base = OTHER; note = 2'-O-methylguanosine-3'-phosphorothioate
  modified_base 3: mod_base = OTHER; note = 2'-O-methylguanosine-3'-phosphate
  modified_base 4: mod_base = OTHER; note = 2'-O-methylguanosine-3'-phosphate
  modified_base 5: mod_base = OTHER; note = 2'-O-methylcytidine-3'-phosphate
  modified_base 6: mod_base = OTHER; note = 2'-O-docosanyl-uridine-3'-phosphate
  modified_base 7: mod_base = OTHER; note = 2'-deoxy-2'-fluoroadenosine-3'-phosphate
  modified_base 8: mod_base = OTHER; note = 2'-O-methyladenosine-3'-phosphate
  modified_base 9: mod_base = OTHER; note = 2'-deoxy-2'-fluoroadenosine-3'-phosphate
  modified_base 10: mod_base = OTHER; note = 2'-deoxy-2'-fluoroadenosine-3'-phosphate
  modified_base 11: mod_base = OTHER; note = 2'-deoxy-2'-fluorouridine-3'-phosphate
  modified_base 12: mod_base = OTHER; note = 2'-O-methylcytidine-3'-phosphate
  modified_base 13: mod_base = OTHER; note = 2'-O-methylcytidine-3'-phosphate
  modified_base 14: mod_base = OTHER; note = 2'-O-methyladenosine-3'-phosphate
  modified_base 15: mod_base = OTHER; note = 2'-O-methyladenosine-3'-phosphate
  modified_base 16: mod_base = OTHER; note = 2'-O-methylcytidine-3'-phosphate
  modified_base 17: mod_base = OTHER; note = 2'-O-methyluridine-3'-phosphate
  modified_base 18: mod_base = OTHER; note = 2'-O-methylguanosine-3'-phosphate
  modified_base 19: mod_base = OTHER; note = 2'-O-methylcytidine-3'-phosphorothioate
  modified_base 20: mod_base = OTHER; note = 2'-O-methyladenosine-3'-phosphorothioate
  modified_base 21: mod_base = OTHER; note = 2'-O-methyladenosine
cgggctaaaatccaactgcaa

SEQ ID NO: 11772 - RNA, 21 nt, synthetic construct
  source 1..21: mol_type = other RNA
  modified_base 1: mod_base = OTHER; note = 2'-O-methylguanosine-3'-phosphorothioate
  modified_base 2: mod_base = OTHER; note = 2'-O-methylguanosine-3'-phosphorothioate
  modified_base 3: mod_base = OTHER; note = 2'-O-methylguanosine-3'-phosphate
  modified_base 4: mod_base = OTHER; note = 2'-O-methylcytidine-3'-phosphate
  modified_base 5: mod_base = OTHER; note = 2'-O-methyluridine-3'-phosphate
  modified_base 6: mod_base = OTHER; note = 2'-O-docosanyl-adenosine-3'-phosphate
  modified_base 7: mod_base = OTHER; note = 2'-deoxy-2'-fluoroadenosine-3'-phosphate
  modified_base 8: mod_base = OTHER; note = 2'-O-methyladenosine-3'-phosphate
  modified_base 9: mod_base = OTHER; note = 2'-deoxy-2'-fluoroadenosine-3'-phosphate
  modified_base 10: mod_base = OTHER; note = 2'-deoxy-2'-fluorouridine-3'-phosphate
  modified_base 11: mod_base = OTHER; note = 2'-deoxy-2'-fluorocytidine-3'-phosphate
  modified_base 12: mod_base = OTHER; note = 2'-O-methylcytidine-3'-phosphate
  modified_base 13: mod_base = OTHER; note = 2'-O-methyladenosine-3'-phosphate
  modified_base 14: mod_base = OTHER; note = 2'-O-methyladenosine-3'-phosphate
  modified_base 15: mod_base = OTHER; note = 2'-O-methylcytidine-3'-phosphate
  modified_base 16: mod_base = OTHER; note = 2'-O-methyluridine-3'-phosphate
  modified_base 17: mod_base = OTHER; note = 2'-O-methylguanosine-3'-phosphate
  modified_base 18: mod_base = OTHER; note = 2'-O-methylcytidine-3'-phosphate
  modified_base 19: mod_base = OTHER; note = 2'-O-methyladenosine-3'-phosphorothioate
  modified_base 20: mod_base = OTHER; note = 2'-O-methyladenosine-3'-phosphorothioate
  modified_base 21: mod_base = OTHER; note = 2'-O-methyladenosine
gggctaaaatccaactgcaaa

SEQ ID NO: 11773 - RNA, 21 nt, synthetic construct
  source 1..21: mol_type = other RNA
  modified_base 1: mod_base = OTHER; note = 2'-O-methylguanosine-3'-phosphorothioate
  modified_base 2: mod_base = OTHER; note = 2'-O-methylguanosine-3'-phosphorothioate
  modified_base 3: mod_base = OTHER; note = 2'-O-methylcytidine-3'-phosphate
  modified_base 4: mod_base = OTHER; note = 2'-O-methyluridine-3'-phosphate
  modified_base 5: mod_base = OTHER; note = 2'-O-methyladenosine-3'-phosphate
  modified_base 6: mod_base = OTHER; note = 2'-O-docosanyl-adenosine-3'-phosphate
  modified_base 7: mod_base = OTHER; note = 2'-deoxy-2'-fluoroadenosine-3'-phosphate
  modified_base 8: mod_base = OTHER; note = 2'-O-methyladenosine-3'-phosphate
  modified_base 9: mod_base = OTHER; note = 2'-deoxy-2'-fluorouridine-3'-phosphate
  modified_base 10: mod_base = OTHER; note = 2'-deoxy-2'-fluorocytidine-3'-phosphate
  modified_base 11: mod_base = OTHER; note = 2'-deoxy-2'-fluorocytidine-3'-phosphate
  modified_base 12: mod_base = OTHER; note = 2'-O-methyladenosine-3'-phosphate
  modified_base 13: mod_base = OTHER; note = 2'-O-methyladenosine-3'-phosphate
  modified_base 14: mod_base = OTHER; note = 2'-O-methylcytidine-3'-phosphate
  modified_base 15: mod_base = OTHER; note = 2'-O-methyluridine-3'-phosphate
  modified_base 16: mod_base = OTHER; note = 2'-O-methylguanosine-3'-phosphate
  modified_base 17: mod_base = OTHER; note = 2'-O-methylcytidine-3'-phosphate
  modified_base 18: mod_base = OTHER; note = 2'-O-methyladenosine-3'-phosphate
  modified_base 19: mod_base = OTHER; note = 2'-O-methyladenosine-3'-phosphorothioate
  modified_base 20: mod_base = OTHER; note = 2'-O-methyluridine-3'-phosphorothioate
  modified_base 21: mod_base = OTHER; note = 2'-O-methyladenosine
ggctaaaatccaactgcaata

SEQ ID NO: 11774 - RNA, 21 nt, synthetic construct
  source 1..21: mol_type = other RNA
  modified_base 1: mod_base = OTHER; note = 2'-O-methylcytidine-3'-phosphorothioate
  modified_base 2: mod_base = OTHER; note = 2'-O-methyluridine-3'-phosphorothioate
  modified_base 3: mod_base = OTHER; note = 2'-O-methyladenosine-3'-phosphate
  modified_base 4: mod_base = OTHER; note = 2'-O-methyladenosine-3'-phosphate
  modified_base 5: mod_base = OTHER; note = 2'-O-methyladenosine-3'-phosphate
  modified_base 6: mod_base = OTHER; note = 2'-O-docosanyl-adenosine-3'-phosphate
  modified_base 7: mod_base = OTHER; note = 2'-deoxy-2'-fluorouridine-3'-phosphate
  modified_base 8: mod_base = OTHER; note = 2'-O-methylcytidine-3'-phosphate
  modified_base 9: mod_base = OTHER; note = 2'-deoxy-2'-fluorocytidine-3'-phosphate
  modified_base 10: mod_base = OTHER; note = 2'-deoxy-2'-fluoroadenosine-3'-phosphate
  modified_base 11: mod_base = OTHER; note = 2'-deoxy-2'-fluoroadenosine-3'-phosphate
  modified_base 12: mod_base = OTHER; note = 2'-O-methylcytidine-3'-phosphate
  modified_base 13: mod_base = OTHER; note = 2'-O-methyluridine-3'-phosphate
  modified_base 14: mod_base = OTHER; note = 2'-O-methylguanosine-3'-phosphate
  modified_base 15: mod_base = OTHER; note = 2'-O-methylcytidine-3'-phosphate
  modified_base 16: mod_base = OTHER; note = 2'-O-methyladenosine-3'-phosphate
  modified_base 17: mod_base = OTHER; note = 2'-O-methyladenosine-3'-phosphate
  modified_base 18: mod_base = OTHER; note = 2'-O-methyluridine-3'-phosphate
  modified_base 19: mod_base = OTHER; note = 2'-O-methyluridine-3'-phosphorothioate
  modified_base 20: mod_base = OTHER; note = 2'-O-methylguanosine-3'-phosphorothioate
  modified_base 21: mod_base = OTHER; note = 2'-O-methyladenosine
ctaaaatccaactgcaattga

SEQ ID NO: 11775 - RNA, 21 nt, synthetic construct
  source 1..21: mol_type = other RNA
  modified_base 1: mod_base = OTHER; note = 2'-O-methyluridine-3'-phosphorothioate
  modified_base 2: mod_base = OTHER; note = 2'-O-methyladenosine-3'-phosphorothioate
  modified_base 3: mod_base = OTHER; note = 2'-O-methyladenosine-3'-phosphate
  modified_base 4: mod_base = OTHER; note = 2'-O-methyladenosine-3'-phosphate
  modified_base 5: mod_base = OTHER; note = 2'-O-methyladenosine-3'-phosphate
  modified_base 6: mod_base = OTHER; note = 2'-O-docosanyl-uridine-3'-phosphate
  modified_base 7: mod_base = OTHER; note = 2'-deoxy-2'-fluorocytidine-3'-phosphate
  modified_base 8: mod_base = OTHER; note = 2'-O-methylcytidine-3'-phosphate
  modified_base 9: mod_base = OTHER; note = 2'-deoxy-2'-fluoroadenosine-3'-phosphate
  modified_base 10: mod_base = OTHER; note = 2'-deoxy-2'-fluoroadenosine-3'-phosphate
  modified_base 11: mod_base = OTHER; note = 2'-deoxy-2'-fluorocytidine-3'-phosphate
  modified_base 12: mod_base = OTHER; note = 2'-O-methyluridine-3'-phosphate
  modified_base 13: mod_base = OTHER; note = 2'-O-methylguanosine-3'-phosphate
  modified_base 14: mod_base = OTHER; note = 2'-O-methylcytidine-3'-phosphate
  modified_base 15: mod_base = OTHER; note = 2'-O-methyladenosine-3'-phosphate
  modified_base 16: mod_base = OTHER; note = 2'-O-methyladenosine-3'-phosphate
  modified_base 17: mod_base = OTHER; note = 2'-O-methyluridine-3'-phosphate
  modified_base 18: mod_base = OTHER; note = 2'-O-methyluridine-3'-phosphate
  modified_base 19: mod_base = OTHER; note = 2'-O-methylguanosine-3'-phosphorothioate
  modified_base 20: mod_base = OTHER; note = 2'-O-methylguanosine-3'-phosphorothioate
  modified_base 21: mod_base = OTHER; note = 2'-O-methyladenosine
taaaatccaactgcaattgga

SEQ ID NO: 11776 - RNA, 21 nt, synthetic construct
  source 1..21: mol_type = other RNA
  modified_base 1: mod_base = OTHER; note = 2'-O-methyladenosine-3'-phosphorothioate
  modified_base 2: mod_base = OTHER; note = 2'-O-methyladenosine-3'-phosphorothioate
  modified_base 3: mod_base = OTHER; note = 2'-O-methyladenosine-3'-phosphate
  modified_base 4: mod_base = OTHER; note = 2'-O-methyladenosine-3'-phosphate
  modified_base 5: mod_base = OTHER; note = 2'-O-methyluridine-3'-phosphate
  modified_base 6: mod_base = OTHER; note = 2'-O-docosanyl-cytidine-3'-phosphate
  modified_base 7: mod_base = OTHER; note = 2'-deoxy-2'-fluorocytidine-3'-phosphate
  modified_base 8: mod_base = OTHER; note = 2'-O-methyladenosine-3'-phosphate
  modified_base 9: mod_base = OTHER; note = 2'-deoxy-2'-fluoroadenosine-3'-phosphate
  modified_base 10: mod_base = OTHER; note = 2'-deoxy-2'-fluorocytidine-3'-phosphate
  modified_base 11: mod_base = OTHER; note = 2'-deoxy-2'-fluorouridine-3'-phosphate
  modified_base 12: mod_base = OTHER; note = 2'-O-methylguanosine-3'-phosphate
  modified_base 13: mod_base = OTHER; note = 2'-O-methylcytidine-3'-phosphate
  modified_base 14: mod_base = OTHER; note = 2'-O-methyladenosine-3'-phosphate
  modified_base 15: mod_base = OTHER; note = 2'-O-methyladenosine-3'-phosphate
  modified_base 16: mod_base = OTHER; note = 2'-O-methyluridine-3'-phosphate
  modified_base 17: mod_base = OTHER; note = 2'-O-methyluridine-3'-phosphate
  modified_base 18: mod_base = OTHER; note = 2'-O-methylguanosine-3'-phosphate
  modified_base 19: mod_base = OTHER; note = 2'-O-methylguanosine-3'-phosphorothioate
  modified_base 20: mod_base = OTHER; note = 2'-O-methylcytidine-3'-phosphorothioate
  modified_base 21: mod_base = OTHER; note = 2'-O-methyladenosine
aaaatccaactgcaattggca

SEQ ID NO: 11777 - RNA, 21 nt, synthetic construct
  source 1..21: mol_type = other RNA
  modified_base 1: mod_base = OTHER; note = 2'-O-methyladenosine-3'-phosphorothioate
  modified_base 2: mod_base = OTHER; note = 2'-O-methyladenosine-3'-phosphorothioate
  modified_base 3: mod_base = OTHER; note = 2'-O-methyladenosine-3'-phosphate
  modified_base 4: mod_base = OTHER; note = 2'-O-methyluridine-3'-phosphate
  modified_base 5: mod_base = OTHER; note = 2'-O-methylcytidine-3'-phosphate
  modified_base 6: mod_base = OTHER; note = 2'-O-docosanyl-cytidine-3'-phosphate
  modified_base 7: mod_base = OTHER; note = 2'-deoxy-2'-fluoroadenosine-3'-phosphate
  modified_base 8: mod_base = OTHER; note = 2'-O-methyladenosine-3'-phosphate
  modified_base 9: mod_base = OTHER; note = 2'-deoxy-2'-fluorocytidine-3'-phosphate
  modified_base 10: mod_base = OTHER; note = 2'-deoxy-2'-fluorouridine-3'-phosphate
  modified_base 11: mod_base = OTHER; note = 2'-deoxy-2'-fluoroguanosine-3'-phosphate
  modified_base 12: mod_base = OTHER; note = 2'-O-methylcytidine-3'-phosphate
  modified_base 13: mod_base = OTHER; note = 2'-O-methyladenosine-3'-phosphate
  modified_base 14: mod_base = OTHER; note = 2'-O-methyladenosine-3'-phosphate
  modified_base 15: mod_base = OTHER; note = 2'-O-methyluridine-3'-phosphate
  modified_base 16: mod_base = OTHER; note = 2'-O-methyluridine-3'-phosphate
  modified_base 17: mod_base = OTHER; note = 2'-O-methylguanosine-3'-phosphate
  modified_base 18: mod_base = OTHER; note = 2'-O-methylguanosine-3'-phosphate
  modified_base 19: mod_base = OTHER; note = 2'-O-methylcytidine-3'-phosphorothioate
  modified_base 20: mod_base = OTHER; note = 2'-O-methyluridine-3'-phosphorothioate
  modified_base 21: mod_base = OTHER; note = 2'-O-methyladenosine
aaatccaactgcaattggcta

SEQ ID NO: 11778 - RNA, 21 nt, synthetic construct
  source 1..21: mol_type = other RNA
  modified_base 1: mod_base = OTHER; note = 2'-O-methyladenosine-3'-phosphorothioate
  modified_base 2: mod_base = OTHER; note = 2'-O-methyladenosine-3'-phosphorothioate
  modified_base 3: mod_base = OTHER; note = 2'-O-methyluridine-3'-phosphate
  modified_base 4: mod_base = OTHER; note = 2'-O-methylcytidine-3'-phosphate
  modified_base 5: mod_base = OTHER; note = 2'-O-methylcytidine-3'-phosphate
  modified_base 6: mod_base = OTHER; note = 2'-O-docosanyl-adenosine-3'-phosphate
  modified_base 7: mod_base = OTHER; note = 2'-deoxy-2'-fluoroadenosine-3'-phosphate
  modified_base 8: mod_base = OTHER; note = 2'-O-methylcytidine-3'-phosphate
  modified_base 9: mod_base = OTHER; note = 2'-deoxy-2'-fluorouridine-3'-phosphate
  modified_base 10: mod_base = OTHER; note = 2'-deoxy-2'-fluoroguanosine-3'-phosphate
  modified_base 11: mod_base = OTHER; note = 2'-deoxy-2'-fluorocytidine-3'-phosphate
  modified_base 12: mod_base = OTHER; note = 2'-O-methyladenosine-3'-phosphate
  modified_base 13: mod_base = OTHER; note = 2'-O-methyladenosine-3'-phosphate
  modified_base 14: mod_base = OTHER; note = 2'-O-methyluridine-3'-phosphate
  modified_base 15: mod_base = OTHER; note = 2'-O-methyluridine-3'-phosphate
  modified_base 16: mod_base = OTHER; note = 2'-O-methylguanosine-3'-phosphate
  modified_base 17: mod_base = OTHER; note = 2'-O-methylguanosine-3'-phosphate
  modified_base 18: mod_base = OTHER; note = 2'-O-methylcytidine-3'-phosphate
  modified_base 19: mod_base = OTHER; note = 2'-O-methyluridine-3'-phosphorothioate
  modified_base 20: mod_base = OTHER; note = 2'-O-methylcytidine-3'-phosphorothioate
  modified_base 21: mod_base = OTHER; note = 2'-O-methyladenosine
aatccaactgcaattggctca

SEQ ID NO: 11779 - RNA, 21 nt, synthetic construct
  source 1..21: mol_type = other RNA
  modified_base 1: mod_base = OTHER; note = 2'-O-methyladenosine-3'-phosphorothioate
  modified_base 2: mod_base = OTHER; note = 2'-O-methyluridine-3'-phosphorothioate
  modified_base 3: mod_base = OTHER; note = 2'-O-methylcytidine-3'-phosphate
  modified_base 4: mod_base = OTHER; note = 2'-O-methylcytidine-3'-phosphate
  modified_base 5: mod_base = OTHER; note = 2'-O-methyladenosine-3'-phosphate
  modified_base 6: mod_base = OTHER; note = 2'-O-docosanyl-adenosine-3'-phosphate
  modified_base 7: mod_base = OTHER; note = 2'-deoxy-2'-fluorocytidine-3'-phosphate
  modified_base 8: mod_base = OTHER; note = 2'-O-methyluridine-3'-phosphate
  modified_base 9: mod_base = OTHER; note = 2'-deoxy-2'-fluoroguanosine-3'-phosphate
  modified_base 10: mod_base = OTHER; note = 2'-deoxy-2'-fluorocytidine-3'-phosphate
  modified_base 11: mod_base = OTHER; note = 2'-deoxy-2'-fluoroadenosine-3'-phosphate
  modified_base 12: mod_base = OTHER; note = 2'-O-methyladenosine-3'-phosphate
  modified_base 13: mod_base = OTHER; note = 2'-O-methyluridine-3'-phosphate
  modified_base 14: mod_base = OTHER; note = 2'-O-methyluridine-3'-phosphate
  modified_base 15: mod_base = OTHER; note = 2'-O-methylguanosine-3'-phosphate
  modified_base 16: mod_base = OTHER; note = 2'-O-methylguanosine-3'-phosphate
  modified_base 17: mod_base = OTHER; note = 2'-O-methylcytidine-3'-phosphate
  modified_base 18: mod_base = OTHER; note = 2'-O-methyluridine-3'-phosphate
  modified_base 19: mod_base = OTHER; note = 2'-O-methylcytidine-3'-phosphorothioate
  modified_base 20: mod_base = OTHER; note = 2'-O-methylcytidine-3'-phosphorothioate
  modified_base 21: mod_base = OTHER; note = 2'-O-methyladenosine
atccaactgcaattggctcca

SEQ ID NO: 11780 - RNA, 21 nt, synthetic construct
  source 1..21: mol_type = other RNA
  modified_base 1: mod_base = OTHER; note = 2'-O-methyluridine-3'-phosphorothioate
  modified_base 2: mod_base = OTHER; note = 2'-O-methylcytidine-3'-phosphorothioate
  modified_base 3: mod_base = OTHER; note = 2'-O-methylcytidine-3'-phosphate
  modified_base 4: mod_base = OTHER; note = 2'-O-methyladenosine-3'-phosphate
  modified_base 5: mod_base = OTHER; note = 2'-O-methyladenosine-3'-phosphate
  modified_base 6: mod_base = OTHER; note = 2'-O-docosanyl-cytidine-3'-phosphate
  modified_base 7: mod_base = OTHER; note = 2'-deoxy-2'-fluorouridine-3'-phosphate
  modified_base 8: mod_base = OTHER; note = 2'-O-methylguanosine-3'-phosphate
  modified_base 9: mod_base = OTHER; note = 2'-deoxy-2'-fluorocytidine-3'-phosphate
  modified_base 10: mod_base = OTHER; note = 2'-deoxy-2'-fluoroadenosine-3'-phosphate
  modified_base 11: mod_base = OTHER; note = 2'-deoxy-2'-fluoroadenosine-3'-phosphate
  modified_base 12: mod_base = OTHER; note = 2'-O-methyluridine-3'-phosphate
  modified_base 13: mod_base = OTHER; note = 2'-O-methyluridine-3'-phosphate
  modified_base 14: mod_base = OTHER; note = 2'-O-methylguanosine-3'-phosphate
  modified_base 15: mod_base = OTHER; note = 2'-O-methylguanosine-3'-phosphate
  modified_base 16: mod_base = OTHER; note = 2'-O-methylcytidine-3'-phosphate
  modified_base 17: mod_base = OTHER; note = 2'-O-methyluridine-3'-phosphate
  modified_base 18: mod_base = OTHER; note = 2'-O-methylcytidine-3'-phosphate
  modified_base 19: mod_base = OTHER; note = 2'-O-methylcytidine-3'-phosphorothioate
  modified_base 20: mod_base = OTHER; note = 2'-O-methylcytidine-3'-phosphorothioate
  modified_base 21: mod_base = OTHER; note = 2'-O-methyladenosine
tccaactgcaattggctccca

SEQ ID NO: 11781 - RNA, 21 nt, synthetic construct
  source 1..21: mol_type = other RNA
  modified_base 1: mod_base = OTHER; note = 2'-O-methylguanosine-3'-phosphorothioate
  modified_base 2: mod_base = OTHER; note = 2'-O-methyladenosine-3'-phosphorothioate
  modified_base 3: mod_base = OTHER; note = 2'-O-methylguanosine-3'-phosphate
  modified_base 4: mod_base = OTHER; note = 2'-O-methyladenosine-3'-phosphate
  modified_base 5: mod_base = OTHER; note = 2'-O-methyladenosine-3'-phosphate
  modified_base 6: mod_base = OTHER; note = 2'-O-docosanyl-guanosine-3'-phosphate
  modified_base 7: mod_base = OTHER; note = 2'-deoxy-2'-fluorocytidine-3'-phosphate
  modified_base 8: mod_base = OTHER; note = 2'-O-methyladenosine-3'-phosphate
  modified_base 9: mod_base = OTHER; note = 2'-deoxy-2'-fluorouridine-3'-phosphate
  modified_base 10: mod_base = OTHER; note = 2'-deoxy-2'-fluorocytidine-3'-phosphate
  modified_base 11: mod_base = OTHER; note = 2'-deoxy-2'-fluorouridine-3'-phosphate
  modified_base 12: mod_base = OTHER; note = 2'-O-methyluridine-3'-phosphate
  modified_base 13: mod_base = OTHER; note = 2'-O-methyladenosine-3'-phosphate
  modified_base 14: mod_base = OTHER; note = 2'-O-methyluridine-3'-phosphate
  modified_base 15: mod_base = OTHER; note = 2'-O-methyluridine-3'-phosphate
  modified_base 16: mod_base = OTHER; note = 2'-O-methylguanosine-3'-phosphate
  modified_base 17: mod_base = OTHER; note = 2'-O-methylguanosine-3'-phosphate
  modified_base 18: mod_base = OTHER; note = 2'-O-methylcytidine-3'-phosphate
  modified_base 19: mod_base = OTHER; note = 2'-O-methyluridine-3'-phosphorothioate
  modified_base 20: mod_base = OTHER; note = 2'-O-methyluridine-3'-phosphorothioate
  modified_base 21: mod_base = OTHER; note = 2'-O-methyladenosine
gagaagcatcttattggctta

SEQ ID NO: 11782 - RNA, 21 nt, synthetic construct
  source 1..21: mol_type = other RNA
  modified_base 1: mod_base = OTHER; note = 2'-O-methyladenosine-3'-phosphorothioate
  modified_base 2: mod_base = OTHER; note = 2'-O-methyladenosine-3'-phosphorothioate
  modified_base 3: mod_base = OTHER; note = 2'-O-methylguanosine-3'-phosphate
  modified_base 4: mod_base = OTHER; note = 2'-O-methylcytidine-3'-phosphate
  modified_base 5: mod_base = OTHER; note = 2'-O-methyladenosine-3'-phosphate
  modified_base 6: mod_base = OTHER; note = 2'-O-docosanyl-uridine-3'-phosphate
  modified_base 7: mod_base = OTHER; note = 2'-deoxy-2'-fluorocytidine-3'-phosphate
  modified_base 8: mod_base = OTHER; note = 2'-O-methyluridine-3'-phosphate
  modified_base 9: mod_base = OTHER; note = 2'-deoxy-2'-fluorouridine-3'-phosphate
  modified_base 10: mod_base = OTHER; note = 2'-deoxy-2'-fluoroadenosine-3'-phosphate
  modified_base 11: mod_base = OTHER; note = 2'-deoxy-2'-fluorouridine-3'-phosphate
  modified_base 12: mod_base = OTHER; note = 2'-O-methyluridine-3'-phosphate
  modified_base 13: mod_base = OTHER; note = 2'-O-methylguanosine-3'-phosphate
  modified_base 14: mod_base = OTHER; note = 2'-O-methylguanosine-3'-phosphate
  modified_base 15: mod_base = OTHER; note = 2'-O-methylcytidine-3'-phosphate
  modified_base 16: mod_base = OTHER; note = 2'-O-methyluridine-3'-phosphate
  modified_base 17: mod_base = OTHER; note = 2'-O-methyluridine-3'-phosphate
  modified_base 18: mod_base = OTHER; note = 2'-O-methyladenosine-3'-phosphate
  modified_base 19: mod_base = OTHER; note = 2'-O-methyluridine-3'-phosphorothioate
  modified_base 20: mod_base = OTHER; note = 2'-O-methyladenosine-3'-phosphorothioate
  modified_base 21: mod_base = OTHER; note = 2'-O-methyladenosine
aagcatcttattggcttataa

SEQ ID NO: 11783 - RNA, 21 nt, synthetic construct
  source 1..21: mol_type = other RNA
  modified_base 1: mod_base = OTHER; note = 2'-O-methyladenosine-3'-phosphorothioate
  modified_base 2: mod_base = OTHER; note = 2'-O-methylguanosine-3'-phosphorothioate
  modified_base 3: mod_base = OTHER; note = 2'-O-methylcytidine-3'-phosphate
  modified_base 4: mod_base = OTHER; note = 2'-O-methyladenosine-3'-phosphate
  modified_base 5: mod_base = OTHER; note = 2'-O-methyluridine-3'-phosphate
  modified_base 6: mod_base = OTHER; note = 2'-O-docosanyl-cytidine-3'-phosphate
  modified_base 7: mod_base = OTHER; note = 2'-deoxy-2'-fluorouridine-3'-phosphate
  modified_base 8: mod_base = OTHER; note = 2'-O-methyluridine-3'-phosphate
  modified_base 9: mod_base = OTHER; note = 2'-deoxy-2'-fluoroadenosine-3'-phosphate
  modified_base 10: mod_base = OTHER; note = 2'-deoxy-2'-fluorouridine-3'-phosphate
  modified_base 11: mod_base = OTHER; note = 2'-deoxy-2'-fluorouridine-3'-phosphate
  modified_base 12: mod_base = OTHER; note = 2'-O-methylguanosine-3'-phosphate
  modified_base 13: mod_base = OTHER; note = 2'-O-methylguanosine-3'-phosphate
  modified_base 14: mod_base = OTHER; note = 2'-O-methylcytidine-3'-phosphate
  modified_base 15: mod_base = OTHER; note = 2'-O-methyluridine-3'-phosphate
  modified_base 16: mod_base = OTHER; note = 2'-O-methyluridine-3'-phosphate
  modified_base 17: mod_base = OTHER; note = 2'-O-methyladenosine-3'-phosphate
  modified_base 18: mod_base = OTHER; note = 2'-O-methyluridine-3'-phosphate
  modified_base 19: mod_base = OTHER; note = 2'-O-methyladenosine-3'-phosphorothioate
  modified_base 20: mod_base = OTHER; note = 2'-O-methyluridine-3'-phosphorothioate
  modified_base 21: mod_base = OTHER; note = 2'-O-methyladenosine
agcatcttattggcttatata

SEQ ID NO: 11784 - RNA, 21 nt, synthetic construct
  source 1..21: mol_type = other RNA
  modified_base 1: mod_base = OTHER; note = 2'-O-methyluridine-3'-phosphorothioate
  modified_base 2: mod_base = OTHER; note = 2'-O-methyladenosine-3'-phosphorothioate
  modified_base 3: mod_base = OTHER; note = 2'-O-methylcytidine-3'-phosphate
  modified_base 4: mod_base = OTHER; note = 2'-O-methyladenosine-3'-phosphate
  modified_base 5: mod_base = OTHER; note = 2'-O-methyluridine-3'-phosphate
  modified_base 6: mod_base = OTHER; note = 2'-O-docosanyl-cytidine-3'-phosphate
  modified_base 7: mod_base = OTHER; note = 2'-deoxy-2'-fluorouridine-3'-phosphate
  modified_base 8: mod_base = OTHER; note = 2'-O-methyluridine-3'-phosphate
  modified_base 9: mod_base = OTHER; note = 2'-deoxy-2'-fluorocytidine-3'-phosphate
  modified_base 10: mod_base = OTHER; note = 2'-deoxy-2'-fluoroadenosine-3'-phosphate
  modified_base 11: mod_base = OTHER; note = 2'-deoxy-2'-fluoroguanosine-3'-phosphate
  modified_base 12: mod_base = OTHER; note = 2'-O-methyladenosine-3'-phosphate
  modified_base 13: mod_base = OTHER; note = 2'-O-methyladenosine-3'-phosphate
  modified_base 14: mod_base = OTHER; note = 2'-O-methyladenosine-3'-phosphate
  modified_base 15: mod_base = OTHER; note = 2'-O-methyladenosine-3'-phosphate
  modified_base 16: mod_base = OTHER; note = 2'-O-methyluridine-3'-phosphate
  modified_base 17: mod_base = OTHER; note = 2'-O-methylguanosine-3'-phosphate
  modified_base 18: mod_base = OTHER; note = 2'-O-methyladenosine-3'-phosphate
  modified_base 19: mod_base = OTHER; note = 2'-O-methylguanosine-3'-phosphorothioate
  modified_base 20: mod_base = OTHER; note = 2'-O-methyladenosine-3'-phosphorothioate
  modified_base 21: mod_base = OTHER; note = 2'-O-methyladenosine
tacatcttcagaaaatgagaa

SEQ ID NO: 11785 - RNA, 21 nt, synthetic construct
  source 1..21: mol_type = other RNA
  modified_base 1: mod_base = OTHER; note = 2'-O-methyladenosine-3'-phosphorothioate
  modified_base 2: mod_base = OTHER; note = 2'-O-methylcytidine-3'-phosphorothioate
  modified_base 3: mod_base = OTHER; note = 2'-O-methyladenosine-3'-phosphate
  modified_base 4: mod_base = OTHER; note = 2'-O-methyluridine-3'-phosphate
  modified_base 5: mod_base = OTHER; note = 2'-O-methylcytidine-3'-phosphate
  modified_base 6: mod_base = OTHER; note = 2'-O-docosanyl-uridine-3'-phosphate
  modified_base 7: mod_base = OTHER; note = 2'-deoxy-2'-fluorouridine-3'-phosphate
  modified_base 8: mod_base = OTHER; note = 2'-O-methylcytidine-3'-phosphate
  modified_base 9: mod_base = OTHER; note = 2'-deoxy-2'-fluoroadenosine-3'-phosphate
  modified_base 10: mod_base = OTHER; note = 2'-deoxy-2'-fluoroguanosine-3'-phosphate
  modified_base 11: mod_base = OTHER; note = 2'-deoxy-2'-fluoroadenosine-3'-phosphate
  modified_base 12: mod_base = OTHER; note = 2'-O-methyladenosine-3'-phosphate
  modified_base 13: mod_base = OTHER; note = 2'-O-methyladenosine-3'-phosphate
  modified_base 14: mod_base = OTHER; note = 2'-O-methyladenosine-3'-phosphate
  modified_base 15: mod_base = OTHER; note = 2'-O-methyluridine-3'-phosphate
  modified_base 16: mod_base = OTHER; note = 2'-O-methylguanosine-3'-phosphate
  modified_base 17: mod_base = OTHER; note = 2'-O-methyladenosine-3'-phosphate
  modified_base 18: mod_base = OTHER; note = 2'-O-methylguanosine-3'-phosphate
  modified_base 19: mod_base = OTHER; note = 2'-O-methyladenosine-3'-phosphorothioate
  modified_base 20: mod_base = OTHER; note = 2'-O-methyladenosine-3'-phosphorothioate
  modified_base 21: mod_base = OTHER; note = 2'-O-methyladenosine
acatcttcagaaaatgagaaa

SEQ ID NO: 11786 - RNA, 21 nt, synthetic construct
  source 1..21: mol_type = other RNA
  modified_base 1: mod_base = OTHER; note = 2'-O-methylcytidine-3'-phosphorothioate
  modified_base 2: mod_base = OTHER; note = 2'-O-methyladenosine-3'-phosphorothioate
  modified_base 3: mod_base = OTHER; note = 2'-O-methyluridine-3'-phosphate
  modified_base 4: mod_base = OTHER; note = 2'-O-methylcytidine-3'-phosphate
  modified_base 5: mod_base = OTHER; note = 2'-O-methyluridine-3'-phosphate
  modified_base 6: mod_base = OTHER; note = 2'-O-docosanyl-uridine-3'-phosphate
  modified_base 7: mod_base = OTHER; note = 2'-deoxy-2'-fluorocytidine-3'-phosphate
  modified_base 8: mod_base = OTHER; note = 2'-O-methyladenosine-3'-phosphate
  modified_base 9: mod_base = OTHER; note = 2'-deoxy-2'-fluoroguanosine-3'-phosphate
  modified_base 10: mod_base = OTHER; note = 2'-deoxy-2'-fluoroadenosine-3'-phosphate
  modified_base 11: mod_base = OTHER; note = 2'-deoxy-2'-fluoroadenosine-3'-phosphate
  modified_base 12: mod_base = OTHER; note = 2'-O-methyladenosine-3'-phosphate
  modified_base 13: mod_base = OTHER; note = 2'-O-methyladenosine-3'-phosphate
  modified_base 14: mod_base = OTHER; note = 2'-O-methyluridine-3'-phosphate
  modified_base 15: mod_base = OTHER; note = 2'-O-methylguanosine-3'-phosphate
  modified_base 16: mod_base = OTHER; note = 2'-O-methyladenosine-3'-phosphate
  modified_base 17: mod_base = OTHER; note = 2'-O-methylguanosine-3'-phosphate
  modified_base 18: mod_base = OTHER; note = 2'-O-methyladenosine-3'-phosphate
  modified_base 19: mod_base = OTHER; note = 2'-O-methyladenosine-3'-phosphorothioate
  modified_base 20: mod_base = OTHER; note = 2'-O-methyluridine-3'-phosphorothioate
  modified_base 21: mod_base = OTHER; note = 2'-O-methyladenosine
catcttcagaaaatgagaata

SEQ ID NO: 11787 - RNA, 21 nt, synthetic construct
  source 1..21: mol_type = other RNA
  modified_base 1: mod_base = OTHER; note = 2'-O-methyladenosine-3'-phosphorothioate
  modified_base 2: mod_base = OTHER; note = 2'-O-methyluridine-3'-phosphorothioate
  modified_base 3: mod_base = OTHER; note = 2'-O-methylcytidine-3'-phosphate
  modified_base 4: mod_base = OTHER; note = 2'-O-methyluridine-3'-phosphate
  modified_base 5: mod_base = OTHER; note = 2'-O-methyluridine-3'-phosphate
  modified_base 6: mod_base = OTHER; note = 2'-O-docosanyl-cytidine-3'-phosphate
  modified_base 7: mod_base = OTHER; note = 2'-deoxy-2'-fluoroadenosine-3'-phosphate
  modified_base 8: mod_base = OTHER; note = 2'-O-methylguanosine-3'-phosphate
  modified_base 9: mod_base = OTHER; note = 2'-deoxy-2'-fluoroadenosine-3'-phosphate
  modified_base 10: mod_base = OTHER; note = 2'-deoxy-2'-fluoroadenosine-3'-phosphate
  modified_base 11: mod_base = OTHER; note = 2'-deoxy-2'-fluoroadenosine-3'-phosphate
  modified_base 12: mod_base = OTHER; note = 2'-O-methyladenosine-3'-phosphate
  modified_base 13: mod_base = OTHER; note = 2'-O-methyluridine-3'-phosphate
  modified_base 14: mod_base = OTHER; note = 2'-O-methylguanosine-3'-phosphate
  modified_base 15: mod_base = OTHER; note = 2'-O-methyladenosine-3'-phosphate
  modified_base 16: mod_base = OTHER; note = 2'-O-methylguanosine-3'-phosphate
  modified_base 17: mod_base = OTHER; note = 2'-O-methyladenosine-3'-phosphate
  modified_base 18: mod_base = OTHER; note = 2'-O-methyladenosine-3'-phosphate
  modified_base 19: mod_base = OTHER; note = 2'-O-methyluridine-3'-phosphorothioate
  modified_base 20: mod_base = OTHER; note = 2'-O-methyluridine-3'-phosphorothioate
  modified_base 21: mod_base = OTHER; note = 2'-O-methyladenosine
atcttcagaaaatgagaatta

SEQ ID NO: 11788 - RNA, 21 nt, synthetic construct
  source 1..21: mol_type = other RNA
  modified_base 1: mod_base = OTHER; note = 2'-O-methyluridine-3'-phosphorothioate
  modified_base 2: mod_base = OTHER; note = 2'-O-methylcytidine-3'-phosphorothioate
  modified_base 3: mod_base = OTHER; note = 2'-O-methyluridine-3'-phosphate
  modified_base 4: mod_base = OTHER; note = 2'-O-methyluridine-3'-phosphate
  modified_base 5: mod_base = OTHER; note = 2'-O-methylcytidine-3'-phosphate
  modified_base 6: mod_base = OTHER; note = 2'-O-docosanyl-adenosine-3'-phosphate
  modified_base 7: mod_base = OTHER; note = 2'-deoxy-2'-fluoroguanosine-3'-phosphate
  modified_base 8: mod_base = OTHER; note = 2'-O-methyladenosine-3'-phosphate
  modified_base 9: mod_base = OTHER; note = 2'-deoxy-2'-fluoroadenosine-3'-phosphate
  modified_base 10: mod_base = OTHER; note = 2'-deoxy-2'-fluoroadenosine-3'-phosphate
  modified_base 11: mod_base = OTHER; note = 2'-deoxy-2'-fluoroadenosine-3'-phosphate
  modified_base 12: mod_base = OTHER; note = 2'-O-methyluridine-3'-phosphate
  modified_base 13: mod_base = OTHER; note = 2'-O-methylguanosine-3'-phosphate
  modified_base 14: mod_base = OTHER; note = 2'-O-methyladenosine-3'-phosphate
  modified_base 15: mod_base = OTHER; note = 2'-O-methylguanosine-3'-phosphate
  modified_base 16: mod_base = OTHER; note = 2'-O-methyladenosine-3'-phosphate
  modified_base 17: mod_base = OTHER; note = 2'-O-methyladenosine-3'-phosphate
  modified_base 18: mod_base = OTHER; note = 2'-O-methyluridine-3'-phosphate
  modified_base 19: mod_base = OTHER; note = 2'-O-methyluridine-3'-phosphorothioate
  modified_base 20: mod_base = OTHER; note = 2'-O-methyladenosine-3'-phosphorothioate
  modified_base 21: mod_base = OTHER; note = 2'-O-methyladenosine
tcttcagaaaatgagaattaa

SEQ ID NO: 11789 - RNA, 21 nt, synthetic construct
  source 1..21: mol_type = other RNA
  modified_base 1: mod_base = OTHER; note = 2'-O-methyladenosine-3'-phosphorothioate
  modified_base 2: mod_base = OTHER; note = 2'-O-methylcytidine-3'-phosphorothioate
  modified_base 3: mod_base = OTHER; note = 2'-O-methyladenosine-3'-phosphate
  modified_base 4: mod_base = OTHER; note = 2'-O-methylguanosine-3'-phosphate
  modified_base 5: mod_base = OTHER; note = 2'-O-methyladenosine-3'-phosphate
  modified_base 6: mod_base = OTHER; note = 2'-O-docosanyl-uridine-3'-phosphate
  modified_base 7: mod_base = OTHER; note = 2'-deoxy-2'-fluorouridine-3'-phosphate
  modified_base 8: mod_base = OTHER; note = 2'-O-methylguanosine-3'-phosphate
  modified_base 9: mod_base = OTHER; note = 2'-deoxy-2'-fluoroadenosine-3'-phosphate
  modified_base 10: mod_base = OTHER; note = 2'-deoxy-2'-fluoroadenosine-3'-phosphate
  modified_base 11: mod_base = OTHER; note = 2'-deoxy-2'-fluorocytidine-3'-phosphate
  modified_base 12: mod_base = OTHER; note = 2'-O-methyladenosine-3'-phosphate
  modified_base 13: mod_base = OTHER; note = 2'-O-methyladenosine-3'-phosphate
  modified_base 14: mod_base = OTHER; note = 2'-O-methyladenosine-3'-phosphate
  modified_base 15: mod_base = OTHER; note = 2'-O-methylguanosine-3'-phosphate
  modified_base 16: mod_base = OTHER; note = 2'-O-methyladenosine-3'-phosphate
  modified_base 17: mod_base = OTHER; note = 2'-O-methyladenosine-3'-phosphate
  modified_base 18: mod_base = OTHER; note = 2'-O-methylcytidine-3'-phosphate
  modified_base 19: mod_base = OTHER; note = 2'-O-methyluridine-3'-phosphorothioate
  modified_base 20: mod_base = OTHER; note = 2'-O-methyluridine-3'-phosphorothioate
  modified_base 21: mod_base = OTHER; note = 2'-O-methyladenosine
acagattgaacaaagaactta

SEQ ID NO: 11790 - RNA, 21 nt, synthetic construct
  source 1..21: mol_type = other RNA
  modified_base 1: mod_base = OTHER; note = 2'-O-methylcytidine-3'-phosphorothioate
  modified_base 2: mod_base = OTHER; note = 2'-O-methyladenosine-3'-phosphorothioate
  modified_base 3: mod_base = OTHER; note = 2'-O-methylguanosine-3'-phosphate
  modified_base 4: mod_base = OTHER; note = 2'-O-methyladenosine-3'-phosphate
  modified_base 5: mod_base = OTHER; note = 2'-O-methyluridine-3'-phosphate
  modified_base 6: mod_base = OTHER; note = 2'-O-docosanyl-uridine-3'-phosphate
  modified_base 7: mod_base = OTHER; note = 2'-deoxy-2'-fluoroguanosine-3'-phosphate
  modified_base 8: mod_base = OTHER; note = 2'-O-methyladenosine-3'-phosphate
  modified_base 9: mod_base = OTHER; note = 2'-deoxy-2'-fluoroadenosine-3'-phosphate
  modified_base 10: mod_base = OTHER; note = 2'-deoxy-2'-fluorocytidine-3'-phosphate
  modified_base 11: mod_base = OTHER; note = 2'-deoxy-2'-fluoroadenosine-3'-phosphate
  modified_base 12: mod_base = OTHER; note = 2'-O-methyladenosine-3'-phosphate
  modified_base 13: mod_base = OTHER; note = 2'-O-methyladenosine-3'-phosphate
  modified_base 14: mod_base = OTHER; note = 2'-O-methylguanosine-3'-phosphate
  modified_base 15: mod_base = OTHER; note = 2'-O-methyladenosine-3'-phosphate
  modified_base 16: mod_base = OTHER; note = 2'-O-methyladenosine-3'-phosphate
  modified_base 17: mod_base = OTHER; note = 2'-O-methylcytidine-3'-phosphate
  modified_base 18: mod_base = OTHER; note = 2'-O-methyluridine-3'-phosphate
  modified_base 19: mod_base = OTHER; note = 2'-O-methyluridine-3'-phosphorothioate
  modified_base 20: mod_base = OTHER; note = 2'-O-methyladenosine-3'-phosphorothioate
  modified_base 21: mod_base = OTHER; note = 2'-O-methyladenosine
cagattgaacaaagaacttaa

SEQ ID NO: 11791 - RNA, 21 nt, synthetic construct
  source 1..21: mol_type = other RNA
  modified_base 1: mod_base = OTHER; note = 2'-O-methyladenosine-3'-phosphorothioate
  modified_base 2: mod_base = OTHER; note = 2'-O-methylguanosine-3'-phosphorothioate
  modified_base 3: mod_base = OTHER; note = 2'-O-methyladenosine-3'-phosphate
  modified_base 4: mod_base = OTHER; note = 2'-O-methyluridine-3'-phosphate
  modified_base 5: mod_base = OTHER; note = 2'-O-methyluridine-3'-phosphate
  modified_base 6: mod_base = OTHER; note = 2'-O-docosanyl-guanosine-3'-phosphate
  modified_base 7: mod_base = OTHER; note = 2'-deoxy-2'-fluoroadenosine-3'-phosphate
  modified_base 8: mod_base = OTHER; note = 2'-O-methyladenosine-3'-phosphate
  modified_base 9: mod_base = OTHER; note = 2'-deoxy-2'-fluorocytidine-3'-phosphate
  modified_base 10: mod_base = OTHER; note = 2'-deoxy-2'-fluoroadenosine-3'-phosphate
  modified_base 11: mod_base = OTHER; note = 2'-deoxy-2'-fluoroadenosine-3'-phosphate
  modified_base 12: mod_base = OTHER; note = 2'-O-methyladenosine-3'-phosphate
  modified_base 13: mod_base = OTHER; note = 2'-O-methylguanosine-3'-phosphate
  modified_base 14: mod_base = OTHER; note = 2'-O-methyladenosine-3'-phosphate
  modified_base 15: mod_base = OTHER; note = 2'-O-methyladenosine-3'-phosphate
  modified_base 16: mod_base = OTHER; note = 2'-O-methylcytidine-3'-phosphate
  modified_base 17: mod_base = OTHER; note = 2'-O-methyluridine-3'-phosphate
  modified_base 18: mod_base = OTHER; note = 2'-O-methyluridine-3'-phosphate
  modified_base 19: mod_base = OTHER; note = 2'-O-methyladenosine-3'-phosphorothioate
  modified_base 20: mod_base = OTHER; note = 2'-O-methylguanosine-3'-phosphorothioate
  modified_base 21: mod_base = OTHER; note = 2'-O-methyladenosine
agattgaacaaagaacttaga

SEQ ID NO: 11792 - RNA, 21 nt, synthetic construct
  source 1..21: mol_type = other RNA
  modified_base 1: mod_base = OTHER; note = 2'-O-methylguanosine-3'-phosphorothioate
  modified_base 2: mod_base = OTHER; note = 2'-O-methyladenosine-3'-phosphorothioate
  modified_base 3: mod_base = OTHER; note = 2'-O-methyluridine-3'-phosphate
  modified_base 4: mod_base = OTHER; note = 2'-O-methyluridine-3'-phosphate
  modified_base 5: mod_base = OTHER; note = 2'-O-methylguanosine-3'-phosphate
  modified_base 6: mod_base = OTHER; note = 2'-O-docosanyl-adenosine-3'-phosphate
  modified_base 7: mod_base = OTHER; note = 2'-deoxy-2'-fluoroadenosine-3'-phosphate
  modified_base 8: mod_base = OTHER; note = 2'-O-methylcytidine-3'-phosphate
  modified_base 9: mod_base = OTHER; note = 2'-deoxy-2'-fluoroadenosine-3'-phosphate
  modified_base 10: mod_base = OTHER; note = 2'-deoxy-2'-fluoroadenosine-3'-phosphate
  modified_base 11: mod_base = OTHER; note = 2'-deoxy-2'-fluoroadenosine-3'-phosphate
  modified_base 12: mod_base = OTHER; note = 2'-O-methylguanosine-3'-phosphate
  modified_base 13: mod_base = OTHER; note = 2'-O-methyladenosine-3'-phosphate
  modified_base 14: mod_base = OTHER; note = 2'-O-methyladenosine-3'-phosphate
  modified_base 15: mod_base = OTHER; note = 2'-O-methylcytidine-3'-phosphate
  modified_base 16: mod_base = OTHER; note = 2'-O-methyluridine-3'-phosphate
  modified_base 17: mod_base = OTHER; note = 2'-O-methyluridine-3'-phosphate
  modified_base 18: mod_base = OTHER; note = 2'-O-methyladenosine-3'-phosphate
  modified_base 19: mod_base = OTHER; note = 2'-O-methylguanosine-3'-phosphorothioate
  modified_base 20: mod_base = OTHER; note = 2'-O-methyladenosine-3'-phosphorothioate
  modified_base 21: mod_base = OTHER; note = 2'-O-methyladenosine
gattgaacaaagaacttagaa

SEQ ID NO: 11793 - RNA, 21 nt, synthetic construct
  source 1..21: mol_type = other RNA
  modified_base 1: mod_base = OTHER; note = 2'-O-methyladenosine-3'-phosphorothioate
  modified_base 2: mod_base = OTHER; note = 2'-O-methyluridine-3'-phosphorothioate
  modified_base 3: mod_base = OTHER; note = 2'-O-methyluridine-3'-phosphate
  modified_base 4: mod_base = OTHER; note = 2'-O-methylguanosine-3'-phosphate
  modified_base 5: mod_base = OTHER; note = 2'-O-methyladenosine-3'-phosphate
  modified_base 6: mod_base = OTHER; note = 2'-O-docosanyl-adenosine-3'-phosphate
  modified_base 7: mod_base = OTHER; note = 2'-deoxy-2'-fluorocytidine-3'-phosphate
  modified_base 8: mod_base = OTHER; note = 2'-O-methyladenosine-3'-phosphate
  modified_base 9: mod_base = OTHER; note = 2'-deoxy-2'-fluoroadenosine-3'-phosphate
  modified_base 10: mod_base = OTHER; note = 2'-deoxy-2'-fluoroadenosine-3'-phosphate
  modified_base 11: mod_base = OTHER; note = 2'-deoxy-2'-fluoroguanosine-3'-phosphate
  modified_base 12: mod_base = OTHER; note = 2'-O-methyladenosine-3'-phosphate
  modified_base 13: mod_base = OTHER; note = 2'-O-methyladenosine-3'-phosphate
  modified_base 14: mod_base = OTHER; note = 2'-O-methylcytidine-3'-phosphate
  modified_base 15: mod_base = OTHER; note = 2'-O-methyluridine-3'-phosphate
  modified_base 16: mod_base = OTHER; note = 2'-O-methyluridine-3'-phosphate
  modified_base 17: mod_base = OTHER; note = 2'-O-methyladenosine-3'-phosphate
  modified_base 18: mod_base = OTHER; note = 2'-O-methylguanosine-3'-phosphate
  modified_base 19: mod_base = OTHER; note = 2'-O-methyladenosine-3'-phosphorothioate
  modified_base 20: mod_base = OTHER; note = 2'-O-methyladenosine-3'-phosphorothioate
  modified_base 21: mod_base = OTHER; note = 2'-O-methyladenosine
attgaacaaagaacttagaaa

SEQ ID NO: 11794 - RNA, 21 nt, synthetic construct
  source 1..21: mol_type = other RNA
  modified_base 1: mod_base = OTHER; note = 2'-O-methyluridine-3'-phosphorothioate
  modified_base 2: mod_base = OTHER; note = 2'-O-methyluridine-3'-phosphorothioate
  modified_base 3: mod_base = OTHER; note = 2'-O-methylguanosine-3'-phosphate
  modified_base 4: mod_base = OTHER; note = 2'-O-methyladenosine-3'-phosphate
  modified_base 5: mod_base = OTHER; note = 2'-O-methyladenosine-3'-phosphate
  modified_base 6: mod_base = OTHER; note = 2'-O-docosanyl-cytidine-3'-phosphate
  modified_base 7: mod_base = OTHER; note = 2'-deoxy-2'-fluoroadenosine-3'-phosphate
  modified_base 8: mod_base = OTHER; note = 2'-O-methyladenosine-3'-phosphate
  modified_base 9: mod_base = OTHER; note = 2'-deoxy-2'-fluoroadenosine-3'-phosphate
  modified_base 10: mod_base = OTHER; note = 2'-deoxy-2'-fluoroguanosine-3'-phosphate
  modified_base 11: mod_base = OTHER; note = 2'-deoxy-2'-fluoroadenosine-3'-phosphate
  modified_base 12: mod_base = OTHER; note = 2'-O-methyladenosine-3'-phosphate
  modified_base 13: mod_base = OTHER; note = 2'-O-methylcytidine-3'-phosphate
  modified_base 14: mod_base = OTHER; note = 2'-O-methyluridine-3'-phosphate
  modified_base 15: mod_base = OTHER; note = 2'-O-methyluridine-3'-phosphate
  modified_base 16: mod_base = OTHER; note = 2'-O-methyladenosine-3'-phosphate
  modified_base 17: mod_base = OTHER; note = 2'-O-methylguanosine-3'-phosphate
  modified_base 18: mod_base = OTHER; note = 2'-O-methyladenosine-3'-phosphate
  modified_base 19: mod_base = OTHER; note = 2'-O-methyladenosine-3'-phosphorothioate
  modified_base 20: mod_base = OTHER; note = 2'-O-methylguanosine-3'-phosphorothioate
  modified_base 21: mod_base = OTHER; note = 2'-O-methyladenosine
ttgaacaaagaacttagaaga

SEQ ID NO: 11795 - RNA, 21 nt, synthetic construct
  source 1..21: mol_type = other RNA
  modified_base 1: mod_base = OTHER; note = 2'-O-methylguanosine-3'-phosphorothioate
  modified_base 2: mod_base = OTHER; note = 2'-O-methyladenosine-3'-phosphorothioate
  modified_base 3: mod_base = OTHER; note = 2'-O-methyladenosine-3'-phosphate
  modified_base 4: mod_base = OTHER; note = 2'-O-methylguanosine-3'-phosphate
  modified_base 5: mod_base = OTHER; note = 2'-O-methyladenosine-3'-phosphate
  modified_base 6: mod_base = OTHER; note = 2'-O-docosanyl-guanosine-3'-phosphate
  modified_base 7: mod_base = OTHER; note = 2'-deoxy-2'-fluoroadenosine-3'-phosphate
  modified_base 8: mod_base = OTHER; note = 2'-O-methyladenosine-3'-phosphate
  modified_base 9: mod_base = OTHER; note = 2'-deoxy-2'-fluoroadenosine-3'-phosphate
  modified_base 10: mod_base = OTHER; note = 2'-deoxy-2'-fluorouridine-3'-phosphate
  modified_base 11: mod_base = OTHER; note = 2'-deoxy-2'-fluorouridine-3'-phosphate
  modified_base 12: mod_base = OTHER; note = 2'-O-methylguanosine-3'-phosphate
  modified_base 13: mod_base = OTHER; note = 2'-O-methyladenosine-3'-phosphate
  modified_base 14: mod_base = OTHER; note = 2'-O-methyluridine-3'-phosphate
  modified_base 15: mod_base = OTHER; note = 2'-O-methyluridine-3'-phosphate
  modified_base 16: mod_base = OTHER; note = 2'-O-methylguanosine-3'-phosphate
  modified_base 17: mod_base = OTHER; note = 2'-O-methyluridine-3'-phosphate
  modified_base 18: mod_base = OTHER; note = 2'-O-methyluridine-3'-phosphate
  modified_base 19: mod_base = OTHER; note = 2'-O-methyluridine-3'-phosphorothioate
  modified_base 20: mod_base = OTHER; note = 2'-O-methyladenosine-3'-phosphorothioate
  modified_base 21: mod_base = OTHER; note = 2'-O-methyladenosine
gaagagaaattgattgtttaa

SEQ ID NO: 11796 - RNA, 21 nt, synthetic construct
  source 1..21: mol_type = other RNA
  modified_base 1: mod_base = OTHER; note = 2'-O-methyluridine-3'-phosphorothioate
  modified_base 2: mod_base = OTHER; note = 2'-O-methylguanosine-3'-phosphorothioate
  modified_base 3: mod_base = OTHER; note = 2'-O-methyluridine-3'-phosphate
  modified_base 4: mod_base = OTHER; note = 2'-O-methyluridine-3'-phosphate
  modified_base 5: mod_base = OTHER; note = 2'-O-methylguanosine-3'-phosphate
  modified_base 6: mod_base = OTHER; note = 2'-O-docosanyl-guanosine-3'-phosphate
  modified_base 7: mod_base = OTHER; note = 2'-deoxy-2'-fluorouridine-3'-phosphate
  modified_base 8: mod_base = OTHER; note = 2'-O-methyluridine-3'-phosphate
  modified_base 9: mod_base = OTHER; note = 2'-deoxy-2'-fluorouridine-3'-phosphate
  modified_base 10: mod_base = OTHER; note = 2'-deoxy-2'-fluoroadenosine-3'-phosphate
  modified_base 11: mod_base = OTHER; note = 2'-deoxy-2'-fluoroadenosine-3'-phosphate
  modified_base 12: mod_base = OTHER; note = 2'-O-methyluridine-3'-phosphate
  modified_base 13: mod_base = OTHER; note = 2'-O-methyluridine-3'-phosphate
  modified_base 14: mod_base = OTHER; note = 2'-O-methyluridine-3'-phosphate
  modified_base 15: mod_base = OTHER; note = 2'-O-methyluridine-3'-phosphate
  modified_base 16: mod_base = OTHER; note = 2'-O-methyluridine-3'-phosphate
  modified_base 17: mod_base = OTHER; note = 2'-O-methylcytidine-3'-phosphate
  modified_base 18: mod_base = OTHER; note = 2'-O-methyladenosine-3'-phosphate
  modified_base 19: mod_base = OTHER; note = 2'-O-methyladenosine-3'-phosphorothioate
  modified_base 20: mod_base = OTHER; note = 2'-O-methylcytidine-3'-phosphorothioate
  modified_base 21: mod_base = OTHER; note = 2'-O-methyladenosine
tgttggtttaatttttcaaca

SEQ ID NO: 11797 - RNA, 21 nt, synthetic construct
  source 1..21: mol_type = other RNA
  modified_base 1: mod_base = OTHER; note = 2'-O-methyluridine-3'-phosphorothioate
  modified_base 2: mod_base = OTHER; note = 2'-O-methylcytidine-3'-phosphorothioate
  modified_base 3: mod_base = OTHER; note = 2'-O-methylcytidine-3'-phosphate
  modified_base 4: mod_base = OTHER; note = 2'-O-methyluridine-3'-phosphate
  modified_base 5: mod_base = OTHER; note = 2'-O-methylguanosine-3'-phosphate
  modified_base 6: mod_base = OTHER; note = 2'-O-docosanyl-adenosine-3'-phosphate
  modified_base 7: mod_base = OTHER; note = 2'-deoxy-2'-fluoroguanosine-3'-phosphate
  modified_base 8: mod_base = OTHER; note = 2'-O-methyladenosine-3'-phosphate
  modified_base 9: mod_base = OTHER; note = 2'-deoxy-2'-fluoroguanosine-3'-phosphate
  modified_base 10: mod_base = OTHER; note = 2'-deoxy-2'-fluoroadenosine-3'-phosphate
  modified_base 11: mod_base = OTHER; note = 2'-deoxy-2'-fluoroadenosine-3'-phosphate
  modified_base 12: mod_base = OTHER; note = 2'-O-methylguanosine-3'-phosphate
  modified_base 13: mod_base = OTHER; note = 2'-O-methyladenosine-3'-phosphate
  modified_base 14: mod_base = OTHER; note = 2'-O-methylguanosine-3'-phosphate
  modified_base 15: mod_base = OTHER; note = 2'-O-methyladenosine-3'-phosphate
  modified_base 16: mod_base = OTHER; note = 2'-O-methyladenosine-3'-phosphate
  modified_base 17: mod_base = OTHER; note = 2'-O-methyladenosine-3'-phosphate
  modified_base 18: mod_base = OTHER; note = 2'-O-methyluridine-3'-phosphate
  modified_base 19: mod_base = OTHER; note = 2'-O-methyluridine-3'-phosphorothioate
  modified_base 20: mod_base = OTHER; note = 2'-O-methylguanosine-3'-phosphorothioate
  modified_base 21: mod_base = OTHER; note = 2'-O-methyladenosine
tcctgagagaagagaaattga

SEQ ID NO: 11798 - RNA, 21 nt, synthetic construct
  source 1..21: mol_type = other RNA
  modified_base 1: mod_base = OTHER; note = 2'-O-methylcytidine-3'-phosphorothioate
  modified_base 2: mod_base = OTHER; note = 2'-O-methylcytidine-3'-phosphorothioate
  modified_base 3: mod_base = OTHER; note = 2'-O-methyluridine-3'-phosphate
  modified_base 4: mod_base = OTHER; note = 2'-O-methylguanosine-3'-phosphate
  modified_base 5: mod_base = OTHER; note = 2'-O-methyladenosine-3'-phosphate
  modified_base 6: mod_base = OTHER; note = 2'-O-docosanyl-guanosine-3'-phosphate
  modified_base 7: mod_base = OTHER; note = 2'-deoxy-2'-fluoroadenosine-3'-phosphate
  modified_base 8: mod_base = OTHER; note = 2'-O-methylguanosine-3'-phosphate
  modified_base 9: mod_base = OTHER; note = 2'-deoxy-2'-fluoroadenosine-3'-phosphate
  modified_base 10: mod_base = OTHER; note = 2'-deoxy-2'-fluoroadenosine-3'-phosphate
  modified_base 11: mod_base = OTHER; note = 2'-deoxy-2'-fluoroguanosine-3'-phosphate
  modified_base 12: mod_base = OTHER; note = 2'-O-methyladenosine-3'-phosphate
  modified_base 13: mod_base = OTHER; note = 2'-O-methylguanosine-3'-phosphate
  modified_base 14: mod_base = OTHER; note = 2'-O-methyladenosine-3'-phosphate
  modified_base 15: mod_base = OTHER; note = 2'-O-methyladenosine-3'-phosphate
  modified_base 16: mod_base = OTHER; note = 2'-O-methyladenosine-3'-phosphate
  modified_base 17: mod_base = OTHER; note = 2'-O-methyluridine-3'-phosphate
  modified_base 18: mod_base = OTHER; note = 2'-O-methyluridine-3'-phosphate
  modified_base 19: mod_base = OTHER; note = 2'-O-methylguanosine-3'-phosphorothioate
  modified_base 20: mod_base = OTHER; note = 2'-O-methyladenosine-3'-phosphorothioate
  modified_base 21: mod_base = OTHER; note = 2'-O-methyladenosine
cctgagagaagagaaattgaa

SEQ ID NO: 11799 - RNA, 21 nt, synthetic construct
  source 1..21: mol_type = other RNA
  modified_base 1: mod_base = OTHER; note = 2'-O-methylcytidine-3'-phosphorothioate
  modified_base 2: mod_base = OTHER; note = 2'-O-methyluridine-3'-phosphorothioate
  modified_base 3: mod_base = OTHER; note = 2'-O-methylguanosine-3'-phosphate
  modified_base 4: mod_base = OTHER; note = 2'-O-methyladenosine-3'-phosphate
  modified_base 5: mod_base = OTHER; note = 2'-O-methylguanosine-3'-phosphate
  modified_base 6: mod_base = OTHER; note = 2'-O-docosanyl-adenosine-3'-phosphate
  modified_base 7: mod_base = OTHER; note = 2'-deoxy-2'-fluoroguanosine-3'-phosphate
  modified_base 8: mod_base = OTHER; note = 2'-O-methyladenosine-3'-phosphate
  modified_base 9: mod_base = OTHER; note = 2'-deoxy-2'-fluoroadenosine-3'-phosphate
  modified_base 10: mod_base = OTHER; note = 2'-deoxy-2'-fluoroguanosine-3'-phosphate
  modified_base 11: mod_base = OTHER; note = 2'-deoxy-2'-fluoroadenosine-3'-phosphate
  modified_base 12: mod_base = OTHER; note = 2'-O-methylguanosine-3'-phosphate
  modified_base 13: mod_base = OTHER; note = 2'-O-methyladenosine-3'-phosphate
  modified_base 14: mod_base = OTHER; note = 2'-O-methyladenosine-3'-phosphate
  modified_base 15: mod_base = OTHER; note = 2'-O-methyladenosine-3'-phosphate
  modified_base 16: mod_base = OTHER; note = 2'-O-methyluridine-3'-phosphate
  modified_base 17: mod_base = OTHER; note = 2'-O-methyluridine-3'-phosphate
  modified_base 18: mod_base = OTHER; note = 2'-O-methylguanosine-3'-phosphate
  modified_base 19: mod_base = OTHER; note = 2'-O-methyladenosine-3'-phosphorothioate
  modified_base 20: mod_base = OTHER; note = 2'-O-methyluridine-3'-phosphorothioate
  modified_base 21: mod_base = OTHER; note = 2'-O-methyladenosine
ctgagagaagagaaattgata

SEQ ID NO: 11800 - RNA, 21 nt, synthetic construct
  source 1..21: mol_type = other RNA
  modified_base 1: mod_base = OTHER; note = 2'-O-methyluridine-3'-phosphorothioate
  modified_base 2: mod_base = OTHER; note = 2'-O-methylguanosine-3'-phosphorothioate
  modified_base 3: mod_base = OTHER; note = 2'-O-methyladenosine-3'-phosphate
  modified_base 4: mod_base = OTHER; note = 2'-O-methylguanosine-3'-phosphate
  modified_base 5: mod_base = OTHER; note = 2'-O-methyladenosine-3'-phosphate
  modified_base 6: mod_base = OTHER; note = 2'-O-docosanyl-guanosine-3'-phosphate
  modified_base 7: mod_base = OTHER; note = 2'-deoxy-2'-fluoroadenosine-3'-phosphate
  modified_base 8: mod_base = OTHER; note = 2'-O-methyladenosine-3'-phosphate
  modified_base 9: mod_base = OTHER; note = 2'-deoxy-2'-fluoroguanosine-3'-phosphate
  modified_base 10: mod_base = OTHER; note = 2'-deoxy-2'-fluoroadenosine-3'-phosphate
  modified_base 11: mod_base = OTHER; note = 2'-deoxy-2'-fluoroguanosine-3'-phosphate
  modified_base 12: mod_base = OTHER; note = 2'-O-methyladenosine-3'-phosphate
  modified_base 13: mod_base = OTHER; note = 2'-O-methyladenosine-3'-phosphate
  modified_base 14: mod_base = OTHER; note = 2'-O-methyladenosine-3'-phosphate
  modified_base 15: mod_base = OTHER; note = 2'-O-methyluridine-3'-phosphate
  modified_base 16: mod_base = OTHER; note = 2'-O-methyluridine-3'-phosphate
  modified_base 17: mod_base = OTHER; note = 2'-O-methylguanosine-3'-phosphate
  modified_base 18: mod_base = OTHER; note = 2'-O-methyladenosine-3'-phosphate
  modified_base 19: mod_base = OTHER; note = 2'-O-methyluridine-3'-phosphorothioate
  modified_base 20: mod_base = OTHER; note = 2'-O-methyluridine-3'-phosphorothioate
  modified_base 21: mod_base = OTHER; note = 2'-O-methyladenosine
tgagagaagagaaattgatta

SEQ ID NO: 11801 - RNA, 21 nt, synthetic construct
  source 1..21: mol_type = other RNA
  modified_base 1: mod_base = OTHER; note = 2'-O-methylguanosine-3'-phosphorothioate
  modified_base 2: mod_base = OTHER; note = 2'-O-methyladenosine-3'-phosphorothioate
  modified_base 3: mod_base = OTHER; note = 2'-O-methylguanosine-3'-phosphate
  modified_base 4: mod_base = OTHER; note = 2'-O-methyladenosine-3'-phosphate
  modified_base 5: mod_base = OTHER; note = 2'-O-methylguanosine-3'-phosphate
  modified_base 6: mod_base = OTHER; note = 2'-O-docosanyl-adenosine-3'-phosphate
  modified_base 7: mod_base = OTHER; note = 2'-deoxy-2'-fluoroadenosine-3'-phosphate
  modified_base 8: mod_base = OTHER; note = 2'-O-methylguanosine-3'-phosphate
  modified_base 9: mod_base = OTHER; note = 2'-deoxy-2'-fluoroadenosine-3'-phosphate
  modified_base 10: mod_base = OTHER; note = 2'-deoxy-2'-fluoroguanosine-3'-phosphate
  modified_base 11: mod_base = OTHER; note = 2'-deoxy-2'-fluoroadenosine-3'-phosphate
  modified_base 12: mod_base = OTHER; note = 2'-O-methyladenosine-3'-phosphate
  modified_base 13: mod_base = OTHER; note = 2'-O-methyladenosine-3'-phosphate
  modified_base 14: mod_base = OTHER; note = 2'-O-methyluridine-3'-phosphate
  modified_base 15: mod_base = OTHER; note = 2'-O-methyluridine-3'-phosphate
  modified_base 16: mod_base = OTHER; note = 2'-O-methylguanosine-3'-phosphate
  modified_base 17: mod_base = OTHER; note = 2'-O-methyladenosine-3'-phosphate
  modified_base 18: mod_base = OTHER; note = 2'-O-methyluridine-3'-phosphate
  modified_base 19: mod_base = OTHER; note = 2'-O-methyluridine-3'-phosphorothioate
  modified_base 20: mod_base = OTHER; note = 2'-O-methylguanosine-3'-phosphorothioate
  modified_base 21: mod_base = OTHER; note = 2'-O-methyladenosine
gagagaagagaaattgattga

SEQ ID NO: 11802 - RNA, 21 nt, synthetic construct
  source 1..21: mol_type = other RNA
  modified_base 1: mod_base = OTHER; note = 2'-O-methyladenosine-3'-phosphorothioate
  modified_base 2: mod_base = OTHER; note = 2'-O-methylguanosine-3'-phosphorothioate
  modified_base 3: mod_base = OTHER; note = 2'-O-methyladenosine-3'-phosphate
  modified_base 4: mod_base = OTHER; note = 2'-O-methylguanosine-3'-phosphate
  modified_base 5: mod_base = OTHER; note = 2'-O-methyladenosine-3'-phosphate
  modified_base 6: mod_base = OTHER; note = 2'-O-docosanyl-adenosine-3'-phosphate
  modified_base 7: mod_base = OTHER; note = 2'-deoxy-2'-fluoroguanosine-3'-phosphate
  modified_base 8: mod_base = OTHER; note = 2'-O-methyladenosine-3'-phosphate
  modified_base 9: mod_base = OTHER; note = 2'-deoxy-2'-fluoroguanosine-3'-phosphate
  modified_base 10: mod_base = OTHER; note = 2'-deoxy-2'-fluoroadenosine-3'-phosphate
  modified_base 11: mod_base = OTHER; note = 2'-deoxy-2'-fluoroadenosine-3'-phosphate
  modified_base 12: mod_base = OTHER; note = 2'-O-methyladenosine-3'-phosphate
  modified_base 13: mod_base = OTHER; note = 2'-O-methyluridine-3'-phosphate
  modified_base 14: mod_base = OTHER; note = 2'-O-methyluridine-3'-phosphate
  modified_base 15: mod_base = OTHER; note = 2'-O-methylguanosine-3'-phosphate
  modified_base 16: mod_base = OTHER; note = 2'-O-methyladenosine-3'-phosphate
  modified_base 17: mod_base = OTHER; note = 2'-O-methyluridine-3'-phosphate
  modified_base 18: mod_base = OTHER; note = 2'-O-methyluridine-3'-phosphate
  modified_base 19: mod_base = OTHER; note = 2'-O-methylguanosine-3'-phosphorothioate
  modified_base 20: mod_base = OTHER; note = 2'-O-methyluridine-3'-phosphorothioate
  modified_base 21: mod_base = OTHER; note = 2'-O-methyladenosine
agagaagagaaattgattgta

SEQ ID NO: 11803 - RNA, 21 nt, synthetic construct
  source 1..21: mol_type = other RNA
  modified_base 1: mod_base = OTHER; note = 2'-O-methylguanosine-3'-phosphorothioate
  modified_base 2: mod_base = OTHER; note = 2'-O-methyladenosine-3'-phosphorothioate
  modified_base 3: mod_base = OTHER; note = 2'-O-methylguanosine-3'-phosphate
  modified_base 4: mod_base = OTHER; note = 2'-O-methyladenosine-3'-phosphate
  modified_base 5: mod_base = OTHER; note = 2'-O-methyladenosine-3'-phosphate
  modified_base 6: mod_base = OTHER; note = 2'-O-docosanyl-guanosine-3'-phosphate
  modified_base 7: mod_base = OTHER; note = 2'-deoxy-2'-fluoroadenosine-3'-phosphate
  modified_base 8: mod_base = OTHER; note = 2'-O-methylguanosine-3'-phosphate
  modified_base 9: mod_base = OTHER; note = 2'-deoxy-2'-fluoroadenosine-3'-phosphate
  modified_base 10: mod_base = OTHER; note = 2'-deoxy-2'-fluoroadenosine-3'-phosphate
  modified_base 11: mod_base = OTHER; note = 2'-deoxy-2'-fluoroadenosine-3'-phosphate
  modified_base 12: mod_base = OTHER; note = 2'-O-methyluridine-3'-phosphate
  modified_base 13: mod_base = OTHER; note = 2'-O-methyluridine-3'-phosphate
  modified_base 14: mod_base = OTHER; note = 2'-O-methylguanosine-3'-phosphate
  modified_base 15: mod_base = OTHER; note = 2'-O-methyladenosine-3'-phosphate
  modified_base 16: mod_base = OTHER; note = 2'-O-methyluridine-3'-phosphate
  modified_base 17: mod_base = OTHER; note = 2'-O-methyluridine-3'-phosphate
  modified_base 18: mod_base = OTHER; note = 2'-O-methylguanosine-3'-phosphate
  modified_base 19: mod_base = OTHER; note = 2'-O-methyluridine-3'-phosphorothioate
  modified_base 20: mod_base = OTHER; note = 2'-O-methyluridine-3'-phosphorothioate
  modified_base 21: mod_base = OTHER; note = 2'-O-methyladenosine
gagaagagaaattgattgtta

SEQ ID NO: 11804 - RNA, 21 nt, synthetic construct
  source 1..21: mol_type = other RNA
  modified_base 1: mod_base = OTHER; note = 2'-O-methyladenosine-3'-phosphorothioate
  modified_base 2: mod_base = OTHER; note = 2'-O-methylguanosine-3'-phosphorothioate
  modified_base 3: mod_base = OTHER; note = 2'-O-methyladenosine-3'-phosphate
  modified_base 4: mod_base = OTHER; note = 2'-O-methyladenosine-3'-phosphate
  modified_base 5: mod_base = OTHER; note = 2'-O-methylguanosine-3'-phosphate
  modified_base 6: mod_base = OTHER; note = 2'-O-docosanyl-adenosine-3'-phosphate
  modified_base 7: mod_base = OTHER; note = 2'-deoxy-2'-fluoroguanosine-3'-phosphate
  modified_base 8: mod_base = OTHER; note = 2'-O-methyladenosine-3'-phosphate
  modified_base 9: mod_base = OTHER; note = 2'-deoxy-2'-fluoroadenosine-3'-phosphate
  modified_base 10: mod_base = OTHER; note = 2'-deoxy-2'-fluoroadenosine-3'-phosphate
  modified_base 11: mod_base = OTHER; note = 2'-deoxy-2'-fluorouridine-3'-phosphate
  modified_base 12: mod_base = OTHER; note = 2'-O-methyluridine-3'-phosphate
  modified_base 13: mod_base = OTHER; note = 2'-O-methylguanosine-3'-phosphate
  modified_base 14: mod_base = OTHER; note = 2'-O-methyladenosine-3'-phosphate
  modified_base 15: mod_base = OTHER; note = 2'-O-methyluridine-3'-phosphate
  modified_base 16: mod_base = OTHER; note = 2'-O-methyluridine-3'-phosphate
  modified_base 17: mod_base = OTHER; note = 2'-O-methylguanosine-3'-phosphate
  modified_base 18: mod_base = OTHER; note = 2'-O-methyluridine-3'-phosphate
  modified_base 19: mod_base = OTHER; note = 2'-O-methyluridine-3'-phosphorothioate
  modified_base 20: mod_base = OTHER; note = 2'-O-methyluridine-3'-phosphorothioate
  modified_base 21: mod_base = OTHER; note = 2'-O-methyladenosine
agaagagaaattgattgttta

SEQ ID NO: 11805 - RNA, 21 nt, synthetic construct
  source 1..21: mol_type = other RNA
  modified_base 1: mod_base = OTHER; note = 2'-O-methyladenosine-3'-phosphorothioate
  modified_base 2: mod_base = OTHER; note = 2'-O-methylguanosine-3'-phosphorothioate
  modified_base 3: mod_base = OTHER; note = 2'-O-methyladenosine-3'-phosphate
  modified_base 4: mod_base = OTHER; note = 2'-O-methylguanosine-3'-phosphate
  modified_base 5: mod_base = OTHER; note = 2'-O-methyladenosine-3'-phosphate
  modified_base 6: mod_base = OTHER; note = 2'-O-docosanyl-adenosine-3'-phosphate
  modified_base 7: mod_base = OTHER; note = 2'-deoxy-2'-fluoroadenosine-3'-phosphate
  modified_base 8: mod_base = OTHER; note = 2'-O-methyluridine-3'-phosphate
  modified_base 9: mod_base = OTHER; note = 2'-deoxy-2'-fluorouridine-3'-phosphate
  modified_base 10: mod_base = OTHER; note = 2'-deoxy-2'-fluoroguanosine-3'-phosphate
  modified_base 11: mod_base = OTHER; note = 2'-deoxy-2'-fluoroadenosine-3'-phosphate
  modified_base 12: mod_base = OTHER; note = 2'-O-methyluridine-3'-phosphate
  modified_base 13: mod_base = OTHER; note = 2'-O-methyluridine-3'-phosphate
  modified_base 14: mod_base = OTHER; note = 2'-O-methylguanosine-3'-phosphate
  modified_base 15: mod_base = OTHER; note = 2'-O-methyluridine-3'-phosphate
  modified_base 16: mod_base = OTHER; note = 2'-O-methyluridine-3'-phosphate
  modified_base 17: mod_base = OTHER; note = 2'-O-methyluridine-3'-phosphate
  modified_base 18: mod_base = OTHER; note = 2'-O-methyladenosine-3'-phosphate
  modified_base 19: mod_base = OTHER; note = 2'-O-methyluridine-3'-phosphorothioate
  modified_base 20: mod_base = OTHER; note = 2'-O-methylcytidine-3'-phosphorothioate
  modified_base 21: mod_base = OTHER; note = 2'-O-methyladenosine
agagaaattgattgtttatca

SEQ ID NO: 11806 - RNA, 21 nt, synthetic construct
  source 1..21: mol_type = other RNA
  modified_base 1: mod_base = OTHER; note = 2'-O-methylguanosine-3'-phosphorothioate
  modified_base 2: mod_base = OTHER; note = 2'-O-methyluridine-3'-phosphorothioate
  modified_base 3: mod_base = OTHER; note = 2'-O-methyluridine-3'-phosphate
  modified_base 4: mod_base = OTHER; note = 2'-O-methylguanosine-3'-phosphate
  modified_base 5: mod_base = OTHER; note = 2'-O-methylguanosine-3'-phosphate
  modified_base 6: mod_base = OTHER; note = 2'-O-docosanyl-uridine-3'-phosphate
  modified_base 7: mod_base = OTHER; note = 2'-deoxy-2'-fluorouridine-3'-phosphate
  modified_base 8: mod_base = OTHER; note = 2'-O-methyluridine-3'-phosphate
  modified_base 9: mod_base = OTHER; note = 2'-deoxy-2'-fluoroadenosine-3'-phosphate
  modified_base 10: mod_base = OTHER; note = 2'-deoxy-2'-fluoroadenosine-3'-phosphate
  modified_base 11: mod_base = OTHER; note = 2'-deoxy-2'-fluorouridine-3'-phosphate
  modified_base 12: mod_base = OTHER; note = 2'-O-methyluridine-3'-phosphate
  modified_base 13: mod_base = OTHER; note = 2'-O-methyluridine-3'-phosphate
  modified_base 14: mod_base = OTHER; note = 2'-O-methyluridine-3'-phosphate
  modified_base 15: mod_base = OTHER; note = 2'-O-methyluridine-3'-phosphate
  modified_base 16: mod_base = OTHER; note = 2'-O-methylcytidine-3'-phosphate
  modified_base 17: mod_base = OTHER; note = 2'-O-methyladenosine-3'-phosphate
  modified_base 18: mod_base = OTHER; note = 2'-O-methyladenosine-3'-phosphate
  modified_base 19: mod_base = OTHER; note = 2'-O-methylcytidine-3'-phosphorothioate
  modified_base 20: mod_base = OTHER; note = 2'-O-methylcytidine-3'-phosphorothioate
  modified_base 21: mod_base = OTHER; note = 2'-O-methyladenosine
gttggtttaatttttcaacca

SEQ ID NO: 11807 - RNA, 21 nt, synthetic construct
  source 1..21: mol_type = other RNA
  modified_base 1: mod_base = OTHER; note = 2'-O-methyluridine-3'-phosphorothioate
  modified_base 2: mod_base = OTHER; note = 2'-O-methyluridine-3'-phosphorothioate
  modified_base 3: mod_base = OTHER; note = 2'-O-methylguanosine-3'-phosphate
  modified_base 4: mod_base = OTHER; note = 2'-O-methylguanosine-3'-phosphate
  modified_base 5: mod_base = OTHER; note = 2'-O-methyluridine-3'-phosphate
  modified_base 6: mod_base = OTHER; note = 2'-O-docosanyl-uridine-3'-phosphate
  modified_base 7: mod_base = OTHER; note = 2'-deoxy-2'-fluorouridine-3'-phosphate
  modified_base 8: mod_base = OTHER; note = 2'-O-methyladenosine-3'-phosphate
  modified_base 9: mod_base = OTHER; note = 2'-deoxy-2'-fluoroadenosine-3'-phosphate
  modified_base 10: mod_base = OTHER; note = 2'-deoxy-2'-fluorouridine-3'-phosphate
  modified_base 11: mod_base = OTHER; note = 2'-deoxy-2'-fluorouridine-3'-phosphate
  modified_base 12: mod_base = OTHER; note = 2'-O-methyluridine-3'-phosphate
  modified_base 13: mod_base = OTHER; note = 2'-O-methyluridine-3'-phosphate
  modified_base 14: mod_base = OTHER; note = 2'-O-methyluridine-3'-phosphate
  modified_base 15: mod_base = OTHER; note = 2'-O-methylcytidine-3'-phosphate
  modified_base 16: mod_base = OTHER; note = 2'-O-methyladenosine-3'-phosphate
  modified_base 17: mod_base = OTHER; note = 2'-O-methyladenosine-3'-phosphate
  modified_base 18: mod_base = OTHER; note = 2'-O-methylcytidine-3'-phosphate
  modified_base 19: mod_base = OTHER; note = 2'-O-methylcytidine-3'-phosphorothioate
  modified_base 20: mod_base = OTHER; note = 2'-O-methylcytidine-3'-phosphorothioate
  modified_base 21: mod_base = OTHER; note = 2'-O-methyladenosine
ttggtttaatttttcaaccca

SEQ ID NO: 11808 - RNA, 21 nt, synthetic construct
  source 1..21: mol_type = other RNA
  modified_base 1: mod_base = OTHER; note = 2'-O-methyluridine-3'-phosphorothioate
  modified_base 2: mod_base = OTHER; note = 2'-O-methylguanosine-3'-phosphorothioate
  modified_base 3: mod_base = OTHER; note = 2'-O-methylguanosine-3'-phosphate
  modified_base 4: mod_base = OTHER; note = 2'-O-methyluridine-3'-phosphate
  modified_base 5: mod_base = OTHER; note = 2'-O-methyluridine-3'-phosphate
  modified_base 6: mod_base = OTHER; note = 2'-O-docosanyl-uridine-3'-phosphate
  modified_base 7: mod_base = OTHER; note = 2'-deoxy-2'-fluoroadenosine-3'-phosphate
  modified_base 8: mod_base = OTHER; note = 2'-O-methyladenosine-3'-phosphate
  modified_base 9: mod_base = OTHER; note = 2'-deoxy-2'-fluorouridine-3'-phosphate
  modified_base 10: mod_base = OTHER; note = 2'-deoxy-2'-fluorouridine-3'-phosphate
  modified_base 11: mod_base = OTHER; note = 2'-deoxy-2'-fluorouridine-3'-phosphate
  modified_base 12: mod_base = OTHER; note = 2'-O-methyluridine-3'-phosphate
  modified_base 13: mod_base = OTHER; note = 2'-O-methyluridine-3'-phosphate
  modified_base 14: mod_base = OTHER; note = 2'-O-methylcytidine-3'-phosphate
  modified_base 15: mod_base = OTHER; note = 2'-O-methyladenosine-3'-phosphate
  modified_base 16: mod_base = OTHER; note = 2'-O-methyladenosine-3'-phosphate
  modified_base 17: mod_base = OTHER; note = 2'-O-methylcytidine-3'-phosphate
  modified_base 18: mod_base = OTHER; note = 2'-O-methylcytidine-3'-phosphate
  modified_base 19: mod_base = OTHER; note = 2'-O-methylcytidine-3'-phosphorothioate
  modified_base 20: mod_base = OTHER; note = 2'-O-methyladenosine-3'-phosphorothioate
  modified_base 21: mod_base = OTHER; note = 2'-O-methyladenosine
tggtttaatttttcaacccaa

SEQ ID NO: 11809 - RNA, 21 nt, synthetic construct
  source 1..21: mol_type = other RNA
  modified_base 1: mod_base = OTHER; note = 2'-O-methyluridine-3'-phosphorothioate
  modified_base 2: mod_base = OTHER; note = 2'-O-methylcytidine-3'-phosphorothioate
  modified_base 3: mod_base = OTHER; note = 2'-O-methylguanosine-3'-phosphate
  modified_base 4: mod_base = OTHER; note = 2'-O-methyluridine-3'-phosphate
  modified_base 5: mod_base = OTHER; note = 2'-O-methylcytidine-3'-phosphate
  modified_base 6: mod_base = OTHER; note = 2'-O-docosanyl-cytidine-3'-phosphate
  modified_base 7: mod_base = OTHER; note = 2'-deoxy-2'-fluoroadenosine-3'-phosphate
  modified_base 8: mod_base = OTHER; note = 2'-O-methyluridine-3'-phosphate
  modified_base 9: mod_base = OTHER; note = 2'-deoxy-2'-fluoroadenosine-3'-phosphate
  modified_base 10: mod_base = OTHER; note = 2'-deoxy-2'-fluorocytidine-3'-phosphate
  modified_base 11: mod_base = OTHER; note = 2'-deoxy-2'-fluoroadenosine-3'-phosphate
  modified_base 12: mod_base = OTHER; note = 2'-O-methylguanosine-3'-phosphate
  modified_base 13: mod_base = OTHER; note = 2'-O-methyluridine-3'-phosphate
  modified_base 14: mod_base = OTHER; note = 2'-O-methyluridine-3'-phosphate
  modified_base 15: mod_base = OTHER; note = 2'-O-methyluridine-3'-phosphate
  modified_base 16: mod_base = OTHER; note = 2'-O-methyluridine-3'-phosphate
  modified_base 17: mod_base = OTHER; note = 2'-O-methylcytidine-3'-phosphate
  modified_base 18: mod_base = OTHER; note = 2'-O-methyladenosine-3'-phosphate
  modified_base 19: mod_base = OTHER; note = 2'-O-methyluridine-3'-phosphorothioate
  modified_base 20: mod_base = OTHER; note = 2'-O-methyluridine-3'-phosphorothioate
  modified_base 21: mod_base = OTHER; note = 2'-O-methyladenosine
tcgtccatacagttttcatta

SEQ ID NO: 11810 - RNA, 21 nt, synthetic construct
  source 1..21: mol_type = other RNA
  modified_base 1: mod_base = OTHER; note = 2'-O-methylcytidine-3'-phosphorothioate
  modified_base 2: mod_base = OTHER; note = 2'-O-methylguanosine-3'-phosphorothioate
  modified_base 3: mod_base = OTHER; note = 2'-O-methyluridine-3'-phosphate
  modified_base 4: mod_base = OTHER; note = 2'-O-methylcytidine-3'-phosphate
  modified_base 5: mod_base = OTHER; note = 2'-O-methylcytidine-3'-phosphate
  modified_base 6: mod_base = OTHER; note = 2'-O-docosanyl-adenosine-3'-phosphate
  modified_base 7: mod_base = OTHER; note = 2'-deoxy-2'-fluorouridine-3'-phosphate
  modified_base 8: mod_base = OTHER; note = 2'-O-methyladenosine-3'-phosphate
  modified_base 9: mod_base = OTHER; note = 2'-deoxy-2'-fluorocytidine-3'-phosphate
  modified_base 10: mod_base = OTHER; note = 2'-deoxy-2'-fluoroadenosine-3'-phosphate
  modified_base 11: mod_base = OTHER; note = 2'-deoxy-2'-fluoroguanosine-3'-phosphate
  modified_base 12: mod_base = OTHER; note = 2'-O-methyluridine-3'-phosphate
  modified_base 13: mod_base = OTHER; note = 2'-O-methyluridine-3'-phosphate
  modified_base 14: mod_base = OTHER; note = 2'-O-methyluridine-3'-phosphate
  modified_base 15: mod_base = OTHER; note = 2'-O-methyluridine-3'-phosphate
  modified_base 16: mod_base = OTHER; note = 2'-O-methylcytidine-3'-phosphate
  modified_base 17: mod_base = OTHER; note = 2'-O-methyladenosine-3'-phosphate
  modified_base 18: mod_base = OTHER; note = 2'-O-methyluridine-3'-phosphate
  modified_base 19: mod_base = OTHER; note = 2'-O-methyluridine-3'-phosphorothioate
  modified_base 20: mod_base = OTHER; note = 2'-O-methylcytidine-3'-phosphorothioate
  modified_base 21: mod_base = OTHER; note = 2'-O-methyladenosine
cgtccatacagttttcattca

SEQ ID NO: 11811 - RNA, 21 nt, synthetic construct
  source 1..21: mol_type = other RNA
  modified_base 1: mod_base = OTHER; note = 2'-O-methylguanosine-3'-phosphorothioate
  modified_base 2: mod_base = OTHER; note = 2'-O-methyluridine-3'-phosphorothioate
  modified_base 3: mod_base = OTHER; note = 2'-O-methylcytidine-3'-phosphate
  modified_base 4: mod_base = OTHER; note = 2'-O-methylcytidine-3'-phosphate
  modified_base 5: mod_base = OTHER; note = 2'-O-methyladenosine-3'-phosphate
  modified_base 6: mod_base = OTHER; note = 2'-O-docosanyl-uridine-3'-phosphate
  modified_base 7: mod_base = OTHER; note = 2'-deoxy-2'-fluoroadenosine-3'-phosphate
  modified_base 8: mod_base = OTHER; note = 2'-O-methylcytidine-3'-phosphate
  modified_base 9: mod_base = OTHER; note = 2'-deoxy-2'-fluoroadenosine-3'-phosphate
  modified_base 10: mod_base = OTHER; note = 2'-deoxy-2'-fluoroguanosine-3'-phosphate
  modified_base 11: mod_base = OTHER; note = 2'-deoxy-2'-fluorouridine-3'-phosphate
  modified_base 12: mod_base = OTHER; note = 2'-O-methyluridine-3'-phosphate
  modified_base 13: mod_base = OTHER; note = 2'-O-methyluridine-3'-phosphate
  modified_base 14: mod_base = OTHER; note = 2'-O-methyluridine-3'-phosphate
  modified_base 15: mod_base = OTHER; note = 2'-O-methylcytidine-3'-phosphate
  modified_base 16: mod_base = OTHER; note = 2'-O-methyladenosine-3'-phosphate
  modified_base 17: mod_base = OTHER; note = 2'-O-methyluridine-3'-phosphate
  modified_base 18: mod_base = OTHER; note = 2'-O-methyluridine-3'-phosphate
  modified_base 19: mod_base = OTHER; note = 2'-O-methylcytidine-3'-phosphorothioate
  modified_base 20: mod_base = OTHER; note = 2'-O-methyluridine-3'-phosphorothioate
  modified_base 21: mod_base = OTHER; note = 2'-O-methyladenosine
gtccatacagttttcattcta

SEQ ID NO: 11812 - RNA, 21 nt, synthetic construct
  source 1..21: mol_type = other RNA
  modified_base 1: mod_base = OTHER; note = 2'-O-methyluridine-3'-phosphorothioate
  modified_base 2: mod_base = OTHER; note = 2'-O-methylcytidine-3'-phosphorothioate
  modified_base 3: mod_base = OTHER; note = 2'-O-methylcytidine-3'-phosphate
  modified_base 4: mod_base = OTHER; note = 2'-O-methyladenosine-3'-phosphate
  modified_base 5: mod_base = OTHER; note = 2'-O-methyluridine-3'-phosphate
  modified_base 6: mod_base = OTHER; note = 2'-O-docosanyl-adenosine-3'-phosphate
  modified_base 7: mod_base = OTHER; note = 2'-deoxy-2'-fluorocytidine-3'-phosphate
  modified_base 8: mod_base = OTHER; note = 2'-O-methyladenosine-3'-phosphate
  modified_base 9: mod_base = OTHER; note = 2'-deoxy-2'-fluoroguanosine-3'-phosphate
  modified_base 10: mod_base = OTHER; note = 2'-deoxy-2'-fluorouridine-3'-phosphate
  modified_base 11: mod_base = OTHER; note = 2'-deoxy-2'-fluorouridine-3'-phosphate
  modified_base 12: mod_base = OTHER; note = 2'-O-methyluridine-3'-phosphate
  modified_base 13: mod_base = OTHER; note = 2'-O-methyluridine-3'-phosphate
  modified_base 14: mod_base = OTHER; note = 2'-O-methylcytidine-3'-phosphate
  modified_base 15: mod_base = OTHER; note = 2'-O-methyladenosine-3'-phosphate
  modified_base 16: mod_base = OTHER; note = 2'-O-methyluridine-3'-phosphate
  modified_base 17: mod_base = OTHER; note = 2'-O-methyluridine-3'-phosphate
  modified_base 18: mod_base = OTHER; note = 2'-O-methylcytidine-3'-phosphate
  modified_base 19: mod_base = OTHER; note = 2'-O-methyluridine-3'-phosphorothioate
  modified_base 20: mod_base = OTHER; note = 2'-O-methyladenosine-3'-phosphorothioate
  modified_base 21: mod_base = OTHER; note = 2'-O-methyladenosine
tccatacagttttcattctaa

SEQ ID NO: 11813 - RNA, 21 nt, synthetic construct
  source 1..21: mol_type = other RNA
  modified_base 1: mod_base = OTHER; note = 2'-O-methylcytidine-3'-phosphorothioate
  modified_base 2: mod_base = OTHER; note = 2'-O-methylcytidine-3'-phosphorothioate
  modified_base 3: mod_base = OTHER; note = 2'-O-methyladenosine-3'-phosphate
  modified_base 4: mod_base = OTHER; note = 2'-O-methyluridine-3'-phosphate
  modified_base 5: mod_base = OTHER; note = 2'-O-methyladenosine-3'-phosphate
  modified_base 6: mod_base = OTHER; note = 2'-O-docosanyl-cytidine-3'-phosphate
  modified_base 7: mod_base = OTHER; note = 2'-deoxy-2'-fluoroadenosine-3'-phosphate
  modified_base 8: mod_base = OTHER; note = 2'-O-methylguanosine-3'-phosphate
  modified_base 9: mod_base = OTHER; note = 2'-deoxy-2'-fluorouridine-3'-phosphate
  modified_base 10: mod_base = OTHER; note = 2'-deoxy-2'-fluorouridine-3'-phosphate
  modified_base 11: mod_base = OTHER; note = 2'-deoxy-2'-fluorouridine-3'-phosphate
  modified_base 12: mod_base = OTHER; note = 2'-O-methyluridine-3'-phosphate
  modified_base 13: mod_base = OTHER; note = 2'-O-methylcytidine-3'-phosphate
  modified_base 14: mod_base = OTHER; note = 2'-O-methyladenosine-3'-phosphate
  modified_base 15: mod_base = OTHER; note = 2'-O-methyluridine-3'-phosphate
  modified_base 16: mod_base = OTHER; note = 2'-O-methyluridine-3'-phosphate
  modified_base 17: mod_base = OTHER; note = 2'-O-methylcytidine-3'-phosphate
  modified_base 18: mod_base = OTHER; note = 2'-O-methyluridine-3'-phosphate
  modified_base 19: mod_base = OTHER; note = 2'-O-methyladenosine-3'-phosphorothioate
  modified_base 20: mod_base = OTHER; note = 2'-O-methyluridine-3'-phosphorothioate
  modified_base 21: mod_base = OTHER; note = 2'-O-methyladenosine
ccatacagttttcattctata

SEQ ID NO: 11814 - RNA, 21 nt, synthetic construct
  source 1..21: mol_type = other RNA
  modified_base 1: mod_base = OTHER; note = 2'-O-methylcytidine-3'-phosphorothioate
  modified_base 2: mod_base = OTHER; note = 2'-O-methyladenosine-3'-phosphorothioate
  modified_base 3: mod_base = OTHER; note = 2'-O-methyluridine-3'-phosphate
  modified_base 4: mod_base = OTHER; note = 2'-O-methyladenosine-3'-phosphate
  modified_base 5: mod_base = OTHER; note = 2'-O-methylcytidine-3'-phosphate
  modified_base 6: mod_base = OTHER; note = 2'-O-docosanyl-adenosine-3'-phosphate
  modified_base 7: mod_base = OTHER; note = 2'-deoxy-2'-fluoroguanosine-3'-phosphate
  modified_base 8: mod_base = OTHER; note = 2'-O-methyluridine-3'-phosphate
  modified_base 9: mod_base = OTHER; note = 2'-deoxy-2'-fluorouridine-3'-phosphate
  modified_base 10: mod_base = OTHER; note = 2'-deoxy-2'-fluorouridine-3'-phosphate
  modified_base 11: mod_base = OTHER; note = 2'-deoxy-2'-fluorouridine-3'-phosphate
  modified_base 12: mod_base = OTHER; note = 2'-O-methylcytidine-3'-phosphate
  modified_base 13: mod_base = OTHER; note = 2'-O-methyladenosine-3'-phosphate
  modified_base 14: mod_base = OTHER; note = 2'-O-methyluridine-3'-phosphate
  modified_base 15: mod_base = OTHER; note = 2'-O-methyluridine-3'-phosphate
  modified_base 16: mod_base = OTHER; note = 2'-O-methylcytidine-3'-phosphate
  modified_base 17: mod_base = OTHER; note = 2'-O-methyluridine-3'-phosphate
  modified_base 18: mod_base = OTHER; note = 2'-O-methyladenosine-3'-phosphate
  modified_base 19: mod_base = OTHER; note = 2'-O-methyluridine-3'-phosphorothioate
  modified_base 20: mod_base = OTHER; note = 2'-O-methylguanosine-3'-phosphorothioate
  modified_base 21: mod_base = OTHER; note = 2'-O-methyladenosine
catacagttttcattctatga

SEQ ID NO: 11815 - RNA, 21 nt, synthetic construct
  source 1..21: mol_type = other RNA
  modified_base 1: mod_base = OTHER; note = 2'-O-methyladenosine-3'-phosphorothioate
  modified_base 2: mod_base = OTHER; note = 2'-O-methyluridine-3'-phosphorothioate
  modified_base 3: mod_base = OTHER; note = 2'-O-methyladenosine-3'-phosphate
  modified_base 4: mod_base = OTHER; note = 2'-O-methylcytidine-3'-phosphate
  modified_base 5: mod_base = OTHER; note = 2'-O-methyladenosine-3'-phosphate
  modified_base 6: mod_base = OTHER; note = 2'-O-docosanyl-guanosine-3'-phosphate
  modified_base 7: mod_base = OTHER; note = 2'-deoxy-2'-fluorouridine-3'-phosphate
  modified_base 8: mod_base = OTHER; note = 2'-O-methyluridine-3'-phosphate
  modified_base 9: mod_base = OTHER; note = 2'-deoxy-2'-fluorouridine-3'-phosphate
  modified_base 10: mod_base = OTHER; note = 2'-deoxy-2'-fluorouridine-3'-phosphate
  modified_base 11: mod_base = OTHER; note = 2'-deoxy-2'-fluorocytidine-3'-phosphate
  modified_base 12: mod_base = OTHER; note = 2'-O-methyladenosine-3'-phosphate
  modified_base 13: mod_base = OTHER; note = 2'-O-methyluridine-3'-phosphate
  modified_base 14: mod_base = OTHER; note = 2'-O-methyluridine-3'-phosphate
  modified_base 15: mod_base = OTHER; note = 2'-O-methylcytidine-3'-phosphate
  modified_base 16: mod_base = OTHER; note = 2'-O-methyluridine-3'-phosphate
  modified_base 17: mod_base = OTHER; note = 2'-O-methyladenosine-3'-phosphate
  modified_base 18: mod_base = OTHER; note = 2'-O-methyluridine-3'-phosphate
  modified_base 19: mod_base = OTHER; note = 2'-O-methylguanosine-3'-phosphorothioate
  modified_base 20: mod_base = OTHER; note = 2'-O-methylcytidine-3'-phosphorothioate
  modified_base 21: mod_base = OTHER; note = 2'-O-methyladenosine
atacagttttcattctatgca

SEQ ID NO: 11816 - RNA, 21 nt, synthetic construct
  source 1..21: mol_type = other RNA
  modified_base 1: mod_base = OTHER; note = 2'-O-methyluridine-3'-phosphorothioate
  modified_base 2: mod_base = OTHER; note = 2'-O-methyladenosine-3'-phosphorothioate
  modified_base 3: mod_base = OTHER; note = 2'-O-methylcytidine-3'-phosphate
  modified_base 4: mod_base = OTHER; note = 2'-O-methyladenosine-3'-phosphate
  modified_base 5: mod_base = OTHER; note = 2'-O-methylguanosine-3'-phosphate
  modified_base 6: mod_base = OTHER; note = 2'-O-docosanyl-uridine-3'-phosphate
  modified_base 7: mod_base = OTHER; note = 2'-deoxy-2'-fluorouridine-3'-phosphate
  modified_base 8: mod_base = OTHER; note = 2'-O-methyluridine-3'-phosphate
  modified_base 9: mod_base = OTHER; note = 2'-deoxy-2'-fluorouridine-3'-phosphate
  modified_base 10: mod_base = OTHER; note = 2'-deoxy-2'-fluorocytidine-3'-phosphate
  modified_base 11: mod_base = OTHER; note = 2'-deoxy-2'-fluoroadenosine-3'-phosphate
  modified_base 12: mod_base = OTHER; note = 2'-O-methyluridine-3'-phosphate
  modified_base 13: mod_base = OTHER; note = 2'-O-methyluridine-3'-phosphate
  modified_base 14: mod_base = OTHER; note = 2'-O-methylcytidine-3'-phosphate
  modified_base 15: mod_base = OTHER; note = 2'-O-methyluridine-3'-phosphate
  modified_base 16: mod_base = OTHER; note = 2'-O-methyladenosine-3'-phosphate
  modified_base 17: mod_base = OTHER; note = 2'-O-methyluridine-3'-phosphate
  modified_base 18: mod_base = OTHER; note = 2'-O-methylguanosine-3'-phosphate
  modified_base 19: mod_base = OTHER; note = 2'-O-methylcytidine-3'-phosphorothioate
  modified_base 20: mod_base = OTHER; note = 2'-O-methyladenosine-3'-phosphorothioate
  modified_base 21: mod_base = OTHER; note = 2'-O-methyladenosine
tacagttttcattctatgcaa

SEQ ID NO: 11817 - RNA, 21 nt, synthetic construct
  source 1..21: mol_type = other RNA
  modified_base 1: mod_base = OTHER; note = 2'-O-methyladenosine-3'-phosphorothioate
  modified_base 2: mod_base = OTHER; note = 2'-O-methylcytidine-3'-phosphorothioate
  modified_base 3: mod_base = OTHER; note = 2'-O-methyladenosine-3'-phosphate
  modified_base 4: mod_base = OTHER; note = 2'-O-methylguanosine-3'-phosphate
  modified_base 5: mod_base = OTHER; note = 2'-O-methyluridine-3'-phosphate
  modified_base 6: mod_base = OTHER; note = 2'-O-docosanyl-uridine-3'-phosphate
  modified_base 7: mod_base = OTHER; note = 2'-deoxy-2'-fluorouridine-3'-phosphate
  modified_base 8: mod_base = OTHER; note = 2'-O-methyluridine-3'-phosphate
  modified_base 9: mod_base = OTHER; note = 2'-deoxy-2'-fluorocytidine-3'-phosphate
  modified_base 10: mod_base = OTHER; note = 2'-deoxy-2'-fluoroadenosine-3'-phosphate
  modified_base 11: mod_base = OTHER; note = 2'-deoxy-2'-fluorouridine-3'-phosphate
  modified_base 12: mod_base = OTHER; note = 2'-O-methyluridine-3'-phosphate
  modified_base 13: mod_base = OTHER; note = 2'-O-methylcytidine-3'-phosphate
  modified_base 14: mod_base = OTHER; note = 2'-O-methyluridine-3'-phosphate
  modified_base 15: mod_base = OTHER; note = 2'-O-methyladenosine-3'-phosphate
  modified_base 16: mod_base = OTHER; note = 2'-O-methyluridine-3'-phosphate
  modified_base 17: mod_base = OTHER; note = 2'-O-methylguanosine-3'-phosphate
  modified_base 18: mod_base = OTHER; note = 2'-O-methylcytidine-3'-phosphate
  modified_base 19: mod_base = OTHER; note = 2'-O-methyladenosine-3'-phosphorothioate
  modified_base 20: mod_base = OTHER; note = 2'-O-methyluridine-3'-phosphorothioate
  modified_base 21: mod_base = OTHER; note = 2'-O-methyladenosine
acagttttcattctatgcata

SEQ ID NO: 11818 - RNA, 21 nt, synthetic construct
  source 1..21: mol_type = other RNA
  modified_base 1: mod_base = OTHER; note = 2'-O-methylcytidine-3'-phosphorothioate
  modified_base 2: mod_base = OTHER; note = 2'-O-methyladenosine-3'-phosphorothioate
  modified_base 3: mod_base = OTHER; note = 2'-O-methylguanosine-3'-phosphate
  modified_base 4: mod_base = OTHER; note = 2'-O-methyluridine-3'-phosphate
  modified_base 5: mod_base = OTHER; note = 2'-O-methyluridine-3'-phosphate
  modified_base 6: mod_base = OTHER; note = 2'-O-docosanyl-uridine-3'-phosphate
  modified_base 7: mod_base = OTHER; note = 2'-deoxy-2'-fluorouridine-3'-phosphate
  modified_base 8: mod_base = OTHER; note = 2'-O-methylcytidine-3'-phosphate
  modified_base 9: mod_base = OTHER; note = 2'-deoxy-2'-fluoroadenosine-3'-phosphate
  modified_base 10: mod_base = OTHER; note = 2'-deoxy-2'-fluorouridine-3'-phosphate
  modified_base 11: mod_base = OTHER; note = 2'-deoxy-2'-fluorouridine-3'-phosphate
  modified_base 12: mod_base = OTHER; note = 2'-O-methylcytidine-3'-phosphate
  modified_base 13: mod_base = OTHER; note = 2'-O-methyluridine-3'-phosphate
  modified_base 14: mod_base = OTHER; note = 2'-O-methyladenosine-3'-phosphate
  modified_base 15: mod_base = OTHER; note = 2'-O-methyluridine-3'-phosphate
  modified_base 16: mod_base = OTHER; note = 2'-O-methylguanosine-3'-phosphate
  modified_base 17: mod_base = OTHER; note = 2'-O-methylcytidine-3'-phosphate
  modified_base 18: mod_base = OTHER; note = 2'-O-methyladenosine-3'-phosphate
  modified_base 19: mod_base = OTHER; note = 2'-O-methyluridine-3'-phosphorothioate
  modified_base 20: mod_base = OTHER; note = 2'-O-methylguanosine-3'-phosphorothioate
  modified_base 21: mod_base = OTHER; note = 2'-O-methyladenosine
cagttttcattctatgcatga

SEQ ID NO: 11819 - RNA, 21 nt, synthetic construct
  source 1..21: mol_type = other RNA
  modified_base 1: mod_base = OTHER; note = 2'-O-methyladenosine-3'-phosphorothioate
  modified_base 2: mod_base = OTHER; note = 2'-O-methylguanosine-3'-phosphorothioate
  modified_base 3: mod_base = OTHER; note = 2'-O-methyluridine-3'-phosphate
  modified_base 4: mod_base = OTHER; note = 2'-O-methyluridine-3'-phosphate
  modified_base 5: mod_base = OTHER; note = 2'-O-methyluridine-3'-phosphate
  modified_base 6: mod_base = OTHER; note = 2'-O-docosanyl-uridine-3'-phosphate
  modified_base 7: mod_base = OTHER; note = 2'-deoxy-2'-fluorocytidine-3'-phosphate
  modified_base 8: mod_base = OTHER; note = 2'-O-methyladenosine-3'-phosphate
  modified_base 9: mod_base = OTHER; note = 2'-deoxy-2'-fluorouridine-3'-phosphate
  modified_base 10: mod_base = OTHER; note = 2'-deoxy-2'-fluorouridine-3'-phosphate
  modified_base 11: mod_base = OTHER; note = 2'-deoxy-2'-fluorocytidine-3'-phosphate
  modified_base 12: mod_base = OTHER; note = 2'-O-methyluridine-3'-phosphate
  modified_base 13: mod_base = OTHER; note = 2'-O-methyladenosine-3'-phosphate
  modified_base 14: mod_base = OTHER; note = 2'-O-methyluridine-3'-phosphate
  modified_base 15: mod_base = OTHER; note = 2'-O-methylguanosine-3'-phosphate
  modified_base 16: mod_base = OTHER; note = 2'-O-methylcytidine-3'-phosphate
  modified_base 17: mod_base = OTHER; note = 2'-O-methyladenosine-3'-phosphate
  modified_base 18: mod_base = OTHER; note = 2'-O-methyluridine-3'-phosphate
  modified_base 19: mod_base = OTHER; note = 2'-O-methylguanosine-3'-phosphorothioate
  modified_base 20: mod_base = OTHER; note = 2'-O-methylguanosine-3'-phosphorothioate
  modified_base 21: mod_base = OTHER; note = 2'-O-methyladenosine
agttttcattctatgcatgga

SEQ ID NO: 11820 - RNA, 21 nt, synthetic construct
  source 1..21: mol_type = other RNA
  modified_base 1: mod_base = OTHER; note = 2'-O-methylguanosine-3'-phosphorothioate
  modified_base 2: mod_base = OTHER; note = 2'-O-methylguanosine-3'-phosphorothioate
  modified_base 3: mod_base = OTHER; note = 2'-O-methyladenosine-3'-phosphate
  modified_base 4: mod_base = OTHER; note = 2'-O-methyluridine-3'-phosphate
  modified_base 5: mod_base = OTHER; note = 2'-O-methyluridine-3'-phosphate
  modified_base 6: mod_base = OTHER; note = 2'-O-docosanyl-guanosine-3'-phosphate
  modified_base 7: mod_base = OTHER; note = 2'-deoxy-2'-fluorouridine-3'-phosphate
  modified_base 8: mod_base = OTHER; note = 2'-O-methylguanosine-3'-phosphate
  modified_base 9: mod_base = OTHER; note = 2'-deoxy-2'-fluorouridine-3'-phosphate
  modified_base 10: mod_base = OTHER; note = 2'-deoxy-2'-fluoroguanosine-3'-phosphate
  modified_base 11: mod_base = OTHER; note = 2'-deoxy-2'-fluorocytidine-3'-phosphate
  modified_base 12: mod_base = OTHER; note = 2'-O-methylcytidine-3'-phosphate
  modified_base 13: mod_base = OTHER; note = 2'-O-methyluridine-3'-phosphate
  modified_base 14: mod_base = OTHER; note = 2'-O-methyladenosine-3'-phosphate
  modified_base 15: mod_base = OTHER; note = 2'-O-methyladenosine-3'-phosphate
  modified_base 16: mod_base = OTHER; note = 2'-O-methyladenosine-3'-phosphate
  modified_base 17: mod_base = OTHER; note = 2'-O-methyluridine-3'-phosphate
  modified_base 18: mod_base = OTHER; note = 2'-O-methyluridine-3'-phosphate
  modified_base 19: mod_base = OTHER; note = 2'-O-methyluridine-3'-phosphorothioate
  modified_base 20: mod_base = OTHER; note = 2'-O-methyluridine-3'-phosphorothioate
  modified_base 21: mod_base = OTHER; note = 2'-O-methyladenosine
ggattgtgtgcctaaatttta

SEQ ID NO: 11821 - RNA, 21 nt, synthetic construct
  source 1..21: mol_type = other RNA
  modified_base 1: mod_base = OTHER; note = 2'-O-methylcytidine-3'-phosphorothioate
  modified_base 2: mod_base = OTHER; note = 2'-O-methyluridine-3'-phosphorothioate
  modified_base 3: mod_base = OTHER; note = 2'-O-methyladenosine-3'-phosphate
  modified_base 4: mod_base = OTHER; note = 2'-O-methyladenosine-3'-phosphate
  modified_base 5: mod_base = OTHER; note = 2'-O-methyladenosine-3'-phosphate
  modified_base 6: mod_base = OTHER; note = 2'-O-docosanyl-uridine-3'-phosphate
  modified_base 7: mod_base = OTHER; note = 2'-deoxy-2'-fluorouridine-3'-phosphate
  modified_base 8: mod_base = OTHER; note = 2'-O-methyluridine-3'-phosphate
  modified_base 9: mod_base = OTHER; note = 2'-deoxy-2'-fluorouridine-3'-phosphate
  modified_base 10: mod_base = OTHER; note = 2'-deoxy-2'-fluoroguanosine-3'-phosphate
  modified_base 11: mod_base = OTHER; note = 2'-deoxy-2'-fluorouridine-3'-phosphate
  modified_base 12: mod_base = OTHER; note = 2'-O-methylcytidine-3'-phosphate
  modified_base 13: mod_base = OTHER; note = 2'-O-methyluridine-3'-phosphate
  modified_base 14: mod_base = OTHER; note = 2'-O-methyladenosine-3'-phosphate
  modified_base 15: mod_base = OTHER; note = 2'-O-methyladenosine-3'-phosphate
  modified_base 16: mod_base = OTHER; note = 2'-O-methylcytidine-3'-phosphate
  modified_base 17: mod_base = OTHER; note = 2'-O-methyladenosine-3'-phosphate
  modified_base 18: mod_base = OTHER; note = 2'-O-methyladenosine-3'-phosphate
  modified_base 19: mod_base = OTHER; note = 2'-O-methyladenosine-3'-phosphorothioate
  modified_base 20: mod_base = OTHER; note = 2'-O-methyluridine-3'-phosphorothioate
  modified_base 21: mod_base = OTHER; note = 2'-O-methyladenosine
ctaaattttgtctaacaaata

SEQ ID NO: 11822 - RNA, 21 nt, synthetic construct
  source 1..21: mol_type = other RNA
  modified_base 1: mod_base = OTHER; note = 2'-O-methyluridine-3'-phosphorothioate
  modified_base 2: mod_base = OTHER; note = 2'-O-methyladenosine-3'-phosphorothioate
  modified_base 3: mod_base = OTHER; note = 2'-O-methylguanosine-3'-phosphate
  modified_base 4: mod_base = OTHER; note = 2'-O-methyladenosine-3'-phosphate
  modified_base 5: mod_base = OTHER; note = 2'-O-methyladenosine-3'-phosphate
  modified_base 6: mod_base = OTHER; note = 2'-O-docosanyl-uridine-3'-phosphate
  modified_base 7: mod_base = OTHER; note = 2'-deoxy-2'-fluoroguanosine-3'-phosphate
  modified_base 8: mod_base = OTHER; note = 2'-O-methyladenosine-3'-phosphate
  modified_base 9: mod_base = OTHER; note = 2'-deoxy-2'-fluorocytidine-3'-phosphate
  modified_base 10: mod_base = OTHER; note = 2'-deoxy-2'-fluoroadenosine-3'-phosphate
  modified_base 11: mod_base = OTHER; note = 2'-deoxy-2'-fluorouridine-3'-phosphate
  modified_base 12: mod_base = OTHER; note = 2'-O-methyluridine-3'-phosphate
  modified_base 13: mod_base = OTHER; note = 2'-O-methyluridine-3'-phosphate
  modified_base 14: mod_base = OTHER; note = 2'-O-methyladenosine-3'-phosphate
  modified_base 15: mod_base = OTHER; note = 2'-O-methylcytidine-3'-phosphate
  modified_base 16: mod_base = OTHER; note = 2'-O-methyluridine-3'-phosphate
  modified_base 17: mod_base = OTHER; note = 2'-O-methyladenosine-3'-phosphate
  modified_base 18: mod_base = OTHER; note = 2'-O-methyladenosine-3'-phosphate
  modified_base 19: mod_base = OTHER; note = 2'-O-methyluridine-3'-phosphorothioate
  modified_base 20: mod_base = OTHER; note = 2'-O-methyladenosine-3'-phosphorothioate
  modified_base 21: mod_base = OTHER; note = 2'-O-methyladenosine
tagaatgacatttactaataa

SEQ ID NO: 11823 - RNA, 21 nt, synthetic construct
  source 1..21: mol_type = other RNA
  modified_base 1: mod_base = OTHER; note = 2'-O-methyluridine-3'-phosphorothioate
  modified_base 2: mod_base = OTHER; note = 2'-O-methylguanosine-3'-phosphorothioate
  modified_base 3: mod_base = OTHER; note = 2'-O-methylcytidine-3'-phosphate
  modified_base 4: mod_base = OTHER; note = 2'-O-methylcytidine-3'-phosphate
  modified_base 5: mod_base = OTHER; note = 2'-O-methyluridine-3'-phosphate
  modified_base 6: mod_base = OTHER; note = 2'-O-docosanyl-adenosine-3'-phosphate
  modified_base 7: mod_base = OTHER; note = 2'-deoxy-2'-fluoroadenosine-3'-phosphate
  modified_base 8: mod_base = OTHER; note = 2'-O-methyladenosine-3'-phosphate
  modified_base 9: mod_base = OTHER; note = 2'-deoxy-2'-fluorouridine-3'-phosphate
  modified_base 10: mod_base = OTHER; note = 2'-deoxy-2'-fluorouridine-3'-phosphate
  modified_base 11: mod_base = OTHER; note = 2'-deoxy-2'-fluorouridine-3'-phosphate
  modified_base 12: mod_base = OTHER; note = 2'-O-methyluridine-3'-phosphate
  modified_base 13: mod_base = OTHER; note = 2'-O-methylguanosine-3'-phosphate
  modified_base 14: mod_base = OTHER; note = 2'-O-methyluridine-3'-phosphate
  modified_base 15: mod_base = OTHER; note = 2'-O-methylcytidine-3'-phosphate
  modified_base 16: mod_base = OTHER; note = 2'-O-methyluridine-3'-phosphate
  modified_base 17: mod_base = OTHER; note = 2'-O-methyladenosine-3'-phosphate
  modified_base 18: mod_base = OTHER; note = 2'-O-methyladenosine-3'-phosphate
  modified_base 19: mod_base = OTHER; note = 2'-O-methylcytidine-3'-phosphorothioate
  modified_base 20: mod_base = OTHER; note = 2'-O-methyladenosine-3'-phosphorothioate
  modified_base 21: mod_base = OTHER; note = 2'-O-methyladenosine
tgcctaaattttgtctaacaa

SEQ ID NO: 11824 - RNA, 21 nt, synthetic construct
  source 1..21: mol_type = other RNA
  modified_base 1: mod_base = OTHER; note = 2'-O-methyluridine-3'-phosphorothioate
  modified_base 2: mod_base = OTHER; note = 2'-O-methyladenosine-3'-phosphorothioate
  modified_base 3: mod_base = OTHER; note = 2'-O-methyladenosine-3'-phosphate
  modified_base 4: mod_base = OTHER; note = 2'-O-methyladenosine-3'-phosphate
  modified_base 5: mod_base = OTHER; note = 2'-O-methyluridine-3'-phosphate
  modified_base 6: mod_base = OTHER; note = 2'-O-docosanyl-uridine-3'-phosphate
  modified_base 7: mod_base = OTHER; note = 2'-deoxy-2'-fluorouridine-3'-phosphate
  modified_base 8: mod_base = OTHER; note = 2'-O-methyluridine-3'-phosphate
  modified_base 9: mod_base = OTHER; note = 2'-deoxy-2'-fluoroguanosine-3'-phosphate
  modified_base 10: mod_base = OTHER; note = 2'-deoxy-2'-fluorouridine-3'-phosphate
  modified_base 11: mod_base = OTHER; note = 2'-deoxy-2'-fluorocytidine-3'-phosphate
  modified_base 12: mod_base = OTHER; note = 2'-O-methyluridine-3'-phosphate
  modified_base 13: mod_base = OTHER; note = 2'-O-methyladenosine-3'-phosphate
  modified_base 14: mod_base = OTHER; note = 2'-O-methyladenosine-3'-phosphate
  modified_base 15: mod_base = OTHER; note = 2'-O-methylcytidine-3'-phosphate
  modified_base 16: mod_base = OTHER; note = 2'-O-methyladenosine-3'-phosphate
  modified_base 17: mod_base = OTHER; note = 2'-O-methyladenosine-3'-phosphate
  modified_base 18: mod_base = OTHER; note = 2'-O-methyladenosine-3'-phosphate
  modified_base 19: mod_base = OTHER; note = 2'-O-methyluridine-3'-phosphorothioate
  modified_base 20: mod_base = OTHER; note = 2'-O-methylguanosine-3'-phosphorothioate
  modified_base 21: mod_base = OTHER; note = 2'-O-methyladenosine
taaattttgtctaacaaatga

SEQ ID NO: 11825 - RNA, 21 nt, synthetic construct
  source 1..21: mol_type = other RNA
  modified_base 1: mod_base = OTHER; note = 2'-O-methyladenosine-3'-phosphorothioate
  modified_base 2: mod_base = OTHER; note = 2'-O-methyladenosine-3'-phosphorothioate
  modified_base 3: mod_base = OTHER; note = 2'-O-methyladenosine-3'-phosphate
  modified_base 4: mod_base = OTHER; note = 2'-O-methyluridine-3'-phosphate
  modified_base 5: mod_base = OTHER; note = 2'-O-methyluridine-3'-phosphate
  modified_base 6: mod_base = OTHER; note = 2'-O-docosanyl-uridine-3'-phosphate
  modified_base 7: mod_base = OTHER; note = 2'-deoxy-2'-fluorouridine-3'-phosphate
  modified_base 8: mod_base = OTHER; note = 2'-O-methylguanosine-3'-phosphate
  modified_base 9: mod_base = OTHER; note = 2'-deoxy-2'-fluorouridine-3'-phosphate
  modified_base 10: mod_base = OTHER; note = 2'-deoxy-2'-fluorocytidine-3'-phosphate
  modified_base 11: mod_base = OTHER; note = 2'-deoxy-2'-fluorouridine-3'-phosphate
  modified_base 12: mod_base = OTHER; note = 2'-O-methyladenosine-3'-phosphate
  modified_base 13: mod_base = OTHER; note = 2'-O-methyladenosine-3'-phosphate
  modified_base 14: mod_base = OTHER; note = 2'-O-methylcytidine-3'-phosphate
  modified_base 15: mod_base = OTHER; note = 2'-O-methyladenosine-3'-phosphate
  modified_base 16: mod_base = OTHER; note = 2'-O-methyladenosine-3'-phosphate
  modified_base 17: mod_base = OTHER; note = 2'-O-methyladenosine-3'-phosphate
  modified_base 18: mod_base = OTHER; note = 2'-O-methyluridine-3'-phosphate
  modified_base 19: mod_base = OTHER; note = 2'-O-methylguanosine-3'-phosphorothioate
  modified_base 20: mod_base = OTHER; note = 2'-O-methylcytidine-3'-phosphorothioate
  modified_base 21: mod_base = OTHER; note = 2'-O-methyladenosine
aaattttgtctaacaaatgca

SEQ ID NO: 11826 - RNA, 21 nt, synthetic construct
  source 1..21: mol_type = other RNA
  modified_base 1: mod_base = OTHER; note = 2'-O-methyluridine-3'-phosphorothioate
  modified_base 2: mod_base = OTHER; note = 2'-O-methyluridine-3'-phosphorothioate
  modified_base 3: mod_base = OTHER; note = 2'-O-methyluridine-3'-phosphate
  modified_base 4: mod_base = OTHER; note = 2'-O-methyluridine-3'-phosphate
  modified_base 5: mod_base = OTHER; note = 2'-O-methylguanosine-3'-phosphate
  modified_base 6: mod_base = OTHER; note = 2'-O-docosanyl-uridine-3'-phosphate
  modified_base 7: mod_base = OTHER; note = 2'-deoxy-2'-fluorocytidine-3'-phosphate
  modified_base 8: mod_base = OTHER; note = 2'-O-methyluridine-3'-phosphate
  modified_base 9: mod_base = OTHER; note = 2'-deoxy-2'-fluoroadenosine-3'-phosphate
  modified_base 10: mod_base = OTHER; note = 2'-deoxy-2'-fluoroadenosine-3'-phosphate
  modified_base 11: mod_base = OTHER; note = 2'-deoxy-2'-fluorocytidine-3'-phosphate
  modified_base 12: mod_base = OTHER; note = 2'-O-methyladenosine-3'-phosphate
  modified_base 13: mod_base = OTHER; note = 2'-O-methyladenosine-3'-phosphate
  modified_base 14: mod_base = OTHER; note = 2'-O-methyladenosine-3'-phosphate
  modified_base 15: mod_base = OTHER; note = 2'-O-methyluridine-3'-phosphate
  modified_base 16: mod_base = OTHER; note = 2'-O-methylguanosine-3'-phosphate
  modified_base 17: mod_base = OTHER; note = 2'-O-methylcytidine-3'-phosphate
  modified_base 18: mod_base = OTHER; note = 2'-O-methyladenosine-3'-phosphate
  modified_base 19: mod_base = OTHER; note = 2'-O-methyladenosine-3'-phosphorothioate
  modified_base 20: mod_base = OTHER; note = 2'-O-methylguanosine-3'-phosphorothioate
  modified_base 21: mod_base = OTHER; note = 2'-O-methyladenosine
ttttgtctaacaaatgcaaga

SEQ ID NO: 11827 - RNA, 21 nt, synthetic construct
  source 1..21: mol_type = other RNA
  modified_base 1: mod_base = OTHER; note = 2'-O-methylcytidine-3'-phosphorothioate
  modified_base 2: mod_base = OTHER; note = 2'-O-methyluridine-3'-phosphorothioate
  modified_base 3: mod_base = OTHER; note = 2'-O-methyluridine-3'-phosphate
  modified_base 4: mod_base = OTHER; note = 2'-O-methylcytidine-3'-phosphate
  modified_base 5: mod_base = OTHER; note = 2'-O-methylcytidine-3'-phosphate
  modified_base 6: mod_base = OTHER; note = 2'-O-docosanyl-adenosine-3'-phosphate
  modified_base 7: mod_base = OTHER; note = 2'-deoxy-2'-fluorouridine-3'-phosphate
  modified_base 8: mod_base = OTHER; note = 2'-O-methyladenosine-3'-phosphate
  modified_base 9: mod_base = OTHER; note = 2'-deoxy-2'-fluoroguanosine-3'-phosphate
  modified_base 10: mod_base = OTHER; note = 2'-deoxy-2'-fluoroguanosine-3'-phosphate
  modified_base 11: mod_base = OTHER; note = 2'-deoxy-2'-fluorocytidine-3'-phosphate
  modified_base 12: mod_base = OTHER; note = 2'-O-methyluridine-3'-phosphate
  modified_base 13: mod_base = OTHER; note = 2'-O-methyladenosine-3'-phosphate
  modified_base 14: mod_base = OTHER; note = 2'-O-methyladenosine-3'-phosphate
  modified_base 15: mod_base = OTHER; note = 2'-O-methyladenosine-3'-phosphate
  modified_base 16: mod_base = OTHER; note = 2'-O-methyluridine-3'-phosphate
  modified_base 17: mod_base = OTHER; note = 2'-O-methyladenosine-3'-phosphate
  modified_base 18: mod_base = OTHER; note = 2'-O-methyladenosine-3'-phosphate
  modified_base 19: mod_base = OTHER; note = 2'-O-methyluridine-3'-phosphorothioate
  modified_base 20: mod_base = OTHER; note = 2'-O-methyladenosine-3'-phosphorothioate
  modified_base 21: mod_base = OTHER; note = 2'-O-methyladenosine
cttccataggctaaataataa

SEQ ID NO: 11828 - RNA, 21 nt, synthetic construct
  source 1..21: mol_type = other RNA
  modified_base 1: mod_base = OTHER; note = 2'-O-methylguanosine-3'-phosphorothioate
  modified_base 2: mod_base = OTHER; note = 2'-O-methylcytidine-3'-phosphorothioate
  modified_base 3: mod_base = OTHER; note = 2'-O-methylcytidine-3'-phosphate
  modified_base 4: mod_base = OTHER; note = 2'-O-methyladenosine-3'-phosphate
  modified_base 5: mod_base = OTHER; note = 2'-O-methyladenosine-3'-phosphate
  modified_base 6: mod_base = OTHER; note = 2'-O-docosanyl-adenosine-3'-phosphate
  modified_base 7: mod_base = OTHER; note = 2'-deoxy-2'-fluoroadenosine-3'-phosphate
  modified_base 8: mod_base = OTHER; note = 2'-O-methyluridine-3'-phosphate
  modified_base 9: mod_base = OTHER; note = 2'-deoxy-2'-fluoroadenosine-3'-phosphate
  modified_base 10: mod_base = OTHER; note = 2'-deoxy-2'-fluorouridine-3'-phosphate
  modified_base 11: mod_base = OTHER; note = 2'-deoxy-2'-fluorouridine-3'-phosphate
  modified_base 12: mod_base = OTHER; note = 2'-O-methyladenosine-3'-phosphate
  modified_base 13: mod_base = OTHER; note = 2'-O-methyladenosine-3'-phosphate
  modified_base 14: mod_base = OTHER; note = 2'-O-methyladenosine-3'-phosphate
  modified_base 15: mod_base = OTHER; note = 2'-O-methyluridine-3'-phosphate
  modified_base 16: mod_base = OTHER; note = 2'-O-methyluridine-3'-phosphate
  modified_base 17: mod_base = OTHER; note = 2'-O-methylcytidine-3'-phosphate
  modified_base 18: mod_base = OTHER; note = 2'-O-methyluridine-3'-phosphate
  modified_base 19: mod_base = OTHER; note = 2'-O-methyladenosine-3'-phosphorothioate
  modified_base 20: mod_base = OTHER; note = 2'-O-methylguanosine-3'-phosphorothioate
  modified_base 21: mod_base = OTHER; note = 2'-O-methyladenosine
gccaaaatattaaattctaga

SEQ ID NO: 11829 - RNA, 21 nt, synthetic construct
  source 1..21: mol_type = other RNA
  modified_base 1: mod_base = OTHER; note = 2'-O-methyluridine-3'-phosphorothioate
  modified_base 2: mod_base = OTHER; note = 2'-O-methyladenosine-3'-phosphorothioate
  modified_base 3: mod_base = OTHER; note = 2'-O-methyladenosine-3'-phosphate
  modified_base 4: mod_base = OTHER; note = 2'-O-methyladenosine-3'-phosphate
  modified_base 5: mod_base = OTHER; note = 2'-O-methyluridine-3'-phosphate
  modified_base 6: mod_base = OTHER; note = 2'-O-docosanyl-uridine-3'-phosphate
  modified_base 7: mod_base = OTHER; note = 2'-deoxy-2'-fluorocytidine-3'-phosphate
  modified_base 8: mod_base = OTHER; note = 2'-O-methyluridine-3'-phosphate
  modified_base 9: mod_base = OTHER; note = 2'-deoxy-2'-fluoroadenosine-3'-phosphate
  modified_base 10: mod_base = OTHER; note = 2'-deoxy-2'-fluoroguanosine-3'-phosphate
  modified_base 11: mod_base = OTHER; note = 2'-deoxy-2'-fluorouridine-3'-phosphate
  modified_base 12: mod_base = OTHER; note = 2'-O-methyluridine-3'-phosphate
  modified_base 13: mod_base = OTHER; note = 2'-O-methylcytidine-3'-phosphate
  modified_base 14: mod_base = OTHER; note = 2'-O-methyluridine-3'-phosphate
  modified_base 15: mod_base = OTHER; note = 2'-O-methyluridine-3'-phosphate
  modified_base 16: mod_base = OTHER; note = 2'-O-methyluridine-3'-phosphate
  modified_base 17: mod_base = OTHER; note = 2'-O-methyluridine-3'-phosphate
  modified_base 18: mod_base = OTHER; note = 2'-O-methylcytidine-3'-phosphate
  modified_base 19: mod_base = OTHER; note = 2'-O-methylcytidine-3'-phosphorothioate
  modified_base 20: mod_base = OTHER; note = 2'-O-methylguanosine-3'-phosphorothioate
  modified_base 21: mod_base = OTHER; note = 2'-O-methyladenosine
taaattctagttcttttccga

SEQ ID NO: 11830 - RNA, 21 nt, synthetic construct
  source 1..21: mol_type = other RNA
  modified_base 1: mod_base = OTHER; note = 2'-O-methyladenosine-3'-phosphorothioate
  modified_base 2: mod_base = OTHER; note = 2'-O-methyladenosine-3'-phosphorothioate
  modified_base 3: mod_base = OTHER; note = 2'-O-methyladenosine-3'-phosphate
  modified_base 4: mod_base = OTHER; note = 2'-O-methyluridine-3'-phosphate
  modified_base 5: mod_base = OTHER; note = 2'-O-methyluridine-3'-phosphate
  modified_base 6: mod_base = OTHER; note = 2'-O-docosanyl-cytidine-3'-phosphate
  modified_base 7: mod_base = OTHER; note = 2'-deoxy-2'-fluorouridine-3'-phosphate
  modified_base 8: mod_base = OTHER; note = 2'-O-methyladenosine-3'-phosphate
  modified_base 9: mod_base = OTHER; note = 2'-deoxy-2'-fluoroguanosine-3'-phosphate
  modified_base 10: mod_base = OTHER; note = 2'-deoxy-2'-fluorouridine-3'-phosphate
  modified_base 11: mod_base = OTHER; note = 2'-deoxy-2'-fluorouridine-3'-phosphate
  modified_base 12: mod_base = OTHER; note = 2'-O-methylcytidine-3'-phosphate
  modified_base 13: mod_base = OTHER; note = 2'-O-methyluridine-3'-phosphate
  modified_base 14: mod_base = OTHER; note = 2'-O-methyluridine-3'-phosphate
  modified_base 15: mod_base = OTHER; note = 2'-O-methyluridine-3'-phosphate
  modified_base 16: mod_base = OTHER; note = 2'-O-methyluridine-3'-phosphate
  modified_base 17: mod_base = OTHER; note = 2'-O-methylcytidine-3'-phosphate
  modified_base 18: mod_base = OTHER; note = 2'-O-methylcytidine-3'-phosphate
  modified_base 19: mod_base = OTHER; note = 2'-O-methylguanosine-3'-phosphorothioate
  modified_base 20: mod_base = OTHER; note = 2'-O-methylcytidine-3'-phosphorothioate
  modified_base 21: mod_base = OTHER; note = 2'-O-methyladenosine
aaattctagttcttttccgca

SEQ ID NO: 11831 - RNA, 21 nt, synthetic construct
  source 1..21: mol_type = other RNA
  modified_base 1: mod_base = OTHER; note = 2'-O-methyladenosine-3'-phosphorothioate
  modified_base 2: mod_base = OTHER; note = 2'-O-methyladenosine-3'-phosphorothioate
  modified_base 3: mod_base = OTHER; note = 2'-O-methyluridine-3'-phosphate
  modified_base 4: mod_base = OTHER; note = 2'-O-methyluridine-3'-phosphate
  modified_base 5: mod_base = OTHER; note = 2'-O-methylcytidine-3'-phosphate
  modified_base 6: mod_base = OTHER; note = 2'-O-docosanyl-uridine-3'-phosphate
  modified_base 7: mod_base = OTHER; note = 2'-deoxy-2'-fluoroadenosine-3'-phosphate
  modified_base 8: mod_base = OTHER; note = 2'-O-methylguanosine-3'-phosphate
  modified_base 9: mod_base = OTHER; note = 2'-deoxy-2'-fluorouridine-3'-phosphate
  modified_base 10: mod_base = OTHER; note = 2'-deoxy-2'-fluorouridine-3'-phosphate
  modified_base 11: mod_base = OTHER; note = 2'-deoxy-2'-fluorocytidine-3'-phosphate
  modified_base 12: mod_base = OTHER; note = 2'-O-methyluridine-3'-phosphate
  modified_base 13: mod_base = OTHER; note = 2'-O-methyluridine-3'-phosphate
  modified_base 14: mod_base = OTHER; note = 2'-O-methyluridine-3'-phosphate
  modified_base 15: mod_base = OTHER; note = 2'-O-methyluridine-3'-phosphate
  modified_base 16: mod_base = OTHER; note = 2'-O-methylcytidine-3'-phosphate
  modified_base 17: mod_base = OTHER; note = 2'-O-methylcytidine-3'-phosphate
  modified_base 18: mod_base = OTHER; note = 2'-O-methylguanosine-3'-phosphate
  modified_base 19: mod_base = OTHER; note = 2'-O-methylcytidine-3'-phosphorothioate
  modified_base 20: mod_base = OTHER; note = 2'-O-methyladenosine-3'-phosphorothioate
  modified_base 21: mod_base = OTHER; note = 2'-O-methyladenosine
aattctagttcttttccgcaa

SEQ ID NO: 11832 - RNA, 21 nt, synthetic construct
  source 1..21: mol_type = other RNA
  modified_base 1: mod_base = OTHER; note = 2'-O-methylcytidine-3'-phosphorothioate
  modified_base 2: mod_base = OTHER; note = 2'-O-methyluridine-3'-phosphorothioate
  modified_base 3: mod_base = OTHER; note = 2'-O-methyladenosine-3'-phosphate
  modified_base 4: mod_base = OTHER; note = 2'-O-methylguanosine-3'-phosphate
  modified_base 5: mod_base = OTHER; note = 2'-O-methyluridine-3'-phosphate
  modified_base 6: mod_base = OTHER; note = 2'-O-docosanyl-uridine-3'-phosphate
  modified_base 7: mod_base = OTHER; note = 2'-deoxy-2'-fluorocytidine-3'-phosphate
  modified_base 8: mod_base = OTHER; note = 2'-O-methyluridine-3'-phosphate
  modified_base 9: mod_base = OTHER; note = 2'-deoxy-2'-fluorouridine-3'-phosphate
  modified_base 10: mod_base = OTHER; note = 2'-deoxy-2'-fluorouridine-3'-phosphate
  modified_base 11: mod_base = OTHER; note = 2'-deoxy-2'-fluorouridine-3'-phosphate
  modified_base 12: mod_base = OTHER; note = 2'-O-methylcytidine-3'-phosphate
  modified_base 13: mod_base = OTHER; note = 2'-O-methylcytidine-3'-phosphate
  modified_base 14: mod_base = OTHER; note = 2'-O-methylguanosine-3'-phosphate
  modified_base 15: mod_base = OTHER; note = 2'-O-methylcytidine-3'-phosphate
  modified_base 16: mod_base = OTHER; note = 2'-O-methyladenosine-3'-phosphate
  modified_base 17: mod_base = OTHER; note = 2'-O-methyladenosine-3'-phosphate
  modified_base 18: mod_base = OTHER; note = 2'-O-methyluridine-3'-phosphate
  modified_base 19: mod_base = OTHER; note = 2'-O-methylguanosine-3'-phosphorothioate
  modified_base 20: mod_base = OTHER; note = 2'-O-methyladenosine-3'-phosphorothioate
  modified_base 21: mod_base = OTHER; note = 2'-O-methyladenosine
ctagttcttttccgcaatgaa

SEQ ID NO: 11833 - RNA, 21 nt, synthetic construct
  source 1..21: mol_type = other RNA
  modified_base 1: mod_base = OTHER; note = 2'-O-methyladenosine-3'-phosphorothioate
  modified_base 2: mod_base = OTHER; note = 2'-O-methyluridine-3'-phosphorothioate
  modified_base 3: mod_base = OTHER; note = 2'-O-methyluridine-3'-phosphate
  modified_base 4: mod_base = OTHER; note = 2'-O-methylcytidine-3'-phosphate
  modified_base 5: mod_base = OTHER; note = 2'-O-methyluridine-3'-phosphate
  modified_base 6: mod_base = OTHER; note = 2'-O-docosanyl-adenosine-3'-phosphate
  modified_base 7: mod_base = OTHER; note = 2'-deoxy-2'-fluoroguanosine-3'-phosphate
  modified_base 8: mod_base = OTHER; note = 2'-O-methyluridine-3'-phosphate
  modified_base 9: mod_base = OTHER; note = 2'-deoxy-2'-fluorouridine-3'-phosphate
  modified_base 10: mod_base = OTHER; note = 2'-deoxy-2'-fluorocytidine-3'-phosphate
  modified_base 11: mod_base = OTHER; note = 2'-deoxy-2'-fluorouridine-3'-phosphate
  modified_base 12: mod_base = OTHER; note = 2'-O-methyluridine-3'-phosphate
  modified_base 13: mod_base = OTHER; note = 2'-O-methyluridine-3'-phosphate
  modified_base 14: mod_base = OTHER; note = 2'-O-methyluridine-3'-phosphate
  modified_base 15: mod_base = OTHER; note = 2'-O-methylcytidine-3'-phosphate
  modified_base 16: mod_base = OTHER; note = 2'-O-methylcytidine-3'-phosphate
  modified_base 17: mod_base = OTHER; note = 2'-O-methylguanosine-3'-phosphate
  modified_base 18: mod_base = OTHER; note = 2'-O-methylcytidine-3'-phosphate
  modified_base 19: mod_base = OTHER; note = 2'-O-methyladenosine-3'-phosphorothioate
  modified_base 20: mod_base = OTHER; note = 2'-O-methyladenosine-3'-phosphorothioate
  modified_base 21: mod_base = OTHER; note = 2'-O-methyladenosine
attctagttcttttccgcaaa

SEQ ID NO: 11834 - RNA, 21 nt, synthetic construct
  source 1..21: mol_type = other RNA
  modified_base 1: mod_base = OTHER; note = 2'-O-methyluridine-3'-phosphorothioate
  modified_base 2: mod_base = OTHER; note = 2'-O-methyluridine-3'-phosphorothioate
  modified_base 3: mod_base = OTHER; note = 2'-O-methylcytidine-3'-phosphate
  modified_base 4: mod_base = OTHER; note = 2'-O-methyluridine-3'-phosphate
  modified_base 5: mod_base = OTHER; note = 2'-O-methyladenosine-3'-phosphate
  modified_base 6: mod_base = OTHER; note = 2'-O-docosanyl-guanosine-3'-phosphate
  modified_base 7: mod_base = OTHER; note = 2'-deoxy-2'-fluorouridine-3'-phosphate
  modified_base 8: mod_base = OTHER; note = 2'-O-methyluridine-3'-phosphate
  modified_base 9: mod_base = OTHER; note = 2'-deoxy-2'-fluorocytidine-3'-phosphate
  modified_base 10: mod_base = OTHER; note = 2'-deoxy-2'-fluorouridine-3'-phosphate
  modified_base 11: mod_base = OTHER; note = 2'-deoxy-2'-fluorouridine-3'-phosphate
  modified_base 12: mod_base = OTHER; note = 2'-O-methyluridine-3'-phosphate
  modified_base 13: mod_base = OTHER; note = 2'-O-methyluridine-3'-phosphate
  modified_base 14: mod_base = OTHER; note = 2'-O-methylcytidine-3'-phosphate
  modified_base 15: mod_base = OTHER; note = 2'-O-methylcytidine-3'-phosphate
  modified_base 16: mod_base = OTHER; note = 2'-O-methylguanosine-3'-phosphate
  modified_base 17: mod_base = OTHER; note = 2'-O-methylcytidine-3'-phosphate
  modified_base 18: mod_base = OTHER; note = 2'-O-methyladenosine-3'-phosphate
  modified_base 19: mod_base = OTHER; note = 2'-O-methyladenosine-3'-phosphorothioate
  modified_base 20: mod_base = OTHER; note = 2'-O-methyluridine-3'-phosphorothioate
  modified_base 21: mod_base = OTHER; note = 2'-O-methyladenosine
ttctagttcttttccgcaata

SEQ ID NO: 11835 - RNA, 21 nt, synthetic construct
  source 1..21: mol_type = other RNA
  modified_base 1: mod_base = OTHER; note = 2'-O-methyluridine-3'-phosphorothioate
  modified_base 2: mod_base = OTHER; note = 2'-O-methylcytidine-3'-phosphorothioate
  modified_base 3: mod_base = OTHER; note = 2'-O-methyluridine-3'-phosphate
  modified_base 4: mod_base = OTHER; note = 2'-O-methyladenosine-3'-phosphate
  modified_base 5: mod_base = OTHER; note = 2'-O-methylguanosine-3'-phosphate
  modified_base 6: mod_base = OTHER; note = 2'-O-docosanyl-uridine-3'-phosphate
  modified_base 7: mod_base = OTHER; note = 2'-deoxy-2'-fluorouridine-3'-phosphate
  modified_base 8: mod_base = OTHER; note = 2'-O-methylcytidine-3'-phosphate
  modified_base 9: mod_base = OTHER; note = 2'-deoxy-2'-fluorouridine-3'-phosphate
  modified_base 10: mod_base = OTHER; note = 2'-deoxy-2'-fluorouridine-3'-phosphate
  modified_base 11: mod_base = OTHER; note = 2'-deoxy-2'-fluorouridine-3'-phosphate
  modified_base 12: mod_base = OTHER; note = 2'-O-methyluridine-3'-phosphate
  modified_base 13: mod_base = OTHER; note = 2'-O-methylcytidine-3'-phosphate
  modified_base 14: mod_base = OTHER; note = 2'-O-methylcytidine-3'-phosphate
  modified_base 15: mod_base = OTHER; note = 2'-O-methylguanosine-3'-phosphate
  modified_base 16: mod_base = OTHER; note = 2'-O-methylcytidine-3'-phosphate
  modified_base 17: mod_base = OTHER; note = 2'-O-methyladenosine-3'-phosphate
  modified_base 18: mod_base = OTHER; note = 2'-O-methyladenosine-3'-phosphate
  modified_base 19: mod_base = OTHER; note = 2'-O-methyluridine-3'-phosphorothioate
  modified_base 20: mod_base = OTHER; note = 2'-O-methylguanosine-3'-phosphorothioate
  modified_base 21: mod_base = OTHER; note = 2'-O-methyladenosine
tctagttcttttccgcaatga

SEQ ID NO: 11836 - RNA, 21 nt, synthetic construct
  source 1..21: mol_type = other RNA
  modified_base 1: mod_base = OTHER; note = 2'-O-methyluridine-3'-phosphorothioate
  modified_base 2: mod_base = OTHER; note = 2'-O-methyladenosine-3'-phosphorothioate
  modified_base 3: mod_base = OTHER; note = 2'-O-methylguanosine-3'-phosphate
  modified_base 4: mod_base = OTHER; note = 2'-O-methyluridine-3'-phosphate
  modified_base 5: mod_base = OTHER; note = 2'-O-methyluridine-3'-phosphate
  modified_base 6: mod_base = OTHER; note = 2'-O-docosanyl-cytidine-3'-phosphate
  modified_base 7: mod_base = OTHER; note = 2'-deoxy-2'-fluorouridine-3'-phosphate
  modified_base 8: mod_base = OTHER; note = 2'-O-methyluridine-3'-phosphate
  modified_base 9: mod_base = OTHER; note = 2'-deoxy-2'-fluorouridine-3'-phosphate
  modified_base 10: mod_base = OTHER; note = 2'-deoxy-2'-fluorouridine-3'-phosphate
  modified_base 11: mod_base = OTHER; note = 2'-deoxy-2'-fluorocytidine-3'-phosphate
  modified_base 12: mod_base = OTHER; note = 2'-O-methylcytidine-3'-phosphate
  modified_base 13: mod_base = OTHER; note = 2'-O-methylguanosine-3'-phosphate
  modified_base 14: mod_base = OTHER; note = 2'-O-methylcytidine-3'-phosphate
  modified_base 15: mod_base = OTHER; note = 2'-O-methyladenosine-3'-phosphate
  modified_base 16: mod_base = OTHER; note = 2'-O-methyladenosine-3'-phosphate
  modified_base 17: mod_base = OTHER; note = 2'-O-methyluridine-3'-phosphate
  modified_base 18: mod_base = OTHER; note = 2'-O-methylguanosine-3'-phosphate
  modified_base 19: mod_base = OTHER; note = 2'-O-methyladenosine-3'-phosphorothioate
  modified_base 20: mod_base = OTHER; note = 2'-O-methylcytidine-3'-phosphorothioate
  modified_base 21: mod_base = OTHER; note = 2'-O-methyladenosine
tagttcttttccgcaatgaca

SEQ ID NO: 11837 - RNA, 21 nt, synthetic construct
  source 1..21: mol_type = other RNA
  modified_base 1: mod_base = OTHER; note = 2'-O-methyladenosine-3'-phosphorothioate
  modified_base 2: mod_base = OTHER; note = 2'-O-methylguanosine-3'-phosphorothioate
  modified_base 3: mod_base = OTHER; note = 2'-O-methyluridine-3'-phosphate
  modified_base 4: mod_base = OTHER; note = 2'-O-methyluridine-3'-phosphate
  modified_base 5: mod_base = OTHER; note = 2'-O-methylcytidine-3'-phosphate
  modified_base 6: mod_base = OTHER; note = 2'-O-docosanyl-uridine-3'-phosphate
  modified_base 7: mod_base = OTHER; note = 2'-deoxy-2'-fluorouridine-3'-phosphate
  modified_base 8: mod_base = OTHER; note = 2'-O-methyluridine-3'-phosphate
  modified_base 9: mod_base = OTHER; note = 2'-deoxy-2'-fluorouridine-3'-phosphate
  modified_base 10: mod_base = OTHER; note = 2'-deoxy-2'-fluorocytidine-3'-phosphate
  modified_base 11: mod_base = OTHER; note = 2'-deoxy-2'-fluorocytidine-3'-phosphate
  modified_base 12: mod_base = OTHER; note = 2'-O-methylguanosine-3'-phosphate
  modified_base 13: mod_base = OTHER; note = 2'-O-methylcytidine-3'-phosphate
  modified_base 14: mod_base = OTHER; note = 2'-O-methyladenosine-3'-phosphate
  modified_base 15: mod_base = OTHER; note = 2'-O-methyladenosine-3'-phosphate
  modified_base 16: mod_base = OTHER; note = 2'-O-methyluridine-3'-phosphate
  modified_base 17: mod_base = OTHER; note = 2'-O-methylguanosine-3'-phosphate
  modified_base 18: mod_base = OTHER; note = 2'-O-methyladenosine-3'-phosphate
  modified_base 19: mod_base = OTHER; note = 2'-O-methylcytidine-3'-phosphorothioate
  modified_base 20: mod_base = OTHER; note = 2'-O-methyluridine-3'-phosphorothioate
  modified_base 21: mod_base = OTHER; note = 2'-O-methyladenosine
agttcttttccgcaatgacta

SEQ ID NO: 11838 - RNA, 21 nt, synthetic construct
  source 1..21: mol_type = other RNA
  modified_base 1: mod_base = OTHER; note = 2'-O-methylguanosine-3'-phosphorothioate
  modified_base 2: mod_base = OTHER; note = 2'-O-methyluridine-3'-phosphorothioate
  modified_base 3: mod_base = OTHER; note = 2'-O-methyluridine-3'-phosphate
  modified_base 4: mod_base = OTHER; note = 2'-O-methylcytidine-3'-phosphate
  modified_base 5: mod_base = OTHER; note = 2'-O-methyluridine-3'-phosphate
  modified_base 6: mod_base = OTHER; note = 2'-O-docosanyl-uridine-3'-phosphate
  modified_base 7: mod_base = OTHER; note = 2'-deoxy-2'-fluorouridine-3'-phosphate
  modified_base 8: mod_base = OTHER; note = 2'-O-methyluridine-3'-phosphate
  modified_base 9: mod_base = OTHER; note = 2'-deoxy-2'-fluorocytidine-3'-phosphate
  modified_base 10: mod_base = OTHER; note = 2'-deoxy-2'-fluorocytidine-3'-phosphate
  modified_base 11: mod_base = OTHER; note = 2'-deoxy-2'-fluoroguanosine-3'-phosphate
  modified_base 12: mod_base = OTHER; note = 2'-O-methylcytidine-3'-phosphate
  modified_base 13: mod_base = OTHER; note = 2'-O-methyladenosine-3'-phosphate
  modified_base 14: mod_base = OTHER; note = 2'-O-methyladenosine-3'-phosphate
  modified_base 15: mod_base = OTHER; note = 2'-O-methyluridine-3'-phosphate
  modified_base 16: mod_base = OTHER; note = 2'-O-methylguanosine-3'-phosphate
  modified_base 17: mod_base = OTHER; note = 2'-O-methyladenosine-3'-phosphate
  modified_base 18: mod_base = OTHER; note = 2'-O-methylcytidine-3'-phosphate
  modified_base 19: mod_base = OTHER; note = 2'-O-methyluridine-3'-phosphorothioate
  modified_base 20: mod_base = OTHER; note = 2'-O-methyladenosine-3'-phosphorothioate
  modified_base 21: mod_base = OTHER; note = 2'-O-methyladenosine
gttcttttccgcaatgactaa

SEQ ID NO: 11839 - RNA, 21 nt, synthetic construct
  source 1..21: mol_type = other RNA
  modified_base 1: mod_base = OTHER; note = 2'-O-methyluridine-3'-phosphorothioate
  modified_base 2: mod_base = OTHER; note = 2'-O-methyluridine-3'-phosphorothioate
  modified_base 3: mod_base = OTHER; note = 2'-O-methylcytidine-3'-phosphate
  modified_base 4: mod_base = OTHER; note = 2'-O-methyluridine-3'-phosphate
  modified_base 5: mod_base = OTHER; note = 2'-O-methyluridine-3'-phosphate
  modified_base 6: mod_base = OTHER; note = 2'-O-docosanyl-uridine-3'-phosphate
  modified_base 7: mod_base = OTHER; note = 2'-deoxy-2'-fluorouridine-3'-phosphate
  modified_base 8: mod_base = OTHER; note = 2'-O-methylcytidine-3'-phosphate
  modified_base 9: mod_base = OTHER; note = 2'-deoxy-2'-fluorocytidine-3'-phosphate
  modified_base 10: mod_base = OTHER; note = 2'-deoxy-2'-fluoroguanosine-3'-phosphate
  modified_base 11: mod_base = OTHER; note = 2'-deoxy-2'-fluorocytidine-3'-phosphate
  modified_base 12: mod_base = OTHER; note = 2'-O-methyladenosine-3'-phosphate
  modified_base 13: mod_base = OTHER; note = 2'-O-methyladenosine-3'-phosphate
  modified_base 14: mod_base = OTHER; note = 2'-O-methyluridine-3'-phosphate
  modified_base 15: mod_base = OTHER; note = 2'-O-methylguanosine-3'-phosphate
  modified_base 16: mod_base = OTHER; note = 2'-O-methyladenosine-3'-phosphate
  modified_base 17: mod_base = OTHER; note = 2'-O-methylcytidine-3'-phosphate
  modified_base 18: mod_base = OTHER; note = 2'-O-methyluridine-3'-phosphate
  modified_base 19: mod_base = OTHER; note = 2'-O-methyladenosine-3'-phosphorothioate
  modified_base 20: mod_base = OTHER; note = 2'-O-methylguanosine-3'-phosphorothioate
  modified_base 21: mod_base = OTHER; note = 2'-O-methyladenosine
ttcttttccgcaatgactaga

SEQ ID NO: 11840 - RNA, 21 nt, synthetic construct
  source 1..21: mol_type = other RNA
  modified_base 1: mod_base = OTHER; note = 2'-O-methyluridine-3'-phosphorothioate
  modified_base 2: mod_base = OTHER; note = 2'-O-methylcytidine-3'-phosphorothioate
  modified_base 3: mod_base = OTHER; note = 2'-O-methyluridine-3'-phosphate
  modified_base 4: mod_base = OTHER; note = 2'-O-methyluridine-3'-phosphate
  modified_base 5: mod_base = OTHER; note = 2'-O-methyluridine-3'-phosphate
  modified_base 6: mod_base = OTHER; note = 2'-O-docosanyl-uridine-3'-phosphate
  modified_base 7: mod_base = OTHER; note = 2'-deoxy-2'-fluorocytidine-3'-phosphate
  modified_base 8: mod_base = OTHER; note = 2'-O-methylcytidine-3'-phosphate
  modified_base 9: mod_base = OTHER; note = 2'-deoxy-2'-fluoroguanosine-3'-phosphate
  modified_base 10: mod_base = OTHER; note = 2'-deoxy-2'-fluorocytidine-3'-phosphate
  modified_base 11: mod_base = OTHER; note = 2'-deoxy-2'-fluoroadenosine-3'-phosphate
  modified_base 12: mod_base = OTHER; note = 2'-O-methyladenosine-3'-phosphate
  modified_base 13: mod_base = OTHER; note = 2'-O-methyluridine-3'-phosphate
  modified_base 14: mod_base = OTHER; note = 2'-O-methylguanosine-3'-phosphate
  modified_base 15: mod_base = OTHER; note = 2'-O-methyladenosine-3'-phosphate
  modified_base 16: mod_base = OTHER; note = 2'-O-methylcytidine-3'-phosphate
  modified_base 17: mod_base = OTHER; note = 2'-O-methyluridine-3'-phosphate
  modified_base 18: mod_base = OTHER; note = 2'-O-methyladenosine-3'-phosphate
  modified_base 19: mod_base = OTHER; note = 2'-O-methylguanosine-3'-phosphorothioate
  modified_base 20: mod_base = OTHER; note = 2'-O-methyluridine-3'-phosphorothioate
  modified_base 21: mod_base = OTHER; note = 2'-O-methyladenosine
tcttttccgcaatgactagta

SEQ ID NO: 11841 - RNA, 21 nt, synthetic construct
  source 1..21: mol_type = other RNA
  modified_base 1: mod_base = OTHER; note = 2'-O-methylcytidine-3'-phosphorothioate
  modified_base 2: mod_base = OTHER; note = 2'-O-methyluridine-3'-phosphorothioate
  modified_base 3: mod_base = OTHER; note = 2'-O-methylguanosine-3'-phosphate
  modified_base 4: mod_base = OTHER; note = 2'-O-methylguanosine-3'-phosphate
  modified_base 5: mod_base = OTHER; note = 2'-O-methyladenosine-3'-phosphate
  modified_base 6: mod_base = OTHER; note = 2'-O-docosanyl-guanosine-3'-phosphate
  modified_base 7: mod_base = OTHER; note = 2'-deoxy-2'-fluoroadenosine-3'-phosphate
  modified_base 8: mod_base = OTHER; note = 2'-O-methyladenosine-3'-phosphate
  modified_base 9: mod_base = OTHER; note = 2'-deoxy-2'-fluoroguanosine-3'-phosphate
  modified_base 10: mod_base = OTHER; note = 2'-deoxy-2'-fluoroadenosine-3'-phosphate
  modified_base 11: mod_base = OTHER; note = 2'-deoxy-2'-fluorouridine-3'-phosphate
  modified_base 12: mod_base = OTHER; note = 2'-O-methyluridine-3'-phosphate
  modified_base 13: mod_base = OTHER; note = 2'-O-methyladenosine-3'-phosphate
  modified_base 14: mod_base = OTHER; note = 2'-O-methyluridine-3'-phosphate
  modified_base 15: mod_base = OTHER; note = 2'-O-methyluridine-3'-phosphate
  modified_base 16: mod_base = OTHER; note = 2'-O-methylcytidine-3'-phosphate
  modified_base 17: mod_base = OTHER; note = 2'-O-methyladenosine-3'-phosphate
  modified_base 18: mod_base = OTHER; note = 2'-O-methyladenosine-3'-phosphate
  modified_base 19: mod_base = OTHER; note = 2'-O-methyladenosine-3'-phosphorothioate
  modified_base 20: mod_base = OTHER; note = 2'-O-methylcytidine-3'-phosphorothioate
  modified_base 21: mod_base = OTHER; note = 2'-O-methyladenosine
ctggagaagattattcaaaca

SEQ ID NO: 11842 - RNA, 21 nt, synthetic construct
  source 1..21: mol_type = other RNA
  modified_base 1: mod_base = OTHER; note = 2'-O-methylguanosine-3'-phosphorothioate
  modified_base 2: mod_base = OTHER; note = 2'-O-methylguanosine-3'-phosphorothioate
  modified_base 3: mod_base = OTHER; note = 2'-O-methyladenosine-3'-phosphate
  modified_base 4: mod_base = OTHER; note = 2'-O-methylguanosine-3'-phosphate
  modified_base 5: mod_base = OTHER; note = 2'-O-methyladenosine-3'-phosphate
  modified_base 6: mod_base = OTHER; note = 2'-O-docosanyl-adenosine-3'-phosphate
  modified_base 7: mod_base = OTHER; note = 2'-deoxy-2'-fluoroguanosine-3'-phosphate
  modified_base 8: mod_base = OTHER; note = 2'-O-methyladenosine-3'-phosphate
  modified_base 9: mod_base = OTHER; note = 2'-deoxy-2'-fluorouridine-3'-phosphate
  modified_base 10: mod_base = OTHER; note = 2'-deoxy-2'-fluorouridine-3'-phosphate
  modified_base 11: mod_base = OTHER; note = 2'-deoxy-2'-fluoroadenosine-3'-phosphate
  modified_base 12: mod_base = OTHER; note = 2'-O-methyluridine-3'-phosphate
  modified_base 13: mod_base = OTHER; note = 2'-O-methyluridine-3'-phosphate
  modified_base 14: mod_base = OTHER; note = 2'-O-methylcytidine-3'-phosphate
  modified_base 15: mod_base = OTHER; note = 2'-O-methyladenosine-3'-phosphate
  modified_base 16: mod_base = OTHER; note = 2'-O-methyladenosine-3'-phosphate
  modified_base 17: mod_base = OTHER; note = 2'-O-methyladenosine-3'-phosphate
  modified_base 18: mod_base = OTHER; note = 2'-O-methylcytidine-3'-phosphate
  modified_base 19: mod_base = OTHER; note = 2'-O-methyluridine-3'-phosphorothioate
  modified_base 20: mod_base = OTHER; note = 2'-O-methyluridine-3'-phosphorothioate
  modified_base 21: mod_base = OTHER; note = 2'-O-methyladenosine
ggagaagattattcaaactta

SEQ ID NO: 11843 - RNA, 21 nt, synthetic construct
  source 1..21: mol_type = other RNA
  modified_base 1: mod_base = OTHER; note = 2'-O-methylcytidine-3'-phosphorothioate
  modified_base 2: mod_base = OTHER; note = 2'-O-methyluridine-3'-phosphorothioate
  modified_base 3: mod_base = OTHER; note = 2'-O-methyluridine-3'-phosphate
  modified_base 4: mod_base = OTHER; note = 2'-O-methylguanosine-3'-phosphate
  modified_base 5: mod_base = OTHER; note = 2'-O-methyladenosine-3'-phosphate
  modified_base 6: mod_base = OTHER; note = 2'-O-docosanyl-uridine-3'-phosphate
  modified_base 7: mod_base = OTHER; note = 2'-deoxy-2'-fluorocytidine-3'-phosphate
  modified_base 8: mod_base = OTHER; note = 2'-O-methyluridine-3'-phosphate
  modified_base 9: mod_base = OTHER; note = 2'-deoxy-2'-fluoroguanosine-3'-phosphate
  modified_base 10: mod_base = OTHER; note = 2'-deoxy-2'-fluorouridine-3'-phosphate
  modified_base 11: mod_base = OTHER; note = 2'-deoxy-2'-fluoroguanosine-3'-phosphate
  modified_base 12: mod_base = OTHER; note = 2'-O-methyluridine-3'-phosphate
  modified_base 13: mod_base = OTHER; note = 2'-O-methyluridine-3'-phosphate
  modified_base 14: mod_base = OTHER; note = 2'-O-methyluridine-3'-phosphate
  modified_base 15: mod_base = OTHER; note = 2'-O-methylcytidine-3'-phosphate
  modified_base 16: mod_base = OTHER; note = 2'-O-methyladenosine-3'-phosphate
  modified_base 17: mod_base = OTHER; note = 2'-O-methylguanosine-3'-phosphate
  modified_base 18: mod_base = OTHER; note = 2'-O-methylguanosine-3'-phosphate
  modified_base 19: mod_base = OTHER; note = 2'-O-methyluridine-3'-phosphorothioate
  modified_base 20: mod_base = OTHER; note = 2'-O-methyluridine-3'-phosphorothioate
  modified_base 21: mod_base = OTHER; note = 2'-O-methyladenosine
cttgatctgtgtttcaggtta

SEQ ID NO: 11844 - RNA, 21 nt, synthetic construct
  source 1..21: mol_type = other RNA
  modified_base 1: mod_base = OTHER; note = 2'-O-methyluridine-3'-phosphorothioate
  modified_base 2: mod_base = OTHER; note = 2'-O-methylcytidine-3'-phosphorothioate
  modified_base 3: mod_base = OTHER; note = 2'-O-methyluridine-3'-phosphate
  modified_base 4: mod_base = OTHER; note = 2'-O-methylguanosine-3'-phosphate
  modified_base 5: mod_base = OTHER; note = 2'-O-methyluridine-3'-phosphate
  modified_base 6: mod_base = OTHER; note = 2'-O-docosanyl-guanosine-3'-phosphate
  modified_base 7: mod_base = OTHER; note = 2'-deoxy-2'-fluorouridine-3'-phosphate
  modified_base 8: mod_base = OTHER; note = 2'-O-methyluridine-3'-phosphate
  modified_base 9: mod_base = OTHER; note = 2'-deoxy-2'-fluorouridine-3'-phosphate
  modified_base 10: mod_base = OTHER; note = 2'-deoxy-2'-fluorocytidine-3'-phosphate
  modified_base 11: mod_base = OTHER; note = 2'-deoxy-2'-fluoroadenosine-3'-phosphate
  modified_base 12: mod_base = OTHER; note = 2'-O-methylguanosine-3'-phosphate
  modified_base 13: mod_base = OTHER; note = 2'-O-methylguanosine-3'-phosphate
  modified_base 14: mod_base = OTHER; note = 2'-O-methyluridine-3'-phosphate
  modified_base 15: mod_base = OTHER; note = 2'-O-methyluridine-3'-phosphate
  modified_base 16: mod_base = OTHER; note = 2'-O-methyluridine-3'-phosphate
  modified_base 17: mod_base = OTHER; note = 2'-O-methyluridine-3'-phosphate
  modified_base 18: mod_base = OTHER; note = 2'-O-methyluridine-3'-phosphate
  modified_base 19: mod_base = OTHER; note = 2'-O-methyladenosine-3'-phosphorothioate
  modified_base 20: mod_base = OTHER; note = 2'-O-methyladenosine-3'-phosphorothioate
  modified_base 21: mod_base = OTHER; note = 2'-O-methyladenosine
tctgtgtttcaggtttttaaa

SEQ ID NO: 11845 - RNA, 21 nt, synthetic construct
  source 1..21: mol_type = other RNA
  modified_base 1: mod_base = OTHER; note = 2'-O-methylcytidine-3'-phosphorothioate
  modified_base 2: mod_base = OTHER; note = 2'-O-methyladenosine-3'-phosphorothioate
  modified_base 3: mod_base = OTHER; note = 2'-O-methylguanosine-3'-phosphate
  modified_base 4: mod_base = OTHER; note = 2'-O-methylguanosine-3'-phosphate
  modified_base 5: mod_base = OTHER; note = 2'-O-methyluridine-3'-phosphate
  modified_base 6: mod_base = OTHER; note = 2'-O-docosanyl-uridine-3'-phosphate
  modified_base 7: mod_base = OTHER; note = 2'-deoxy-2'-fluorouridine-3'-phosphate
  modified_base 8: mod_base = OTHER; note = 2'-O-methyluridine-3'-phosphate
  modified_base 9: mod_base = OTHER; note = 2'-deoxy-2'-fluorouridine-3'-phosphate
  modified_base 10: mod_base = OTHER; note = 2'-deoxy-2'-fluoroadenosine-3'-phosphate
  modified_base 11: mod_base = OTHER; note = 2'-deoxy-2'-fluoroadenosine-3'-phosphate
  modified_base 12: mod_base = OTHER; note = 2'-O-methyladenosine-3'-phosphate
  modified_base 13: mod_base = OTHER; note = 2'-O-methyluridine-3'-phosphate
  modified_base 14: mod_base = OTHER; note = 2'-O-methylguanosine-3'-phosphate
  modified_base 15: mod_base = OTHER; note = 2'-O-methyluridine-3'-phosphate
  modified_base 16: mod_base = OTHER; note = 2'-O-methylcytidine-3'-phosphate
  modified_base 17: mod_base = OTHER; note = 2'-O-methylcytidine-3'-phosphate
  modified_base 18: mod_base = OTHER; note = 2'-O-methyluridine-3'-phosphate
  modified_base 19: mod_base = OTHER; note = 2'-O-methyladenosine-3'-phosphorothioate
  modified_base 20: mod_base = OTHER; note = 2'-O-methyladenosine-3'-phosphorothioate
  modified_base 21: mod_base = OTHER; note = 2'-O-methyladenosine
caggtttttaaatgtcctaaa

SEQ ID NO: 11846 - RNA, 21 nt, synthetic construct
  source 1..21: mol_type = other RNA
  modified_base 1: mod_base = OTHER; note = 2'-O-methylguanosine-3'-phosphorothioate
  modified_base 2: mod_base = OTHER; note = 2'-O-methyladenosine-3'-phosphorothioate
  modified_base 3: mod_base = OTHER; note = 2'-O-methylcytidine-3'-phosphate
  modified_base 4: mod_base = OTHER; note = 2'-O-methyluridine-3'-phosphate
  modified_base 5: mod_base = OTHER; note = 2'-O-methyluridine-3'-phosphate
  modified_base 6: mod_base = OTHER; note = 2'-O-docosanyl-uridine-3'-phosphate
  modified_base 7: mod_base = OTHER; note = 2'-deoxy-2'-fluorocytidine-3'-phosphate
  modified_base 8: mod_base = OTHER; note = 2'-O-methyladenosine-3'-phosphate
  modified_base 9: mod_base = OTHER; note = 2'-deoxy-2'-fluoroadenosine-3'-phosphate
  modified_base 10: mod_base = OTHER; note = 2'-deoxy-2'-fluoroadenosine-3'-phosphate
  modified_base 11: mod_base = OTHER; note = 2'-deoxy-2'-fluoroguanosine-3'-phosphate
  modified_base 12: mod_base = OTHER; note = 2'-O-methyluridine-3'-phosphate
  modified_base 13: mod_base = OTHER; note = 2'-O-methyladenosine-3'-phosphate
  modified_base 14: mod_base = OTHER; note = 2'-O-methylcytidine-3'-phosphate
  modified_base 15: mod_base = OTHER; note = 2'-O-methyluridine-3'-phosphate
  modified_base 16: mod_base = OTHER; note = 2'-O-methyladenosine-3'-phosphate
  modified_base 17: mod_base = OTHER; note = 2'-O-methyladenosine-3'-phosphate
  modified_base 18: mod_base = OTHER; note = 2'-O-methyluridine-3'-phosphate
  modified_base 19: mod_base = OTHER; note = 2'-O-methyladenosine-3'-phosphorothioate
  modified_base 20: mod_base = OTHER; note = 2'-O-methylcytidine-3'-phosphorothioate
  modified_base 21: mod_base = OTHER; note = 2'-O-methyladenosine
gactttcaaagtactaataca

SEQ ID NO: 11847 - RNA, 21 nt, synthetic construct
  source 1..21: mol_type = other RNA
  modified_base 1: mod_base = OTHER; note = 2'-O-methyladenosine-3'-phosphorothioate
  modified_base 2: mod_base = OTHER; note = 2'-O-methyladenosine-3'-phosphorothioate
  modified_base 3: mod_base = OTHER; note = 2'-O-methylguanosine-3'-phosphate
  modified_base 4: mod_base = OTHER; note = 2'-O-methylguanosine-3'-phosphate
  modified_base 5: mod_base = OTHER; note = 2'-O-methyladenosine-3'-phosphate
  modified_base 6: mod_base = OTHER; note = 2'-O-docosanyl-adenosine-3'-phosphate
  modified_base 7: mod_base = OTHER; note = 2'-deoxy-2'-fluorouridine-3'-phosphate
  modified_base 8: mod_base = OTHER; note = 2'-O-methyluridine-3'-phosphate
  modified_base 9: mod_base = OTHER; note = 2'-deoxy-2'-fluorouridine-3'-phosphate
  modified_base 10: mod_base = OTHER; note = 2'-deoxy-2'-fluorouridine-3'-phosphate
  modified_base 11: mod_base = OTHER; note = 2'-deoxy-2'-fluoroguanosine-3'-phosphate
  modified_base 12: mod_base = OTHER; note = 2'-O-methylguanosine-3'-phosphate
  modified_base 13: mod_base = OTHER; note = 2'-O-methyladenosine-3'-phosphate
  modified_base 14: mod_base = OTHER; note = 2'-O-methyluridine-3'-phosphate
  modified_base 15: mod_base = OTHER; note = 2'-O-methyluridine-3'-phosphate
  modified_base 16: mod_base = OTHER; note = 2'-O-methylguanosine-3'-phosphate
  modified_base 17: mod_base = OTHER; note = 2'-O-methyladenosine-3'-phosphate
  modified_base 18: mod_base = OTHER; note = 2'-O-methylcytidine-3'-phosphate
  modified_base 19: mod_base = OTHER; note = 2'-O-methyluridine-3'-phosphorothioate
  modified_base 20: mod_base = OTHER; note = 2'-O-methyluridine-3'-phosphorothioate
  modified_base 21: mod_base = OTHER; note = 2'-O-methyladenosine
aaggaattttggattgactta

SEQ ID NO: 11848 - RNA, 21 nt, synthetic construct
  source 1..21: mol_type = other RNA
  modified_base 1: mod_base = OTHER; note = 2'-O-methyluridine-3'-phosphorothioate
  modified_base 2: mod_base = OTHER; note = 2'-O-methyluridine-3'-phosphorothioate
  modified_base 3: mod_base = OTHER; note = 2'-O-methylguanosine-3'-phosphate
  modified_base 4: mod_base = OTHER; note = 2'-O-methyladenosine-3'-phosphate
  modified_base 5: mod_base = OTHER; note = 2'-O-methylcytidine-3'-phosphate
  modified_base 6: mod_base = OTHER; note = 2'-O-docosanyl-uridine-3'-phosphate
  modified_base 7: mod_base = OTHER; note = 2'-deoxy-2'-fluorouridine-3'-phosphate
  modified_base 8: mod_base = OTHER; note = 2'-O-methyluridine-3'-phosphate
  modified_base 9: mod_base = OTHER; note = 2'-deoxy-2'-fluorocytidine-3'-phosphate
  modified_base 10: mod_base = OTHER; note = 2'-deoxy-2'-fluoroadenosine-3'-phosphate
  modified_base 11: mod_base = OTHER; note = 2'-deoxy-2'-fluoroadenosine-3'-phosphate
  modified_base 12: mod_base = OTHER; note = 2'-O-methyladenosine-3'-phosphate
  modified_base 13: mod_base = OTHER; note = 2'-O-methylguanosine-3'-phosphate
  modified_base 14: mod_base = OTHER; note = 2'-O-methyluridine-3'-phosphate
  modified_base 15: mod_base = OTHER; note = 2'-O-methyladenosine-3'-phosphate
  modified_base 16: mod_base = OTHER; note = 2'-O-methylcytidine-3'-phosphate
  modified_base 17: mod_base = OTHER; note = 2'-O-methyluridine-3'-phosphate
  modified_base 18: mod_base = OTHER; note = 2'-O-methyladenosine-3'-phosphate
  modified_base 19: mod_base = OTHER; note = 2'-O-methyladenosine-3'-phosphorothioate
  modified_base 20: mod_base = OTHER; note = 2'-O-methyluridine-3'-phosphorothioate
  modified_base 21: mod_base = OTHER; note = 2'-O-methyladenosine
ttgactttcaaagtactaata

SEQ ID NO: 11849 - RNA, 21 nt, synthetic construct
  source 1..21: mol_type = other RNA
  modified_base 1: mod_base = OTHER; note = 2'-O-methyluridine-3'-phosphorothioate
  modified_base 2: mod_base = OTHER; note = 2'-O-methyladenosine-3'-phosphorothioate
  modified_base 3: mod_base = OTHER; note = 2'-O-methylguanosine-3'-phosphate
  modified_base 4: mod_base = OTHER; note = 2'-O-methylcytidine-3'-phosphate
  modified_base 5: mod_base = OTHER; note = 2'-O-methylguanosine-3'-phosphate
  modified_base 6: mod_base = OTHER; note = 2'-O-docosanyl-uridine-3'-phosphate
  modified_base 7: mod_base = OTHER; note = 2'-deoxy-2'-fluoroguanosine-3'-phosphate
  modified_base 8: mod_base = OTHER; note = 2'-O-methyladenosine-3'-phosphate
  modified_base 9: mod_base = OTHER; note = 2'-deoxy-2'-fluorocytidine-3'-phosphate
  modified_base 10: mod_base = OTHER; note = 2'-deoxy-2'-fluorouridine-3'-phosphate
  modified_base 11: mod_base = OTHER; note = 2'-deoxy-2'-fluorocytidine-3'-phosphate
  modified_base 12: mod_base = OTHER; note = 2'-O-methyluridine-3'-phosphate
  modified_base 13: mod_base = OTHER; note = 2'-O-methyluridine-3'-phosphate
  modified_base 14: mod_base = OTHER; note = 2'-O-methylcytidine-3'-phosphate
  modified_base 15: mod_base = OTHER; note = 2'-O-methyluridine-3'-phosphate
  modified_base 16: mod_base = OTHER; note = 2'-O-methyluridine-3'-phosphate
  modified_base 17: mod_base = OTHER; note = 2'-O-methyladenosine-3'-phosphate
  modified_base 18: mod_base = OTHER; note = 2'-O-methyluridine-3'-phosphate
  modified_base 19: mod_base = OTHER; note = 2'-O-methyladenosine-3'-phosphorothioate
  modified_base 20: mod_base = OTHER; note = 2'-O-methylcytidine-3'-phosphorothioate
  modified_base 21: mod_base = OTHER; note = 2'-O-methyladenosine
tagcgtgactcttcttataca

SEQ ID NO: 11850 - RNA, 21 nt, synthetic construct
  source 1..21: mol_type = other RNA
  modified_base 1: mod_base = OTHER; note = 2'-O-methylguanosine-3'-phosphorothioate
  modified_base 2: mod_base = OTHER; note = 2'-O-methyluridine-3'-phosphorothioate
  modified_base 3: mod_base = OTHER; note = 2'-O-methylguanosine-3'-phosphate
  modified_base 4: mod_base = OTHER; note = 2'-O-methyladenosine-3'-phosphate
  modified_base 5: mod_base = OTHER; note = 2'-O-methylcytidine-3'-phosphate
  modified_base 6: mod_base = OTHER; note = 2'-O-docosanyl-uridine-3'-phosphate
  modified_base 7: mod_base = OTHER; note = 2'-deoxy-2'-fluorocytidine-3'-phosphate
  modified_base 8: mod_base = OTHER; note = 2'-O-methyluridine-3'-phosphate
  modified_base 9: mod_base = OTHER; note = 2'-deoxy-2'-fluorouridine-3'-phosphate
  modified_base 10: mod_base = OTHER; note = 2'-deoxy-2'-fluorocytidine-3'-phosphate
  modified_base 11: mod_base = OTHER; note = 2'-deoxy-2'-fluorouridine-3'-phosphate
  modified_base 12: mod_base = OTHER; note = 2'-O-methyluridine-3'-phosphate
  modified_base 13: mod_base = OTHER; note = 2'-O-methyladenosine-3'-phosphate
  modified_base 14: mod_base = OTHER; note = 2'-O-methyluridine-3'-phosphate
  modified_base 15: mod_base = OTHER; note = 2'-O-methyladenosine-3'-phosphate
  modified_base 16: mod_base = OTHER; note = 2'-O-methylcytidine-3'-phosphate
  modified_base 17: mod_base = OTHER; note = 2'-O-methylcytidine-3'-phosphate
  modified_base 18: mod_base = OTHER; note = 2'-O-methyluridine-3'-phosphate
  modified_base 19: mod_base = OTHER; note = 2'-O-methyladenosine-3'-phosphorothioate
  modified_base 20: mod_base = OTHER; note = 2'-O-methyladenosine-3'-phosphorothioate
  modified_base 21: mod_base = OTHER; note = 2'-O-methyladenosine
gtgactcttcttatacctaaa

SEQ ID NO: 11851 - RNA, 21 nt, synthetic construct
  source 1..21: mol_type = other RNA
  modified_base 1: mod_base = OTHER; note = 2'-O-methyluridine-3'-phosphorothioate
  modified_base 2: mod_base = OTHER; note = 2'-O-methyladenosine-3'-phosphorothioate
  modified_base 3: mod_base = OTHER; note = 2'-O-methyladenosine-3'-phosphate
  modified_base 4: mod_base = OTHER; note = 2'-O-methylguanosine-3'-phosphate
  modified_base 5: mod_base = OTHER; note = 2'-O-methyladenosine-3'-phosphate
  modified_base 6: mod_base = OTHER; note = 2'-O-docosanyl-adenosine-3'-phosphate
  modified_base 7: mod_base = OTHER; note = 2'-deoxy-2'-fluorocytidine-3'-phosphate
  modified_base 8: mod_base = OTHER; note = 2'-O-methyladenosine-3'-phosphate
  modified_base 9: mod_base = OTHER; note = 2'-deoxy-2'-fluorouridine-3'-phosphate
  modified_base 10: mod_base = OTHER; note = 2'-deoxy-2'-fluoroadenosine-3'-phosphate
  modified_base 11: mod_base = OTHER; note = 2'-deoxy-2'-fluorouridine-3'-phosphate
  modified_base 12: mod_base = OTHER; note = 2'-O-methyluridine-3'-phosphate
  modified_base 13: mod_base = OTHER; note = 2'-O-methyladenosine-3'-phosphate
  modified_base 14: mod_base = OTHER; note = 2'-O-methylcytidine-3'-phosphate
  modified_base 15: mod_base = OTHER; note = 2'-O-methyladenosine-3'-phosphate
  modified_base 16: mod_base = OTHER; note = 2'-O-methyladenosine-3'-phosphate
  modified_base 17: mod_base = OTHER; note = 2'-O-methyladenosine-3'-phosphate
  modified_base 18: mod_base = OTHER; note = 2'-O-methyluridine-3'-phosphate
  modified_base 19: mod_base = OTHER; note = 2'-O-methylguanosine-3'-phosphorothioate
  modified_base 20: mod_base = OTHER; note = 2'-O-methyluridine-3'-phosphorothioate
  modified_base 21: mod_base = OTHER; note = 2'-O-methyladenosine
taagaacatattacaaatgta

SEQ ID NO: 11852 - RNA, 21 nt, synthetic construct
  source 1..21: mol_type = other RNA
  modified_base 1: mod_base = OTHER; note = 2'-O-methylcytidine-3'-phosphorothioate
  modified_base 2: mod_base = OTHER; note = 2'-O-methyladenosine-3'-phosphorothioate
  modified_base 3: mod_base = OTHER; note = 2'-O-methyladenosine-3'-phosphate
  modified_base 4: mod_base = OTHER; note = 2'-O-methyladenosine-3'-phosphate
  modified_base 5: mod_base = OTHER; note = 2'-O-methyladenosine-3'-phosphate
  modified_base 6: mod_base = OTHER; note = 2'-O-docosanyl-cytidine-3'-phosphate
  modified_base 7: mod_base = OTHER; note = 2'-deoxy-2'-fluoroadenosine-3'-phosphate
  modified_base 8: mod_base = OTHER; note = 2'-O-methyluridine-3'-phosphate
  modified_base 9: mod_base = OTHER; note = 2'-deoxy-2'-fluoroguanosine-3'-phosphate
  modified_base 10: mod_base = OTHER; note = 2'-deoxy-2'-fluorocytidine-3'-phosphate
  modified_base 11: mod_base = OTHER; note = 2'-deoxy-2'-fluorocytidine-3'-phosphate
  modified_base 12: mod_base = OTHER; note = 2'-O-methyluridine-3'-phosphate
  modified_base 13: mod_base = OTHER; note = 2'-O-methyluridine-3'-phosphate
  modified_base 14: mod_base = OTHER; note = 2'-O-methylguanosine-3'-phosphate
  modified_base 15: mod_base = OTHER; note = 2'-O-methyladenosine-3'-phosphate
  modified_base 16: mod_base = OTHER; note = 2'-O-methyladenosine-3'-phosphate
  modified_base 17: mod_base = OTHER; note = 2'-O-methylcytidine-3'-phosphate
  modified_base 18: mod_base = OTHER; note = 2'-O-methyluridine-3'-phosphate
  modified_base 19: mod_base = OTHER; note = 2'-O-methylcytidine-3'-phosphorothioate
  modified_base 20: mod_base = OTHER; note = 2'-O-methyluridine-3'-phosphorothioate
  modified_base 21: mod_base = OTHER; note = 2'-O-methyladenosine
caaaacatgccttgaactcta

SEQ ID NO: 11853 - RNA, 21 nt, synthetic construct
  source 1..21: mol_type = other RNA
  modified_base 1: mod_base = OTHER; note = 2'-O-methyladenosine-3'-phosphorothioate
  modified_base 2: mod_base = OTHER; note = 2'-O-methyladenosine-3'-phosphorothioate
  modified_base 3: mod_base = OTHER; note = 2'-O-methyladenosine-3'-phosphate
  modified_base 4: mod_base = OTHER; note = 2'-O-methyladenosine-3'-phosphate
  modified_base 5: mod_base = OTHER; note = 2'-O-methylcytidine-3'-phosphate
  modified_base 6: mod_base = OTHER; note = 2'-O-docosanyl-adenosine-3'-phosphate
  modified_base 7: mod_base = OTHER; note = 2'-deoxy-2'-fluorouridine-3'-phosphate
  modified_base 8: mod_base = OTHER; note = 2'-O-methylguanosine-3'-phosphate
  modified_base 9: mod_base = OTHER; note = 2'-deoxy-2'-fluorocytidine-3'-phosphate
  modified_base 10: mod_base = OTHER; note = 2'-deoxy-2'-fluorocytidine-3'-phosphate
  modified_base 11: mod_base = OTHER; note = 2'-deoxy-2'-fluorouridine-3'-phosphate
  modified_base 12: mod_base = OTHER; note = 2'-O-methyluridine-3'-phosphate
  modified_base 13: mod_base = OTHER; note = 2'-O-methylguanosine-3'-phosphate
  modified_base 14: mod_base = OTHER; note = 2'-O-methyladenosine-3'-phosphate
  modified_base 15: mod_base = OTHER; note = 2'-O-methyladenosine-3'-phosphate
  modified_base 16: mod_base = OTHER; note = 2'-O-methylcytidine-3'-phosphate
  modified_base 17: mod_base = OTHER; note = 2'-O-methyluridine-3'-phosphate
  modified_base 18: mod_base = OTHER; note = 2'-O-methylcytidine-3'-phosphate
  modified_base 19: mod_base = OTHER; note = 2'-O-methyluridine-3'-phosphorothioate
  modified_base 20: mod_base = OTHER; note = 2'-O-methyluridine-3'-phosphorothioate
  modified_base 21: mod_base = OTHER; note = 2'-O-methyladenosine
aaaacatgccttgaactctta

SEQ ID NO: 11854 - RNA, 21 nt, synthetic construct
  source 1..21: mol_type = other RNA
  modified_base 1: mod_base = OTHER; note = 2'-O-methyluridine-3'-phosphorothioate
  modified_base 2: mod_base = OTHER; note = 2'-O-methylguanosine-3'-phosphorothioate
  modified_base 3: mod_base = OTHER; note = 2'-O-methylcytidine-3'-phosphate
  modified_base 4: mod_base = OTHER; note = 2'-O-methylcytidine-3'-phosphate
  modified_base 5: mod_base = OTHER; note = 2'-O-methyluridine-3'-phosphate
  modified_base 6: mod_base = OTHER; note = 2'-O-docosanyl-uridine-3'-phosphate
  modified_base 7: mod_base = OTHER; note = 2'-deoxy-2'-fluoroguanosine-3'-phosphate
  modified_base 8: mod_base = OTHER; note = 2'-O-methyladenosine-3'-phosphate
  modified_base 9: mod_base = OTHER; note = 2'-deoxy-2'-fluoroadenosine-3'-phosphate
  modified_base 10: mod_base = OTHER; note = 2'-deoxy-2'-fluorocytidine-3'-phosphate
  modified_base 11: mod_base = OTHER; note = 2'-deoxy-2'-fluorouridine-3'-phosphate
  modified_base 12: mod_base = OTHER; note = 2'-O-methylcytidine-3'-phosphate
  modified_base 13: mod_base = OTHER; note = 2'-O-methyluridine-3'-phosphate
  modified_base 14: mod_base = OTHER; note = 2'-O-methyluridine-3'-phosphate
  modified_base 15: mod_base = OTHER; note = 2'-O-methylguanosine-3'-phosphate
  modified_base 16: mod_base = OTHER; note = 2'-O-methyladenosine-3'-phosphate
  modified_base 17: mod_base = OTHER; note = 2'-O-methyladenosine-3'-phosphate
  modified_base 18: mod_base = OTHER; note = 2'-O-methylcytidine-3'-phosphate
  modified_base 19: mod_base = OTHER; note = 2'-O-methyluridine-3'-phosphorothioate
  modified_base 20: mod_base = OTHER; note = 2'-O-methyladenosine-3'-phosphorothioate
  modified_base 21: mod_base = OTHER; note = 2'-O-methyladenosine
tgccttgaactcttgaactaa

SEQ ID NO: 11855 - RNA, 21 nt, synthetic construct
  source 1..21: mol_type = other RNA
  modified_base 1: mod_base = OTHER; note = 2'-O-methylcytidine-3'-phosphorothioate
  modified_base 2: mod_base = OTHER; note = 2'-O-methyluridine-3'-phosphorothioate
  modified_base 3: mod_base = OTHER; note = 2'-O-methylcytidine-3'-phosphate
  modified_base 4: mod_base = OTHER; note = 2'-O-methyluridine-3'-phosphate
  modified_base 5: mod_base = OTHER; note = 2'-O-methyluridine-3'-phosphate
  modified_base 6: mod_base = OTHER; note = 2'-O-docosanyl-guanosine-3'-phosphate
  modified_base 7: mod_base = OTHER; note = 2'-deoxy-2'-fluoroadenosine-3'-phosphate
  modified_base 8: mod_base = OTHER; note = 2'-O-methyladenosine-3'-phosphate
  modified_base 9: mod_base = OTHER; note = 2'-deoxy-2'-fluorocytidine-3'-phosphate
  modified_base 10: mod_base = OTHER; note = 2'-deoxy-2'-fluorouridine-3'-phosphate
  modified_base 11: mod_base = OTHER; note = 2'-deoxy-2'-fluoroadenosine-3'-phosphate
  modified_base 12: mod_base = OTHER; note = 2'-O-methylcytidine-3'-phosphate
  modified_base 13: mod_base = OTHER; note = 2'-O-methyluridine-3'-phosphate
  modified_base 14: mod_base = OTHER; note = 2'-O-methylguanosine-3'-phosphate
  modified_base 15: mod_base = OTHER; note = 2'-O-methyluridine-3'-phosphate
  modified_base 16: mod_base = OTHER; note = 2'-O-methylguanosine-3'-phosphate
  modified_base 17: mod_base = OTHER; note = 2'-O-methyladenosine-3'-phosphate
  modified_base 18: mod_base = OTHER; note = 2'-O-methyladenosine-3'-phosphate
  modified_base 19: mod_base = OTHER; note = 2'-O-methyladenosine-3'-phosphorothioate
  modified_base 20: mod_base = OTHER; note = 2'-O-methyladenosine-3'-phosphorothioate
  modified_base 21: mod_base = OTHER; note = 2'-O-methyladenosine
ctcttgaactactgtgaaaaa

SEQ ID NO: 11856 - RNA, 21 nt, synthetic construct
  source 1..21: mol_type = other RNA
  modified_base 1: mod_base = OTHER; note = 2'-O-methyluridine-3'-phosphorothioate
  modified_base 2: mod_base = OTHER; note = 2'-O-methyluridine-3'-phosphorothioate
  modified_base 3: mod_base = OTHER; note = 2'-O-methylguanosine-3'-phosphate
  modified_base 4: mod_base = OTHER; note = 2'-O-methyladenosine-3'-phosphate
  modified_base 5: mod_base = OTHER; note = 2'-O-methyladenosine-3'-phosphate
  modified_base 6: mod_base = OTHER; note = 2'-O-docosanyl-cytidine-3'-phosphate
  modified_base 7: mod_base = OTHER; note = 2'-deoxy-2'-fluorouridine-3'-phosphate
  modified_base 8: mod_base = OTHER; note = 2'-O-methyladenosine-3'-phosphate
  modified_base 9: mod_base = OTHER; note = 2'-deoxy-2'-fluorocytidine-3'-phosphate
  modified_base 10: mod_base = OTHER; note = 2'-deoxy-2'-fluorouridine-3'-phosphate
  modified_base 11: mod_base = OTHER; note = 2'-deoxy-2'-fluoroguanosine-3'-phosphate
  modified_base 12: mod_base = OTHER; note = 2'-O-methyluridine-3'-phosphate
  modified_base 13: mod_base = OTHER; note = 2'-O-methylguanosine-3'-phosphate
  modified_base 14: mod_base = OTHER; note = 2'-O-methyladenosine-3'-phosphate
  modified_base 15: mod_base = OTHER; note = 2'-O-methyladenosine-3'-phosphate
  modified_base 16: mod_base = OTHER; note = 2'-O-methyladenosine-3'-phosphate
  modified_base 17: mod_base = OTHER; note = 2'-O-methyladenosine-3'-phosphate
  modified_base 18: mod_base = OTHER; note = 2'-O-methylguanosine-3'-phosphate
  modified_base 19: mod_base = OTHER; note = 2'-O-methyladenosine-3'-phosphorothioate
  modified_base 20: mod_base = OTHER; note = 2'-O-methyladenosine-3'-phosphorothioate
  modified_base 21: mod_base = OTHER; note = 2'-O-methyladenosine
ttgaactactgtgaaaagaaa

SEQ ID NO: 11857 - RNA, 21 nt, synthetic construct
  source 1..21: mol_type = other RNA
  modified_base 1: mod_base = OTHER; note = 2'-O-methylguanosine-3'-phosphorothioate
  modified_base 2: mod_base = OTHER; note = 2'-O-methyladenosine-3'-phosphorothioate
  modified_base 3: mod_base = OTHER; note = 2'-O-methyladenosine-3'-phosphate
  modified_base 4: mod_base = OTHER; note = 2'-O-methylcytidine-3'-phosphate
  modified_base 5: mod_base = OTHER; note = 2'-O-methyluridine-3'-phosphate
  modified_base 6: mod_base = OTHER; note = 2'-O-docosanyl-adenosine-3'-phosphate
  modified_base 7: mod_base = OTHER; note = 2'-deoxy-2'-fluorocytidine-3'-phosphate
  modified_base 8: mod_base = OTHER; note = 2'-O-methyluridine-3'-phosphate
  modified_base 9: mod_base = OTHER; note = 2'-deoxy-2'-fluoroguanosine-3'-phosphate
  modified_base 10: mod_base = OTHER; note = 2'-deoxy-2'-fluorouridine-3'-phosphate
  modified_base 11: mod_base = OTHER; note = 2'-deoxy-2'-fluoroguanosine-3'-phosphate
  modified_base 12: mod_base = OTHER; note = 2'-O-methyladenosine-3'-phosphate
  modified_base 13: mod_base = OTHER; note = 2'-O-methyladenosine-3'-phosphate
  modified_base 14: mod_base = OTHER; note = 2'-O-methyladenosine-3'-phosphate
  modified_base 15: mod_base = OTHER; note = 2'-O-methyladenosine-3'-phosphate
  modified_base 16: mod_base = OTHER; note = 2'-O-methylguanosine-3'-phosphate
  modified_base 17: mod_base = OTHER; note = 2'-O-methyladenosine-3'-phosphate
  modified_base 18: mod_base = OTHER; note = 2'-O-methyladenosine-3'-phosphate
  modified_base 19: mod_base = OTHER; note = 2'-O-methyluridine-3'-phosphorothioate
  modified_base 20: mod_base = OTHER; note = 2'-O-methylcytidine-3'-phosphorothioate
  modified_base 21: mod_base = OTHER; note = 2'-O-methyladenosine
gaactactgtgaaaagaatca

SEQ ID NO: 11858 - RNA, 21 nt, synthetic construct
  source 1..21: mol_type = other RNA
  modified_base 1: mod_base = OTHER; note = 2'-O-methylcytidine-3'-phosphorothioate
  modified_base 2: mod_base = OTHER; note = 2'-O-methylguanosine-3'-phosphorothioate
  modified_base 3: mod_base = OTHER; note = 2'-O-methyluridine-3'-phosphate
  modified_base 4: mod_base = OTHER; note = 2'-O-methyluridine-3'-phosphate
  modified_base 5: mod_base = OTHER; note = 2'-O-methylguanosine-3'-phosphate
  modified_base 6: mod_base = OTHER; note = 2'-O-docosanyl-uridine-3'-phosphate
  modified_base 7: mod_base = OTHER; note = 2'-deoxy-2'-fluoroadenosine-3'-phosphate
  modified_base 8: mod_base = OTHER; note = 2'-O-methyladenosine-3'-phosphate
  modified_base 9: mod_base = OTHER; note = 2'-deoxy-2'-fluoroadenosine-3'-phosphate
  modified_base 10: mod_base = OTHER; note = 2'-deoxy-2'-fluoroguanosine-3'-phosphate
  modified_base 11: mod_base = OTHER; note = 2'-deoxy-2'-fluoroadenosine-3'-phosphate
  modified_base 12: mod_base = OTHER; note = 2'-O-methylcytidine-3'-phosphate
  modified_base 13: mod_base = OTHER; note = 2'-O-methyluridine-3'-phosphate
  modified_base 14: mod_base = OTHER; note = 2'-O-methyluridine-3'-phosphate
  modified_base 15: mod_base = OTHER; note = 2'-O-methyluridine-3'-phosphate
  modified_base 16: mod_base = OTHER; note = 2'-O-methyluridine-3'-phosphate
  modified_base 17: mod_base = OTHER; note = 2'-O-methyluridine-3'-phosphate
  modified_base 18: mod_base = OTHER; note = 2'-O-methylguanosine-3'-phosphate
  modified_base 19: mod_base = OTHER; note = 2'-O-methyluridine-3'-phosphorothioate
  modified_base 20: mod_base = OTHER; note = 2'-O-methyladenosine-3'-phosphorothioate
  modified_base 21: mod_base = OTHER; note = 2'-O-methyladenosine
cgttgtaaagactttttgtaa

SEQ ID NO: 11859 - RNA, 21 nt, synthetic construct
  source 1..21: mol_type = other RNA
  modified_base 1: mod_base = OTHER; note = 2'-O-methylguanosine-3'-phosphorothioate
  modified_base 2: mod_base = OTHER; note = 2'-O-methyluridine-3'-phosphorothioate
  modified_base 3: mod_base = OTHER; note = 2'-O-methyluridine-3'-phosphate
  modified_base 4: mod_base = OTHER; note = 2'-O-methylguanosine-3'-phosphate
  modified_base 5: mod_base = OTHER; note = 2'-O-methyluridine-3'-phosphate
  modified_base 6: mod_base = OTHER; note = 2'-O-docosanyl-adenosine-3'-phosphate
  modified_base 7: mod_base = OTHER; note = 2'-deoxy-2'-fluoroadenosine-3'-phosphate
  modified_base 8: mod_base = OTHER; note = 2'-O-methyladenosine-3'-phosphate
  modified_base 9: mod_base = OTHER; note = 2'-deoxy-2'-fluoroguanosine-3'-phosphate
  modified_base 10: mod_base = OTHER; note = 2'-deoxy-2'-fluoroadenosine-3'-phosphate
  modified_base 11: mod_base = OTHER; note = 2'-deoxy-2'-fluorocytidine-3'-phosphate
  modified_base 12: mod_base = OTHER; note = 2'-O-methyluridine-3'-phosphate
  modified_base 13: mod_base = OTHER; note = 2'-O-methyluridine-3'-phosphate
  modified_base 14: mod_base = OTHER; note = 2'-O-methyluridine-3'-phosphate
  modified_base 15: mod_base = OTHER; note = 2'-O-methyluridine-3'-phosphate
  modified_base 16: mod_base = OTHER; note = 2'-O-methyluridine-3'-phosphate
  modified_base 17: mod_base = OTHER; note = 2'-O-methylguanosine-3'-phosphate
  modified_base 18: mod_base = OTHER; note = 2'-O-methyluridine-3'-phosphate
  modified_base 19: mod_base = OTHER; note = 2'-O-methyladenosine-3'-phosphorothioate
  modified_base 20: mod_base = OTHER; note = 2'-O-methyladenosine-3'-phosphorothioate
  modified_base 21: mod_base = OTHER; note = 2'-O-methyladenosine
gttgtaaagactttttgtaaa

SEQ ID NO: 11860 - RNA, 21 nt, synthetic construct
  source 1..21: mol_type = other RNA
  modified_base 1: mod_base = OTHER; note = 2'-O-methylcytidine-3'-phosphorothioate
  modified_base 2: mod_base = OTHER; note = 2'-O-methyluridine-3'-phosphorothioate
  modified_base 3: mod_base = OTHER; note = 2'-O-methyladenosine-3'-phosphate
  modified_base 4: mod_base = OTHER; note = 2'-O-methylguanosine-3'-phosphate
  modified_base 5: mod_base = OTHER; note = 2'-O-methylcytidine-3'-phosphate
  modified_base 6: mod_base = OTHER; note = 2'-O-docosanyl-uridine-3'-phosphate
  modified_base 7: mod_base = OTHER; note = 2'-deoxy-2'-fluoroguanosine-3'-phosphate
  modified_base 8: mod_base = OTHER; note = 2'-O-methyladenosine-3'-phosphate
  modified_base 9: mod_base = OTHER; note = 2'-deoxy-2'-fluorouridine-3'-phosphate
  modified_base 10: mod_base = OTHER; note = 2'-deoxy-2'-fluoroadenosine-3'-phosphate
  modified_base 11: mod_base = OTHER; note = 2'-deoxy-2'-fluorocytidine-3'-phosphate
  modified_base 12: mod_base = OTHER; note = 2'-O-methyluridine-3'-phosphate
  modified_base 13: mod_base = OTHER; note = 2'-O-methylcytidine-3'-phosphate
  modified_base 14: mod_base = OTHER; note = 2'-O-methyluridine-3'-phosphate
  modified_base 15: mod_base = OTHER; note = 2'-O-methyluridine-3'-phosphate
  modified_base 16: mod_base = OTHER; note = 2'-O-methyladenosine-3'-phosphate
  modified_base 17: mod_base = OTHER; note = 2'-O-methyladenosine-3'-phosphate
  modified_base 18: mod_base = OTHER; note = 2'-O-methylguanosine-3'-phosphate
  modified_base 19: mod_base = OTHER; note = 2'-O-methyluridine-3'-phosphorothioate
  modified_base 20: mod_base = OTHER; note = 2'-O-methyladenosine-3'-phosphorothioate
  modified_base 21: mod_base = OTHER; note = 2'-O-methyladenosine
ctagctgatactcttaagtaa

SEQ ID NO: 11861 - RNA, 21 nt, synthetic construct
  source 1..21: mol_type = other RNA
  modified_base 1: mod_base = OTHER; note = 2'-O-methyladenosine-3'-phosphorothioate
  modified_base 2: mod_base = OTHER; note = 2'-O-methyladenosine-3'-phosphorothioate
  modified_base 3: mod_base = OTHER; note = 2'-O-methylguanosine-3'-phosphate
  modified_base 4: mod_base = OTHER; note = 2'-O-methylcytidine-3'-phosphate
  modified_base 5: mod_base = OTHER; note = 2'-O-methyluridine-3'-phosphate
  modified_base 6: mod_base = OTHER; note = 2'-O-docosanyl-adenosine-3'-phosphate
  modified_base 7: mod_base = OTHER; note = 2'-deoxy-2'-fluoroguanosine-3'-phosphate
  modified_base 8: mod_base = OTHER; note = 2'-O-methylcytidine-3'-phosphate
  modified_base 9: mod_base = OTHER; note = 2'-deoxy-2'-fluorouridine-3'-phosphate
  modified_base 10: mod_base = OTHER; note = 2'-deoxy-2'-fluoroguanosine-3'-phosphate
  modified_base 11: mod_base = OTHER; note = 2'-deoxy-2'-fluoroadenosine-3'-phosphate
  modified_base 12: mod_base = OTHER; note = 2'-O-methyluridine-3'-phosphate
  modified_base 13: mod_base = OTHER; note = 2'-O-methyladenosine-3'-phosphate
  modified_base 14: mod_base = OTHER; note = 2'-O-methylcytidine-3'-phosphate
  modified_base 15: mod_base = OTHER; note = 2'-O-methyluridine-3'-phosphate
  modified_base 16: mod_base = OTHER; note = 2'-O-methylcytidine-3'-phosphate
  modified_base 17: mod_base = OTHER; note = 2'-O-methyluridine-3'-phosphate
  modified_base 18: mod_base = OTHER; note = 2'-O-methyluridine-3'-phosphate
  modified_base 19: mod_base = OTHER; note = 2'-O-methyladenosine-3'-phosphorothioate
  modified_base 20: mod_base = OTHER; note = 2'-O-methyladenosine-3'-phosphorothioate
  modified_base 21: mod_base = OTHER; note = 2'-O-methyladenosine
aagctagctgatactcttaaa

SEQ ID NO: 11862 - RNA, 21 nt, synthetic construct
  source 1..21: mol_type = other RNA
  modified_base 1: mod_base = OTHER; note = 2'-O-methylguanosine-3'-phosphorothioate
  modified_base 2: mod_base = OTHER; note = 2'-O-methylguanosine-3'-phosphorothioate
  modified_base 3: mod_base = OTHER; note = 2'-O-methylguanosine-3'-phosphate
  modified_base 4: mod_base = OTHER; note = 2'-O-methylcytidine-3'-phosphate
  modified_base 5: mod_base = OTHER; note = 2'-O-methyladenosine-3'-phosphate
  modified_base 6: mod_base = OTHER; note = 2'-O-docosanyl-adenosine-3'-phosphate
  modified_base 7: mod_base = OTHER; note = 2'-deoxy-2'-fluorouridine-3'-phosphate
  modified_base 8: mod_base = OTHER; note = 2'-O-methyladenosine-3'-phosphate
  modified_base 9: mod_base = OTHER; note = 2'-deoxy-2'-fluoroadenosine-3'-phosphate
  modified_base 10: mod_base = OTHER; note = 2'-deoxy-2'-fluoroadenosine-3'-phosphate
  modified_base 11: mod_base = OTHER; note = 2'-deoxy-2'-fluorocytidine-3'-phosphate
  modified_base 12: mod_base = OTHER; note = 2'-O-methyluridine-3'-phosphate
  modified_base 13: mod_base = OTHER; note = 2'-O-methylguanosine-3'-phosphate
  modified_base 14: mod_base = OTHER; note = 2'-O-methyluridine-3'-phosphate
  modified_base 15: mod_base = OTHER; note = 2'-O-methyladenosine-3'-phosphate
  modified_base 16: mod_base = OTHER; note = 2'-O-methyluridine-3'-phosphate
  modified_base 17: mod_base = OTHER; note = 2'-O-methylcytidine-3'-phosphate
  modified_base 18: mod_base = OTHER; note = 2'-O-methyladenosine-3'-phosphate
  modified_base 19: mod_base = OTHER; note = 2'-O-methyladenosine-3'-phosphorothioate
  modified_base 20: mod_base = OTHER; note = 2'-O-methyladenosine-3'-phosphorothioate
  modified_base 21: mod_base = OTHER; note = 2'-O-methyladenosine
gggcaataaactgtatcaaaa

SEQ ID NO: 11863 - RNA, 21 nt, synthetic construct
  source 1..21: mol_type = other RNA
  modified_base 1: mod_base = OTHER; note = 2'-O-methyladenosine-3'-phosphorothioate
  modified_base 2: mod_base = OTHER; note = 2'-O-methyladenosine-3'-phosphorothioate
  modified_base 3: mod_base = OTHER; note = 2'-O-methyluridine-3'-phosphate
  modified_base 4: mod_base = OTHER; note = 2'-O-methyluridine-3'-phosphate
  modified_base 5: mod_base = OTHER; note = 2'-O-methylguanosine-3'-phosphate
  modified_base 6: mod_base = OTHER; note = 2'-O-docosanyl-guanosine-3'-phosphate
  modified_base 7: mod_base = OTHER; note = 2'-deoxy-2'-fluoroguanosine-3'-phosphate
  modified_base 8: mod_base = OTHER; note = 2'-O-methylcytidine-3'-phosphate
  modified_base 9: mod_base = OTHER; note = 2'-deoxy-2'-fluoroadenosine-3'-phosphate
  modified_base 10: mod_base = OTHER; note = 2'-deoxy-2'-fluoroadenosine-3'-phosphate
  modified_base 11: mod_base = OTHER; note = 2'-deoxy-2'-fluorouridine-3'-phosphate
  modified_base 12: mod_base = OTHER; note = 2'-O-methyladenosine-3'-phosphate
  modified_base 13: mod_base = OTHER; note = 2'-O-methyladenosine-3'-phosphate
  modified_base 14: mod_base = OTHER; note = 2'-O-methyladenosine-3'-phosphate
  modified_base 15: mod_base = OTHER; note = 2'-O-methylcytidine-3'-phosphate
  modified_base 16: mod_base = OTHER; note = 2'-O-methyluridine-3'-phosphate
  modified_base 17: mod_base = OTHER; note = 2'-O-methylguanosine-3'-phosphate
  modified_base 18: mod_base = OTHER; note = 2'-O-methyluridine-3'-phosphate
  modified_base 19: mod_base = OTHER; note = 2'-O-methyladenosine-3'-phosphorothioate
  modified_base 20: mod_base = OTHER; note = 2'-O-methyluridine-3'-phosphorothioate
  modified_base 21: mod_base = OTHER; note = 2'-O-methyladenosine
aattgggcaataaactgtata

SEQ ID NO: 11864 - RNA, 21 nt, synthetic construct
  source 1..21: mol_type = other RNA
  modified_base 1: mod_base = OTHER; note = 2'-O-methyladenosine-3'-phosphorothioate
  modified_base 2: mod_base = OTHER; note = 2'-O-methyluridine-3'-phosphorothioate
  modified_base 3: mod_base = OTHER; note = 2'-O-methyluridine-3'-phosphate
  modified_base 4: mod_base = OTHER; note = 2'-O-methylguanosine-3'-phosphate
  modified_base 5: mod_base = OTHER; note = 2'-O-methylguanosine-3'-phosphate
  modified_base 6: mod_base = OTHER; note = 2'-O-docosanyl-guanosine-3'-phosphate
  modified_base 7: mod_base = OTHER; note = 2'-deoxy-2'-fluorocytidine-3'-phosphate
  modified_base 8: mod_base = OTHER; note = 2'-O-methyladenosine-3'-phosphate
  modified_base 9: mod_base = OTHER; note = 2'-deoxy-2'-fluoroadenosine-3'-phosphate
  modified_base 10: mod_base = OTHER; note = 2'-deoxy-2'-fluorouridine-3'-phosphate
  modified_base 11: mod_base = OTHER; note = 2'-deoxy-2'-fluoroadenosine-3'-phosphate
  modified_base 12: mod_base = OTHER; note = 2'-O-methyladenosine-3'-phosphate
  modified_base 13: mod_base = OTHER; note = 2'-O-methyladenosine-3'-phosphate
  modified_base 14: mod_base = OTHER; note = 2'-O-methylcytidine-3'-phosphate
  modified_base 15: mod_base = OTHER; note = 2'-O-methyluridine-3'-phosphate
  modified_base 16: mod_base = OTHER; note = 2'-O-methylguanosine-3'-phosphate
  modified_base 17: mod_base = OTHER; note = 2'-O-methyluridine-3'-phosphate
  modified_base 18: mod_base = OTHER; note = 2'-O-methyladenosine-3'-phosphate
  modified_base 19: mod_base = OTHER; note = 2'-O-methyluridine-3'-phosphorothioate
  modified_base 20: mod_base = OTHER; note = 2'-O-methylcytidine-3'-phosphorothioate
  modified_base 21: mod_base = OTHER; note = 2'-O-methyladenosine
attgggcaataaactgtatca

SEQ ID NO: 11865 - RNA, 21 nt, synthetic construct
  source 1..21: mol_type = other RNA
  modified_base 1: mod_base = OTHER; note = 2'-O-methyluridine-3'-phosphorothioate
  modified_base 2: mod_base = OTHER; note = 2'-O-methyluridine-3'-phosphorothioate
  modified_base 3: mod_base = OTHER; note = 2'-O-methylguanosine-3'-phosphate
  modified_base 4: mod_base = OTHER; note = 2'-O-methylguanosine-3'-phosphate
  modified_base 5: mod_base = OTHER; note = 2'-O-methylguanosine-3'-phosphate
  modified_base 6: mod_base = OTHER; note = 2'-O-docosanyl-cytidine-3'-phosphate
  modified_base 7: mod_base = OTHER; note = 2'-deoxy-2'-fluoroadenosine-3'-phosphate
  modified_base 8: mod_base = OTHER; note = 2'-O-methyladenosine-3'-phosphate
  modified_base 9: mod_base = OTHER; note = 2'-deoxy-2'-fluorouridine-3'-phosphate
  modified_base 10: mod_base = OTHER; note = 2'-deoxy-2'-fluoroadenosine-3'-phosphate
  modified_base 11: mod_base = OTHER; note = 2'-deoxy-2'-fluoroadenosine-3'-phosphate
  modified_base 12: mod_base = OTHER; note = 2'-O-methyladenosine-3'-phosphate
  modified_base 13: mod_base = OTHER; note = 2'-O-methylcytidine-3'-phosphate
  modified_base 14: mod_base = OTHER; note = 2'-O-methyluridine-3'-phosphate
  modified_base 15: mod_base = OTHER; note = 2'-O-methylguanosine-3'-phosphate
  modified_base 16: mod_base = OTHER; note = 2'-O-methyluridine-3'-phosphate
  modified_base 17: mod_base = OTHER; note = 2'-O-methyladenosine-3'-phosphate
  modified_base 18: mod_base = OTHER; note = 2'-O-methyluridine-3'-phosphate
  modified_base 19: mod_base = OTHER; note = 2'-O-methylcytidine-3'-phosphorothioate
  modified_base 20: mod_base = OTHER; note = 2'-O-methyladenosine-3'-phosphorothioate
  modified_base 21: mod_base = OTHER; note = 2'-O-methyladenosine
ttgggcaataaactgtatcaa

SEQ ID NO: 11866 - RNA, 21 nt, synthetic construct
  source 1..21: mol_type = other RNA
  modified_base 1: mod_base = OTHER; note = 2'-O-methyluridine-3'-phosphorothioate
  modified_base 2: mod_base = OTHER; note = 2'-O-methylguanosine-3'-phosphorothioate
  modified_base 3: mod_base = OTHER; note = 2'-O-methylguanosine-3'-phosphate
  modified_base 4: mod_base = OTHER; note = 2'-O-methylguanosine-3'-phosphate
  modified_base 5: mod_base = OTHER; note = 2'-O-methylcytidine-3'-phosphate
  modified_base 6: mod_base = OTHER; note = 2'-O-docosanyl-adenosine-3'-phosphate
  modified_base 7: mod_base = OTHER; note = 2'-deoxy-2'-fluoroadenosine-3'-phosphate
  modified_base 8: mod_base = OTHER; note = 2'-O-methyluridine-3'-phosphate
  modified_base 9: mod_base = OTHER; note = 2'-deoxy-2'-fluoroadenosine-3'-phosphate
  modified_base 10: mod_base = OTHER; note = 2'-deoxy-2'-fluoroadenosine-3'-phosphate
  modified_base 11: mod_base = OTHER; note = 2'-deoxy-2'-fluoroadenosine-3'-phosphate
  modified_base 12: mod_base = OTHER; note = 2'-O-methylcytidine-3'-phosphate
  modified_base 13: mod_base = OTHER; note = 2'-O-methyluridine-3'-phosphate
  modified_base 14: mod_base = OTHER; note = 2'-O-methylguanosine-3'-phosphate
  modified_base 15: mod_base = OTHER; note = 2'-O-methyluridine-3'-phosphate
  modified_base 16: mod_base = OTHER; note = 2'-O-methyladenosine-3'-phosphate
  modified_base 17: mod_base = OTHER; note = 2'-O-methyluridine-3'-phosphate
  modified_base 18: mod_base = OTHER; note = 2'-O-methylcytidine-3'-phosphate
  modified_base 19: mod_base = OTHER; note = 2'-O-methyladenosine-3'-phosphorothioate
  modified_base 20: mod_base = OTHER; note = 2'-O-methyladenosine-3'-phosphorothioate
  modified_base 21: mod_base = OTHER; note = 2'-O-methyladenosine
tgggcaataaactgtatcaaa

SEQ ID NO: 11867 - RNA, 21 nt, synthetic construct
  source 1..21: mol_type = other RNA
  modified_base 1: mod_base = OTHER; note = 2'-O-methylguanosine-3'-phosphorothioate
  modified_base 2: mod_base = OTHER; note = 2'-O-methylguanosine-3'-phosphorothioate
  modified_base 3: mod_base = OTHER; note = 2'-O-methylcytidine-3'-phosphate
  modified_base 4: mod_base = OTHER; note = 2'-O-methyladenosine-3'-phosphate
  modified_base 5: mod_base = OTHER; note = 2'-O-methyladenosine-3'-phosphate
  modified_base 6: mod_base = OTHER; note = 2'-O-docosanyl-uridine-3'-phosphate
  modified_base 7: mod_base = OTHER; note = 2'-deoxy-2'-fluoroadenosine-3'-phosphate
  modified_base 8: mod_base = OTHER; note = 2'-O-methyladenosine-3'-phosphate
  modified_base 9: mod_base = OTHER; note = 2'-deoxy-2'-fluoroadenosine-3'-phosphate
  modified_base 10: mod_base = OTHER; note = 2'-deoxy-2'-fluorocytidine-3'-phosphate
  modified_base 11: mod_base = OTHER; note = 2'-deoxy-2'-fluorouridine-3'-phosphate
  modified_base 12: mod_base = OTHER; note = 2'-O-methylguanosine-3'-phosphate
  modified_base 13: mod_base = OTHER; note = 2'-O-methyluridine-3'-phosphate
  modified_base 14: mod_base = OTHER; note = 2'-O-methyladenosine-3'-phosphate
  modified_base 15: mod_base = OTHER; note = 2'-O-methyluridine-3'-phosphate
  modified_base 16: mod_base = OTHER; note = 2'-O-methylcytidine-3'-phosphate
  modified_base 17: mod_base = OTHER; note = 2'-O-methyladenosine-3'-phosphate
  modified_base 18: mod_base = OTHER; note = 2'-O-methyladenosine-3'-phosphate
  modified_base 19: mod_base = OTHER; note = 2'-O-methyladenosine-3'-phosphorothioate
  modified_base 20: mod_base = OTHER; note = 2'-O-methyladenosine-3'-phosphorothioate
  modified_base 21: mod_base = OTHER; note = 2'-O-methyladenosine
ggcaataaactgtatcaaaaa

SEQ ID NO: 11868 - RNA, 21 nt, synthetic construct
  source 1..21: mol_type = other RNA
  modified_base 1: mod_base = OTHER; note = 2'-O-methylguanosine-3'-phosphorothioate
  modified_base 2: mod_base = OTHER; note = 2'-O-methylcytidine-3'-phosphorothioate
  modified_base 3: mod_base = OTHER; note = 2'-O-methyladenosine-3'-phosphate
  modified_base 4: mod_base = OTHER; note = 2'-O-methyladenosine-3'-phosphate
  modified_base 5: mod_base = OTHER; note = 2'-O-methyluridine-3'-phosphate
  modified_base 6: mod_base = OTHER; note = 2'-O-docosanyl-adenosine-3'-phosphate
  modified_base 7: mod_base = OTHER; note = 2'-deoxy-2'-fluoroadenosine-3'-phosphate
  modified_base 8: mod_base = OTHER; note = 2'-O-methyladenosine-3'-phosphate
  modified_base 9: mod_base = OTHER; note = 2'-deoxy-2'-fluorocytidine-3'-phosphate
  modified_base 10: mod_base = OTHER; note = 2'-deoxy-2'-fluorouridine-3'-phosphate
  modified_base 11: mod_base = OTHER; note = 2'-deoxy-2'-fluoroguanosine-3'-phosphate
  modified_base 12: mod_base = OTHER; note = 2'-O-methyluridine-3'-phosphate
  modified_base 13: mod_base = OTHER; note = 2'-O-methyladenosine-3'-phosphate
  modified_base 14: mod_base = OTHER; note = 2'-O-methyluridine-3'-phosphate
  modified_base 15: mod_base = OTHER; note = 2'-O-methylcytidine-3'-phosphate
  modified_base 16: mod_base = OTHER; note = 2'-O-methyladenosine-3'-phosphate
  modified_base 17: mod_base = OTHER; note = 2'-O-methyladenosine-3'-phosphate
  modified_base 18: mod_base = OTHER; note = 2'-O-methyladenosine-3'-phosphate
  modified_base 19: mod_base = OTHER; note = 2'-O-methyladenosine-3'-phosphorothioate
  modified_base 20: mod_base = OTHER; note = 2'-O-methyladenosine-3'-phosphorothioate
  modified_base 21: mod_base = OTHER; note = 2'-O-methyladenosine
gcaataaactgtatcaaaaaa

SEQ ID NO: 11869 - RNA, 21 nt, synthetic construct
  source 1..21: mol_type = other RNA
  modified_base 1: mod_base = OTHER; note = 2'-O-methylcytidine-3'-phosphorothioate
  modified_base 2: mod_base = OTHER; note = 2'-O-methyladenosine-3'-phosphorothioate
  modified_base 3: mod_base = OTHER; note = 2'-O-methyladenosine-3'-phosphate
  modified_base 4: mod_base = OTHER; note = 2'-O-methyluridine-3'-phosphate
  modified_base 5: mod_base = OTHER; note = 2'-O-methyladenosine-3'-phosphate
  modified_base 6: mod_base = OTHER; note = 2'-O-docosanyl-adenosine-3'-phosphate
  modified_base 7: mod_base = OTHER; note = 2'-deoxy-2'-fluoroadenosine-3'-phosphate
  modified_base 8: mod_base = OTHER; note = 2'-O-methylcytidine-3'-phosphate
  modified_base 9: mod_base = OTHER; note = 2'-deoxy-2'-fluorouridine-3'-phosphate
  modified_base 10: mod_base = OTHER; note = 2'-deoxy-2'-fluoroguanosine-3'-phosphate
  modified_base 11: mod_base = OTHER; note = 2'-deoxy-2'-fluorouridine-3'-phosphate
  modified_base 12: mod_base = OTHER; note = 2'-O-methyladenosine-3'-phosphate
  modified_base 13: mod_base = OTHER; note = 2'-O-methyluridine-3'-phosphate
  modified_base 14: mod_base = OTHER; note = 2'-O-methylcytidine-3'-phosphate
  modified_base 15: mod_base = OTHER; note = 2'-O-methyladenosine-3'-phosphate
  modified_base 16: mod_base = OTHER; note = 2'-O-methyladenosine-3'-phosphate
  modified_base 17: mod_base = OTHER; note = 2'-O-methyladenosine-3'-phosphate
  modified_base 18: mod_base = OTHER; note = 2'-O-methyladenosine-3'-phosphate
  modified_base 19: mod_base = OTHER; note = 2'-O-methyladenosine-3'-phosphorothioate
  modified_base 20: mod_base = OTHER; note = 2'-O-methyluridine-3'-phosphorothioate
  modified_base 21: mod_base = OTHER; note = 2'-O-methyladenosine
caataaactgtatcaaaaata

SEQ ID NO: 11870 - RNA, 21 nt, synthetic construct
  source 1..21: mol_type = other RNA
  modified_base 1: mod_base = OTHER; note = 2'-O-methylguanosine-3'-phosphorothioate
  modified_base 2: mod_base = OTHER; note = 2'-O-methyluridine-3'-phosphorothioate
  modified_base 3: mod_base = OTHER; note = 2'-O-methyladenosine-3'-phosphate
  modified_base 4: mod_base = OTHER; note = 2'-O-methyluridine-3'-phosphate
  modified_base 5: mod_base = OTHER; note = 2'-O-methylcytidine-3'-phosphate
  modified_base 6: mod_base = OTHER; note = 2'-O-docosanyl-adenosine-3'-phosphate
  modified_base 7: mod_base = OTHER; note = 2'-deoxy-2'-fluoroadenosine-3'-phosphate
  modified_base 8: mod_base = OTHER; note = 2'-O-methyladenosine-3'-phosphate
  modified_base 9: mod_base = OTHER; note = 2'-deoxy-2'-fluoroadenosine-3'-phosphate
  modified_base 10: mod_base = OTHER; note = 2'-deoxy-2'-fluoroadenosine-3'-phosphate
  modified_base 11: mod_base = OTHER; note = 2'-deoxy-2'-fluorouridine-3'-phosphate
  modified_base 12: mod_base = OTHER; note = 2'-O-methyladenosine-3'-phosphate
  modified_base 13: mod_base = OTHER; note = 2'-O-methyluridine-3'-phosphate
  modified_base 14: mod_base = OTHER; note = 2'-O-methylguanosine-3'-phosphate
  modified_base 15: mod_base = OTHER; note = 2'-O-methyluridine-3'-phosphate
  modified_base 16: mod_base = OTHER; note = 2'-O-methyladenosine-3'-phosphate
  modified_base 17: mod_base = OTHER; note = 2'-O-methylguanosine-3'-phosphate
  modified_base 18: mod_base = OTHER; note = 2'-O-methyladenosine-3'-phosphate
  modified_base 19: mod_base = OTHER; note = 2'-O-methyluridine-3'-phosphorothioate
  modified_base 20: mod_base = OTHER; note = 2'-O-methylguanosine-3'-phosphorothioate
  modified_base 21: mod_base = OTHER; note = 2'-O-methyladenosine
gtatcaaaaatatgtagatga

SEQ ID NO: 11871 - RNA, 21 nt, synthetic construct
  source 1..21: mol_type = other RNA
  modified_base 1: mod_base = OTHER; note = 2'-O-methyluridine-3'-phosphorothioate
  modified_base 2: mod_base = OTHER; note = 2'-O-methyladenosine-3'-phosphorothioate
  modified_base 3: mod_base = OTHER; note = 2'-O-methyluridine-3'-phosphate
  modified_base 4: mod_base = OTHER; note = 2'-O-methylcytidine-3'-phosphate
  modified_base 5: mod_base = OTHER; note = 2'-O-methyladenosine-3'-phosphate
  modified_base 6: mod_base = OTHER; note = 2'-O-docosanyl-adenosine-3'-phosphate
  modified_base 7: mod_base = OTHER; note = 2'-deoxy-2'-fluoroadenosine-3'-phosphate
  modified_base 8: mod_base = OTHER; note = 2'-O-methyladenosine-3'-phosphate
  modified_base 9: mod_base = OTHER; note = 2'-deoxy-2'-fluoroadenosine-3'-phosphate
  modified_base 10: mod_base = OTHER; note = 2'-deoxy-2'-fluorouridine-3'-phosphate
  modified_base 11: mod_base = OTHER; note = 2'-deoxy-2'-fluoroadenosine-3'-phosphate
  modified_base 12: mod_base = OTHER; note = 2'-O-methyluridine-3'-phosphate
  modified_base 13: mod_base = OTHER; note = 2'-O-methylguanosine-3'-phosphate
  modified_base 14: mod_base = OTHER; note = 2'-O-methyluridine-3'-phosphate
  modified_base 15: mod_base = OTHER; note = 2'-O-methyladenosine-3'-phosphate
  modified_base 16: mod_base = OTHER; note = 2'-O-methylguanosine-3'-phosphate
  modified_base 17: mod_base = OTHER; note = 2'-O-methyladenosine-3'-phosphate
  modified_base 18: mod_base = OTHER; note = 2'-O-methyluridine-3'-phosphate
  modified_base 19: mod_base = OTHER; note = 2'-O-methylguanosine-3'-phosphorothioate
  modified_base 20: mod_base = OTHER; note = 2'-O-methylguanosine-3'-phosphorothioate
  modified_base 21: mod_base = OTHER; note = 2'-O-methyladenosine
tatcaaaaatatgtagatgga

SEQ ID NO: 11872 - RNA, 21 nt, synthetic construct
  source 1..21: mol_type = other RNA
  modified_base 1: mod_base = OTHER; note = 2'-O-methyladenosine-3'-phosphorothioate
  modified_base 2: mod_base = OTHER; note = 2'-O-methyluridine-3'-phosphorothioate
  modified_base 3: mod_base = OTHER; note = 2'-O-methylcytidine-3'-phosphate
  modified_base 4: mod_base = OTHER; note = 2'-O-methyladenosine-3'-phosphate
  modified_base 5: mod_base = OTHER; note = 2'-O-methyladenosine-3'-phosphate
  modified_base 6: mod_base = OTHER; note = 2'-O-docosanyl-adenosine-3'-phosphate
  modified_base 7: mod_base = OTHER; note = 2'-deoxy-2'-fluoroadenosine-3'-phosphate
  modified_base 8: mod_base = OTHER; note = 2'-O-methyladenosine-3'-phosphate
  modified_base 9: mod_base = OTHER; note = 2'-deoxy-2'-fluorouridine-3'-phosphate
  modified_base 10: mod_base = OTHER; note = 2'-deoxy-2'-fluoroadenosine-3'-phosphate
  modified_base 11: mod_base = OTHER; note = 2'-deoxy-2'-fluorouridine-3'-phosphate
  modified_base 12: mod_base = OTHER; note = 2'-O-methylguanosine-3'-phosphate
  modified_base 13: mod_base = OTHER; note = 2'-O-methyluridine-3'-phosphate
  modified_base 14: mod_base = OTHER; note = 2'-O-methyladenosine-3'-phosphate
  modified_base 15: mod_base = OTHER; note = 2'-O-methylguanosine-3'-phosphate
  modified_base 16: mod_base = OTHER; note = 2'-O-methyladenosine-3'-phosphate
  modified_base 17: mod_base = OTHER; note = 2'-O-methyluridine-3'-phosphate
  modified_base 18: mod_base = OTHER; note = 2'-O-methylguanosine-3'-phosphate
  modified_base 19: mod_base = OTHER; note = 2'-O-methylguanosine-3'-phosphorothioate
  modified_base 20: mod_base = OTHER; note = 2'-O-methyladenosine-3'-phosphorothioate
  modified_base 21: mod_base = OTHER; note = 2'-O-methyladenosine
atcaaaaatatgtagatggaa

SEQ ID NO: 11873 - RNA, 21 nt, synthetic construct
  source 1..21: mol_type = other RNA
  modified_base 1: mod_base = OTHER; note = 2'-O-methyladenosine-3'-phosphorothioate
  modified_base 2: mod_base = OTHER; note = 2'-O-methyladenosine-3'-phosphorothioate
  modified_base 3: mod_base = OTHER; note = 2'-O-methylguanosine-3'-phosphate
  modified_base 4: mod_base = OTHER; note = 2'-O-methylguanosine-3'-phosphate
  modified_base 5: mod_base = OTHER; note = 2'-O-methyluridine-3'-phosphate
  modified_base 6: mod_base = OTHER; note = 2'-O-docosanyl-guanosine-3'-phosphate
  modified_base 7: mod_base = OTHER; note = 2'-deoxy-2'-fluoroadenosine-3'-phosphate
  modified_base 8: mod_base = OTHER; note = 2'-O-methyladenosine-3'-phosphate
  modified_base 9: mod_base = OTHER; note = 2'-deoxy-2'-fluoroguanosine-3'-phosphate
  modified_base 10: mod_base = OTHER; note = 2'-deoxy-2'-fluoroadenosine-3'-phosphate
  modified_base 11: mod_base = OTHER; note = 2'-deoxy-2'-fluoroguanosine-3'-phosphate
  modified_base 12: mod_base = OTHER; note = 2'-O-methyladenosine-3'-phosphate
  modified_base 13: mod_base = OTHER; note = 2'-O-methyladenosine-3'-phosphate
  modified_base 14: mod_base = OTHER; note = 2'-O-methyluridine-3'-phosphate
  modified_base 15: mod_base = OTHER; note = 2'-O-methyluridine-3'-phosphate
  modified_base 16: mod_base = OTHER; note = 2'-O-methyluridine-3'-phosphate
  modified_base 17: mod_base = OTHER; note = 2'-O-methylcytidine-3'-phosphate
  modified_base 18: mod_base = OTHER; note = 2'-O-methyladenosine-3'-phosphate
  modified_base 19: mod_base = OTHER; note = 2'-O-methyladenosine-3'-phosphorothioate
  modified_base 20: mod_base = OTHER; note = 2'-O-methyladenosine-3'-phosphorothioate
  modified_base 21: mod_base = OTHER; note = 2'-O-methyladenosine
aaggtgaagagaatttcaaaa

SEQ ID NO: 11874 - RNA, 21 nt, synthetic construct
  source 1..21: mol_type = other RNA
  modified_base 1: mod_base = OTHER; note = 2'-O-methylguanosine-3'-phosphorothioate
  modified_base 2: mod_base = OTHER; note = 2'-O-methylguanosine-3'-phosphorothioate
  modified_base 3: mod_base = OTHER; note = 2'-O-methyluridine-3'-phosphate
  modified_base 4: mod_base = OTHER; note = 2'-O-methylguanosine-3'-phosphate
  modified_base 5: mod_base = OTHER; note = 2'-O-methyladenosine-3'-phosphate
  modified_base 6: mod_base = OTHER; note = 2'-O-docosanyl-adenosine-3'-phosphate
  modified_base 7: mod_base = OTHER; note = 2'-deoxy-2'-fluoroguanosine-3'-phosphate
  modified_base 8: mod_base = OTHER; note = 2'-O-methyladenosine-3'-phosphate
  modified_base 9: mod_base = OTHER; note = 2'-deoxy-2'-fluoroguanosine-3'-phosphate
  modified_base 10: mod_base = OTHER; note = 2'-deoxy-2'-fluoroadenosine-3'-phosphate
  modified_base 11: mod_base = OTHER; note = 2'-deoxy-2'-fluoroadenosine-3'-phosphate
  modified_base 12: mod_base = OTHER; note = 2'-O-methyluridine-3'-phosphate
  modified_base 13: mod_base = OTHER; note = 2'-O-methyluridine-3'-phosphate
  modified_base 14: mod_base = OTHER; note = 2'-O-methyluridine-3'-phosphate
  modified_base 15: mod_base = OTHER; note = 2'-O-methylcytidine-3'-phosphate
  modified_base 16: mod_base = OTHER; note = 2'-O-methyladenosine-3'-phosphate
  modified_base 17: mod_base = OTHER; note = 2'-O-methyladenosine-3'-phosphate
  modified_base 18: mod_base = OTHER; note = 2'-O-methyladenosine-3'-phosphate
  modified_base 19: mod_base = OTHER; note = 2'-O-methylcytidine-3'-phosphorothioate
  modified_base 20: mod_base = OTHER; note = 2'-O-methyluridine-3'-phosphorothioate
  modified_base 21: mod_base = OTHER; note = 2'-O-methyladenosine
ggtgaagagaatttcaaacta

SEQ ID NO: 11875 - RNA, 21 nt, synthetic construct
  source 1..21: mol_type = other RNA
  modified_base 1: mod_base = OTHER; note = 2'-O-methylguanosine-3'-phosphorothioate
  modified_base 2: mod_base = OTHER; note = 2'-O-methyluridine-3'-phosphorothioate
  modified_base 3: mod_base = OTHER; note = 2'-O-methylguanosine-3'-phosphate
  modified_base 4: mod_base = OTHER; note = 2'-O-methyladenosine-3'-phosphate
  modified_base 5: mod_base = OTHER; note = 2'-O-methyladenosine-3'-phosphate
  modified_base 6: mod_base = OTHER; note = 2'-O-docosanyl-guanosine-3'-phosphate
  modified_base 7: mod_base = OTHER; note = 2'-deoxy-2'-fluoroadenosine-3'-phosphate
  modified_base 8: mod_base = OTHER; note = 2'-O-methylguanosine-3'-phosphate
  modified_base 9: mod_base = OTHER; note = 2'-deoxy-2'-fluoroadenosine-3'-phosphate
  modified_base 10: mod_base = OTHER; note = 2'-deoxy-2'-fluoroadenosine-3'-phosphate
  modified_base 11: mod_base = OTHER; note = 2'-deoxy-2'-fluorouridine-3'-phosphate
  modified_base 12: mod_base = OTHER; note = 2'-O-methyluridine-3'-phosphate
  modified_base 13: mod_base = OTHER; note = 2'-O-methyluridine-3'-phosphate
  modified_base 14: mod_base = OTHER; note = 2'-O-methylcytidine-3'-phosphate
  modified_base 15: mod_base = OTHER; note = 2'-O-methyladenosine-3'-phosphate
  modified_base 16: mod_base = OTHER; note = 2'-O-methyladenosine-3'-phosphate
  modified_base 17: mod_base = OTHER; note = 2'-O-methyladenosine-3'-phosphate
  modified_base 18: mod_base = OTHER; note = 2'-O-methylcytidine-3'-phosphate
  modified_base 19: mod_base = OTHER; note = 2'-O-methyluridine-3'-phosphorothioate
  modified_base 20: mod_base = OTHER; note = 2'-O-methylcytidine-3'-phosphorothioate
  modified_base 21: mod_base = OTHER; note = 2'-O-methyladenosine
gtgaagagaatttcaaactca

SEQ ID NO: 11876 - RNA, 21 nt, synthetic construct
  source 1..21: mol_type = other RNA
  modified_base 1: mod_base = OTHER; note = 2'-O-methylguanosine-3'-phosphorothioate
  modified_base 2: mod_base = OTHER; note = 2'-O-methyladenosine-3'-phosphorothioate
  modified_base 3: mod_base = OTHER; note = 2'-O-methyluridine-3'-phosphate
  modified_base 4: mod_base = OTHER; note = 2'-O-methylguanosine-3'-phosphate
  modified_base 5: mod_base = OTHER; note = 2'-O-methyluridine-3'-phosphate
  modified_base 6: mod_base = OTHER; note = 2'-O-docosanyl-uridine-3'-phosphate
  modified_base 7: mod_base = OTHER; note = 2'-deoxy-2'-fluorouridine-3'-phosphate
  modified_base 8: mod_base = OTHER; note = 2'-O-methylcytidine-3'-phosphate
  modified_base 9: mod_base = OTHER; note = 2'-deoxy-2'-fluoroadenosine-3'-phosphate
  modified_base 10: mod_base = OTHER; note = 2'-deoxy-2'-fluorouridine-3'-phosphate
  modified_base 11: mod_base = OTHER; note = 2'-deoxy-2'-fluorouridine-3'-phosphate
  modified_base 12: mod_base = OTHER; note = 2'-O-methyladenosine-3'-phosphate
  modified_base 13: mod_base = OTHER; note = 2'-O-methyladenosine-3'-phosphate
  modified_base 14: mod_base = OTHER; note = 2'-O-methyluridine-3'-phosphate
  modified_base 15: mod_base = OTHER; note = 2'-O-methyluridine-3'-phosphate
  modified_base 16: mod_base = OTHER; note = 2'-O-methyluridine-3'-phosphate
  modified_base 17: mod_base = OTHER; note = 2'-O-methylcytidine-3'-phosphate
  modified_base 18: mod_base = OTHER; note = 2'-O-methyluridine-3'-phosphate
  modified_base 19: mod_base = OTHER; note = 2'-O-methyladenosine-3'-phosphorothioate
  modified_base 20: mod_base = OTHER; note = 2'-O-methylguanosine-3'-phosphorothioate
  modified_base 21: mod_base = OTHER; note = 2'-O-methyladenosine
gatgtttcattaatttctaga

SEQ ID NO: 11877 - RNA, 21 nt, synthetic construct
  source 1..21: mol_type = other RNA
  modified_base 1: mod_base = OTHER; note = 2'-O-methyluridine-3'-phosphorothioate
  modified_base 2: mod_base = OTHER; note = 2'-O-methyluridine-3'-phosphorothioate
  modified_base 3: mod_base = OTHER; note = 2'-O-methylcytidine-3'-phosphate
  modified_base 4: mod_base = OTHER; note = 2'-O-methyluridine-3'-phosphate
  modified_base 5: mod_base = OTHER; note = 2'-O-methyladenosine-3'-phosphate
  modified_base 6: mod_base = OTHER; note = 2'-O-docosanyl-guanosine-3'-phosphate
  modified_base 7: mod_base = OTHER; note = 2'-deoxy-2'-fluorouridine-3'-phosphate
  modified_base 8: mod_base = OTHER; note = 2'-O-methylcytidine-3'-phosphate
  modified_base 9: mod_base = OTHER; note = 2'-deoxy-2'-fluorouridine-3'-phosphate
  modified_base 10: mod_base = OTHER; note = 2'-deoxy-2'-fluoroguanosine-3'-phosphate
  modified_base 11: mod_base = OTHER; note = 2'-deoxy-2'-fluorouridine-3'-phosphate
  modified_base 12: mod_base = OTHER; note = 2'-O-methylguanosine-3'-phosphate
  modified_base 13: mod_base = OTHER; note = 2'-O-methyladenosine-3'-phosphate
  modified_base 14: mod_base = OTHER; note = 2'-O-methyladenosine-3'-phosphate
  modified_base 15: mod_base = OTHER; note = 2'-O-methyladenosine-3'-phosphate
  modified_base 16: mod_base = OTHER; note = 2'-O-methyladenosine-3'-phosphate
  modified_base 17: mod_base = OTHER; note = 2'-O-methyluridine-3'-phosphate
  modified_base 18: mod_base = OTHER; note = 2'-O-methyladenosine-3'-phosphate
  modified_base 19: mod_base = OTHER; note = 2'-O-methyluridine-3'-phosphorothioate
  modified_base 20: mod_base = OTHER; note = 2'-O-methylguanosine-3'-phosphorothioate
  modified_base 21: mod_base = OTHER; note = 2'-O-methyladenosine
ttctagtctgtgaaaatatga

SEQ ID NO: 11878 - RNA, 21 nt, synthetic construct
  source 1..21: mol_type = other RNA
  modified_base 1: mod_base = OTHER; note = 2'-O-methyluridine-3'-phosphorothioate
  modified_base 2: mod_base = OTHER; note = 2'-O-methylcytidine-3'-phosphorothioate
  modified_base 3: mod_base = OTHER; note = 2'-O-methyluridine-3'-phosphate
  modified_base 4: mod_base = OTHER; note = 2'-O-methyladenosine-3'-phosphate
  modified_base 5: mod_base = OTHER; note = 2'-O-methylguanosine-3'-phosphate
  modified_base 6: mod_base = OTHER; note = 2'-O-docosanyl-uridine-3'-phosphate
  modified_base 7: mod_base = OTHER; note = 2'-deoxy-2'-fluorocytidine-3'-phosphate
  modified_base 8: mod_base = OTHER; note = 2'-O-methyluridine-3'-phosphate
  modified_base 9: mod_base = OTHER; note = 2'-deoxy-2'-fluoroguanosine-3'-phosphate
  modified_base 10: mod_base = OTHER; note = 2'-deoxy-2'-fluorouridine-3'-phosphate
  modified_base 11: mod_base = OTHER; note = 2'-deoxy-2'-fluoroguanosine-3'-phosphate
  modified_base 12: mod_base = OTHER; note = 2'-O-methyladenosine-3'-phosphate
  modified_base 13: mod_base = OTHER; note = 2'-O-methyladenosine-3'-phosphate
  modified_base 14: mod_base = OTHER; note = 2'-O-methyladenosine-3'-phosphate
  modified_base 15: mod_base = OTHER; note = 2'-O-methyladenosine-3'-phosphate
  modified_base 16: mod_base = OTHER; note = 2'-O-methyluridine-3'-phosphate
  modified_base 17: mod_base = OTHER; note = 2'-O-methyladenosine-3'-phosphate
  modified_base 18: mod_base = OTHER; note = 2'-O-methyluridine-3'-phosphate
  modified_base 19: mod_base = OTHER; note = 2'-O-methylguanosine-3'-phosphorothioate
  modified_base 20: mod_base = OTHER; note = 2'-O-methylcytidine-3'-phosphorothioate
  modified_base 21: mod_base = OTHER; note = 2'-O-methyladenosine
tctagtctgtgaaaatatgca

SEQ ID NO: 11879 - RNA, 21 nt, synthetic construct
  source 1..21: mol_type = other RNA
  modified_base 1: mod_base = OTHER; note = 2'-O-methylcytidine-3'-phosphorothioate
  modified_base 2: mod_base = OTHER; note = 2'-O-methyluridine-3'-phosphorothioate
  modified_base 3: mod_base = OTHER; note = 2'-O-methyladenosine-3'-phosphate
  modified_base 4: mod_base = OTHER; note = 2'-O-methylguanosine-3'-phosphate
  modified_base 5: mod_base = OTHER; note = 2'-O-methyluridine-3'-phosphate
  modified_base 6: mod_base = OTHER; note = 2'-O-docosanyl-cytidine-3'-phosphate
  modified_base 7: mod_base = OTHER; note = 2'-deoxy-2'-fluorouridine-3'-phosphate
  modified_base 8: mod_base = OTHER; note = 2'-O-methylguanosine-3'-phosphate
  modified_base 9: mod_base = OTHER; note = 2'-deoxy-2'-fluorouridine-3'-phosphate
  modified_base 10: mod_base = OTHER; note = 2'-deoxy-2'-fluoroguanosine-3'-phosphate
  modified_base 11: mod_base = OTHER; note = 2'-deoxy-2'-fluoroadenosine-3'-phosphate
  modified_base 12: mod_base = OTHER; note = 2'-O-methyladenosine-3'-phosphate
  modified_base 13: mod_base = OTHER; note = 2'-O-methyladenosine-3'-phosphate
  modified_base 14: mod_base = OTHER; note = 2'-O-methyladenosine-3'-phosphate
  modified_base 15: mod_base = OTHER; note = 2'-O-methyluridine-3'-phosphate
  modified_base 16: mod_base = OTHER; note = 2'-O-methyladenosine-3'-phosphate
  modified_base 17: mod_base = OTHER; note = 2'-O-methyluridine-3'-phosphate
  modified_base 18: mod_base = OTHER; note = 2'-O-methylguanosine-3'-phosphate
  modified_base 19: mod_base = OTHER; note = 2'-O-methylcytidine-3'-phosphorothioate
  modified_base 20: mod_base = OTHER; note = 2'-O-methyladenosine-3'-phosphorothioate
  modified_base 21: mod_base = OTHER; note = 2'-O-methyladenosine
ctagtctgtgaaaatatgcaa

SEQ ID NO: 11880 - RNA, 21 nt, synthetic construct
  source 1..21: mol_type = other RNA
  modified_base 1: mod_base = OTHER; note = 2'-O-methyluridine-3'-phosphorothioate
  modified_base 2: mod_base = OTHER; note = 2'-O-methyladenosine-3'-phosphorothioate
  modified_base 3: mod_base = OTHER; note = 2'-O-methylguanosine-3'-phosphate
  modified_base 4: mod_base = OTHER; note = 2'-O-methyluridine-3'-phosphate
  modified_base 5: mod_base = OTHER; note = 2'-O-methylcytidine-3'-phosphate
  modified_base 6: mod_base = OTHER; note = 2'-O-docosanyl-uridine-3'-phosphate
  modified_base 7: mod_base = OTHER; note = 2'-deoxy-2'-fluoroguanosine-3'-phosphate
  modified_base 8: mod_base = OTHER; note = 2'-O-methyluridine-3'-phosphate
  modified_base 9: mod_base = OTHER; note = 2'-deoxy-2'-fluoroguanosine-3'-phosphate
  modified_base 10: mod_base = OTHER; note = 2'-deoxy-2'-fluoroadenosine-3'-phosphate
  modified_base 11: mod_base = OTHER; note = 2'-deoxy-2'-fluoroadenosine-3'-phosphate
  modified_base 12: mod_base = OTHER; note = 2'-O-methyladenosine-3'-phosphate
  modified_base 13: mod_base = OTHER; note = 2'-O-methyladenosine-3'-phosphate
  modified_base 14: mod_base = OTHER; note = 2'-O-methyluridine-3'-phosphate
  modified_base 15: mod_base = OTHER; note = 2'-O-methyladenosine-3'-phosphate
  modified_base 16: mod_base = OTHER; note = 2'-O-methyluridine-3'-phosphate
  modified_base 17: mod_base = OTHER; note = 2'-O-methylguanosine-3'-phosphate
  modified_base 18: mod_base = OTHER; note = 2'-O-methylcytidine-3'-phosphate
  modified_base 19: mod_base = OTHER; note = 2'-O-methyladenosine-3'-phosphorothioate
  modified_base 20: mod_base = OTHER; note = 2'-O-methyluridine-3'-phosphorothioate
  modified_base 21: mod_base = OTHER; note = 2'-O-methyladenosine
tagtctgtgaaaatatgcata

SEQ ID NO: 11881 - RNA, 21 nt, synthetic construct
  source 1..21: mol_type = other RNA
  modified_base 1: mod_base = OTHER; note = 2'-O-methyladenosine-3'-phosphorothioate
  modified_base 2: mod_base = OTHER; note = 2'-O-methylguanosine-3'-phosphorothioate
  modified_base 3: mod_base = OTHER; note = 2'-O-methyluridine-3'-phosphate
  modified_base 4: mod_base = OTHER; note = 2'-O-methylcytidine-3'-phosphate
  modified_base 5: mod_base = OTHER; note = 2'-O-methyluridine-3'-phosphate
  modified_base 6: mod_base = OTHER; note = 2'-O-docosanyl-guanosine-3'-phosphate
  modified_base 7: mod_base = OTHER; note = 2'-deoxy-2'-fluorouridine-3'-phosphate
  modified_base 8: mod_base = OTHER; note = 2'-O-methylguanosine-3'-phosphate
  modified_base 9: mod_base = OTHER; note = 2'-deoxy-2'-fluoroadenosine-3'-phosphate
  modified_base 10: mod_base = OTHER; note = 2'-deoxy-2'-fluoroadenosine-3'-phosphate
  modified_base 11: mod_base = OTHER; note = 2'-deoxy-2'-fluoroadenosine-3'-phosphate
  modified_base 12: mod_base = OTHER; note = 2'-O-methyladenosine-3'-phosphate
  modified_base 13: mod_base = OTHER; note = 2'-O-methyluridine-3'-phosphate
  modified_base 14: mod_base = OTHER; note = 2'-O-methyladenosine-3'-phosphate
  modified_base 15: mod_base = OTHER; note = 2'-O-methyluridine-3'-phosphate
  modified_base 16: mod_base = OTHER; note = 2'-O-methylguanosine-3'-phosphate
  modified_base 17: mod_base = OTHER; note = 2'-O-methylcytidine-3'-phosphate
  modified_base 18: mod_base = OTHER; note = 2'-O-methyladenosine-3'-phosphate
  modified_base 19: mod_base = OTHER; note = 2'-O-methyluridine-3'-phosphorothioate
  modified_base 20: mod_base = OTHER; note = 2'-O-methyluridine-3'-phosphorothioate
  modified_base 21: mod_base = OTHER; note = 2'-O-methyladenosine
agtctgtgaaaatatgcatta

SEQ ID NO: 11882 - RNA, 21 nt, synthetic construct
  source 1..21: mol_type = other RNA
  modified_base 1: mod_base = OTHER; note = 2'-O-methylguanosine-3'-phosphorothioate
  modified_base 2: mod_base = OTHER; note = 2'-O-methyluridine-3'-phosphorothioate
  modified_base 3: mod_base = OTHER; note = 2'-O-methylcytidine-3'-phosphate
  modified_base 4: mod_base = OTHER; note = 2'-O-methyluridine-3'-phosphate
  modified_base 5: mod_base = OTHER; note = 2'-O-methylguanosine-3'-phosphate
  modified_base 6: mod_base = OTHER; note = 2'-O-docosanyl-uridine-3'-phosphate
  modified_base 7: mod_base = OTHER; note = 2'-deoxy-2'-fluoroguanosine-3'-phosphate
  modified_base 8: mod_base = OTHER; note = 2'-O-methyladenosine-3'-phosphate
  modified_base 9: mod_base = OTHER; note = 2'-deoxy-2'-fluoroadenosine-3'-phosphate
  modified_base 10: mod_base = OTHER; note = 2'-deoxy-2'-fluoroadenosine-3'-phosphate
  modified_base 11: mod_base = OTHER; note = 2'-deoxy-2'-fluoroadenosine-3'-phosphate
  modified_base 12: mod_base = OTHER; note = 2'-O-methyluridine-3'-phosphate
  modified_base 13: mod_base = OTHER; note = 2'-O-methyladenosine-3'-phosphate
  modified_base 14: mod_base = OTHER; note = 2'-O-methyluridine-3'-phosphate
  modified_base 15: mod_base = OTHER; note = 2'-O-methylguanosine-3'-phosphate
  modified_base 16: mod_base = OTHER; note = 2'-O-methylcytidine-3'-phosphate
  modified_base 17: mod_base = OTHER; note = 2'-O-methyladenosine-3'-phosphate
  modified_base 18: mod_base = OTHER; note = 2'-O-methyluridine-3'-phosphate
  modified_base 19: mod_base = OTHER; note = 2'-O-methyluridine-3'-phosphorothioate
  modified_base 20: mod_base = OTHER; note = 2'-O-methyluridine-3'-phosphorothioate
  modified_base 21: mod_base = OTHER; note = 2'-O-methyladenosine
gtctgtgaaaatatgcattta

SEQ ID NO: 11883 - RNA, 21 nt, synthetic construct
  source 1..21: mol_type = other RNA
  modified_base 1: mod_base = OTHER; note = 2'-O-methyluridine-3'-phosphorothioate
  modified_base 2: mod_base = OTHER; note = 2'-O-methylcytidine-3'-phosphorothioate
  modified_base 3: mod_base = OTHER; note = 2'-O-methyluridine-3'-phosphate
  modified_base 4: mod_base = OTHER; note = 2'-O-methylguanosine-3'-phosphate
  modified_base 5: mod_base = OTHER; note = 2'-O-methyluridine-3'-phosphate
  modified_base 6: mod_base = OTHER; note = 2'-O-docosanyl-guanosine-3'-phosphate
  modified_base 7: mod_base = OTHER; note = 2'-deoxy-2'-fluoroadenosine-3'-phosphate
  modified_base 8: mod_base = OTHER; note = 2'-O-methyladenosine-3'-phosphate
  modified_base 9: mod_base = OTHER; note = 2'-deoxy-2'-fluoroadenosine-3'-phosphate
  modified_base 10: mod_base = OTHER; note = 2'-deoxy-2'-fluoroadenosine-3'-phosphate
  modified_base 11: mod_base = OTHER; note = 2'-deoxy-2'-fluorouridine-3'-phosphate
  modified_base 12: mod_base = OTHER; note = 2'-O-methyladenosine-3'-phosphate
  modified_base 13: mod_base = OTHER; note = 2'-O-methyluridine-3'-phosphate
  modified_base 14: mod_base = OTHER; note = 2'-O-methylguanosine-3'-phosphate
  modified_base 15: mod_base = OTHER; note = 2'-O-methylcytidine-3'-phosphate
  modified_base 16: mod_base = OTHER; note = 2'-O-methyladenosine-3'-phosphate
  modified_base 17: mod_base = OTHER; note = 2'-O-methyluridine-3'-phosphate
  modified_base 18: mod_base = OTHER; note = 2'-O-methyluridine-3'-phosphate
  modified_base 19: mod_base = OTHER; note = 2'-O-methyluridine-3'-phosphorothioate
  modified_base 20: mod_base = OTHER; note = 2'-O-methyluridine-3'-phosphorothioate
  modified_base 21: mod_base = OTHER; note = 2'-O-methyladenosine
tctgtgaaaatatgcatttta

SEQ ID NO: 11884 - RNA, 21 nt, synthetic construct
  source 1..21: mol_type = other RNA
  modified_base 1: mod_base = OTHER; note = 2'-O-methylcytidine-3'-phosphorothioate
  modified_base 2: mod_base = OTHER; note = 2'-O-methyluridine-3'-phosphorothioate
  modified_base 3: mod_base = OTHER; note = 2'-O-methylguanosine-3'-phosphate
  modified_base 4: mod_base = OTHER; note = 2'-O-methyluridine-3'-phosphate
  modified_base 5: mod_base = OTHER; note = 2'-O-methylguanosine-3'-phosphate
  modified_base 6: mod_base = OTHER; note = 2'-O-docosanyl-adenosine-3'-phosphate
  modified_base 7: mod_base = OTHER; note = 2'-deoxy-2'-fluoroadenosine-3'-phosphate
  modified_base 8: mod_base = OTHER; note = 2'-O-methyladenosine-3'-phosphate
  modified_base 9: mod_base = OTHER; note = 2'-deoxy-2'-fluoroadenosine-3'-phosphate
  modified_base 10: mod_base = OTHER; note = 2'-deoxy-2'-fluorouridine-3'-phosphate
  modified_base 11: mod_base = OTHER; note = 2'-deoxy-2'-fluoroadenosine-3'-phosphate
  modified_base 12: mod_base = OTHER; note = 2'-O-methyluridine-3'-phosphate
  modified_base 13: mod_base = OTHER; note = 2'-O-methylguanosine-3'-phosphate
  modified_base 14: mod_base = OTHER; note = 2'-O-methylcytidine-3'-phosphate
  modified_base 15: mod_base = OTHER; note = 2'-O-methyladenosine-3'-phosphate
  modified_base 16: mod_base = OTHER; note = 2'-O-methyluridine-3'-phosphate
  modified_base 17: mod_base = OTHER; note = 2'-O-methyluridine-3'-phosphate
  modified_base 18: mod_base = OTHER; note = 2'-O-methyluridine-3'-phosphate
  modified_base 19: mod_base = OTHER; note = 2'-O-methyluridine-3'-phosphorothioate
  modified_base 20: mod_base = OTHER; note = 2'-O-methyladenosine-3'-phosphorothioate
  modified_base 21: mod_base = OTHER; note = 2'-O-methyladenosine
ctgtgaaaatatgcattttaa

SEQ ID NO: 11885 - RNA, 21 nt, synthetic construct
  source 1..21: mol_type = other RNA
  modified_base 1: mod_base = OTHER; note = 2'-O-methylguanosine-3'-phosphorothioate
  modified_base 2: mod_base = OTHER; note = 2'-O-methyladenosine-3'-phosphorothioate
  modified_base 3: mod_base = OTHER; note = 2'-O-methyluridine-3'-phosphate
  modified_base 4: mod_base = OTHER; note = 2'-O-methyladenosine-3'-phosphate
  modified_base 5: mod_base = OTHER; note = 2'-O-methylguanosine-3'-phosphate
  modified_base 6: mod_base = OTHER; note = 2'-O-docosanyl-cytidine-3'-phosphate
  modified_base 7: mod_base = OTHER; note = 2'-deoxy-2'-fluorocytidine-3'-phosphate
  modified_base 8: mod_base = OTHER; note = 2'-O-methyluridine-3'-phosphate
  modified_base 9: mod_base = OTHER; note = 2'-deoxy-2'-fluorouridine-3'-phosphate
  modified_base 10: mod_base = OTHER; note = 2'-deoxy-2'-fluorouridine-3'-phosphate
  modified_base 11: mod_base = OTHER; note = 2'-deoxy-2'-fluoroadenosine-3'-phosphate
  modified_base 12: mod_base = OTHER; note = 2'-O-methyluridine-3'-phosphate
  modified_base 13: mod_base = OTHER; note = 2'-O-methyladenosine-3'-phosphate
  modified_base 14: mod_base = OTHER; note = 2'-O-methylcytidine-3'-phosphate
  modified_base 15: mod_base = OTHER; note = 2'-O-methylcytidine-3'-phosphate
  modified_base 16: mod_base = OTHER; note = 2'-O-methyladenosine-3'-phosphate
  modified_base 17: mod_base = OTHER; note = 2'-O-methyladenosine-3'-phosphate
  modified_base 18: mod_base = OTHER; note = 2'-O-methyladenosine-3'-phosphate
  modified_base 19: mod_base = OTHER; note = 2'-O-methyladenosine-3'-phosphorothioate
  modified_base 20: mod_base = OTHER; note = 2'-O-methyluridine-3'-phosphorothioate
  modified_base 21: mod_base = OTHER; note = 2'-O-methyladenosine
gatagcctttataccaaaata

SEQ ID NO: 11886 - RNA, 21 nt, synthetic construct
  source 1..21: mol_type = other RNA
  modified_base 1: mod_base = OTHER; note = 2'-O-methylcytidine-3'-phosphorothioate
  modified_base 2: mod_base = OTHER; note = 2'-O-methyladenosine-3'-phosphorothioate
  modified_base 3: mod_base = OTHER; note = 2'-O-methyladenosine-3'-phosphate
  modified_base 4: mod_base = OTHER; note = 2'-O-methylcytidine-3'-phosphate
  modified_base 5: mod_base = OTHER; note = 2'-O-methyladenosine-3'-phosphate
  modified_base 6: mod_base = OTHER; note = 2'-O-docosanyl-guanosine-3'-phosphate
  modified_base 7: mod_base = OTHER; note = 2'-deoxy-2'-fluorocytidine-3'-phosphate
  modified_base 8: mod_base = OTHER; note = 2'-O-methyladenosine-3'-phosphate
  modified_base 9: mod_base = OTHER; note = 2'-deoxy-2'-fluoroadenosine-3'-phosphate
  modified_base 10: mod_base = OTHER; note = 2'-deoxy-2'-fluoroguanosine-3'-phosphate
  modified_base 11: mod_base = OTHER; note = 2'-deoxy-2'-fluorouridine-3'-phosphate
  modified_base 12: mod_base = OTHER; note = 2'-O-methylcytidine-3'-phosphate
  modified_base 13: mod_base = OTHER; note = 2'-O-methyladenosine-3'-phosphate
  modified_base 14: mod_base = OTHER; note = 2'-O-methyluridine-3'-phosphate
  modified_base 15: mod_base = OTHER; note = 2'-O-methyladenosine-3'-phosphate
  modified_base 16: mod_base = OTHER; note = 2'-O-methyladenosine-3'-phosphate
  modified_base 17: mod_base = OTHER; note = 2'-O-methyladenosine-3'-phosphate
  modified_base 18: mod_base = OTHER; note = 2'-O-methyladenosine-3'-phosphate
  modified_base 19: mod_base = OTHER; note = 2'-O-methylguanosine-3'-phosphorothioate
  modified_base 20: mod_base = OTHER; note = 2'-O-methyluridine-3'-phosphorothioate
  modified_base 21: mod_base = OTHER; note = 2'-O-methyladenosine
caacagcaagtcataaaagta

SEQ ID NO: 11887 - RNA, 21 nt, synthetic construct
  source 1..21: mol_type = other RNA
  modified_base 1: mod_base = OTHER; note = 2'-O-methyladenosine-3'-phosphorothioate
  modified_base 2: mod_base = OTHER; note = 2'-O-methyladenosine-3'-phosphorothioate
  modified_base 3: mod_base = OTHER; note = 2'-O-methylcytidine-3'-phosphate
  modified_base 4: mod_base = OTHER; note = 2'-O-methyladenosine-3'-phosphate
  modified_base 5: mod_base = OTHER; note = 2'-O-methylguanosine-3'-phosphate
  modified_base 6: mod_base = OTHER; note = 2'-O-docosanyl-cytidine-3'-phosphate
  modified_base 7: mod_base = OTHER; note = 2'-deoxy-2'-fluoroadenosine-3'-phosphate
  modified_base 8: mod_base = OTHER; note = 2'-O-methyladenosine-3'-phosphate
  modified_base 9: mod_base = OTHER; note = 2'-deoxy-2'-fluoroguanosine-3'-phosphate
  modified_base 10: mod_base = OTHER; note = 2'-deoxy-2'-fluorouridine-3'-phosphate
  modified_base 11: mod_base = OTHER; note = 2'-deoxy-2'-fluorocytidine-3'-phosphate
  modified_base 12: mod_base = OTHER; note = 2'-O-methyladenosine-3'-phosphate
  modified_base 13: mod_base = OTHER; note = 2'-O-methyluridine-3'-phosphate
  modified_base 14: mod_base = OTHER; note = 2'-O-methyladenosine-3'-phosphate
  modified_base 15: mod_base = OTHER; note = 2'-O-methyladenosine-3'-phosphate
  modified_base 16: mod_base = OTHER; note = 2'-O-methyladenosine-3'-phosphate
  modified_base 17: mod_base = OTHER; note = 2'-O-methyladenosine-3'-phosphate
  modified_base 18: mod_base = OTHER; note = 2'-O-methylguanosine-3'-phosphate
  modified_base 19: mod_base = OTHER; note = 2'-O-methyluridine-3'-phosphorothioate
  modified_base 20: mod_base = OTHER; note = 2'-O-methyladenosine-3'-phosphorothioate
  modified_base 21: mod_base = OTHER; note = 2'-O-methyladenosine
aacagcaagtcataaaagtaa

SEQ ID NO: 11888 - RNA, 21 nt, synthetic construct
  source 1..21: mol_type = other RNA
  modified_base 1: mod_base = OTHER; note = 2'-O-methyladenosine-3'-phosphorothioate
  modified_base 2: mod_base = OTHER; note = 2'-O-methylcytidine-3'-phosphorothioate
  modified_base 3: mod_base = OTHER; note = 2'-O-methyladenosine-3'-phosphate
  modified_base 4: mod_base = OTHER; note = 2'-O-methylguanosine-3'-phosphate
  modified_base 5: mod_base = OTHER; note = 2'-O-methylcytidine-3'-phosphate
  modified_base 6: mod_base = OTHER; note = 2'-O-docosanyl-adenosine-3'-phosphate
  modified_base 7: mod_base = OTHER; note = 2'-deoxy-2'-fluoroadenosine-3'-phosphate
  modified_base 8: mod_base = OTHER; note = 2'-O-methylguanosine-3'-phosphate
  modified_base 9: mod_base = OTHER; note = 2'-deoxy-2'-fluorouridine-3'-phosphate
  modified_base 10: mod_base = OTHER; note = 2'-deoxy-2'-fluorocytidine-3'-phosphate
  modified_base 11: mod_base = OTHER; note = 2'-deoxy-2'-fluoroadenosine-3'-phosphate
  modified_base 12: mod_base = OTHER; note = 2'-O-methyluridine-3'-phosphate
  modified_base 13: mod_base = OTHER; note = 2'-O-methyladenosine-3'-phosphate
  modified_base 14: mod_base = OTHER; note = 2'-O-methyladenosine-3'-phosphate
  modified_base 15: mod_base = OTHER; note = 2'-O-methyladenosine-3'-phosphate
  modified_base 16: mod_base = OTHER; note = 2'-O-methyladenosine-3'-phosphate
  modified_base 17: mod_base = OTHER; note = 2'-O-methylguanosine-3'-phosphate
  modified_base 18: mod_base = OTHER; note = 2'-O-methyluridine-3'-phosphate
  modified_base 19: mod_base = OTHER; note = 2'-O-methyladenosine-3'-phosphorothioate
  modified_base 20: mod_base = OTHER; note = 2'-O-methyluridine-3'-phosphorothioate
  modified_base 21: mod_base = OTHER; note = 2'-O-methyladenosine
acagcaagtcataaaagtata

SEQ ID NO: 11889 - RNA, 21 nt, synthetic construct
  source 1..21: mol_type = other RNA
  modified_base 1: mod_base = OTHER; note = 2'-O-methylcytidine-3'-phosphorothioate
  modified_base 2: mod_base = OTHER; note = 2'-O-methyladenosine-3'-phosphorothioate
  modified_base 3: mod_base = OTHER; note = 2'-O-methylguanosine-3'-phosphate
  modified_base 4: mod_base = OTHER; note = 2'-O-methylcytidine-3'-phosphate
  modified_base 5: mod_base = OTHER; note = 2'-O-methyladenosine-3'-phosphate
  modified_base 6: mod_base = OTHER; note = 2'-O-docosanyl-adenosine-3'-phosphate
  modified_base 7: mod_base = OTHER; note = 2'-deoxy-2'-fluoroguanosine-3'-phosphate
  modified_base 8: mod_base = OTHER; note = 2'-O-methyluridine-3'-phosphate
  modified_base 9: mod_base = OTHER; note = 2'-deoxy-2'-fluorocytidine-3'-phosphate
  modified_base 10: mod_base = OTHER; note = 2'-deoxy-2'-fluoroadenosine-3'-phosphate
  modified_base 11: mod_base = OTHER; note = 2'-deoxy-2'-fluorouridine-3'-phosphate
  modified_base 12: mod_base = OTHER; note = 2'-O-methyladenosine-3'-phosphate
  modified_base 13: mod_base = OTHER; note = 2'-O-methyladenosine-3'-phosphate
  modified_base 14: mod_base = OTHER; note = 2'-O-methyladenosine-3'-phosphate
  modified_base 15: mod_base = OTHER; note = 2'-O-methyladenosine-3'-phosphate
  modified_base 16: mod_base = OTHER; note = 2'-O-methylguanosine-3'-phosphate
  modified_base 17: mod_base = OTHER; note = 2'-O-methyluridine-3'-phosphate
  modified_base 18: mod_base = OTHER; note = 2'-O-methyladenosine-3'-phosphate
  modified_base 19: mod_base = OTHER; note = 2'-O-methyluridine-3'-phosphorothioate
  modified_base 20: mod_base = OTHER; note = 2'-O-methyluridine-3'-phosphorothioate
  modified_base 21: mod_base = OTHER; note = 2'-O-methyladenosine
cagcaagtcataaaagtatta

SEQ ID NO: 11890 - RNA, 21 nt, synthetic construct
  source 1..21: mol_type = other RNA
  modified_base 1: mod_base = OTHER; note = 2'-O-methyladenosine-3'-phosphorothioate
  modified_base 2: mod_base = OTHER; note = 2'-O-methylguanosine-3'-phosphorothioate
  modified_base 3: mod_base = OTHER; note = 2'-O-methylcytidine-3'-phosphate
  modified_base 4: mod_base = OTHER; note = 2'-O-methyladenosine-3'-phosphate
  modified_base 5: mod_base = OTHER; note = 2'-O-methyladenosine-3'-phosphate
  modified_base 6: mod_base = OTHER; note = 2'-O-docosanyl-guanosine-3'-phosphate
  modified_base 7: mod_base = OTHER; note = 2'-deoxy-2'-fluorouridine-3'-phosphate
  modified_base 8: mod_base = OTHER; note = 2'-O-methylcytidine-3'-phosphate
  modified_base 9: mod_base = OTHER; note = 2'-deoxy-2'-fluoroadenosine-3'-phosphate
  modified_base 10: mod_base = OTHER; note = 2'-deoxy-2'-fluorouridine-3'-phosphate
  modified_base 11: mod_base = OTHER; note = 2'-deoxy-2'-fluoroadenosine-3'-phosphate
  modified_base 12: mod_base = OTHER; note = 2'-O-methyladenosine-3'-phosphate
  modified_base 13: mod_base = OTHER; note = 2'-O-methyladenosine-3'-phosphate
  modified_base 14: mod_base = OTHER; note = 2'-O-methyladenosine-3'-phosphate
  modified_base 15: mod_base = OTHER; note = 2'-O-methylguanosine-3'-phosphate
  modified_base 16: mod_base = OTHER; note = 2'-O-methyluridine-3'-phosphate
  modified_base 17: mod_base = OTHER; note = 2'-O-methyladenosine-3'-phosphate
  modified_base 18: mod_base = OTHER; note = 2'-O-methyluridine-3'-phosphate
  modified_base 19: mod_base = OTHER; note = 2'-O-methyluridine-3'-phosphorothioate
  modified_base 20: mod_base = OTHER; note = 2'-O-methyluridine-3'-phosphorothioate
  modified_base 21: mod_base = OTHER; note = 2'-O-methyladenosine
agcaagtcataaaagtattta

SEQ ID NO: 11891 - RNA, 21 nt, synthetic construct
  source 1..21: mol_type = other RNA
  modified_base 1: mod_base = OTHER; note = 2'-O-methylguanosine-3'-phosphorothioate
  modified_base 2: mod_base = OTHER; note = 2'-O-methylcytidine-3'-phosphorothioate
  modified_base 3: mod_base = OTHER; note = 2'-O-methyladenosine-3'-phosphate
  modified_base 4: mod_base = OTHER; note = 2'-O-methyladenosine-3'-phosphate
  modified_base 5: mod_base = OTHER; note = 2'-O-methylguanosine-3'-phosphate
  modified_base 6: mod_base = OTHER; note = 2'-O-docosanyl-uridine-3'-phosphate
  modified_base 7: mod_base = OTHER; note = 2'-deoxy-2'-fluorocytidine-3'-phosphate
  modified_base 8: mod_base = OTHER; note = 2'-O-methyladenosine-3'-phosphate
  modified_base 9: mod_base = OTHER; note = 2'-deoxy-2'-fluorouridine-3'-phosphate
  modified_base 10: mod_base = OTHER; note = 2'-deoxy-2'-fluoroadenosine-3'-phosphate
  modified_base 11: mod_base = OTHER; note = 2'-deoxy-2'-fluoroadenosine-3'-phosphate
  modified_base 12: mod_base = OTHER; note = 2'-O-methyladenosine-3'-phosphate
  modified_base 13: mod_base = OTHER; note = 2'-O-methyladenosine-3'-phosphate
  modified_base 14: mod_base = OTHER; note = 2'-O-methylguanosine-3'-phosphate
  modified_base 15: mod_base = OTHER; note = 2'-O-methyluridine-3'-phosphate
  modified_base 16: mod_base = OTHER; note = 2'-O-methyladenosine-3'-phosphate
  modified_base 17: mod_base = OTHER; note = 2'-O-methyluridine-3'-phosphate
  modified_base 18: mod_base = OTHER; note = 2'-O-methyluridine-3'-phosphate
  modified_base 19: mod_base = OTHER; note = 2'-O-methyluridine-3'-phosphorothioate
  modified_base 20: mod_base = OTHER; note = 2'-O-methyladenosine-3'-phosphorothioate
  modified_base 21: mod_base = OTHER; note = 2'-O-methyladenosine
gcaagtcataaaagtatttaa

SEQ ID NO: 11892 - RNA, 21 nt, synthetic construct
  source 1..21: mol_type = other RNA
  modified_base 1: mod_base = OTHER; note = 2'-O-methylguanosine-3'-phosphorothioate
  modified_base 2: mod_base = OTHER; note = 2'-O-methyluridine-3'-phosphorothioate
  modified_base 3: mod_base = OTHER; note = 2'-O-methylcytidine-3'-phosphate
  modified_base 4: mod_base = OTHER; note = 2'-O-methyluridine-3'-phosphate
  modified_base 5: mod_base = OTHER; note = 2'-O-methyluridine-3'-phosphate
  modified_base 6: mod_base = OTHER; note = 2'-O-docosanyl-cytidine-3'-phosphate
  modified_base 7: mod_base = OTHER; note = 2'-deoxy-2'-fluoroadenosine-3'-phosphate
  modified_base 8: mod_base = OTHER; note = 2'-O-methylguanosine-3'-phosphate
  modified_base 9: mod_base = OTHER; note = 2'-deoxy-2'-fluoroadenosine-3'-phosphate
  modified_base 10: mod_base = OTHER; note = 2'-deoxy-2'-fluorouridine-3'-phosphate
  modified_base 11: mod_base = OTHER; note = 2'-deoxy-2'-fluoroguanosine-3'-phosphate
  modified_base 12: mod_base = OTHER; note = 2'-O-methyluridine-3'-phosphate
  modified_base 13: mod_base = OTHER; note = 2'-O-methyladenosine-3'-phosphate
  modified_base 14: mod_base = OTHER; note = 2'-O-methyladenosine-3'-phosphate
  modified_base 15: mod_base = OTHER; note = 2'-O-methyladenosine-3'-phosphate
  modified_base 16: mod_base = OTHER; note = 2'-O-methyluridine-3'-phosphate
  modified_base 17: mod_base = OTHER; note = 2'-O-methyladenosine-3'-phosphate
  modified_base 18: mod_base = OTHER; note = 2'-O-methyladenosine-3'-phosphate
  modified_base 19: mod_base = OTHER; note = 2'-O-methyluridine-3'-phosphorothioate
  modified_base 20: mod_base = OTHER; note = 2'-O-methyluridine-3'-phosphorothioate
  modified_base 21: mod_base = OTHER; note = 2'-O-methyladenosine
gtcttcagatgtaaataatta

SEQ ID NO: 11893 - RNA, 21 nt, synthetic construct
  source 1..21: mol_type = other RNA
  modified_base 1: mod_base = OTHER; note = 2'-O-methylcytidine-3'-phosphorothioate
  modified_base 2: mod_base = OTHER; note = 2'-O-methyladenosine-3'-phosphorothioate
  modified_base 3: mod_base = OTHER; note = 2'-O-methyluridine-3'-phosphate
  modified_base 4: mod_base = OTHER; note = 2'-O-methyluridine-3'-phosphate
  modified_base 5: mod_base = OTHER; note = 2'-O-methyluridine-3'-phosphate
  modified_base 6: mod_base = OTHER; note = 2'-O-docosanyl-uridine-3'-phosphate
  modified_base 7: mod_base = OTHER; note = 2'-deoxy-2'-fluorocytidine-3'-phosphate
  modified_base 8: mod_base = OTHER; note = 2'-O-methyluridine-3'-phosphate
  modified_base 9: mod_base = OTHER; note = 2'-deoxy-2'-fluoroguanosine-3'-phosphate
  modified_base 10: mod_base = OTHER; note = 2'-deoxy-2'-fluoroadenosine-3'-phosphate
  modified_base 11: mod_base = OTHER; note = 2'-deoxy-2'-fluoroadenosine-3'-phosphate
  modified_base 12: mod_base = OTHER; note = 2'-O-methyladenosine-3'-phosphate
  modified_base 13: mod_base = OTHER; note = 2'-O-methyladenosine-3'-phosphate
  modified_base 14: mod_base = OTHER; note = 2'-O-methyluridine-3'-phosphate
  modified_base 15: mod_base = OTHER; note = 2'-O-methylguanosine-3'-phosphate
  modified_base 16: mod_base = OTHER; note = 2'-O-methyluridine-3'-phosphate
  modified_base 17: mod_base = OTHER; note = 2'-O-methyladenosine-3'-phosphate
  modified_base 18: mod_base = OTHER; note = 2'-O-methyluridine-3'-phosphate
  modified_base 19: mod_base = OTHER; note = 2'-O-methyluridine-3'-phosphorothioate
  modified_base 20: mod_base = OTHER; note = 2'-O-methylguanosine-3'-phosphorothioate
  modified_base 21: mod_base = OTHER; note = 2'-O-methyladenosine
cattttctgaaaatgtattga

SEQ ID NO: 11894 - RNA, 21 nt, synthetic construct
  source 1..21: mol_type = other RNA
  modified_base 1: mod_base = OTHER; note = 2'-O-methylguanosine-3'-phosphorothioate
  modified_base 2: mod_base = OTHER; note = 2'-O-methyladenosine-3'-phosphorothioate
  modified_base 3: mod_base = OTHER; note = 2'-O-methyladenosine-3'-phosphate
  modified_base 4: mod_base = OTHER; note = 2'-O-methylguanosine-3'-phosphate
  modified_base 5: mod_base = OTHER; note = 2'-O-methylcytidine-3'-phosphate
  modified_base 6: mod_base = OTHER; note = 2'-O-docosanyl-adenosine-3'-phosphate
  modified_base 7: mod_base = OTHER; note = 2'-deoxy-2'-fluorouridine-3'-phosphate
  modified_base 8: mod_base = OTHER; note = 2'-O-methyladenosine-3'-phosphate
  modified_base 9: mod_base = OTHER; note = 2'-deoxy-2'-fluorouridine-3'-phosphate
  modified_base 10: mod_base = OTHER; note = 2'-deoxy-2'-fluoroadenosine-3'-phosphate
  modified_base 11: mod_base = OTHER; note = 2'-deoxy-2'-fluoroguanosine-3'-phosphate
  modified_base 12: mod_base = OTHER; note = 2'-O-methyladenosine-3'-phosphate
  modified_base 13: mod_base = OTHER; note = 2'-O-methyladenosine-3'-phosphate
  modified_base 14: mod_base = OTHER; note = 2'-O-methylcytidine-3'-phosphate
  modified_base 15: mod_base = OTHER; note = 2'-O-methyluridine-3'-phosphate
  modified_base 16: mod_base = OTHER; note = 2'-O-methylcytidine-3'-phosphate
  modified_base 17: mod_base = OTHER; note = 2'-O-methyluridine-3'-phosphate
  modified_base 18: mod_base = OTHER; note = 2'-O-methyladenosine-3'-phosphate
  modified_base 19: mod_base = OTHER; note = 2'-O-methyluridine-3'-phosphorothioate
  modified_base 20: mod_base = OTHER; note = 2'-O-methyluridine-3'-phosphorothioate
  modified_base 21: mod_base = OTHER; note = 2'-O-methyladenosine
gaagcatatagaactctatta

SEQ ID NO: 11895 - RNA, 21 nt, synthetic construct
  source 1..21: mol_type = other RNA
  modified_base 1: mod_base = OTHER; note = 2'-O-methylcytidine-3'-phosphorothioate
  modified_base 2: mod_base = OTHER; note = 2'-O-methyluridine-3'-phosphorothioate
  modified_base 3: mod_base = OTHER; note = 2'-O-methylguanosine-3'-phosphate
  modified_base 4: mod_base = OTHER; note = 2'-O-methyluridine-3'-phosphate
  modified_base 5: mod_base = OTHER; note = 2'-O-methylguanosine-3'-phosphate
  modified_base 6: mod_base = OTHER; note = 2'-O-docosanyl-adenosine-3'-phosphate
  modified_base 7: mod_base = OTHER; note = 2'-deoxy-2'-fluoroadenosine-3'-phosphate
  modified_base 8: mod_base = OTHER; note = 2'-O-methylguanosine-3'-phosphate
  modified_base 9: mod_base = OTHER; note = 2'-deoxy-2'-fluorocytidine-3'-phosphate
  modified_base 10: mod_base = OTHER; note = 2'-deoxy-2'-fluoroadenosine-3'-phosphate
  modified_base 11: mod_base = OTHER; note = 2'-deoxy-2'-fluorouridine-3'-phosphate
  modified_base 12: mod_base = OTHER; note = 2'-O-methyladenosine-3'-phosphate
  modified_base 13: mod_base = OTHER; note = 2'-O-methyluridine-3'-phosphate
  modified_base 14: mod_base = OTHER; note = 2'-O-methyladenosine-3'-phosphate
  modified_base 15: mod_base = OTHER; note = 2'-O-methylguanosine-3'-phosphate
  modified_base 16: mod_base = OTHER; note = 2'-O-methyladenosine-3'-phosphate
  modified_base 17: mod_base = OTHER; note = 2'-O-methyladenosine-3'-phosphate
  modified_base 18: mod_base = OTHER; note = 2'-O-methylcytidine-3'-phosphate
  modified_base 19: mod_base = OTHER; note = 2'-O-methyluridine-3'-phosphorothioate
  modified_base 20: mod_base = OTHER; note = 2'-O-methylcytidine-3'-phosphorothioate
  modified_base 21: mod_base = OTHER; note = 2'-O-methyladenosine
ctgtgaagcatatagaactca

SEQ ID NO: 11896 - RNA, 21 nt, synthetic construct
  source 1..21: mol_type = other RNA
  modified_base 1: mod_base = OTHER; note = 2'-O-methyluridine-3'-phosphorothioate
  modified_base 2: mod_base = OTHER; note = 2'-O-methylguanosine-3'-phosphorothioate
  modified_base 3: mod_base = OTHER; note = 2'-O-methyluridine-3'-phosphate
  modified_base 4: mod_base = OTHER; note = 2'-O-methylguanosine-3'-phosphate
  modified_base 5: mod_base = OTHER; note = 2'-O-methyladenosine-3'-phosphate
  modified_base 6: mod_base = OTHER; note = 2'-O-docosanyl-adenosine-3'-phosphate
  modified_base 7: mod_base = OTHER; note = 2'-deoxy-2'-fluoroguanosine-3'-phosphate
  modified_base 8: mod_base = OTHER; note = 2'-O-methylcytidine-3'-phosphate
  modified_base 9: mod_base = OTHER; note = 2'-deoxy-2'-fluoroadenosine-3'-phosphate
  modified_base 10: mod_base = OTHER; note = 2'-deoxy-2'-fluorouridine-3'-phosphate
  modified_base 11: mod_base = OTHER; note = 2'-deoxy-2'-fluoroadenosine-3'-phosphate
  modified_base 12: mod_base = OTHER; note = 2'-O-methyluridine-3'-phosphate
  modified_base 13: mod_base = OTHER; note = 2'-O-methyladenosine-3'-phosphate
  modified_base 14: mod_base = OTHER; note = 2'-O-methylguanosine-3'-phosphate
  modified_base 15: mod_base = OTHER; note = 2'-O-methyladenosine-3'-phosphate
  modified_base 16: mod_base = OTHER; note = 2'-O-methyladenosine-3'-phosphate
  modified_base 17: mod_base = OTHER; note = 2'-O-methylcytidine-3'-phosphate
  modified_base 18: mod_base = OTHER; note = 2'-O-methyluridine-3'-phosphate
  modified_base 19: mod_base = OTHER; note = 2'-O-methylcytidine-3'-phosphorothioate
  modified_base 20: mod_base = OTHER; note = 2'-O-methyluridine-3'-phosphorothioate
  modified_base 21: mod_base = OTHER; note = 2'-O-methyladenosine
tgtgaagcatatagaactcta

SEQ ID NO: 11897 - RNA, 21 nt, synthetic construct
  source 1..21: mol_type = other RNA
  modified_base 1: mod_base = OTHER; note = 2'-O-methylguanosine-3'-phosphorothioate
  modified_base 2: mod_base = OTHER; note = 2'-O-methyluridine-3'-phosphorothioate
  modified_base 3: mod_base = OTHER; note = 2'-O-methylguanosine-3'-phosphate
  modified_base 4: mod_base = OTHER; note = 2'-O-methyladenosine-3'-phosphate
  modified_base 5: mod_base = OTHER; note = 2'-O-methyladenosine-3'-phosphate
  modified_base 6: mod_base = OTHER; note = 2'-O-docosanyl-guanosine-3'-phosphate
  modified_base 7: mod_base = OTHER; note = 2'-deoxy-2'-fluorocytidine-3'-phosphate
  modified_base 8: mod_base = OTHER; note = 2'-O-methyladenosine-3'-phosphate
  modified_base 9: mod_base = OTHER; note = 2'-deoxy-2'-fluorouridine-3'-phosphate
  modified_base 10: mod_base = OTHER; note = 2'-deoxy-2'-fluoroadenosine-3'-phosphate
  modified_base 11: mod_base = OTHER; note = 2'-deoxy-2'-fluorouridine-3'-phosphate
  modified_base 12: mod_base = OTHER; note = 2'-O-methyladenosine-3'-phosphate
  modified_base 13: mod_base = OTHER; note = 2'-O-methylguanosine-3'-phosphate
  modified_base 14: mod_base = OTHER; note = 2'-O-methyladenosine-3'-phosphate
  modified_base 15: mod_base = OTHER; note = 2'-O-methyladenosine-3'-phosphate
  modified_base 16: mod_base = OTHER; note = 2'-O-methylcytidine-3'-phosphate
  modified_base 17: mod_base = OTHER; note = 2'-O-methyluridine-3'-phosphate
  modified_base 18: mod_base = OTHER; note = 2'-O-methylcytidine-3'-phosphate
  modified_base 19: mod_base = OTHER; note = 2'-O-methyluridine-3'-phosphorothioate
  modified_base 20: mod_base = OTHER; note = 2'-O-methyladenosine-3'-phosphorothioate
  modified_base 21: mod_base = OTHER; note = 2'-O-methyladenosine
gtgaagcatatagaactctaa

SEQ ID NO: 11898 - RNA, 21 nt, synthetic construct
  source 1..21: mol_type = other RNA
  modified_base 1: mod_base = OTHER; note = 2'-O-methyluridine-3'-phosphorothioate
  modified_base 2: mod_base = OTHER; note = 2'-O-methylguanosine-3'-phosphorothioate
  modified_base 3: mod_base = OTHER; note = 2'-O-methyladenosine-3'-phosphate
  modified_base 4: mod_base = OTHER; note = 2'-O-methyladenosine-3'-phosphate
  modified_base 5: mod_base = OTHER; note = 2'-O-methylguanosine-3'-phosphate
  modified_base 6: mod_base = OTHER; note = 2'-O-docosanyl-cytidine-3'-phosphate
  modified_base 7: mod_base = OTHER; note = 2'-deoxy-2'-fluoroadenosine-3'-phosphate
  modified_base 8: mod_base = OTHER; note = 2'-O-methyluridine-3'-phosphate
  modified_base 9: mod_base = OTHER; note = 2'-deoxy-2'-fluoroadenosine-3'-phosphate
  modified_base 10: mod_base = OTHER; note = 2'-deoxy-2'-fluorouridine-3'-phosphate
  modified_base 11: mod_base = OTHER; note = 2'-deoxy-2'-fluoroadenosine-3'-phosphate
  modified_base 12: mod_base = OTHER; note = 2'-O-methylguanosine-3'-phosphate
  modified_base 13: mod_base = OTHER; note = 2'-O-methyladenosine-3'-phosphate
  modified_base 14: mod_base = OTHER; note = 2'-O-methyladenosine-3'-phosphate
  modified_base 15: mod_base = OTHER; note = 2'-O-methylcytidine-3'-phosphate
  modified_base 16: mod_base = OTHER; note = 2'-O-methyluridine-3'-phosphate
  modified_base 17: mod_base = OTHER; note = 2'-O-methylcytidine-3'-phosphate
  modified_base 18: mod_base = OTHER; note = 2'-O-methyluridine-3'-phosphate
  modified_base 19: mod_base = OTHER; note = 2'-O-methyladenosine-3'-phosphorothioate
  modified_base 20: mod_base = OTHER; note = 2'-O-methyluridine-3'-phosphorothioate
  modified_base 21: mod_base = OTHER; note = 2'-O-methyladenosine
tgaagcatatagaactctata

SEQ ID NO: 11899 - RNA, 21 nt, synthetic construct
  source 1..21: mol_type = other RNA
  modified_base 1: mod_base = OTHER; note = 2'-O-methyladenosine-3'-phosphorothioate
  modified_base 2: mod_base = OTHER; note = 2'-O-methyladenosine-3'-phosphorothioate
  modified_base 3: mod_base = OTHER; note = 2'-O-methylguanosine-3'-phosphate
  modified_base 4: mod_base = OTHER; note = 2'-O-methylcytidine-3'-phosphate
  modified_base 5: mod_base = OTHER; note = 2'-O-methyladenosine-3'-phosphate
  modified_base 6: mod_base = OTHER; note = 2'-O-docosanyl-uridine-3'-phosphate
  modified_base 7: mod_base = OTHER; note = 2'-deoxy-2'-fluoroadenosine-3'-phosphate
  modified_base 8: mod_base = OTHER; note = 2'-O-methyluridine-3'-phosphate
  modified_base 9: mod_base = OTHER; note = 2'-deoxy-2'-fluoroadenosine-3'-phosphate
  modified_base 10: mod_base = OTHER; note = 2'-deoxy-2'-fluoroguanosine-3'-phosphate
  modified_base 11: mod_base = OTHER; note = 2'-deoxy-2'-fluoroadenosine-3'-phosphate
  modified_base 12: mod_base = OTHER; note = 2'-O-methyladenosine-3'-phosphate
  modified_base 13: mod_base = OTHER; note = 2'-O-methylcytidine-3'-phosphate
  modified_base 14: mod_base = OTHER; note = 2'-O-methyluridine-3'-phosphate
  modified_base 15: mod_base = OTHER; note = 2'-O-methylcytidine-3'-phosphate
  modified_base 16: mod_base = OTHER; note = 2'-O-methyluridine-3'-phosphate
  modified_base 17: mod_base = OTHER; note = 2'-O-methyladenosine-3'-phosphate
  modified_base 18: mod_base = OTHER; note = 2'-O-methyluridine-3'-phosphate
  modified_base 19: mod_base = OTHER; note = 2'-O-methyluridine-3'-phosphorothioate
  modified_base 20: mod_base = OTHER; note = 2'-O-methyluridine-3'-phosphorothioate
  modified_base 21: mod_base = OTHER; note = 2'-O-methyladenosine
aagcatatagaactctattta

SEQ ID NO: 11900 - RNA, 21 nt, synthetic construct
  source 1..21: mol_type = other RNA
  modified_base 1: mod_base = OTHER; note = 2'-O-methyladenosine-3'-phosphorothioate
  modified_base 2: mod_base = OTHER; note = 2'-O-methylguanosine-3'-phosphorothioate
  modified_base 3: mod_base = OTHER; note = 2'-O-methylcytidine-3'-phosphate
  modified_base 4: mod_base = OTHER; note = 2'-O-methyladenosine-3'-phosphate
  modified_base 5: mod_base = OTHER; note = 2'-O-methyluridine-3'-phosphate
  modified_base 6: mod_base = OTHER; note = 2'-O-docosanyl-adenosine-3'-phosphate
  modified_base 7: mod_base = OTHER; note = 2'-deoxy-2'-fluorouridine-3'-phosphate
  modified_base 8: mod_base = OTHER; note = 2'-O-methyladenosine-3'-phosphate
  modified_base 9: mod_base = OTHER; note = 2'-deoxy-2'-fluoroguanosine-3'-phosphate
  modified_base 10: mod_base = OTHER; note = 2'-deoxy-2'-fluoroadenosine-3'-phosphate
  modified_base 11: mod_base = OTHER; note = 2'-deoxy-2'-fluoroadenosine-3'-phosphate
  modified_base 12: mod_base = OTHER; note = 2'-O-methylcytidine-3'-phosphate
  modified_base 13: mod_base = OTHER; note = 2'-O-methyluridine-3'-phosphate
  modified_base 14: mod_base = OTHER; note = 2'-O-methylcytidine-3'-phosphate
  modified_base 15: mod_base = OTHER; note = 2'-O-methyluridine-3'-phosphate
  modified_base 16: mod_base = OTHER; note = 2'-O-methyladenosine-3'-phosphate
  modified_base 17: mod_base = OTHER; note = 2'-O-methyluridine-3'-phosphate
  modified_base 18: mod_base = OTHER; note = 2'-O-methyluridine-3'-phosphate
  modified_base 19: mod_base = OTHER; note = 2'-O-methyluridine-3'-phosphorothioate
  modified_base 20: mod_base = OTHER; note = 2'-O-methyluridine-3'-phosphorothioate
  modified_base 21: mod_base = OTHER; note = 2'-O-methyladenosine
agcatatagaactctatttta

SEQ ID NO: 11901 - RNA, 21 nt, synthetic construct
  source 1..21: mol_type = other RNA
  modified_base 1: mod_base = OTHER; note = 2'-O-methyluridine-3'-phosphorothioate
  modified_base 2: mod_base = OTHER; note = 2'-O-methyladenosine-3'-phosphorothioate
  modified_base 3: mod_base = OTHER; note = 2'-O-methyladenosine-3'-phosphate
  modified_base 4: mod_base = OTHER; note = 2'-O-methyladenosine-3'-phosphate
  modified_base 5: mod_base = OTHER; note = 2'-O-methyluridine-3'-phosphate
  modified_base 6: mod_base = OTHER; note = 2'-O-docosanyl-adenosine-3'-phosphate
  modified_base 7: mod_base = OTHER; note = 2'-deoxy-2'-fluoroadenosine-3'-phosphate
  modified_base 8: mod_base = OTHER; note = 2'-O-methyladenosine-3'-phosphate
  modified_base 9: mod_base = OTHER; note = 2'-deoxy-2'-fluoroguanosine-3'-phosphate
  modified_base 10: mod_base = OTHER; note = 2'-deoxy-2'-fluoroguanosine-3'-phosphate
  modified_base 11: mod_base = OTHER; note = 2'-deoxy-2'-fluoroadenosine-3'-phosphate
  modified_base 12: mod_base = OTHER; note = 2'-O-methyladenosine-3'-phosphate
  modified_base 13: mod_base = OTHER; note = 2'-O-methylguanosine-3'-phosphate
  modified_base 14: mod_base = OTHER; note = 2'-O-methyladenosine-3'-phosphate
  modified_base 15: mod_base = OTHER; note = 2'-O-methyluridine-3'-phosphate
  modified_base 16: mod_base = OTHER; note = 2'-O-methylguanosine-3'-phosphate
  modified_base 17: mod_base = OTHER; note = 2'-O-methyluridine-3'-phosphate
  modified_base 18: mod_base = OTHER; note = 2'-O-methylguanosine-3'-phosphate
  modified_base 19: mod_base = OTHER; note = 2'-O-methyluridine-3'-phosphorothioate
  modified_base 20: mod_base = OTHER; note = 2'-O-methylcytidine-3'-phosphorothioate
  modified_base 21: mod_base = OTHER; note = 2'-O-methyladenosine
taaataaaggaagatgtgtca

SEQ ID NO: 11902 - RNA, 23 nt, synthetic construct
  source 1..23: mol_type = other RNA
  modified_base 1: mod_base = OTHER; note = 2'-O-methyluridine-3'-phosphorothioate 5'-(E)-Vinylphosphonate
  modified_base 2: mod_base = OTHER; note = 2'-deoxy-2'-fluorouridine-3'-phosphorothioate
  modified_base 3: mod_base = OTHER; note = 2'-O-methyluridine-3'-phosphate
  modified_base 4: mod_base = OTHER; note = 2'-O-methyluridine-3'-phosphate
  modified_base 5: mod_base = OTHER; note = 2'-O-methyluridine-3'-phosphate
  modified_base 6: mod_base = OTHER; note = 2'-deoxy-2'-fluoroguanosine-3'-phosphate
  modified_base 7: mod_base = OTHER; note = 2'-O-methyladenosine-3'-phosphate
  modified_base 8: mod_base = OTHER; note = 2'-O-methyladenosine-3'-phosphate
  modified_base 9: mod_base = OTHER; note = 2'-O-methylguanosine-3'-phosphate
  modified_base 10: mod_base = OTHER; note = 2'-O-methyluridine-3'-phosphate
  modified_base 11: mod_base = OTHER; note = 2'-O-methylguanosine-3'-phosphate
  modified_base 12: mod_base = OTHER; note = 2'-O-methylcytidine-3'-phosphate
  modified_base 13: mod_base = OTHER; note = 2'-O-methylguanosine-3'-phosphate
  modified_base 14: mod_base = OTHER; note = 2'-deoxy-2'-fluorocytidine-3'-phosphate
  modified_base 15: mod_base = OTHER; note = 2'-O-methylguanosine-3'-phosphate
  modified_base 16: mod_base = OTHER; note = 2'-deoxy-2'-fluoroguanosine-3'-phosphate
  modified_base 17: mod_base = OTHER; note = 2'-O-methyluridine-3'-phosphate
  modified_base 18: mod_base = OTHER; note = 2'-O-methyluridine-3'-phosphate
  modified_base 19: mod_base = OTHER; note = 2'-O-methylguanosine-3'-phosphate
  modified_base 20: mod_base = OTHER; note = 2'-O-methylguanosine-3'-phosphate
  modified_base 21: mod_base = OTHER; note = 2'-O-methylcytidine-3'-phosphorothioate
  modified_base 22: mod_base = OTHER; note = 2'-O-methyluridine-3'-phosphorothioate
  modified_base 23: mod_base = OTHER; note = 2'-O-methylcytidine
tttttgaagtgcgcggttggctc

SEQ ID NO: 11903 - RNA, 23 nt, synthetic construct
  source 1..23: mol_type = other RNA
  modified_base 1: mod_base = OTHER; note = 2'-O-methyluridine-3'-phosphorothioate 5'-(E)-Vinylphosphonate
  modified_base 2: mod_base = OTHER; note = 2'-deoxy-2'-fluorocytidine-3'-phosphorothioate
  modified_base 3: mod_base = OTHER; note = 2'-O-methyluridine-3'-phosphate
  modified_base 4: mod_base = OTHER; note = 2'-O-methyluridine-3'-phosphate
  modified_base 5: mod_base = OTHER; note = 2'-O-methyluridine-3'-phosphate
  modified_base 6: mod_base = OTHER; note = 2'-deoxy-2'-fluorouridine-3'-phosphate
  modified_base 7: mod_base = OTHER; note = 2'-O-methylguanosine-3'-phosphate
  modified_base 8: mod_base = OTHER; note = 2'-O-methyladenosine-3'-phosphate
  modified_base 9: mod_base = OTHER; note = 2'-O-methyladenosine-3'-phosphate
  modified_base 10: mod_base = OTHER; note = 2'-O-methylguanosine-3'-phosphate
  modified_base 11: mod_base = OTHER; note = 2'-O-methyluridine-3'-phosphate
  modified_base 12: mod_base = OTHER; note = 2'-O-methylguanosine-3'-phosphate
  modified_base 13: mod_base = OTHER; note = 2'-O-methylcytidine-3'-phosphate
  modified_base 14: mod_base = OTHER; note = 2'-deoxy-2'-fluoroguanosine-3'-phosphate
  modified_base 15: mod_base = OTHER; note = 2'-O-methylcytidine-3'-phosphate
  modified_base 16: mod_base = OTHER; note = 2'-deoxy-2'-fluoroguanosine-3'-phosphate
  modified_base 17: mod_base = OTHER; note = 2'-O-methylguanosine-3'-phosphate
  modified_base 18: mod_base = OTHER; note = 2'-O-methyluridine-3'-phosphate
  modified_base 19: mod_base = OTHER; note = 2'-O-methyluridine-3'-phosphate
  modified_base 20: mod_base = OTHER; note = 2'-O-methylguanosine-3'-phosphate
  modified_base 21: mod_base = OTHER; note = 2'-O-methylguanosine-3'-phosphorothioate
  modified_base 22: mod_base = OTHER; note = 2'-O-methylcytidine-3'-phosphorothioate
  modified_base 23: mod_base = OTHER; note = 2'-O-methyluridine
tcttttgaagtgcgcggttggct

SEQ ID NO: 11904 - RNA, 23 nt, synthetic construct
  source 1..23: mol_type = other RNA
  modified_base 1: mod_base = OTHER; note = 2'-O-methyluridine-3'-phosphorothioate 5'-(E)-Vinylphosphonate
  modified_base 2: mod_base = OTHER; note = 2'-deoxy-2'-fluorocytidine-3'-phosphorothioate
  modified_base 3: mod_base = OTHER; note = 2'-O-methylcytidine-3'-phosphate
  modified_base 4: mod_base = OTHER; note = 2'-O-methyluridine-3'-phosphate
  modified_base 5: mod_base = OTHER; note = 2'-O-methyluridine-3'-phosphate
  modified_base 6: mod_base = OTHER; note = 2'-deoxy-2'-fluorouridine-3'-phosphate
  modified_base 7: mod_base = OTHER; note = 2'-O-methyluridine-3'-phosphate
  modified_base 8: mod_base = OTHER; note = 2'-O-methylguanosine-3'-phosphate
  modified_base 9: mod_base = OTHER; note = 2'-O-methyladenosine-3'-phosphate
  modified_base 10: mod_base = OTHER; note = 2'-O-methyladenosine-3'-phosphate
  modified_base 11: mod_base = OTHER; note = 2'-O-methylguanosine-3'-phosphate
  modified_base 12: mod_base = OTHER; note = 2'-O-methyluridine-3'-phosphate
  modified_base 13: mod_base = OTHER; note = 2'-O-methylguanosine-3'-phosphate
  modified_base 14: mod_base = OTHER; note = 2'-deoxy-2'-fluorocytidine-3'-phosphate
  modified_base 15: mod_base = OTHER; note = 2'-O-methylguanosine-3'-phosphate
  modified_base 16: mod_base = OTHER; note = 2'-deoxy-2'-fluorocytidine-3'-phosphate
  modified_base 17: mod_base = OTHER; note = 2'-O-methylguanosine-3'-phosphate
  modified_base 18: mod_base = OTHER; note = 2'-O-methylguanosine-3'-phosphate
  modified_base 19: mod_base = OTHER; note = 2'-O-methyluridine-3'-phosphate
  modified_base 20: mod_base = OTHER; note = 2'-O-methyluridine-3'-phosphate
  modified_base 21: mod_base = OTHER; note = 2'-O-methylguanosine-3'-phosphorothioate
  modified_base 22: mod_base = OTHER; note = 2'-O-methylguanosine-3'-phosphorothioate
  modified_base 23: mod_base = OTHER; note = 2'-O-methylcytidine
tccttttgaagtgcgcggttggc

SEQ ID NO: 11905 - RNA, 23 nt, synthetic construct
  source 1..23: mol_type = other RNA
  modified_base 1: mod_base = OTHER; note = 2'-O-methyluridine-3'-phosphorothioate 5'-(E)-Vinylphosphonate
  modified_base 2: mod_base = OTHER; note = 2'-deoxy-2'-fluorocytidine-3'-phosphorothioate
  modified_base 3: mod_base = OTHER; note = 2'-O-methylcytidine-3'-phosphate
  modified_base 4: mod_base = OTHER; note = 2'-O-methylcytidine-3'-phosphate
  modified_base 5: mod_base = OTHER; note = 2'-O-methyluridine-3'-phosphate
  modified_base 6: mod_base = OTHER; note = 2'-deoxy-2'-fluorouridine-3'-phosphate
  modified_base 7: mod_base = OTHER; note = 2'-O-methyluridine-3'-phosphate
  modified_base 8: mod_base = OTHER; note = 2'-O-methyluridine-3'-phosphate
  modified_base 9: mod_base = OTHER; note = 2'-O-methylguanosine-3'-phosphate
  modified_base 10: mod_base = OTHER; note = 2'-O-methyladenosine-3'-phosphate
  modified_base 11: mod_base = OTHER; note = 2'-O-methyladenosine-3'-phosphate
  modified_base 12: mod_base = OTHER; note = 2'-O-methylguanosine-3'-phosphate
  modified_base 13: mod_base = OTHER; note = 2'-O-methyluridine-3'-phosphate
  modified_base 14: mod_base = OTHER; note = 2'-deoxy-2'-fluoroguanosine-3'-phosphate
  modified_base 15: mod_base = OTHER; note = 2'-O-methylcytidine-3'-phosphate
  modified_base 16: mod_base = OTHER; note = 2'-deoxy-2'-fluoroguanosine-3'-phosphate
  modified_base 17: mod_base = OTHER; note = 2'-O-methylcytidine-3'-phosphate
  modified_base 18: mod_base = OTHER; note = 2'-O-methylguanosine-3'-phosphate
  modified_base 19: mod_base = OTHER; note = 2'-O-methylguanosine-3'-phosphate
  modified_base 20: mod_base = OTHER; note = 2'-O-methyluridine-3'-phosphate
  modified_base 21: mod_base = OTHER; note = 2'-O-methyluridine-3'-phosphorothioate
  modified_base 22: mod_base = OTHER; note = 2'-O-methylguanosine-3'-phosphorothioate
  modified_base 23: mod_base = OTHER; note = 2'-O-methylguanosine
tcccttttgaagtgcgcggttgg

SEQ ID NO: 11906 - RNA, 23 nt, synthetic construct
  source 1..23: mol_type = other RNA
  modified_base 1: mod_base = OTHER; note = 2'-O-methyluridine-3'-phosphorothioate 5'-(E)-Vinylphosphonate
  modified_base 2: mod_base = OTHER; note = 2'-deoxy-2'-fluoroadenosine-3'-phosphorothioate
  modified_base 3: mod_base = OTHER; note = 2'-O-methylcytidine-3'-phosphate
  modified_base 4: mod_base = OTHER; note = 2'-O-methylcytidine-3'-phosphate
  modified_base 5: mod_base = OTHER; note = 2'-O-methylcytidine-3'-phosphate
  modified_base 6: mod_base = OTHER; note = 2'-deoxy-2'-fluorouridine-3'-phosphate
  modified_base 7: mod_base = OTHER; note = 2'-O-methyluridine-3'-phosphate
  modified_base 8: mod_base = OTHER; note = 2'-O-methyluridine-3'-phosphate
  modified_base 9: mod_base = OTHER; note = 2'-O-methyluridine-3'-phosphate
  modified_base 10: mod_base = OTHER; note = 2'-O-methylguanosine-3'-phosphate
  modified_base 11: mod_base = OTHER; note = 2'-O-methyladenosine-3'-phosphate
  modified_base 12: mod_base = OTHER; note = 2'-O-methyladenosine-3'-phosphate
  modified_base 13: mod_base = OTHER; note = 2'-O-methylguanosine-3'-phosphate
  modified_base 14: mod_base = OTHER; note = 2'-deoxy-2'-fluorouridine-3'-phosphate
  modified_base 15: mod_base = OTHER; note = 2'-O-methylguanosine-3'-phosphate
  modified_base 16: mod_base = OTHER; note = 2'-deoxy-2'-fluorocytidine-3'-phosphate
  modified_base 17: mod_base = OTHER; note = 2'-O-methylguanosine-3'-phosphate
  modified_base 18: mod_base = OTHER; note = 2'-O-methylcytidine-3'-phosphate
  modified_base 19: mod_base = OTHER; note = 2'-O-methylguanosine-3'-phosphate
  modified_base 20: mod_base = OTHER; note = 2'-O-methylguanosine-3'-phosphate
  modified_base 21: mod_base = OTHER; note = 2'-O-methyluridine-3'-phosphorothioate
  modified_base 22: mod_base = OTHER; note = 2'-O-methyluridine-3'-phosphorothioate
  modified_base 23: mod_base = OTHER; note = 2'-O-methylguanosine
tacccttttgaagtgcgcggttg

SEQ ID NO: 11907 - RNA, 23 nt, synthetic construct
  source 1..23: mol_type = other RNA
  modified_base 1: mod_base = OTHER; note = 2'-O-methyluridine-3'-phosphorothioate 5'-(E)-Vinylphosphonate
  modified_base 2: mod_base = OTHER; note = 2'-deoxy-2'-fluorocytidine-3'-phosphorothioate
  modified_base 3: mod_base = OTHER; note = 2'-O-methyladenosine-3'-phosphate
  modified_base 4: mod_base = OTHER; note = 2'-O-methylcytidine-3'-phosphate
  modified_base 5: mod_base = OTHER; note = 2'-O-methylcytidine-3'-phosphate
  modified_base 6: mod_base = OTHER; note = 2'-deoxy-2'-fluorocytidine-3'-phosphate
  modified_base 7: mod_base = OTHER; note = 2'-O-methyluridine-3'-phosphate
  modified_base 8: mod_base = OTHER; note = 2'-O-methyluridine-3'-phosphate
  modified_base 9: mod_base = OTHER; note = 2'-O-methyluridine-3'-phosphate
  modified_base 10: mod_base = OTHER; note = 2'-O-methyluridine-3'-phosphate
  modified_base 11: mod_base = OTHER; note = 2'-O-methylguanosine-3'-phosphate
  modified_base 12: mod_base = OTHER; note = 2'-O-methyladenosine-3'-phosphate
  modified_base 13: mod_base = OTHER; note = 2'-O-methyladenosine-3'-phosphate
  modified_base 14: mod_base = OTHER; note = 2'-deoxy-2'-fluoroguanosine-3'-phosphate
  modified_base 15: mod_base = OTHER; note = 2'-O-methyluridine-3'-phosphate
  modified_base 16: mod_base = OTHER; note = 2'-deoxy-2'-fluoroguanosine-3'-phosphate
  modified_base 17: mod_base = OTHER; note = 2'-O-methylcytidine-3'-phosphate
  modified_base 18: mod_base = OTHER; note = 2'-O-methylguanosine-3'-phosphate
  modified_base 19: mod_base = OTHER; note = 2'-O-methylcytidine-3'-phosphate
  modified_base 20: mod_base = OTHER; note = 2'-O-methylguanosine-3'-phosphate
  modified_base 21: mod_base = OTHER; note = 2'-O-methylguanosine-3'-phosphorothioate
  modified_base 22: mod_base = OTHER; note = 2'-O-methyluridine-3'-phosphorothioate
  modified_base 23: mod_base = OTHER; note = 2'-O-methyluridine
tcacccttttgaagtgcgcggtt

SEQ ID NO: 11908 - RNA, 23 nt, synthetic construct
  source 1..23: mol_type = other RNA
  modified_base 1: mod_base = OTHER; note = 2'-O-methyluridine-3'-phosphorothioate 5'-(E)-Vinylphosphonate
  modified_base 2: mod_base = OTHER; note = 2'-deoxy-2'-fluoroadenosine-3'-phosphorothioate
  modified_base 3: mod_base = OTHER; note = 2'-O-methylcytidine-3'-phosphate
  modified_base 4: mod_base = OTHER; note = 2'-O-methyladenosine-3'-phosphate
  modified_base 5: mod_base = OTHER; note = 2'-O-methylcytidine-3'-phosphate
  modified_base 6: mod_base = OTHER; note = 2'-deoxy-2'-fluorocytidine-3'-phosphate
  modified_base 7: mod_base = OTHER; note = 2'-O-methylcytidine-3'-phosphate
  modified_base 8: mod_base = OTHER; note = 2'-O-methyluridine-3'-phosphate
  modified_base 9: mod_base = OTHER; note = 2'-O-methyluridine-3'-phosphate
  modified_base 10: mod_base = OTHER; note = 2'-O-methyluridine-3'-phosphate
  modified_base 11: mod_base = OTHER; note = 2'-O-methyluridine-3'-phosphate
  modified_base 12: mod_base = OTHER; note = 2'-O-methylguanosine-3'-phosphate
  modified_base 13: mod_base = OTHER; note = 2'-O-methyladenosine-3'-phosphate
  modified_base 14: mod_base = OTHER; note = 2'-deoxy-2'-fluoroadenosine-3'-phosphate
  modified_base 15: mod_base = OTHER; note = 2'-O-methylguanosine-3'-phosphate
  modified_base 16: mod_base = OTHER; note = 2'-deoxy-2'-fluorouridine-3'-phosphate
  modified_base 17: mod_base = OTHER; note = 2'-O-methylguanosine-3'-phosphate
  modified_base 18: mod_base = OTHER; note = 2'-O-methylcytidine-3'-phosphate
  modified_base 19: mod_base = OTHER; note = 2'-O-methylguanosine-3'-phosphate
  modified_base 20: mod_base = OTHER; note = 2'-O-methylcytidine-3'-phosphate
  modified_base 21: mod_base = OTHER; note = 2'-O-methylguanosine-3'-phosphorothioate
  modified_base 22: mod_base = OTHER; note = 2'-O-methylguanosine-3'-phosphorothioate
  modified_base 23: mod_base = OTHER; note = 2'-O-methyluridine
tacacccttttgaagtgcgcggt

SEQ ID NO: 11909 - RNA, 23 nt, synthetic construct
  source 1..23: mol_type = other RNA
  modified_base 1: mod_base = OTHER; note = 2'-O-methyluridine-3'-phosphorothioate 5'-(E)-Vinylphosphonate
  modified_base 2: mod_base = OTHER; note = 2'-deoxy-2'-fluoroguanosine-3'-phosphorothioate
  modified_base 3: mod_base = OTHER; note = 2'-O-methyladenosine-3'-phosphate
  modified_base 4: mod_base = OTHER; note = 2'-O-methylcytidine-3'-phosphate
  modified_base 5: mod_base = OTHER; note = 2'-O-methyladenosine-3'-phosphate
  modified_base 6: mod_base = OTHER; note = 2'-deoxy-2'-fluorocytidine-3'-phosphate
  modified_base 7: mod_base = OTHER; note = 2'-O-methylcytidine-3'-phosphate
  modified_base 8: mod_base = OTHER; note = 2'-O-methylcytidine-3'-phosphate
  modified_base 9: mod_base = OTHER; note = 2'-O-methyluridine-3'-phosphate
  modified_base 10: mod_base = OTHER; note = 2'-O-methyluridine-3'-phosphate
  modified_base 11: mod_base = OTHER; note = 2'-O-methyluridine-3'-phosphate
  modified_base 12: mod_base = OTHER; note = 2'-O-methyluridine-3'-phosphate
  modified_base 13: mod_base = OTHER; note = 2'-O-methylguanosine-3'-phosphate
  modified_base 14: mod_base = OTHER; note = 2'-deoxy-2'-fluoroadenosine-3'-phosphate
  modified_base 15: mod_base = OTHER; note = 2'-O-methyladenosine-3'-phosphate
  modified_base 16: mod_base = OTHER; note = 2'-deoxy-2'-fluoroguanosine-3'-phosphate
  modified_base 17: mod_base = OTHER; note = 2'-O-methyluridine-3'-phosphate
  modified_base 18: mod_base = OTHER; note = 2'-O-methylguanosine-3'-phosphate
  modified_base 19: mod_base = OTHER; note = 2'-O-methylcytidine-3'-phosphate
  modified_base 20: mod_base = OTHER; note = 2'-O-methylguanosine-3'-phosphate
  modified_base 21: mod_base = OTHER; note = 2'-O-methylcytidine-3'-phosphorothioate
  modified_base 22: mod_base = OTHER; note = 2'-O-methylguanosine-3'-phosphorothioate
  modified_base 23: mod_base = OTHER; note = 2'-O-methylguanosine
tgacacccttttgaagtgcgcgg

SEQ ID NO: 11910 - RNA, 23 nt, synthetic construct
  source 1..23: mol_type = other RNA
  modified_base 1: mod_base = OTHER; note = 2'-O-methyluridine-3'-phosphorothioate 5'-(E)-Vinylphosphonate
  modified_base 2: mod_base = OTHER; note = 2'-deoxy-2'-fluorocytidine-3'-phosphorothioate
  modified_base 3: mod_base = OTHER; note = 2'-O-methylguanosine-3'-phosphate
  modified_base 4: mod_base = OTHER; note = 2'-O-methyladenosine-3'-phosphate
  modified_base 5: mod_base = OTHER; note = 2'-O-methylcytidine-3'-phosphate
  modified_base 6: mod_base = OTHER; note = 2'-deoxy-2'-fluoroadenosine-3'-phosphate
  modified_base 7: mod_base = OTHER; note = 2'-O-methylcytidine-3'-phosphate
  modified_base 8: mod_base = OTHER; note = 2'-O-methylcytidine-3'-phosphate
  modified_base 9: mod_base = OTHER; note = 2'-O-methylcytidine-3'-phosphate
  modified_base 10: mod_base = OTHER; note = 2'-O-methyluridine-3'-phosphate
  modified_base 11: mod_base = OTHER; note = 2'-O-methyluridine-3'-phosphate
  modified_base 12: mod_base = OTHER; note = 2'-O-methyluridine-3'-phosphate
  modified_base 13: mod_base = OTHER; note = 2'-O-methyluridine-3'-phosphate
  modified_base 14: mod_base = OTHER; note = 2'-deoxy-2'-fluoroguanosine-3'-phosphate
  modified_base 15: mod_base = OTHER; note = 2'-O-methyladenosine-3'-phosphate
  modified_base 16: mod_base = OTHER; note = 2'-deoxy-2'-fluoroadenosine-3'-phosphate
  modified_base 17: mod_base = OTHER; note = 2'-O-methylguanosine-3'-phosphate
  modified_base 18: mod_base = OTHER; note = 2'-O-methyluridine-3'-phosphate
  modified_base 19: mod_base = OTHER; note = 2'-O-methylguanosine-3'-phosphate
  modified_base 20: mod_base = OTHER; note = 2'-O-methylcytidine-3'-phosphate
  modified_base 21: mod_base = OTHER; note = 2'-O-methylguanosine-3'-phosphorothioate
  modified_base 22: mod_base = OTHER; note = 2'-O-methylcytidine-3'-phosphorothioate
  modified_base 23: mod_base = OTHER; note = 2'-O-methylguanosine
tcgacacccttttgaagtgcgcg

SEQ ID NO: 11911 - RNA, 23 nt, synthetic construct
  source 1..23: mol_type = other RNA
  modified_base 1: mod_base = OTHER; note = 2'-O-methyluridine-3'-phosphorothioate 5'-(E)-Vinylphosphonate
  modified_base 2: mod_base = OTHER; note = 2'-deoxy-2'-fluorocytidine-3'-phosphorothioate
  modified_base 3: mod_base = OTHER; note = 2'-O-methylcytidine-3'-phosphate
  modified_base 4: mod_base = OTHER; note = 2'-O-methylguanosine-3'-phosphate
  modified_base 5: mod_base = OTHER; note = 2'-O-methyladenosine-3'-phosphate
  modified_base 6: mod_base = OTHER; note = 2'-deoxy-2'-fluorocytidine-3'-phosphate
  modified_base 7: mod_base = OTHER; note = 2'-O-methyladenosine-3'-phosphate
  modified_base 8: mod_base = OTHER; note = 2'-O-methylcytidine-3'-phosphate
  modified_base 9: mod_base = OTHER; note = 2'-O-methylcytidine-3'-phosphate
  modified_base 10: mod_base = OTHER; note = 2'-O-methylcytidine-3'-phosphate
  modified_base 11: mod_base = OTHER; note = 2'-O-methyluridine-3'-phosphate
  modified_base 12: mod_base = OTHER; note = 2'-O-methyluridine-3'-phosphate
  modified_base 13: mod_base = OTHER; note = 2'-O-methyluridine-3'-phosphate
  modified_base 14: mod_base = OTHER; note = 2'-deoxy-2'-fluorouridine-3'-phosphate
  modified_base 15: mod_base = OTHER; note = 2'-O-methylguanosine-3'-phosphate
  modified_base 16: mod_base = OTHER; note = 2'-deoxy-2'-fluoroadenosine-3'-phosphate
  modified_base 17: mod_base = OTHER; note = 2'-O-methyladenosine-3'-phosphate
  modified_base 18: mod_base = OTHER; note = 2'-O-methylguanosine-3'-phosphate
  modified_base 19: mod_base = OTHER; note = 2'-O-methyluridine-3'-phosphate
  modified_base 20: mod_base = OTHER; note = 2'-O-methylguanosine-3'-phosphate
  modified_base 21: mod_base = OTHER; note = 2'-O-methylcytidine-3'-phosphorothioate
  modified_base 22: mod_base = OTHER; note = 2'-O-methylguanosine-3'-phosphorothioate
  modified_base 23: mod_base = OTHER; note = 2'-O-methylcytidine
tccgacacccttttgaagtgcgc

SEQ ID NO: 11912 - RNA, 23 nt, synthetic construct
  source 1..23: mol_type = other RNA
  modified_base 1: mod_base = OTHER; note = 2'-O-methyluridine-3'-phosphorothioate 5'-(E)-Vinylphosphonate
  modified_base 2: mod_base = OTHER; note = 2'-deoxy-2'-fluoroadenosine-3'-phosphorothioate
  modified_base 3: mod_base = OTHER; note = 2'-O-methylcytidine-3'-phosphate
  modified_base 4: mod_base = OTHER; note = 2'-O-methylcytidine-3'-phosphate
  modified_base 5: mod_base = OTHER; note = 2'-O-methylguanosine-3'-phosphate
  modified_base 6: mod_base = OTHER; note = 2'-deoxy-2'-fluoroadenosine-3'-phosphate
  modified_base 7: mod_base = OTHER; note = 2'-O-methylcytidine-3'-phosphate
  modified_base 8: mod_base = OTHER; note = 2'-O-methyladenosine-3'-phosphate
  modified_base 9: mod_base = OTHER; note = 2'-O-methylcytidine-3'-phosphate
  modified_base 10: mod_base = OTHER; note = 2'-O-methylcytidine-3'-phosphate
  modified_base 11: mod_base = OTHER; note = 2'-O-methylcytidine-3'-phosphate
  modified_base 12: mod_base = OTHER; note = 2'-O-methyluridine-3'-phosphate
  modified_base 13: mod_base = OTHER; note = 2'-O-methyluridine-3'-phosphate
  modified_base 14: mod_base = OTHER; note = 2'-deoxy-2'-fluorouridine-3'-phosphate
  modified_base 15: mod_base = OTHER; note = 2'-O-methyluridine-3'-phosphate
  modified_base 16: mod_base = OTHER; note = 2'-deoxy-2'-fluoroguanosine-3'-phosphate
  modified_base 17: mod_base = OTHER; note = 2'-O-methyladenosine-3'-phosphate
  modified_base 18: mod_base = OTHER; note = 2'-O-methyladenosine-3'-phosphate
  modified_base 19: mod_base = OTHER; note = 2'-O-methylguanosine-3'-phosphate
  modified_base 20: mod_base = OTHER; note = 2'-O-methyluridine-3'-phosphate
  modified_base 21: mod_base = OTHER; note = 2'-O-methylguanosine-3'-phosphorothioate
  modified_base 22: mod_base = OTHER; note = 2'-O-methylcytidine-3'-phosphorothioate
  modified_base 23: mod_base = OTHER; note = 2'-O-methylguanosine
taccgacacccttttgaagtgcg

SEQ ID NO: 11913 - RNA, 23 nt, synthetic construct
  source 1..23: mol_type = other RNA
  modified_base 1: mod_base = OTHER; note = 2'-O-methyluridine-3'-phosphorothioate 5'-(E)-Vinylphosphonate
  modified_base 2: mod_base = OTHER; note = 2'-deoxy-2'-fluoroadenosine-3'-phosphorothioate
  modified_base 3: mod_base = OTHER; note = 2'-O-methylcytidine-3'-phosphate
  modified_base 4: mod_base = OTHER; note = 2'-O-methyladenosine-3'-phosphate
  modified_base 5: mod_base = OTHER; note = 2'-O-methyluridine-3'-phosphate
  modified_base 6: mod_base = OTHER; note = 2'-deoxy-2'-fluoroadenosine-3'-phosphate
  modified_base 7: mod_base = OTHER; note = 2'-O-methylcytidine-3'-phosphate
  modified_base 8: mod_base = OTHER; note = 2'-O-methyladenosine-3'-phosphate
  modified_base 9: mod_base = OTHER; note = 2'-O-methylcytidine-3'-phosphate
  modified_base 10: mod_base = OTHER; note = 2'-O-methyladenosine-3'-phosphate
  modified_base 11: mod_base = OTHER; note = 2'-O-methylcytidine-3'-phosphate
  modified_base 12: mod_base = OTHER; note = 2'-O-methyluridine-3'-phosphate
  modified_base 13: mod_base = OTHER; note = 2'-O-methyluridine-3'-phosphate
  modified_base 14: mod_base = OTHER; note = 2'-deoxy-2'-fluorocytidine-3'-phosphate
  modified_base 15: mod_base = OTHER; note = 2'-O-methyladenosine-3'-phosphate
  modified_base 16: mod_base = OTHER; note = 2'-deoxy-2'-fluoroguanosine-3'-phosphate
  modified_base 17: mod_base = OTHER; note = 2'-O-methyluridine-3'-phosphate
  modified_base 18: mod_base = OTHER; note = 2'-O-methylcytidine-3'-phosphate
  modified_base 19: mod_base = OTHER; note = 2'-O-methylcytidine-3'-phosphate
  modified_base 20: mod_base = OTHER; note = 2'-O-methyluridine-3'-phosphate
  modified_base 21: mod_base = OTHER; note = 2'-O-methylguanosine-3'-phosphorothioate
  modified_base 22: mod_base = OTHER; note = 2'-O-methylguanosine-3'-phosphorothioate
  modified_base 23: mod_base = OTHER; note = 2'-O-methylcytidine
tacatacacacttcagtcctggc

SEQ ID NO: 11914 - RNA, 23 nt, synthetic construct
  source 1..23: mol_type = other RNA
  modified_base 1: mod_base = OTHER; note = 2'-O-methyluridine-3'-phosphorothioate 5'-(E)-Vinylphosphonate
  modified_base 2: mod_base = OTHER; note = 2'-deoxy-2'-fluoroguanosine-3'-phosphorothioate
  modified_base 3: mod_base = OTHER; note = 2'-O-methyladenosine-3'-phosphate
  modified_base 4: mod_base = OTHER; note = 2'-O-methyladenosine-3'-phosphate
  modified_base 5: mod_base = OTHER; note = 2'-O-methylguanosine-3'-phosphate
  modified_base 6: mod_base = OTHER; note = 2'-deoxy-2'-fluoroadenosine-3'-phosphate
  modified_base 7: mod_base = OTHER; note = 2'-O-methyladenosine-3'-phosphate
  modified_base 8: mod_base = OTHER; note = 2'-O-methyluridine-3'-phosphate
  modified_base 9: mod_base = OTHER; note = 2'-O-methylcytidine-3'-phosphate
  modified_base 10: mod_base = OTHER; note = 2'-O-methyladenosine-3'-phosphate
  modified_base 11: mod_base = OTHER; note = 2'-O-methylcytidine-3'-phosphate
  modified_base 12: mod_base = OTHER; note = 2'-O-methyladenosine-3'-phosphate
  modified_base 13: mod_base = OTHER; note = 2'-O-methylcytidine-3'-phosphate
  modified_base 14: mod_base = OTHER; note = 2'-deoxy-2'-fluoroadenosine-3'-phosphate
  modified_base 15: mod_base = OTHER; note = 2'-O-methyladenosine-3'-phosphate
  modified_base 16: mod_base = OTHER; note = 2'-deoxy-2'-fluoroadenosine-3'-phosphate
  modified_base 17: mod_base = OTHER; note = 2'-O-methyladenosine-3'-phosphate
  modified_base 18: mod_base = OTHER; note = 2'-O-methylguanosine-3'-phosphate
  modified_base 19: mod_base = OTHER; note = 2'-O-methyladenosine-3'-phosphate
  modified_base 20: mod_base = OTHER; note = 2'-O-methylcytidine-3'-phosphate
  modified_base 21: mod_base = OTHER; note = 2'-O-methyladenosine-3'-phosphorothioate
  modified_base 22: mod_base = OTHER; note = 2'-O-methyluridine-3'-phosphorothioate
  modified_base 23: mod_base = OTHER; note = 2'-O-methyladenosine
tgaagaatcacacaaaagacata

SEQ ID NO: 11915 - RNA, 23 nt, synthetic construct
  source 1..23: mol_type = other RNA
  modified_base 1: mod_base = OTHER; note = 2'-O-methyluridine-3'-phosphorothioate 5'-(E)-Vinylphosphonate
  modified_base 2: mod_base = OTHER; note = 2'-deoxy-2'-fluoroadenosine-3'-phosphorothioate
  modified_base 3: mod_base = OTHER; note = 2'-O-methyladenosine-3'-phosphate
  modified_base 4: mod_base = OTHER; note = 2'-O-methylguanosine-3'-phosphate
  modified_base 5: mod_base = OTHER; note = 2'-O-methyluridine-3'-phosphate
  modified_base 6: mod_base = OTHER; note = 2'-deoxy-2'-fluorouridine-3'-phosphate
  modified_base 7: mod_base = OTHER; note = 2'-O-methyluridine-3'-phosphate
  modified_base 8: mod_base = OTHER; note = 2'-O-methylguanosine-3'-phosphate
  modified_base 9: mod_base = OTHER; note = 2'-O-methyladenosine-3'-phosphate
  modified_base 10: mod_base = OTHER; note = 2'-O-methyladenosine-3'-phosphate
  modified_base 11: mod_base = OTHER; note = 2'-O-methylguanosine-3'-phosphate
  modified_base 12: mod_base = OTHER; note = 2'-O-methyladenosine-3'-phosphate
  modified_base 13: mod_base = OTHER; note = 2'-O-methyladenosine-3'-phosphate
  modified_base 14: mod_base = OTHER; note = 2'-deoxy-2'-fluorouridine-3'-phosphate
  modified_base 15: mod_base = OTHER; note = 2'-O-methylcytidine-3'-phosphate
  modified_base 16: mod_base = OTHER; note = 2'-deoxy-2'-fluoroadenosine-3'-phosphate
  modified_base 17: mod_base = OTHER; note = 2'-O-methylcytidine-3'-phosphate
  modified_base 18: mod_base = OTHER; note = 2'-O-methyladenosine-3'-phosphate
  modified_base 19: mod_base = OTHER; note = 2'-O-methylcytidine-3'-phosphate
  modified_base 20: mod_base = OTHER; note = 2'-O-methyladenosine-3'-phosphate
  modified_base 21: mod_base = OTHER; note = 2'-O-methyladenosine-3'-phosphorothioate
  modified_base 22: mod_base = OTHER; note = 2'-O-methyladenosine-3'-phosphorothioate
  modified_base 23: mod_base = OTHER; note = 2'-O-methyladenosine
taagtttgaagaatcacacaaaa

SEQ ID NO: 11916 - RNA, 23 nt, synthetic construct
  source 1..23: mol_type = other RNA
  modified_base 1: mod_base = OTHER; note = 2'-O-methyluridine-3'-phosphorothioate 5'-(E)-Vinylphosphonate
  modified_base 2: mod_base = OTHER; note = 2'-deoxy-2'-fluorouridine-3'-phosphorothioate
  modified_base 3: mod_base = OTHER; note = 2'-O-methyladenosine-3'-phosphate
  modified_base 4: mod_base = OTHER; note = 2'-O-methylcytidine-3'-phosphate
  modified_base 5: mod_base = OTHER; note = 2'-O-methyladenosine-3'-phosphate
  modified_base 6: mod_base = OTHER; note = 2'-deoxy-2'-fluorocytidine-3'-phosphate
  modified_base 7: mod_base = OTHER; note = 2'-O-methyladenosine-3'-phosphate
  modified_base 8: mod_base = OTHER; note = 2'-O-methylcytidine-3'-phosphate
  modified_base 9: mod_base = OTHER; note = 2'-O-methyluridine-3'-phosphate
  modified_base 10: mod_base = OTHER; note = 2'-O-methyluridine-3'-phosphate
  modified_base 11: mod_base = OTHER; note = 2'-O-methylcytidine-3'-phosphate
  modified_base 12: mod_base = OTHER; note = 2'-O-methyladenosine-3'-phosphate
  modified_base 13: mod_base = OTHER; note = 2'-O-methylguanosine-3'-phosphate
  modified_base 14: mod_base = OTHER; note = 2'-deoxy-2'-fluorouridine-3'-phosphate
  modified_base 15: mod_base = OTHER; note = 2'-O-methylcytidine-3'-phosphate
  modified_base 16: mod_base = OTHER; note = 2'-deoxy-2'-fluorocytidine-3'-phosphate
  modified_base 17: mod_base = OTHER; note = 2'-O-methyluridine-3'-phosphate
  modified_base 18: mod_base = OTHER; note = 2'-O-methylguanosine-3'-phosphate
  modified_base 19: mod_base = OTHER; note = 2'-O-methylguanosine-3'-phosphate
  modified_base 20: mod_base = OTHER; note = 2'-O-methylcytidine-3'-phosphate
  modified_base 21: mod_base = OTHER; note = 2'-O-methylguanosine-3'-phosphorothioate
  modified_base 22: mod_base = OTHER; note = 2'-O-methyladenosine-3'-phosphorothioate
  modified_base 23: mod_base = OTHER; note = 2'-O-methylguanosine
ttacacacttcagtcctggcgag

SEQ ID NO: 11917 - RNA, 23 nt, synthetic construct
  source 1..23: mol_type = other RNA
  modified_base 1: mod_base = OTHER; note = 2'-O-methyluridine-3'-phosphorothioate 5'-(E)-Vinylphosphonate
  modified_base 2: mod_base = OTHER; note = 2'-deoxy-2'-fluoroadenosine-3'-phosphorothioate
  modified_base 3: mod_base = OTHER; note = 2'-O-methyluridine-3'-phosphate
  modified_base 4: mod_base = OTHER; note = 2'-O-methyladenosine-3'-phosphate
  modified_base 5: mod_base = OTHER; note = 2'-O-methylcytidine-3'-phosphate
  modified_base 6: mod_base = OTHER; note = 2'-deoxy-2'-fluoroadenosine-3'-phosphate
  modified_base 7: mod_base = OTHER; note = 2'-O-methylcytidine-3'-phosphate
  modified_base 8: mod_base = OTHER; note = 2'-O-methyladenosine-3'-phosphate
  modified_base 9: mod_base = OTHER; note = 2'-O-methylcytidine-3'-phosphate
  modified_base 10: mod_base = OTHER; note = 2'-O-methyluridine-3'-phosphate
  modified_base 11: mod_base = OTHER; note = 2'-O-methyluridine-3'-phosphate
  modified_base 12: mod_base = OTHER; note = 2'-O-methylcytidine-3'-phosphate
  modified_base 13: mod_base = OTHER; note = 2'-O-methyladenosine-3'-phosphate
  modified_base 14: mod_base = OTHER; note = 2'-deoxy-2'-fluoroguanosine-3'-phosphate
  modified_base 15: mod_base = OTHER; note = 2'-O-methyluridine-3'-phosphate
  modified_base 16: mod_base = OTHER; note = 2'-deoxy-2'-fluorocytidine-3'-phosphate
  modified_base 17: mod_base = OTHER; note = 2'-O-methylcytidine-3'-phosphate
  modified_base 18: mod_base = OTHER; note = 2'-O-methyluridine-3'-phosphate
  modified_base 19: mod_base = OTHER; note = 2'-O-methylguanosine-3'-phosphate
  modified_base 20: mod_base = OTHER; note = 2'-O-methylguanosine-3'-phosphate
  modified_base 21: mod_base = OTHER; note = 2'-O-methylcytidine-3'-phosphorothioate
  modified_base 22: mod_base = OTHER; note = 2'-O-methylguanosine-3'-phosphorothioate
  modified_base 23: mod_base = OTHER; note = 2'-O-methyladenosine
tatacacacttcagtcctggcga

SEQ ID NO: 11918 - RNA, 23 nt, synthetic construct
  source 1..23: mol_type = other RNA
  modified_base 1: mod_base = OTHER; note = 2'-O-methyluridine-3'-phosphorothioate 5'-(E)-Vinylphosphonate
  modified_base 2: mod_base = OTHER; note = 2'-deoxy-2'-fluorocytidine-3'-phosphorothioate
  modified_base 3: mod_base = OTHER; note = 2'-O-methyladenosine-3'-phosphate
  modified_base 4: mod_base = OTHER; note = 2'-O-methyluridine-3'-phosphate
  modified_base 5: mod_base = OTHER; note = 2'-O-methyladenosine-3'-phosphate
  modified_base 6: mod_base = OTHER; note = 2'-deoxy-2'-fluorocytidine-3'-phosphate
  modified_base 7: mod_base = OTHER; note = 2'-O-methyladenosine-3'-phosphate
  modified_base 8: mod_base = OTHER; note = 2'-O-methylcytidine-3'-phosphate
  modified_base 9: mod_base = OTHER; note = 2'-O-methyladenosine-3'-phosphate
  modified_base 10: mod_base = OTHER; note = 2'-O-methylcytidine-3'-phosphate
  modified_base 11: mod_base = OTHER; note = 2'-O-methyluridine-3'-phosphate
  modified_base 12: mod_base = OTHER; note = 2'-O-methyluridine-3'-phosphate
  modified_base 13: mod_base = OTHER; note = 2'-O-methylcytidine-3'-phosphate
  modified_base 14: mod_base = OTHER; note = 2'-deoxy-2'-fluoroadenosine-3'-phosphate
  modified_base 15: mod_base = OTHER; note = 2'-O-methylguanosine-3'-phosphate
  modified_base 16: mod_base = OTHER; note = 2'-deoxy-2'-fluorouridine-3'-phosphate
  modified_base 17: mod_base = OTHER; note = 2'-O-methylcytidine-3'-phosphate
  modified_base 18: mod_base = OTHER; note = 2'-O-methylcytidine-3'-phosphate
  modified_base 19: mod_base = OTHER; note = 2'-O-methyluridine-3'-phosphate
  modified_base 20: mod_base = OTHER; note = 2'-O-methylguanosine-3'-phosphate
  modified_base 21: mod_base = OTHER; note = 2'-O-methylguanosine-3'-phosphorothioate
  modified_base 22: mod_base = OTHER; note = 2'-O-methylcytidine-3'-phosphorothioate
  modified_base 23: mod_base = OTHER; note = 2'-O-methylguanosine
tcatacacacttcagtcctggcg

SEQ ID NO: 11919 - RNA, 23 nt, synthetic construct
  source 1..23: mol_type = other RNA
  modified_base 1: mod_base = OTHER; note = 2'-O-methyluridine-3'-phosphorothioate 5'-(E)-Vinylphosphonate
  modified_base 2: mod_base = OTHER; note = 2'-deoxy-2'-fluoroguanosine-3'-phosphorothioate
  modified_base 3: mod_base = OTHER; note = 2'-O-methyladenosine-3'-phosphate
  modified_base 4: mod_base = OTHER; note = 2'-O-methylcytidine-3'-phosphate
  modified_base 5: mod_base = OTHER; note = 2'-O-methyladenosine-3'-phosphate
  modified_base 6: mod_base = OTHER; note = 2'-deoxy-2'-fluorouridine-3'-phosphate
  modified_base 7: mod_base = OTHER; note = 2'-O-methyladenosine-3'-phosphate
  modified_base 8: mod_base = OTHER; note = 2'-O-methylcytidine-3'-phosphate
  modified_base 9: mod_base = OTHER; note = 2'-O-methyladenosine-3'-phosphate
  modified_base 10: mod_base = OTHER; note = 2'-O-methylcytidine-3'-phosphate
  modified_base 11: mod_base = OTHER; note = 2'-O-methyladenosine-3'-phosphate
  modified_base 12: mod_base = OTHER; note = 2'-O-methylcytidine-3'-phosphate
  modified_base 13: mod_base = OTHER; note = 2'-O-methyluridine-3'-phosphate
  modified_base 14: mod_base = OTHER; note = 2'-deoxy-2'-fluorouridine-3'-phosphate
  modified_base 15: mod_base = OTHER; note = 2'-O-methylcytidine-3'-phosphate
  modified_base 16: mod_base = OTHER; note = 2'-deoxy-2'-fluoroadenosine-3'-phosphate
  modified_base 17: mod_base = OTHER; note = 2'-O-methylguanosine-3'-phosphate
  modified_base 18: mod_base = OTHER; note = 2'-O-methyluridine-3'-phosphate
  modified_base 19: mod_base = OTHER; note = 2'-O-methylcytidine-3'-phosphate
  modified_base 20: mod_base = OTHER; note = 2'-O-methylcytidine-3'-phosphate
  modified_base 21: mod_base = OTHER; note = 2'-O-methyluridine-3'-phosphorothioate
  modified_base 22: mod_base = OTHER; note = 2'-O-methylguanosine-3'-phosphorothioate
  modified_base 23: mod_base = OTHER; note = 2'-O-methylguanosine
tgacatacacacttcagtcctgg

SEQ ID NO: 11920 - RNA, 23 nt, synthetic construct
  source 1..23: mol_type = other RNA
  modified_base 1: mod_base = OTHER; note = 2'-O-methyluridine-3'-phosphorothioate 5'-(E)-Vinylphosphonate
  modified_base 2: mod_base = OTHER; note = 2'-deoxy-2'-fluoroadenosine-3'-phosphorothioate
  modified_base 3: mod_base = OTHER; note = 2'-O-methylguanosine-3'-phosphate
  modified_base 4: mod_base = OTHER; note = 2'-O-methyladenosine-3'-phosphate
  modified_base 5: mod_base = OTHER; note = 2'-O-methylcytidine-3'-phosphate
  modified_base 6: mod_base = OTHER; note = 2'-deoxy-2'-fluoroadenosine-3'-phosphate
  modified_base 7: mod_base = OTHER; note = 2'-O-methyluridine-3'-phosphate
  modified_base 8: mod_base = OTHER; note = 2'-O-methyladenosine-3'-phosphate
  modified_base 9: mod_base = OTHER; note = 2'-O-methylcytidine-3'-phosphate
  modified_base 10: mod_base = OTHER; note = 2'-O-methyladenosine-3'-phosphate
  modified_base 11: mod_base = OTHER; note = 2'-O-methylcytidine-3'-phosphate
  modified_base 12: mod_base = OTHER; note = 2'-O-methyladenosine-3'-phosphate
  modified_base 13: mod_base = OTHER; note = 2'-O-methylcytidine-3'-phosphate
  modified_base 14: mod_base = OTHER; note = 2'-deoxy-2'-fluorouridine-3'-phosphate
  modified_base 15: mod_base = OTHER; note = 2'-O-methyluridine-3'-phosphate
  modified_base 16: mod_base = OTHER; note = 2'-deoxy-2'-fluorocytidine-3'-phosphate
  modified_base 17: mod_base = OTHER; note = 2'-O-methyladenosine-3'-phosphate
  modified_base 18: mod_base = OTHER; note = 2'-O-methylguanosine-3'-phosphate
  modified_base 19: mod_base = OTHER; note = 2'-O-methyluridine-3'-phosphate
  modified_base 20: mod_base = OTHER; note = 2'-O-methylcytidine-3'-phosphate
  modified_base 21: mod_base = OTHER; note = 2'-O-methylcytidine-3'-phosphorothioate
  modified_base 22: mod_base = OTHER; note = 2'-O-methyluridine-3'-phosphorothioate
  modified_base 23: mod_base = OTHER; note = 2'-O-methylguanosine
tagacatacacacttcagtcctg

SEQ ID NO: 11921 - RNA, 23 nt, synthetic construct
  source 1..23: mol_type = other RNA
  modified_base 1: mod_base = OTHER; note = 2'-O-methyluridine-3'-phosphorothioate 5'-(E)-Vinylphosphonate
  modified_base 2: mod_base = OTHER; note = 2'-deoxy-2'-fluoroadenosine-3'-phosphorothioate
  modified_base 3: mod_base = OTHER; note = 2'-O-methyladenosine-3'-phosphate
  modified_base 4: mod_base = OTHER; note = 2'-O-methylguanosine-3'-phosphate
  modified_base 5: mod_base = OTHER; note = 2'-O-methyladenosine-3'-phosphate
  modified_base 6: mod_base = OTHER; note = 2'-deoxy-2'-fluorocytidine-3'-phosphate
  modified_base 7: mod_base = OTHER; note = 2'-O-methyladenosine-3'-phosphate
  modified_base 8: mod_base = OTHER; note = 2'-O-methyluridine-3'-phosphate
  modified_base 9: mod_base = OTHER; note = 2'-O-methyladenosine-3'-phosphate
  modified_base 10: mod_base = OTHER; note = 2'-O-methylcytidine-3'-phosphate
  modified_base 11: mod_base = OTHER; note = 2'-O-methyladenosine-3'-phosphate
  modified_base 12: mod_base = OTHER; note = 2'-O-methylcytidine-3'-phosphate
  modified_base 13: mod_base = OTHER; note = 2'-O-methyladenosine-3'-phosphate
  modified_base 14: mod_base = OTHER; note = 2'-deoxy-2'-fluorocytidine-3'-phosphate
  modified_base 15: mod_base = OTHER; note = 2'-O-methyluridine-3'-phosphate
  modified_base 16: mod_base = OTHER; note = 2'-deoxy-2'-fluorouridine-3'-phosphate
  modified_base 17: mod_base = OTHER; note = 2'-O-methylcytidine-3'-phosphate
  modified_base 18: mod_base = OTHER; note = 2'-O-methyladenosine-3'-phosphate
  modified_base 19: mod_base = OTHER; note = 2'-O-methylguanosine-3'-phosphate
  modified_base 20: mod_base = OTHER; note = 2'-O-methyluridine-3'-phosphate
  modified_base 21: mod_base = OTHER; note = 2'-O-methylcytidine-3'-phosphorothioate
  modified_base 22: mod_base = OTHER; note = 2'-O-methylcytidine-3'-phosphorothioate
  modified_base 23: mod_base = OTHER; note = 2'-O-methyluridine
taagacatacacacttcagtcct

SEQ ID NO: 11922 - RNA, 23 nt, synthetic construct
  source 1..23: mol_type = other RNA
  modified_base 1: mod_base = OTHER; note = 2'-O-methyluridine-3'-phosphorothioate 5'-(E)-Vinylphosphonate
  modified_base 2: mod_base = OTHER; note = 2'-deoxy-2'-fluoroadenosine-3'-phosphorothioate
  modified_base 3: mod_base = OTHER; note = 2'-O-methyladenosine-3'-phosphate
  modified_base 4: mod_base = OTHER; note = 2'-O-methyladenosine-3'-phosphate
  modified_base 5: mod_base = OTHER; note = 2'-O-methylguanosine-3'-phosphate
  modified_base 6: mod_base = OTHER; note = 2'-deoxy-2'-fluoroadenosine-3'-phosphate
  modified_base 7: mod_base = OTHER; note = 2'-O-methylcytidine-3'-phosphate
  modified_base 8: mod_base = OTHER; note = 2'-O-methyladenosine-3'-phosphate
  modified_base 9: mod_base = OTHER; note = 2'-O-methyluridine-3'-phosphate
  modified_base 10: mod_base = OTHER; note = 2'-O-methyladenosine-3'-phosphate
  modified_base 11: mod_base = OTHER; note = 2'-O-methylcytidine-3'-phosphate
  modified_base 12: mod_base = OTHER; note = 2'-O-methyladenosine-3'-phosphate
  modified_base 13: mod_base = OTHER; note = 2'-O-methylcytidine-3'-phosphate
  modified_base 14: mod_base = OTHER; note = 2'-deoxy-2'-fluoroadenosine-3'-phosphate
  modified_base 15: mod_base = OTHER; note = 2'-O-methylcytidine-3'-phosphate
  modified_base 16: mod_base = OTHER; note = 2'-deoxy-2'-fluorouridine-3'-phosphate
  modified_base 17: mod_base = OTHER; note = 2'-O-methyluridine-3'-phosphate
  modified_base 18: mod_base = OTHER; note = 2'-O-methylcytidine-3'-phosphate
  modified_base 19: mod_base = OTHER; note = 2'-O-methyladenosine-3'-phosphate
  modified_base 20: mod_base = OTHER; note = 2'-O-methylguanosine-3'-phosphate
  modified_base 21: mod_base = OTHER; note = 2'-O-methyluridine-3'-phosphorothioate
  modified_base 22: mod_base = OTHER; note = 2'-O-methylcytidine-3'-phosphorothioate
  modified_base 23: mod_base = OTHER; note = 2'-O-methylcytidine
taaagacatacacacttcagtcc

SEQ ID NO: 11923 - RNA, 23 nt, synthetic construct
  source 1..23: mol_type = other RNA
  modified_base 1: mod_base = OTHER; note = 2'-O-methyluridine-3'-phosphorothioate 5'-(E)-Vinylphosphonate
  modified_base 2: mod_base = OTHER; note = 2'-deoxy-2'-fluoroadenosine-3'-phosphorothioate
  modified_base 3: mod_base = OTHER; note = 2'-O-methyladenosine-3'-phosphate
  modified_base 4: mod_base = OTHER; note = 2'-O-methyladenosine-3'-phosphate
  modified_base 5: mod_base = OTHER; note = 2'-O-methyladenosine-3'-phosphate
  modified_base 6: mod_base = OTHER; note = 2'-deoxy-2'-fluoroguanosine-3'-phosphate
  modified_base 7: mod_base = OTHER; note = 2'-O-methyladenosine-3'-phosphate
  modified_base 8: mod_base = OTHER; note = 2'-O-methylcytidine-3'-phosphate
  modified_base 9: mod_base = OTHER; note = 2'-O-methyladenosine-3'-phosphate
  modified_base 10: mod_base = OTHER; note = 2'-O-methyluridine-3'-phosphate
  modified_base 11: mod_base = OTHER; note = 2'-O-methyladenosine-3'-phosphate
  modified_base 12: mod_base = OTHER; note = 2'-O-methylcytidine-3'-phosphate
  modified_base 13: mod_base = OTHER; note = 2'-O-methyladenosine-3'-phosphate
  modified_base 14: mod_base = OTHER; note = 2'-deoxy-2'-fluorocytidine-3'-phosphate
  modified_base 15: mod_base = OTHER; note = 2'-O-methyladenosine-3'-phosphate
  modified_base 16: mod_base = OTHER; note = 2'-deoxy-2'-fluorocytidine-3'-phosphate
  modified_base 17: mod_base = OTHER; note = 2'-O-methyluridine-3'-phosphate
  modified_base 18: mod_base = OTHER; note = 2'-O-methyluridine-3'-phosphate
  modified_base 19: mod_base = OTHER; note = 2'-O-methylcytidine-3'-phosphate
  modified_base 20: mod_base = OTHER; note = 2'-O-methyladenosine-3'-phosphate
  modified_base 21: mod_base = OTHER; note = 2'-O-methylguanosine-3'-phosphorothioate
  modified_base 22: mod_base = OTHER; note = 2'-O-methyluridine-3'-phosphorothioate
  modified_base 23: mod_base = OTHER; note = 2'-O-methylcytidine
taaaagacatacacacttcagtc

SEQ ID NO: 11924 - RNA, 23 nt, synthetic construct
  source 1..23: mol_type = other RNA
  modified_base 1: mod_base = OTHER; note = 2'-O-methyluridine-3'-phosphorothioate 5'-(E)-Vinylphosphonate
  modified_base 2: mod_base = OTHER; note = 2'-deoxy-2'-fluorocytidine-3'-phosphorothioate
  modified_base 3: mod_base = OTHER; note = 2'-O-methyladenosine-3'-phosphate
  modified_base 4: mod_base = OTHER; note = 2'-O-methyladenosine-3'-phosphate
  modified_base 5: mod_base = OTHER; note = 2'-O-methyladenosine-3'-phosphate
  modified_base 6: mod_base = OTHER; note = 2'-deoxy-2'-fluoroadenosine-3'-phosphate
  modified_base 7: mod_base = OTHER; note = 2'-O-methylguanosine-3'-phosphate
  modified_base 8: mod_base = OTHER; note = 2'-O-methyladenosine-3'-phosphate
  modified_base 9: mod_base = OTHER; note = 2'-O-methylcytidine-3'-phosphate
  modified_base 10: mod_base = OTHER; note = 2'-O-methyladenosine-3'-phosphate
  modified_base 11: mod_base = OTHER; note = 2'-O-methyluridine-3'-phosphate
  modified_base 12: mod_base = OTHER; note = 2'-O-methyladenosine-3'-phosphate
  modified_base 13: mod_base = OTHER; note = 2'-O-methylcytidine-3'-phosphate
  modified_base 14: mod_base = OTHER; note = 2'-deoxy-2'-fluoroadenosine-3'-phosphate
  modified_base 15: mod_base = OTHER; note = 2'-O-methylcytidine-3'-phosphate
  modified_base 16: mod_base = OTHER; note = 2'-deoxy-2'-fluoroadenosine-3'-phosphate
  modified_base 17: mod_base = OTHER; note = 2'-O-methylcytidine-3'-phosphate
  modified_base 18: mod_base = OTHER; note = 2'-O-methyluridine-3'-phosphate
  modified_base 19: mod_base = OTHER; note = 2'-O-methyluridine-3'-phosphate
  modified_base 20: mod_base = OTHER; note = 2'-O-methylcytidine-3'-phosphate
  modified_base 21: mod_base = OTHER; note = 2'-O-methyladenosine-3'-phosphorothioate
  modified_base 22: mod_base = OTHER; note = 2'-O-methylguanosine-3'-phosphorothioate
  modified_base 23: mod_base = OTHER; note = 2'-O-methyluridine
tcaaaagacatacacacttcagt

SEQ ID NO: 11925 - RNA, 23 nt, synthetic construct
  source 1..23: mol_type = other RNA
  modified_base 1: mod_base = OTHER; note = 2'-O-methyluridine-3'-phosphorothioate 5'-(E)-Vinylphosphonate
  modified_base 2: mod_base = OTHER; note = 2'-deoxy-2'-fluoroadenosine-3'-phosphorothioate
  modified_base 3: mod_base = OTHER; note = 2'-O-methylcytidine-3'-phosphate
  modified_base 4: mod_base = OTHER; note = 2'-O-methyladenosine-3'-phosphate
  modified_base 5: mod_base = OTHER; note = 2'-O-methyladenosine-3'-phosphate
  modified_base 6: mod_base = OTHER; note = 2'-deoxy-2'-fluoroadenosine-3'-phosphate
  modified_base 7: mod_base = OTHER; note = 2'-O-methyladenosine-3'-phosphate
  modified_base 8: mod_base = OTHER; note = 2'-O-methylguanosine-3'-phosphate
  modified_base 9: mod_base = OTHER; note = 2'-O-methyladenosine-3'-phosphate
  modified_base 10: mod_base = OTHER; note = 2'-O-methylcytidine-3'-phosphate
  modified_base 11: mod_base = OTHER; note = 2'-O-methyladenosine-3'-phosphate
  modified_base 12: mod_base = OTHER; note = 2'-O-methyluridine-3'-phosphate
  modified_base 13: mod_base = OTHER; note = 2'-O-methyladenosine-3'-phosphate
  modified_base 14: mod_base = OTHER; note = 2'-deoxy-2'-fluorocytidine-3'-phosphate
  modified_base 15: mod_base = OTHER; note = 2'-O-methyladenosine-3'-phosphate
  modified_base 16: mod_base = OTHER; note = 2'-deoxy-2'-fluorocytidine-3'-phosphate
  modified_base 17: mod_base = OTHER; note = 2'-O-methyladenosine-3'-phosphate
  modified_base 18: mod_base = OTHER; note = 2'-O-methylcytidine-3'-phosphate
  modified_base 19: mod_base = OTHER; note = 2'-O-methyluridine-3'-phosphate
  modified_base 20: mod_base = OTHER; note = 2'-O-methyluridine-3'-phosphate
  modified_base 21: mod_base = OTHER; note = 2'-O-methylcytidine-3'-phosphorothioate
  modified_base 22: mod_base = OTHER; note = 2'-O-methyladenosine-3'-phosphorothioate
  modified_base 23: mod_base = OTHER; note = 2'-O-methylguanosine
tacaaaagacatacacacttcag

SEQ ID NO: 11926 - RNA, 23 nt, synthetic construct
  source 1..23: mol_type = other RNA
  modified_base 1: mod_base = OTHER; note = 2'-O-methyluridine-3'-phosphorothioate 5'-(E)-Vinylphosphonate
  modified_base 2: mod_base = OTHER; note = 2'-deoxy-2'-fluorocytidine-3'-phosphorothioate
  modified_base 3: mod_base = OTHER; note = 2'-O-methyladenosine-3'-phosphate
  modified_base 4: mod_base = OTHER; note = 2'-O-methylcytidine-3'-phosphate
  modified_base 5: mod_base = OTHER; note = 2'-O-methyladenosine-3'-phosphate
  modified_base 6: mod_base = OTHER; note = 2'-deoxy-2'-fluoroadenosine-3'-phosphate
  modified_base 7: mod_base = OTHER; note = 2'-O-methyladenosine-3'-phosphate
  modified_base 8: mod_base = OTHER; note = 2'-O-methyladenosine-3'-phosphate
  modified_base 9: mod_base = OTHER; note = 2'-O-methylguanosine-3'-phosphate
  modified_base 10: mod_base = OTHER; note = 2'-O-methyladenosine-3'-phosphate
  modified_base 11: mod_base = OTHER; note = 2'-O-methylcytidine-3'-phosphate
  modified_base 12: mod_base = OTHER; note = 2'-O-methyladenosine-3'-phosphate
  modified_base 13: mod_base = OTHER; note = 2'-O-methyluridine-3'-phosphate
  modified_base 14: mod_base = OTHER; note = 2'-deoxy-2'-fluoroadenosine-3'-phosphate
  modified_base 15: mod_base = OTHER; note = 2'-O-methylcytidine-3'-phosphate
  modified_base 16: mod_base = OTHER; note = 2'-deoxy-2'-fluoroadenosine-3'-phosphate
  modified_base 17: mod_base = OTHER; note = 2'-O-methylcytidine-3'-phosphate
  modified_base 18: mod_base = OTHER; note = 2'-O-methyladenosine-3'-phosphate
  modified_base 19: mod_base = OTHER; note = 2'-O-methylcytidine-3'-phosphate
  modified_base 20: mod_base = OTHER; note = 2'-O-methyluridine-3'-phosphate
  modified_base 21: mod_base = OTHER; note = 2'-O-methyluridine-3'-phosphorothioate
  modified_base 22: mod_base = OTHER; note = 2'-O-methylcytidine-3'-phosphorothioate
  modified_base 23: mod_base = OTHER; note = 2'-O-methyladenosine
tcacaaaagacatacacacttca

SEQ ID NO: 11927 - RNA, 23 nt, synthetic construct
  source 1..23: mol_type = other RNA
  modified_base 1: mod_base = OTHER; note = 2'-O-methyluridine-3'-phosphorothioate 5'-(E)-Vinylphosphonate
  modified_base 2: mod_base = OTHER; note = 2'-deoxy-2'-fluoroadenosine-3'-phosphorothioate
  modified_base 3: mod_base = OTHER; note = 2'-O-methylcytidine-3'-phosphate
  modified_base 4: mod_base = OTHER; note = 2'-O-methyladenosine-3'-phosphate
  modified_base 5: mod_base = OTHER; note = 2'-O-methylcytidine-3'-phosphate
  modified_base 6: mod_base = OTHER; note = 2'-deoxy-2'-fluoroadenosine-3'-phosphate
  modified_base 7: mod_base = OTHER; note = 2'-O-methyladenosine-3'-phosphate
  modified_base 8: mod_base = OTHER; note = 2'-O-methyladenosine-3'-phosphate
  modified_base 9: mod_base = OTHER; note = 2'-O-methyladenosine-3'-phosphate
  modified_base 10: mod_base = OTHER; note = 2'-O-methylguanosine-3'-phosphate
  modified_base 11: mod_base = OTHER; note = 2'-O-methyladenosine-3'-phosphate
  modified_base 12: mod_base = OTHER; note = 2'-O-methylcytidine-3'-phosphate
  modified_base 13: mod_base = OTHER; note = 2'-O-methyladenosine-3'-phosphate
  modified_base 14: mod_base = OTHER; note = 2'-deoxy-2'-fluorouridine-3'-phosphate
  modified_base 15: mod_base = OTHER; note = 2'-O-methyladenosine-3'-phosphate
  modified_base 16: mod_base = OTHER; note = 2'-deoxy-2'-fluorocytidine-3'-phosphate
  modified_base 17: mod_base = OTHER; note = 2'-O-methyladenosine-3'-phosphate
  modified_base 18: mod_base = OTHER; note = 2'-O-methylcytidine-3'-phosphate
  modified_base 19: mod_base = OTHER; note = 2'-O-methyladenosine-3'-phosphate
  modified_base 20: mod_base = OTHER; note = 2'-O-methylcytidine-3'-phosphate
  modified_base 21: mod_base = OTHER; note = 2'-O-methyluridine-3'-phosphorothioate
  modified_base 22: mod_base = OTHER; note = 2'-O-methyluridine-3'-phosphorothioate
  modified_base 23: mod_base = OTHER; note = 2'-O-methylcytidine
tacacaaaagacatacacacttc

SEQ ID NO: 11928 - RNA, 23 nt, synthetic construct
  source 1..23: mol_type = other RNA
  modified_base 1: mod_base = OTHER; note = 2'-O-methyluridine-3'-phosphorothioate 5'-(E)-Vinylphosphonate
  modified_base 2: mod_base = OTHER; note = 2'-deoxy-2'-fluorocytidine-3'-phosphorothioate
  modified_base 3: mod_base = OTHER; note = 2'-O-methyladenosine-3'-phosphate
  modified_base 4: mod_base = OTHER; note = 2'-O-methylcytidine-3'-phosphate
  modified_base 5: mod_base = OTHER; note = 2'-O-methyladenosine-3'-phosphate
  modified_base 6: mod_base = OTHER; note = 2'-deoxy-2'-fluorocytidine-3'-phosphate
  modified_base 7: mod_base = OTHER; note = 2'-O-methyladenosine-3'-phosphate
  modified_base 8: mod_base = OTHER; note = 2'-O-methyladenosine-3'-phosphate
  modified_base 9: mod_base = OTHER; note = 2'-O-methyladenosine-3'-phosphate
  modified_base 10: mod_base = OTHER; note = 2'-O-methyladenosine-3'-phosphate
  modified_base 11: mod_base = OTHER; note = 2'-O-methylguanosine-3'-phosphate
  modified_base 12: mod_base = OTHER; note = 2'-O-methyladenosine-3'-phosphate
  modified_base 13: mod_base = OTHER; note = 2'-O-methylcytidine-3'-phosphate
  modified_base 14: mod_base = OTHER; note = 2'-deoxy-2'-fluoroadenosine-3'-phosphate
  modified_base 15: mod_base = OTHER; note = 2'-O-methyluridine-3'-phosphate
  modified_base 16: mod_base = OTHER; note = 2'-deoxy-2'-fluoroadenosine-3'-phosphate
  modified_base 17: mod_base = OTHER; note = 2'-O-methylcytidine-3'-phosphate
  modified_base 18: mod_base = OTHER; note = 2'-O-methyladenosine-3'-phosphate
  modified_base 19: mod_base = OTHER; note = 2'-O-methylcytidine-3'-phosphate
  modified_base 20: mod_base = OTHER; note = 2'-O-methyladenosine-3'-phosphate
  modified_base 21: mod_base = OTHER; note = 2'-O-methylcytidine-3'-phosphorothioate
  modified_base 22: mod_base = OTHER; note = 2'-O-methyluridine-3'-phosphorothioate
  modified_base 23: mod_base = OTHER; note = 2'-O-methyluridine
tcacacaaaagacatacacactt

SEQ ID NO: 11929 - RNA, 23 nt, synthetic construct
  source 1..23: mol_type = other RNA
  modified_base 1: mod_base = OTHER; note = 2'-O-methyluridine-3'-phosphorothioate 5'-(E)-Vinylphosphonate
  modified_base 2: mod_base = OTHER; note = 2'-deoxy-2'-fluorouridine-3'-phosphorothioate
  modified_base 3: mod_base = OTHER; note = 2'-O-methylcytidine-3'-phosphate
  modified_base 4: mod_base = OTHER; note = 2'-O-methyladenosine-3'-phosphate
  modified_base 5: mod_base = OTHER; note = 2'-O-methylcytidine-3'-phosphate
  modified_base 6: mod_base = OTHER; note = 2'-deoxy-2'-fluoroadenosine-3'-phosphate
  modified_base 7: mod_base = OTHER; note = 2'-O-methylcytidine-3'-phosphate
  modified_base 8: mod_base = OTHER; note = 2'-O-methyladenosine-3'-phosphate
  modified_base 9: mod_base = OTHER; note = 2'-O-methyladenosine-3'-phosphate
  modified_base 10: mod_base = OTHER; note = 2'-O-methyladenosine-3'-phosphate
  modified_base 11: mod_base = OTHER; note = 2'-O-methyladenosine-3'-phosphate
  modified_base 12: mod_base = OTHER; note = 2'-O-methylguanosine-3'-phosphate
  modified_base 13: mod_base = OTHER; note = 2'-O-methyladenosine-3'-phosphate
  modified_base 14: mod_base = OTHER; note = 2'-deoxy-2'-fluorocytidine-3'-phosphate
  modified_base 15: mod_base = OTHER; note = 2'-O-methyladenosine-3'-phosphate
  modified_base 16: mod_base = OTHER; note = 2'-deoxy-2'-fluorouridine-3'-phosphate
  modified_base 17: mod_base = OTHER; note = 2'-O-methyladenosine-3'-phosphate
  modified_base 18: mod_base = OTHER; note = 2'-O-methylcytidine-3'-phosphate
  modified_base 19: mod_base = OTHER; note = 2'-O-methyladenosine-3'-phosphate
  modified_base 20: mod_base = OTHER; note = 2'-O-methylcytidine-3'-phosphate
  modified_base 21: mod_base = OTHER; note = 2'-O-methyladenosine-3'-phosphorothioate
  modified_base 22: mod_base = OTHER; note = 2'-O-methylcytidine-3'-phosphorothioate
  modified_base 23: mod_base = OTHER; note = 2'-O-methyluridine
ttcacacaaaagacatacacact

SEQ ID NO: 11930 - RNA, 23 nt, synthetic construct
  source 1..23: mol_type = other RNA
  modified_base 1: mod_base = OTHER; note = 2'-O-methyluridine-3'-phosphorothioate 5'-(E)-Vinylphosphonate
  modified_base 2: mod_base = OTHER; note = 2'-deoxy-2'-fluoroadenosine-3'-phosphorothioate
  modified_base 3: mod_base = OTHER; note = 2'-O-methyluridine-3'-phosphate
  modified_base 4: mod_base = OTHER; note = 2'-O-methylcytidine-3'-phosphate
  modified_base 5: mod_base = OTHER; note = 2'-O-methyladenosine-3'-phosphate
  modified_base 6: mod_base = OTHER; note = 2'-deoxy-2'-fluorocytidine-3'-phosphate
  modified_base 7: mod_base = OTHER; note = 2'-O-methyladenosine-3'-phosphate
  modified_base 8: mod_base = OTHER; note = 2'-O-methylcytidine-3'-phosphate
  modified_base 9: mod_base = OTHER; note = 2'-O-methyladenosine-3'-phosphate
  modified_base 10: mod_base = OTHER; note = 2'-O-methyladenosine-3'-phosphate
  modified_base 11: mod_base = OTHER; note = 2'-O-methyladenosine-3'-phosphate
  modified_base 12: mod_base = OTHER; note = 2'-O-methyladenosine-3'-phosphate
  modified_base 13: mod_base = OTHER; note = 2'-O-methylguanosine-3'-phosphate
  modified_base 14: mod_base = OTHER; note = 2'-deoxy-2'-fluoroadenosine-3'-phosphate
  modified_base 15: mod_base = OTHER; note = 2'-O-methylcytidine-3'-phosphate
  modified_base 16: mod_base = OTHER; note = 2'-deoxy-2'-fluoroadenosine-3'-phosphate
  modified_base 17: mod_base = OTHER; note = 2'-O-methyluridine-3'-phosphate
  modified_base 18: mod_base = OTHER; note = 2'-O-methyladenosine-3'-phosphate
  modified_base 19: mod_base = OTHER; note = 2'-O-methylcytidine-3'-phosphate
  modified_base 20: mod_base = OTHER; note = 2'-O-methyladenosine-3'-phosphate
  modified_base 21: mod_base = OTHER; note = 2'-O-methylcytidine-3'-phosphorothioate
  modified_base 22: mod_base = OTHER; note = 2'-O-methyladenosine-3'-phosphorothioate
  modified_base 23: mod_base = OTHER; note = 2'-O-methylcytidine
tatcacacaaaagacatacacac

SEQ ID NO: 11931 - RNA, 23 nt, synthetic construct
  source 1..23: mol_type = other RNA
  modified_base 1: mod_base = OTHER; note = 2'-O-methyluridine-3'-phosphorothioate 5'-(E)-Vinylphosphonate
  modified_base 2: mod_base = OTHER; note = 2'-deoxy-2'-fluoroadenosine-3'-phosphorothioate
  modified_base 3: mod_base = OTHER; note = 2'-O-methyladenosine-3'-phosphate
  modified_base 4: mod_base = OTHER; note = 2'-O-methyluridine-3'-phosphate
  modified_base 5: mod_base = OTHER; note = 2'-O-methylcytidine-3'-phosphate
  modified_base 6: mod_base = OTHER; note = 2'-deoxy-2'-fluoroadenosine-3'-phosphate
  modified_base 7: mod_base = OTHER; note = 2'-O-methylcytidine-3'-phosphate
  modified_base 8: mod_base = OTHER; note = 2'-O-methyladenosine-3'-phosphate
  modified_base 9: mod_base = OTHER; note = 2'-O-methylcytidine-3'-phosphate
  modified_base 10: mod_base = OTHER; note = 2'-O-methyladenosine-3'-phosphate
  modified_base 11: mod_base = OTHER; note = 2'-O-methyladenosine-3'-phosphate
  modified_base 12: mod_base = OTHER; note = 2'-O-methyladenosine-3'-phosphate
  modified_base 13: mod_base = OTHER; note = 2'-O-methyladenosine-3'-phosphate
  modified_base 14: mod_base = OTHER; note = 2'-deoxy-2'-fluoroguanosine-3'-phosphate
  modified_base 15: mod_base = OTHER; note = 2'-O-methyladenosine-3'-phosphate
  modified_base 16: mod_base = OTHER; note = 2'-deoxy-2'-fluorocytidine-3'-phosphate
  modified_base 17: mod_base = OTHER; note = 2'-O-methyladenosine-3'-phosphate
  modified_base 18: mod_base = OTHER; note = 2'-O-methyluridine-3'-phosphate
  modified_base 19: mod_base = OTHER; note = 2'-O-methyladenosine-3'-phosphate
  modified_base 20: mod_base = OTHER; note = 2'-O-methylcytidine-3'-phosphate
  modified_base 21: mod_base = OTHER; note = 2'-O-methyladenosine-3'-phosphorothioate
  modified_base 22: mod_base = OTHER; note = 2'-O-methylcytidine-3'-phosphorothioate
  modified_base 23: mod_base = OTHER; note = 2'-O-methyladenosine
taatcacacaaaagacatacaca

SEQ ID NO: 11932 - RNA, 23 nt, synthetic construct
  source 1..23: mol_type = other RNA
  modified_base 1: mod_base = OTHER; note = 2'-O-methyluridine-3'-phosphorothioate 5'-(E)-Vinylphosphonate
  modified_base 2: mod_base = OTHER; note = 2'-deoxy-2'-fluoroguanosine-3'-phosphorothioate
  modified_base 3: mod_base = OTHER; note = 2'-O-methyladenosine-3'-phosphate
  modified_base 4: mod_base = OTHER; note = 2'-O-methyladenosine-3'-phosphate
  modified_base 5: mod_base = OTHER; note = 2'-O-methyluridine-3'-phosphate
  modified_base 6: mod_base = OTHER; note = 2'-deoxy-2'-fluorocytidine-3'-phosphate
  modified_base 7: mod_base = OTHER; note = 2'-O-methyladenosine-3'-phosphate
  modified_base 8: mod_base = OTHER; note = 2'-O-methylcytidine-3'-phosphate
  modified_base 9: mod_base = OTHER; note = 2'-O-methyladenosine-3'-phosphate
  modified_base 10: mod_base = OTHER; note = 2'-O-methylcytidine-3'-phosphate
  modified_base 11: mod_base = OTHER; note = 2'-O-methyladenosine-3'-phosphate
  modified_base 12: mod_base = OTHER; note = 2'-O-methyladenosine-3'-phosphate
  modified_base 13: mod_base = OTHER; note = 2'-O-methyladenosine-3'-phosphate
  modified_base 14: mod_base = OTHER; note = 2'-deoxy-2'-fluoroadenosine-3'-phosphate
  modified_base 15: mod_base = OTHER; note = 2'-O-methylguanosine-3'-phosphate
  modified_base 16: mod_base = OTHER; note = 2'-deoxy-2'-fluoroadenosine-3'-phosphate
  modified_base 17: mod_base = OTHER; note = 2'-O-methylcytidine-3'-phosphate
  modified_base 18: mod_base = OTHER; note = 2'-O-methyladenosine-3'-phosphate
  modified_base 19: mod_base = OTHER; note = 2'-O-methyluridine-3'-phosphate
  modified_base 20: mod_base = OTHER; note = 2'-O-methyladenosine-3'-phosphate
  modified_base 21: mod_base = OTHER; note = 2'-O-methylcytidine-3'-phosphorothioate
  modified_base 22: mod_base = OTHER; note = 2'-O-methyladenosine-3'-phosphorothioate
  modified_base 23: mod_base = OTHER; note = 2'-O-methylcytidine
tgaatcacacaaaagacatacac

SEQ ID NO: 11933 - RNA, 23 nt, synthetic construct
  source 1..23: mol_type = other RNA
  modified_base 1: mod_base = OTHER; note = 2'-O-methyluridine-3'-phosphorothioate 5'-(E)-Vinylphosphonate
  modified_base 2: mod_base = OTHER; note = 2'-deoxy-2'-fluoroadenosine-3'-phosphorothioate
  modified_base 3: mod_base = OTHER; note = 2'-O-methylguanosine-3'-phosphate
  modified_base 4: mod_base = OTHER; note = 2'-O-methyladenosine-3'-phosphate
  modified_base 5: mod_base = OTHER; note = 2'-O-methyladenosine-3'-phosphate
  modified_base 6: mod_base = OTHER; note = 2'-deoxy-2'-fluorouridine-3'-phosphate
  modified_base 7: mod_base = OTHER; note = 2'-O-methylcytidine-3'-phosphate
  modified_base 8: mod_base = OTHER; note = 2'-O-methyladenosine-3'-phosphate
  modified_base 9: mod_base = OTHER; note = 2'-O-methylcytidine-3'-phosphate
  modified_base 10: mod_base = OTHER; note = 2'-O-methyladenosine-3'-phosphate
  modified_base 11: mod_base = OTHER; note = 2'-O-methylcytidine-3'-phosphate
  modified_base 12: mod_base = OTHER; note = 2'-O-methyladenosine-3'-phosphate
  modified_base 13: mod_base = OTHER; note = 2'-O-methyladenosine-3'-phosphate
  modified_base 14: mod_base = OTHER; note = 2'-deoxy-2'-fluoroadenosine-3'-phosphate
  modified_base 15: mod_base = OTHER; note = 2'-O-methyladenosine-3'-phosphate
  modified_base 16: mod_base = OTHER; note = 2'-deoxy-2'-fluoroguanosine-3'-phosphate
  modified_base 17: mod_base = OTHER; note = 2'-O-methyladenosine-3'-phosphate
  modified_base 18: mod_base = OTHER; note = 2'-O-methylcytidine-3'-phosphate
  modified_base 19: mod_base = OTHER; note = 2'-O-methyladenosine-3'-phosphate
  modified_base 20: mod_base = OTHER; note = 2'-O-methyluridine-3'-phosphate
  modified_base 21: mod_base = OTHER; note = 2'-O-methyladenosine-3'-phosphorothioate
  modified_base 22: mod_base = OTHER; note = 2'-O-methylcytidine-3'-phosphorothioate
  modified_base 23: mod_base = OTHER; note = 2'-O-methyladenosine
tagaatcacacaaaagacataca

SEQ ID NO: 11934 - RNA, 23 nt, synthetic construct
  source 1..23: mol_type = other RNA
  modified_base 1: mod_base = OTHER; note = 2'-O-methyluridine-3'-phosphorothioate 5'-(E)-Vinylphosphonate
  modified_base 2: mod_base = OTHER; note = 2'-deoxy-2'-fluoroadenosine-3'-phosphorothioate
  modified_base 3: mod_base = OTHER; note = 2'-O-methyladenosine-3'-phosphate
  modified_base 4: mod_base = OTHER; note = 2'-O-methylguanosine-3'-phosphate
  modified_base 5: mod_base = OTHER; note = 2'-O-methyladenosine-3'-phosphate
  modified_base 6: mod_base = OTHER; note = 2'-deoxy-2'-fluoroadenosine-3'-phosphate
  modified_base 7: mod_base = OTHER; note = 2'-O-methyluridine-3'-phosphate
  modified_base 8: mod_base = OTHER; note = 2'-O-methylcytidine-3'-phosphate
  modified_base 9: mod_base = OTHER; note = 2'-O-methyladenosine-3'-phosphate
  modified_base 10: mod_base = OTHER; note = 2'-O-methylcytidine-3'-phosphate
  modified_base 11: mod_base = OTHER; note = 2'-O-methyladenosine-3'-phosphate
  modified_base 12: mod_base = OTHER; note = 2'-O-methylcytidine-3'-phosphate
  modified_base 13: mod_base = OTHER; note = 2'-O-methyladenosine-3'-phosphate
  modified_base 14: mod_base = OTHER; note = 2'-deoxy-2'-fluoroadenosine-3'-phosphate
  modified_base 15: mod_base = OTHER; note = 2'-O-methyladenosine-3'-phosphate
  modified_base 16: mod_base = OTHER; note = 2'-deoxy-2'-fluoroadenosine-3'-phosphate
  modified_base 17: mod_base = OTHER; note = 2'-O-methylguanosine-3'-phosphate
  modified_base 18: mod_base = OTHER; note = 2'-O-methyladenosine-3'-phosphate
  modified_base 19: mod_base = OTHER; note = 2'-O-methylcytidine-3'-phosphate
  modified_base 20: mod_base = OTHER; note = 2'-O-methyladenosine-3'-phosphate
  modified_base 21: mod_base = OTHER; note = 2'-O-methyluridine-3'-phosphorothioate
  modified_base 22: mod_base = OTHER; note = 2'-O-methyladenosine-3'-phosphorothioate
  modified_base 23: mod_base = OTHER; note = 2'-O-methylcytidine
taagaatcacacaaaagacatac

SEQ ID NO: 11935 - RNA, 23 nt, synthetic construct
  source 1..23: mol_type = other RNA
  modified_base 1: mod_base = OTHER; note = 2'-O-methyluridine-3'-phosphorothioate 5'-(E)-Vinylphosphonate
  modified_base 2: mod_base = OTHER; note = 2'-deoxy-2'-fluorouridine-3'-phosphorothioate
  modified_base 3: mod_base = OTHER; note = 2'-O-methylguanosine-3'-phosphate
  modified_base 4: mod_base = OTHER; note = 2'-O-methyladenosine-3'-phosphate
  modified_base 5: mod_base = OTHER; note = 2'-O-methyladenosine-3'-phosphate
  modified_base 6: mod_base = OTHER; note = 2'-deoxy-2'-fluoroguanosine-3'-phosphate
  modified_base 7: mod_base = OTHER; note = 2'-O-methyladenosine-3'-phosphate
  modified_base 8: mod_base = OTHER; note = 2'-O-methyladenosine-3'-phosphate
  modified_base 9: mod_base = OTHER; note = 2'-O-methyluridine-3'-phosphate
  modified_base 10: mod_base = OTHER; note = 2'-O-methylcytidine-3'-phosphate
  modified_base 11: mod_base = OTHER; note = 2'-O-methyladenosine-3'-phosphate
  modified_base 12: mod_base = OTHER; note = 2'-O-methylcytidine-3'-phosphate
  modified_base 13: mod_base = OTHER; note = 2'-O-methyladenosine-3'-phosphate
  modified_base 14: mod_base = OTHER; note = 2'-deoxy-2'-fluorocytidine-3'-phosphate
  modified_base 15: mod_base = OTHER; note = 2'-O-methyladenosine-3'-phosphate
  modified_base 16: mod_base = OTHER; note = 2'-deoxy-2'-fluoroadenosine-3'-phosphate
  modified_base 17: mod_base = OTHER; note = 2'-O-methyladenosine-3'-phosphate
  modified_base 18: mod_base = OTHER; note = 2'-O-methyladenosine-3'-phosphate
  modified_base 19: mod_base = OTHER; note = 2'-O-methylguanosine-3'-phosphate
  modified_base 20: mod_base = OTHER; note = 2'-O-methyladenosine-3'-phosphate
  modified_base 21: mod_base = OTHER; note = 2'-O-methylcytidine-3'-phosphorothioate
  modified_base 22: mod_base = OTHER; note = 2'-O-methyladenosine-3'-phosphorothioate
  modified_base 23: mod_base = OTHER; note = 2'-O-methyluridine
ttgaagaatcacacaaaagacat

SEQ ID NO: 11936 - RNA, 23 nt, synthetic construct
  source 1..23: mol_type = other RNA
  modified_base 1: mod_base = OTHER; note = 2'-O-methyluridine-3'-phosphorothioate 5'-(E)-Vinylphosphonate
  modified_base 2: mod_base = OTHER; note = 2'-deoxy-2'-fluorouridine-3'-phosphorothioate
  modified_base 3: mod_base = OTHER; note = 2'-O-methyluridine-3'-phosphate
  modified_base 4: mod_base = OTHER; note = 2'-O-methylguanosine-3'-phosphate
  modified_base 5: mod_base = OTHER; note = 2'-O-methyladenosine-3'-phosphate
  modified_base 6: mod_base = OTHER; note = 2'-deoxy-2'-fluoroadenosine-3'-phosphate
  modified_base 7: mod_base = OTHER; note = 2'-O-methylguanosine-3'-phosphate
  modified_base 8: mod_base = OTHER; note = 2'-O-methyladenosine-3'-phosphate
  modified_base 9: mod_base = OTHER; note = 2'-O-methyladenosine-3'-phosphate
  modified_base 10: mod_base = OTHER; note = 2'-O-methyluridine-3'-phosphate
  modified_base 11: mod_base = OTHER; note = 2'-O-methylcytidine-3'-phosphate
  modified_base 12: mod_base = OTHER; note = 2'-O-methyladenosine-3'-phosphate
  modified_base 13: mod_base = OTHER; note = 2'-O-methylcytidine-3'-phosphate
  modified_base 14: mod_base = OTHER; note = 2'-deoxy-2'-fluoroadenosine-3'-phosphate
  modified_base 15: mod_base = OTHER; note = 2'-O-methylcytidine-3'-phosphate
  modified_base 16: mod_base = OTHER; note = 2'-deoxy-2'-fluoroadenosine-3'-phosphate
  modified_base 17: mod_base = OTHER; note = 2'-O-methyladenosine-3'-phosphate
  modified_base 18: mod_base = OTHER; note = 2'-O-methyladenosine-3'-phosphate
  modified_base 19: mod_base = OTHER; note = 2'-O-methyladenosine-3'-phosphate
  modified_base 20: mod_base = OTHER; note = 2'-O-methylguanosine-3'-phosphate
  modified_base 21: mod_base = OTHER; note = 2'-O-methyladenosine-3'-phosphorothioate
  modified_base 22: mod_base = OTHER; note = 2'-O-methylcytidine-3'-phosphorothioate
  modified_base 23: mod_base = OTHER; note = 2'-O-methyladenosine
tttgaagaatcacacaaaagaca

SEQ ID NO: 11937 - RNA, 23 nt, synthetic construct
  source 1..23: mol_type = other RNA
  modified_base 1: mod_base = OTHER; note = 2'-O-methyluridine-3'-phosphorothioate 5'-(E)-Vinylphosphonate
  modified_base 2: mod_base = OTHER; note = 2'-deoxy-2'-fluorouridine-3'-phosphorothioate
  modified_base 3: mod_base = OTHER; note = 2'-O-methyluridine-3'-phosphate
  modified_base 4: mod_base = OTHER; note = 2'-O-methyluridine-3'-phosphate
  modified_base 5: mod_base = OTHER; note = 2'-O-methylguanosine-3'-phosphate
  modified_base 6: mod_base = OTHER; note = 2'-deoxy-2'-fluoroadenosine-3'-phosphate
  modified_base 7: mod_base = OTHER; note = 2'-O-methyladenosine-3'-phosphate
  modified_base 8: mod_base = OTHER; note = 2'-O-methylguanosine-3'-phosphate
  modified_base 9: mod_base = OTHER; note = 2'-O-methyladenosine-3'-phosphate
  modified_base 10: mod_base = OTHER; note = 2'-O-methyladenosine-3'-phosphate
  modified_base 11: mod_base = OTHER; note = 2'-O-methyluridine-3'-phosphate
  modified_base 12: mod_base = OTHER; note = 2'-O-methylcytidine-3'-phosphate
  modified_base 13: mod_base = OTHER; note = 2'-O-methyladenosine-3'-phosphate
  modified_base 14: mod_base = OTHER; note = 2'-deoxy-2'-fluorocytidine-3'-phosphate
  modified_base 15: mod_base = OTHER; note = 2'-O-methyladenosine-3'-phosphate
  modified_base 16: mod_base = OTHER; note = 2'-deoxy-2'-fluorocytidine-3'-phosphate
  modified_base 17: mod_base = OTHER; note = 2'-O-methyladenosine-3'-phosphate
  modified_base 18: mod_base = OTHER; note = 2'-O-methyladenosine-3'-phosphate
  modified_base 19: mod_base = OTHER; note = 2'-O-methyladenosine-3'-phosphate
  modified_base 20: mod_base = OTHER; note = 2'-O-methyladenosine-3'-phosphate
  modified_base 21: mod_base = OTHER; note = 2'-O-methylguanosine-3'-phosphorothioate
  modified_base 22: mod_base = OTHER; note = 2'-O-methyladenosine-3'-phosphorothioate
  modified_base 23: mod_base = OTHER; note = 2'-O-methylcytidine
ttttgaagaatcacacaaaagac

SEQ ID NO: 11938 - RNA, 23 nt, synthetic construct
  source 1..23: mol_type = other RNA
  modified_base 1: mod_base = OTHER; note = 2'-O-methyluridine-3'-phosphorothioate 5'-(E)-Vinylphosphonate
  modified_base 2: mod_base = OTHER; note = 2'-deoxy-2'-fluoroguanosine-3'-phosphorothioate
  modified_base 3: mod_base = OTHER; note = 2'-O-methyluridine-3'-phosphate
  modified_base 4: mod_base = OTHER; note = 2'-O-methyluridine-3'-phosphate
  modified_base 5: mod_base = OTHER; note = 2'-O-methyluridine-3'-phosphate
  modified_base 6: mod_base = OTHER; note = 2'-deoxy-2'-fluoroguanosine-3'-phosphate
  modified_base 7: mod_base = OTHER; note = 2'-O-methyladenosine-3'-phosphate
  modified_base 8: mod_base = OTHER; note = 2'-O-methyladenosine-3'-phosphate
  modified_base 9: mod_base = OTHER; note = 2'-O-methylguanosine-3'-phosphate
  modified_base 10: mod_base = OTHER; note = 2'-O-methyladenosine-3'-phosphate
  modified_base 11: mod_base = OTHER; note = 2'-O-methyladenosine-3'-phosphate
  modified_base 12: mod_base = OTHER; note = 2'-O-methyluridine-3'-phosphate
  modified_base 13: mod_base = OTHER; note = 2'-O-methylcytidine-3'-phosphate
  modified_base 14: mod_base = OTHER; note = 2'-deoxy-2'-fluoroadenosine-3'-phosphate
  modified_base 15: mod_base = OTHER; note = 2'-O-methylcytidine-3'-phosphate
  modified_base 16: mod_base = OTHER; note = 2'-deoxy-2'-fluoroadenosine-3'-phosphate
  modified_base 17: mod_base = OTHER; note = 2'-O-methylcytidine-3'-phosphate
  modified_base 18: mod_base = OTHER; note = 2'-O-methyladenosine-3'-phosphate
  modified_base 19: mod_base = OTHER; note = 2'-O-methyladenosine-3'-phosphate
  modified_base 20: mod_base = OTHER; note = 2'-O-methyladenosine-3'-phosphate
  modified_base 21: mod_base = OTHER; note = 2'-O-methyladenosine-3'-phosphorothioate
  modified_base 22: mod_base = OTHER; note = 2'-O-methylguanosine-3'-phosphorothioate
  modified_base 23: mod_base = OTHER; note = 2'-O-methyladenosine
tgtttgaagaatcacacaaaaga

SEQ ID NO: 11939 - RNA, 23 nt, synthetic construct
  source 1..23: mol_type = other RNA
  modified_base 1: mod_base = OTHER; note = 2'-O-methyluridine-3'-phosphorothioate 5'-(E)-Vinylphosphonate
  modified_base 2: mod_base = OTHER; note = 2'-deoxy-2'-fluoroadenosine-3'-phosphorothioate
  modified_base 3: mod_base = OTHER; note = 2'-O-methylguanosine-3'-phosphate
  modified_base 4: mod_base = OTHER; note = 2'-O-methyluridine-3'-phosphate
  modified_base 5: mod_base = OTHER; note = 2'-O-methyluridine-3'-phosphate
  modified_base 6: mod_base = OTHER; note = 2'-deoxy-2'-fluorouridine-3'-phosphate
  modified_base 7: mod_base = OTHER; note = 2'-O-methylguanosine-3'-phosphate
  modified_base 8: mod_base = OTHER; note = 2'-O-methyladenosine-3'-phosphate
  modified_base 9: mod_base = OTHER; note = 2'-O-methyladenosine-3'-phosphate
  modified_base 10: mod_base = OTHER; note = 2'-O-methylguanosine-3'-phosphate
  modified_base 11: mod_base = OTHER; note = 2'-O-methyladenosine-3'-phosphate
  modified_base 12: mod_base = OTHER; note = 2'-O-methyladenosine-3'-phosphate
  modified_base 13: mod_base = OTHER; note = 2'-O-methyluridine-3'-phosphate
  modified_base 14: mod_base = OTHER; note = 2'-deoxy-2'-fluorocytidine-3'-phosphate
  modified_base 15: mod_base = OTHER; note = 2'-O-methyladenosine-3'-phosphate
  modified_base 16: mod_base = OTHER; note = 2'-deoxy-2'-fluorocytidine-3'-phosphate
  modified_base 17: mod_base = OTHER; note = 2'-O-methyladenosine-3'-phosphate
  modified_base 18: mod_base = OTHER; note = 2'-O-methylcytidine-3'-phosphate
  modified_base 19: mod_base = OTHER; note = 2'-O-methyladenosine-3'-phosphate
  modified_base 20: mod_base = OTHER; note = 2'-O-methyladenosine-3'-phosphate
  modified_base 21: mod_base = OTHER; note = 2'-O-methyladenosine-3'-phosphorothioate
  modified_base 22: mod_base = OTHER; note = 2'-O-methyladenosine-3'-phosphorothioate
  modified_base 23: mod_base = OTHER; note = 2'-O-methylguanosine
tagtttgaagaatcacacaaaag

SEQ ID NO: 11940 - RNA, 23 nt, synthetic construct
  source 1..23: mol_type = other RNA
  modified_base 1: mod_base = OTHER; note = 2'-O-methyluridine-3'-phosphorothioate 5'-(E)-Vinylphosphonate
  modified_base 2: mod_base = OTHER; note = 2'-deoxy-2'-fluoroadenosine-3'-phosphorothioate
  modified_base 3: mod_base = OTHER; note = 2'-O-methyladenosine-3'-phosphate
  modified_base 4: mod_base = OTHER; note = 2'-O-methylcytidine-3'-phosphate
  modified_base 5: mod_base = OTHER; note = 2'-O-methyladenosine-3'-phosphate
  modified_base 6: mod_base = OTHER; note = 2'-deoxy-2'-fluorouridine-3'-phosphate
  modified_base 7: mod_base = OTHER; note = 2'-O-methylguanosine-3'-phosphate
  modified_base 8: mod_base = OTHER; note = 2'-O-methylcytidine-3'-phosphate
  modified_base 9: mod_base = OTHER; note = 2'-O-methyluridine-3'-phosphate
  modified_base 10: mod_base = OTHER; note = 2'-O-methylcytidine-3'-phosphate
  modified_base 11: mod_base = OTHER; note = 2'-O-methylcytidine-3'-phosphate
  modified_base 12: mod_base = OTHER; note = 2'-O-methyluridine-3'-phosphate
  modified_base 13: mod_base = OTHER; note = 2'-O-methyluridine-3'-phosphate
  modified_base 14: mod_base = OTHER; note = 2'-deoxy-2'-fluorocytidine-3'-phosphate
  modified_base 15: mod_base = OTHER; note = 2'-O-methyluridine-3'-phosphate
  modified_base 16: mod_base = OTHER; note = 2'-deoxy-2'-fluoroguanosine-3'-phosphate
  modified_base 17: mod_base = OTHER; note = 2'-O-methyluridine-3'-phosphate
  modified_base 18: mod_base = OTHER; note = 2'-O-methyluridine-3'-phosphate
  modified_base 19: mod_base = OTHER; note = 2'-O-methyluridine-3'-phosphate
  modified_base 20: mod_base = OTHER; note = 2'-O-methylguanosine-3'-phosphate
  modified_base 21: mod_base = OTHER; note = 2'-O-methylguanosine-3'-phosphorothioate
  modified_base 22: mod_base = OTHER; note = 2'-O-methylcytidine-3'-phosphorothioate
  modified_base 23: mod_base = OTHER; note = 2'-O-methyladenosine
taacatgctccttctgtttggca

SEQ ID NO: 11941 - RNA, 23 nt, synthetic construct
  source 1..23: mol_type = other RNA
  modified_base 1: mod_base = OTHER; note = 2'-O-methyluridine-3'-phosphorothioate 5'-(E)-Vinylphosphonate
  modified_base 2: mod_base = OTHER; note = 2'-deoxy-2'-fluorocytidine-3'-phosphorothioate
  modified_base 3: mod_base = OTHER; note = 2'-O-methyladenosine-3'-phosphate
  modified_base 4: mod_base = OTHER; note = 2'-O-methyladenosine-3'-phosphate
  modified_base 5: mod_base = OTHER; note = 2'-O-methylcytidine-3'-phosphate
  modified_base 6: mod_base = OTHER; note = 2'-deoxy-2'-fluoroadenosine-3'-phosphate
  modified_base 7: mod_base = OTHER; note = 2'-O-methyluridine-3'-phosphate
  modified_base 8: mod_base = OTHER; note = 2'-O-methylguanosine-3'-phosphate
  modified_base 9: mod_base = OTHER; note = 2'-O-methylcytidine-3'-phosphate
  modified_base 10: mod_base = OTHER; note = 2'-O-methyluridine-3'-phosphate
  modified_base 11: mod_base = OTHER; note = 2'-O-methylcytidine-3'-phosphate
  modified_base 12: mod_base = OTHER; note = 2'-O-methylcytidine-3'-phosphate
  modified_base 13: mod_base = OTHER; note = 2'-O-methyluridine-3'-phosphate
  modified_base 14: mod_base = OTHER; note = 2'-deoxy-2'-fluorouridine-3'-phosphate
  modified_base 15: mod_base = OTHER; note = 2'-O-methylcytidine-3'-phosphate
  modified_base 16: mod_base = OTHER; note = 2'-deoxy-2'-fluorouridine-3'-phosphate
  modified_base 17: mod_base = OTHER; note = 2'-O-methylguanosine-3'-phosphate
  modified_base 18: mod_base = OTHER; note = 2'-O-methyluridine-3'-phosphate
  modified_base 19: mod_base = OTHER; note = 2'-O-methyluridine-3'-phosphate
  modified_base 20: mod_base = OTHER; note = 2'-O-methyluridine-3'-phosphate
  modified_base 21: mod_base = OTHER; note = 2'-O-methylguanosine-3'-phosphorothioate
  modified_base 22: mod_base = OTHER; note = 2'-O-methylguanosine-3'-phosphorothioate
  modified_base 23: mod_base = OTHER; note = 2'-O-methylcytidine
tcaacatgctccttctgtttggc

SEQ ID NO: 11942 - RNA, 23 nt, synthetic construct
  source 1..23: mol_type = other RNA
  modified_base 1: mod_base = OTHER; note = 2'-O-methyluridine-3'-phosphorothioate 5'-(E)-Vinylphosphonate
  modified_base 2: mod_base = OTHER; note = 2'-deoxy-2'-fluorouridine-3'-phosphorothioate
  modified_base 3: mod_base = OTHER; note = 2'-O-methyluridine-3'-phosphate
  modified_base 4: mod_base = OTHER; note = 2'-O-methyladenosine-3'-phosphate
  modified_base 5: mod_base = OTHER; note = 2'-O-methylguanosine-3'-phosphate
  modified_base 6: mod_base = OTHER; note = 2'-deoxy-2'-fluorocytidine-3'-phosphate
  modified_base 7: mod_base = OTHER; note = 2'-O-methyladenosine-3'-phosphate
  modified_base 8: mod_base = OTHER; note = 2'-O-methyluridine-3'-phosphate
  modified_base 9: mod_base = OTHER; note = 2'-O-methylguanosine-3'-phosphate
  modified_base 10: mod_base = OTHER; note = 2'-O-methyladenosine-3'-phosphate
  modified_base 11: mod_base = OTHER; note = 2'-O-methylcytidine-3'-phosphate
  modified_base 12: mod_base = OTHER; note = 2'-O-methyluridine-3'-phosphate
  modified_base 13: mod_base = OTHER; note = 2'-O-methylguanosine-3'-phosphate
  modified_base 14: mod_base = OTHER; note = 2'-deoxy-2'-fluoroadenosine-3'-phosphate
  modified_base 15: mod_base = OTHER; note = 2'-O-methyluridine-3'-phosphate
  modified_base 16: mod_base = OTHER; note = 2'-deoxy-2'-fluoroguanosine-3'-phosphate
  modified_base 17: mod_base = OTHER; note = 2'-O-methylcytidine-3'-phosphate
  modified_base 18: mod_base = OTHER; note = 2'-O-methylcytidine-3'-phosphate
  modified_base 19: mod_base = OTHER; note = 2'-O-methylcytidine-3'-phosphate
  modified_base 20: mod_base = OTHER; note = 2'-O-methyladenosine-3'-phosphate
  modified_base 21: mod_base = OTHER; note = 2'-O-methyladenosine-3'-phosphorothioate
  modified_base 22: mod_base = OTHER; note = 2'-O-methylcytidine-3'-phosphorothioate
  modified_base 23: mod_base = OTHER; note = 2'-O-methyladenosine
tttagcatgactgatgcccaaca

SEQ ID NO: 11943 - RNA, 23 nt, synthetic construct
  source 1..23: mol_type = other RNA
  modified_base 1: mod_base = OTHER; note = 2'-O-methyluridine-3'-phosphorothioate 5'-(E)-Vinylphosphonate
  modified_base 2: mod_base = OTHER; note = 2'-deoxy-2'-fluorouridine-3'-phosphorothioate
  modified_base 3: mod_base = OTHER; note = 2'-O-methylguanosine-3'-phosphate
  modified_base 4: mod_base = OTHER; note = 2'-O-methylguanosine-3'-phosphate
  modified_base 5: mod_base = OTHER; note = 2'-O-methyluridine-3'-phosphate
  modified_base 6: mod_base = OTHER; note = 2'-deoxy-2'-fluorouridine-3'-phosphate
  modified_base 7: mod_base = OTHER; note = 2'-O-methyladenosine-3'-phosphate
  modified_base 8: mod_base = OTHER; note = 2'-O-methylguanosine-3'-phosphate
  modified_base 9: mod_base = OTHER; note = 2'-O-methylcytidine-3'-phosphate
  modified_base 10: mod_base = OTHER; note = 2'-O-methyladenosine-3'-phosphate
  modified_base 11: mod_base = OTHER; note = 2'-O-methyluridine-3'-phosphate
  modified_base 12: mod_base = OTHER; note = 2'-O-methylguanosine-3'-phosphate
  modified_base 13: mod_base = OTHER; note = 2'-O-methyladenosine-3'-phosphate
  modified_base 14: mod_base = OTHER; note = 2'-deoxy-2'-fluorocytidine-3'-phosphate
  modified_base 15: mod_base = OTHER; note = 2'-O-methyluridine-3'-phosphate
  modified_base 16: mod_base = OTHER; note = 2'-deoxy-2'-fluoroguanosine-3'-phosphate
  modified_base 17: mod_base = OTHER; note = 2'-O-methyladenosine-3'-phosphate
  modified_base 18: mod_base = OTHER; note = 2'-O-methyluridine-3'-phosphate
  modified_base 19: mod_base = OTHER; note = 2'-O-methylguanosine-3'-phosphate
  modified_base 20: mod_base = OTHER; note = 2'-O-methylcytidine-3'-phosphate
  modified_base 21: mod_base = OTHER; note = 2'-O-methylcytidine-3'-phosphorothioate
  modified_base 22: mod_base = OTHER; note = 2'-O-methylcytidine-3'-phosphorothioate
  modified_base 23: mod_base = OTHER; note = 2'-O-methyladenosine
ttggttagcatgactgatgccca

SEQ ID NO: 11944 - RNA, 23 nt, synthetic construct
  source 1..23: mol_type = other RNA
  modified_base 1: mod_base = OTHER; note = 2'-O-methyluridine-3'-phosphorothioate 5'-(E)-Vinylphosphonate
  modified_base 2: mod_base = OTHER; note = 2'-deoxy-2'-fluorocytidine-3'-phosphorothioate
  modified_base 3: mod_base = OTHER; note = 2'-O-methyladenosine-3'-phosphate
  modified_base 4: mod_base = OTHER; note = 2'-O-methyluridine-3'-phosphate
  modified_base 5: mod_base = OTHER; note = 2'-O-methyluridine-3'-phosphate
  modified_base 6: mod_base = OTHER; note = 2'-deoxy-2'-fluoroguanosine-3'-phosphate
  modified_base 7: mod_base = OTHER; note = 2'-O-methylguanosine-3'-phosphate
  modified_base 8: mod_base = OTHER; note = 2'-O-methyluridine-3'-phosphate
  modified_base 9: mod_base = OTHER; note = 2'-O-methyluridine-3'-phosphate
  modified_base 10: mod_base = OTHER; note = 2'-O-methyladenosine-3'-phosphate
  modified_base 11: mod_base = OTHER; note = 2'-O-methylguanosine-3'-phosphate
  modified_base 12: mod_base = OTHER; note = 2'-O-methylcytidine-3'-phosphate
  modified_base 13: mod_base = OTHER; note = 2'-O-methyladenosine-3'-phosphate
  modified_base 14: mod_base = OTHER; note = 2'-deoxy-2'-fluorouridine-3'-phosphate
  modified_base 15: mod_base = OTHER; note = 2'-O-methylguanosine-3'-phosphate
  modified_base 16: mod_base = OTHER; note = 2'-deoxy-2'-fluoroadenosine-3'-phosphate
  modified_base 17: mod_base = OTHER; note = 2'-O-methylcytidine-3'-phosphate
  modified_base 18: mod_base = OTHER; note = 2'-O-methyluridine-3'-phosphate
  modified_base 19: mod_base = OTHER; note = 2'-O-methylguanosine-3'-phosphate
  modified_base 20: mod_base = OTHER; note = 2'-O-methyladenosine-3'-phosphate
  modified_base 21: mod_base = OTHER; note = 2'-O-methyluridine-3'-phosphorothioate
  modified_base 22: mod_base = OTHER; note = 2'-O-methylguanosine-3'-phosphorothioate
  modified_base 23: mod_base = OTHER; note = 2'-O-methylcytidine
tcattggttagcatgactgatgc

SEQ ID NO: 11945 - RNA, 23 nt, synthetic construct
  source 1..23: mol_type = other RNA
  modified_base 1: mod_base = OTHER; note = 2'-O-methyluridine-3'-phosphorothioate 5'-(E)-Vinylphosphonate
  modified_base 2: mod_base = OTHER; note = 2'-deoxy-2'-fluorouridine-3'-phosphorothioate
  modified_base 3: mod_base = OTHER; note = 2'-O-methyluridine-3'-phosphate
  modified_base 4: mod_base = OTHER; note = 2'-O-methyluridine-3'-phosphate
  modified_base 5: mod_base = OTHER; note = 2'-O-methylcytidine-3'-phosphate
  modified_base 6: mod_base = OTHER; note = 2'-deoxy-2'-fluorocytidine-3'-phosphate
  modified_base 7: mod_base = OTHER; note = 2'-O-methyladenosine-3'-phosphate
  modified_base 8: mod_base = OTHER; note = 2'-O-methyluridine-3'-phosphate
  modified_base 9: mod_base = OTHER; note = 2'-O-methyluridine-3'-phosphate
  modified_base 10: mod_base = OTHER; note = 2'-O-methylguanosine-3'-phosphate
  modified_base 11: mod_base = OTHER; note = 2'-O-methylguanosine-3'-phosphate
  modified_base 12: mod_base = OTHER; note = 2'-O-methyluridine-3'-phosphate
  modified_base 13: mod_base = OTHER; note = 2'-O-methyluridine-3'-phosphate
  modified_base 14: mod_base = OTHER; note = 2'-deoxy-2'-fluoroadenosine-3'-phosphate
  modified_base 15: mod_base = OTHER; note = 2'-O-methylguanosine-3'-phosphate
  modified_base 16: mod_base = OTHER; note = 2'-deoxy-2'-fluorocytidine-3'-phosphate
  modified_base 17: mod_base = OTHER; note = 2'-O-methyladenosine-3'-phosphate
  modified_base 18: mod_base = OTHER; note = 2'-O-methyluridine-3'-phosphate
  modified_base 19: mod_base = OTHER; note = 2'-O-methylguanosine-3'-phosphate
  modified_base 20: mod_base = OTHER; note = 2'-O-methyladenosine-3'-phosphate
  modified_base 21: mod_base = OTHER; note = 2'-O-methylcytidine-3'-phosphorothioate
  modified_base 22: mod_base = OTHER; note = 2'-O-methyluridine-3'-phosphorothioate
  modified_base 23: mod_base = OTHER; note = 2'-O-methylguanosine
ttttccattggttagcatgactg

SEQ ID NO: 11946 - RNA, 23 nt, synthetic construct
  source 1..23: mol_type = other RNA
  modified_base 1: mod_base = OTHER; note = 2'-O-methyluridine-3'-phosphorothioate 5'-(E)-Vinylphosphonate
  modified_base 2: mod_base = OTHER; note = 2'-deoxy-2'-fluorouridine-3'-phosphorothioate
  modified_base 3: mod_base = OTHER; note = 2'-O-methylcytidine-3'-phosphate
  modified_base 4: mod_base = OTHER; note = 2'-O-methyluridine-3'-phosphate
  modified_base 5: mod_base = OTHER; note = 2'-O-methyluridine-3'-phosphate
  modified_base 6: mod_base = OTHER; note = 2'-deoxy-2'-fluorouridine-3'-phosphate
  modified_base 7: mod_base = OTHER; note = 2'-O-methyluridine-3'-phosphate
  modified_base 8: mod_base = OTHER; note = 2'-O-methylcytidine-3'-phosphate
  modified_base 9: mod_base = OTHER; note = 2'-O-methylcytidine-3'-phosphate
  modified_base 10: mod_base = OTHER; note = 2'-O-methyladenosine-3'-phosphate
  modified_base 11: mod_base = OTHER; note = 2'-O-methyluridine-3'-phosphate
  modified_base 12: mod_base = OTHER; note = 2'-O-methyluridine-3'-phosphate
  modified_base 13: mod_base = OTHER; note = 2'-O-methylguanosine-3'-phosphate
  modified_base 14: mod_base = OTHER; note = 2'-deoxy-2'-fluoroguanosine-3'-phosphate
  modified_base 15: mod_base = OTHER; note = 2'-O-methyluridine-3'-phosphate
  modified_base 16: mod_base = OTHER; note = 2'-deoxy-2'-fluorouridine-3'-phosphate
  modified_base 17: mod_base = OTHER; note = 2'-O-methyladenosine-3'-phosphate
  modified_base 18: mod_base = OTHER; note = 2'-O-methylguanosine-3'-phosphate
  modified_base 19: mod_base = OTHER; note = 2'-O-methylcytidine-3'-phosphate
  modified_base 20: mod_base = OTHER; note = 2'-O-methyladenosine-3'-phosphate
  modified_base 21: mod_base = OTHER; note = 2'-O-methyluridine-3'-phosphorothioate
  modified_base 22: mod_base = OTHER; note = 2'-O-methylguanosine-3'-phosphorothioate
  modified_base 23: mod_base = OTHER; note = 2'-O-methyladenosine
ttcttttccattggttagcatga

SEQ ID NO: 11947 - RNA, 23 nt, synthetic construct
  source 1..23: mol_type = other RNA
  modified_base 1: mod_base = OTHER; note = 2'-O-methyluridine-3'-phosphorothioate 5'-(E)-Vinylphosphonate
  modified_base 2: mod_base = OTHER; note = 2'-deoxy-2'-fluoroguanosine-3'-phosphorothioate
  modified_base 3: mod_base = OTHER; note = 2'-O-methyladenosine-3'-phosphate
  modified_base 4: mod_base = OTHER; note = 2'-O-methylcytidine-3'-phosphate
  modified_base 5: mod_base = OTHER; note = 2'-O-methyluridine-3'-phosphate
  modified_base 6: mod_base = OTHER; note = 2'-deoxy-2'-fluorouridine-3'-phosphate
  modified_base 7: mod_base = OTHER; note = 2'-O-methylguanosine-3'-phosphate
  modified_base 8: mod_base = OTHER; note = 2'-O-methyladenosine-3'-phosphate
  modified_base 9: mod_base = OTHER; note = 2'-O-methylguanosine-3'-phosphate
  modified_base 10: mod_base = OTHER; note = 2'-O-methylcytidine-3'-phosphate
  modified_base 11: mod_base = OTHER; note = 2'-O-methyladenosine-3'-phosphate
  modified_base 12: mod_base = OTHER; note = 2'-O-methyluridine-3'-phosphate
  modified_base 13: mod_base = OTHER; note = 2'-O-methyluridine-3'-phosphate
  modified_base 14: mod_base = OTHER; note = 2'-deoxy-2'-fluorocytidine-3'-phosphate
  modified_base 15: mod_base = OTHER; note = 2'-O-methyladenosine-3'-phosphate
  modified_base 16: mod_base = OTHER; note = 2'-deoxy-2'-fluoroguanosine-3'-phosphate
  modified_base 17: mod_base = OTHER; note = 2'-O-methyluridine-3'-phosphate
  modified_base 18: mod_base = OTHER; note = 2'-O-methyluridine-3'-phosphate
  modified_base 19: mod_base = OTHER; note = 2'-O-methylcytidine-3'-phosphate
  modified_base 20: mod_base = OTHER; note = 2'-O-methyluridine-3'-phosphate
  modified_base 21: mod_base = OTHER; note = 2'-O-methylguanosine-3'-phosphorothioate
  modified_base 22: mod_base = OTHER; note = 2'-O-methylguanosine-3'-phosphorothioate
  modified_base 23: mod_base = OTHER; note = 2'-O-methyladenosine
tgacttgagcattcagttctgga

SEQ ID NO: 11948 - RNA, 23 nt, synthetic construct
  source 1..23: mol_type = other RNA
  modified_base 1: mod_base = OTHER; note = 2'-O-methyluridine-3'-phosphorothioate 5'-(E)-Vinylphosphonate
  modified_base 2: mod_base = OTHER; note = 2'-deoxy-2'-fluoroadenosine-3'-phosphorothioate
  modified_base 3: mod_base = OTHER; note = 2'-O-methyluridine-3'-phosphate
  modified_base 4: mod_base = OTHER; note = 2'-O-methyluridine-3'-phosphate
  modified_base 5: mod_base = OTHER; note = 2'-O-methyluridine-3'-phosphate
  modified_base 6: mod_base = OTHER; note = 2'-deoxy-2'-fluoroguanosine-3'-phosphate
  modified_base 7: mod_base = OTHER; note = 2'-O-methyladenosine-3'-phosphate
  modified_base 8: mod_base = OTHER; note = 2'-O-methyluridine-3'-phosphate
  modified_base 9: mod_base = OTHER; note = 2'-O-methylcytidine-3'-phosphate
  modified_base 10: mod_base = OTHER; note = 2'-O-methyladenosine-3'-phosphate
  modified_base 11: mod_base = OTHER; note = 2'-O-methylcytidine-3'-phosphate
  modified_base 12: mod_base = OTHER; note = 2'-O-methylcytidine-3'-phosphate
  modified_base 13: mod_base = OTHER; note = 2'-O-methyluridine-3'-phosphate
  modified_base 14: mod_base = OTHER; note = 2'-deoxy-2'-fluoroguanosine-3'-phosphate
  modified_base 15: mod_base = OTHER; note = 2'-O-methylcytidine-3'-phosphate
  modified_base 16: mod_base = OTHER; note = 2'-deoxy-2'-fluorouridine-3'-phosphate
  modified_base 17: mod_base = OTHER; note = 2'-O-methylcytidine-3'-phosphate
  modified_base 18: mod_base = OTHER; note = 2'-O-methyluridine-3'-phosphate
  modified_base 19: mod_base = OTHER; note = 2'-O-methyluridine-3'-phosphate
  modified_base 20: mod_base = OTHER; note = 2'-O-methyluridine-3'-phosphate
  modified_base 21: mod_base = OTHER; note = 2'-O-methyluridine-3'-phosphorothioate
  modified_base 22: mod_base = OTHER; note = 2'-O-methylcytidine-3'-phosphorothioate
  modified_base 23: mod_base = OTHER; note = 2'-O-methylcytidine
tatttgatcacctgctcttttcc

SEQ ID NO: 11949 - RNA, 23 nt, synthetic construct
  source 1..23: mol_type = other RNA
  modified_base 1: mod_base = OTHER; note = 2'-O-methyluridine-3'-phosphorothioate 5'-(E)-Vinylphosphonate
  modified_base 2: mod_base = OTHER; note = 2'-deoxy-2'-fluorocytidine-3'-phosphorothioate
  modified_base 3: mod_base = OTHER; note = 2'-O-methyladenosine-3'-phosphate
  modified_base 4: mod_base = OTHER; note = 2'-O-methyluridine-3'-phosphate
  modified_base 5: mod_base = OTHER; note = 2'-O-methyluridine-3'-phosphate
  modified_base 6: mod_base = OTHER; note = 2'-deoxy-2'-fluorocytidine-3'-phosphate
  modified_base 7: mod_base = OTHER; note = 2'-O-methyladenosine-3'-phosphate
  modified_base 8: mod_base = OTHER; note = 2'-O-methylguanosine-3'-phosphate
  modified_base 9: mod_base = OTHER; note = 2'-O-methyluridine-3'-phosphate
  modified_base 10: mod_base = OTHER; note = 2'-O-methyluridine-3'-phosphate
  modified_base 11: mod_base = OTHER; note = 2'-O-methylcytidine-3'-phosphate
  modified_base 12: mod_base = OTHER; note = 2'-O-methyluridine-3'-phosphate
  modified_base 13: mod_base = OTHER; note = 2'-O-methylguanosine-3'-phosphate
  modified_base 14: mod_base = OTHER; note = 2'-deoxy-2'-fluoroguanosine-3'-phosphate
  modified_base 15: mod_base = OTHER; note = 2'-O-methyladenosine-3'-phosphate
  modified_base 16: mod_base = OTHER; note = 2'-deoxy-2'-fluoroadenosine-3'-phosphate
  modified_base 17: mod_base = OTHER; note = 2'-O-methylguanosine-3'-phosphate
  modified_base 18: mod_base = OTHER; note = 2'-O-methylguanosine-3'-phosphate
  modified_base 19: mod_base = OTHER; note = 2'-O-methylguanosine-3'-phosphate
  modified_base 20: mod_base = OTHER; note = 2'-O-methyladenosine-3'-phosphate
  modified_base 21: mod_base = OTHER; note = 2'-O-methylguanosine-3'-phosphorothioate
  modified_base 22: mod_base = OTHER; note = 2'-O-methyladenosine-3'-phosphorothioate
  modified_base 23: mod_base = OTHER; note = 2'-O-methylcytidine
tcattcagttctggaagggagac

SEQ ID NO: 11950 - RNA, 23 nt, synthetic construct
  source 1..23: mol_type = other RNA
  modified_base 1: mod_base = OTHER; note = 2'-O-methyluridine-3'-phosphorothioate 5'-(E)-Vinylphosphonate
  modified_base 2: mod_base = OTHER; note = 2'-deoxy-2'-fluoroguanosine-3'-phosphorothioate
  modified_base 3: mod_base = OTHER; note = 2'-O-methylcytidine-3'-phosphate
  modified_base 4: mod_base = OTHER; note = 2'-O-methyladenosine-3'-phosphate
  modified_base 5: mod_base = OTHER; note = 2'-O-methyluridine-3'-phosphate
  modified_base 6: mod_base = OTHER; note = 2'-deoxy-2'-fluorouridine-3'-phosphate
  modified_base 7: mod_base = OTHER; note = 2'-O-methylcytidine-3'-phosphate
  modified_base 8: mod_base = OTHER; note = 2'-O-methyladenosine-3'-phosphate
  modified_base 9: mod_base = OTHER; note = 2'-O-methylguanosine-3'-phosphate
  modified_base 10: mod_base = OTHER; note = 2'-O-methyluridine-3'-phosphate
  modified_base 11: mod_base = OTHER; note = 2'-O-methyluridine-3'-phosphate
  modified_base 12: mod_base = OTHER; note = 2'-O-methylcytidine-3'-phosphate
  modified_base 13: mod_base = OTHER; note = 2'-O-methyluridine-3'-phosphate
  modified_base 14: mod_base = OTHER; note = 2'-deoxy-2'-fluoroguanosine-3'-phosphate
  modified_base 15: mod_base = OTHER; note = 2'-O-methylguanosine-3'-phosphate
  modified_base 16: mod_base = OTHER; note = 2'-deoxy-2'-fluoroadenosine-3'-phosphate
  modified_base 17: mod_base = OTHER; note = 2'-O-methyladenosine-3'-phosphate
  modified_base 18: mod_base = OTHER; note = 2'-O-methylguanosine-3'-phosphate
  modified_base 19: mod_base = OTHER; note = 2'-O-methylguanosine-3'-phosphate
  modified_base 20: mod_base = OTHER; note = 2'-O-methylguanosine-3'-phosphate
  modified_base 21: mod_base = OTHER; note = 2'-O-methyladenosine-3'-phosphorothioate
  modified_base 22: mod_base = OTHER; note = 2'-O-methylguanosine-3'-phosphorothioate
  modified_base 23: mod_base = OTHER; note = 2'-O-methyladenosine
tgcattcagttctggaagggaga

SEQ ID NO: 11951 - RNA, 23 nt, synthetic construct
  source 1..23: mol_type = other RNA
  modified_base 1: mod_base = OTHER; note = 2'-O-methyluridine-3'-phosphorothioate 5'-(E)-Vinylphosphonate
  modified_base 2: mod_base = OTHER; note = 2'-deoxy-2'-fluoroadenosine-3'-phosphorothioate
  modified_base 3: mod_base = OTHER; note = 2'-O-methylguanosine-3'-phosphate
  modified_base 4: mod_base = OTHER; note = 2'-O-methylcytidine-3'-phosphate
  modified_base 5: mod_base = OTHER; note = 2'-O-methyladenosine-3'-phosphate
  modified_base 6: mod_base = OTHER; note = 2'-deoxy-2'-fluorouridine-3'-phosphate
  modified_base 7: mod_base = OTHER; note = 2'-O-methyluridine-3'-phosphate
  modified_base 8: mod_base = OTHER; note = 2'-O-methylcytidine-3'-phosphate
  modified_base 9: mod_base = OTHER; note = 2'-O-methyladenosine-3'-phosphate
  modified_base 10: mod_base = OTHER; note = 2'-O-methylguanosine-3'-phosphate
  modified_base 11: mod_base = OTHER; note = 2'-O-methyluridine-3'-phosphate
  modified_base 12: mod_base = OTHER; note = 2'-O-methyluridine-3'-phosphate
  modified_base 13: mod_base = OTHER; note = 2'-O-methylcytidine-3'-phosphate
  modified_base 14: mod_base = OTHER; note = 2'-deoxy-2'-fluorouridine-3'-phosphate
  modified_base 15: mod_base = OTHER; note = 2'-O-methylguanosine-3'-phosphate
  modified_base 16: mod_base = OTHER; note = 2'-deoxy-2'-fluoroguanosine-3'-phosphate
  modified_base 17: mod_base = OTHER; note = 2'-O-methyladenosine-3'-phosphate
  modified_base 18: mod_base = OTHER; note = 2'-O-methyladenosine-3'-phosphate
  modified_base 19: mod_base = OTHER; note = 2'-O-methylguanosine-3'-phosphate
  modified_base 20: mod_base = OTHER; note = 2'-O-methylguanosine-3'-phosphate
  modified_base 21: mod_base = OTHER; note = 2'-O-methylguanosine-3'-phosphorothioate
  modified_base 22: mod_base = OTHER; note = 2'-O-methyladenosine-3'-phosphorothioate
  modified_base 23: mod_base = OTHER; note = 2'-O-methylguanosine
tagcattcagttctggaagggag

SEQ ID NO: 11952 - RNA, 23 nt, synthetic construct
  source 1..23: mol_type = other RNA
  modified_base 1: mod_base = OTHER; note = 2'-O-methyluridine-3'-phosphorothioate 5'-(E)-Vinylphosphonate
  modified_base 2: mod_base = OTHER; note = 2'-deoxy-2'-fluoroguanosine-3'-phosphorothioate
  modified_base 3: mod_base = OTHER; note = 2'-O-methyladenosine-3'-phosphate
  modified_base 4: mod_base = OTHER; note = 2'-O-methylguanosine-3'-phosphate
  modified_base 5: mod_base = OTHER; note = 2'-O-methylcytidine-3'-phosphate
  modified_base 6: mod_base = OTHER; note = 2'-deoxy-2'-fluoroadenosine-3'-phosphate
  modified_base 7: mod_base = OTHER; note = 2'-O-methyluridine-3'-phosphate
  modified_base 8: mod_base = OTHER; note = 2'-O-methyluridine-3'-phosphate
  modified_base 9: mod_base = OTHER; note = 2'-O-methylcytidine-3'-phosphate
  modified_base 10: mod_base = OTHER; note = 2'-O-methyladenosine-3'-phosphate
  modified_base 11: mod_base = OTHER; note = 2'-O-methylguanosine-3'-phosphate
  modified_base 12: mod_base = OTHER; note = 2'-O-methyluridine-3'-phosphate
  modified_base 13: mod_base = OTHER; note = 2'-O-methyluridine-3'-phosphate
  modified_base 14: mod_base = OTHER; note = 2'-deoxy-2'-fluorocytidine-3'-phosphate
  modified_base 15: mod_base = OTHER; note = 2'-O-methyluridine-3'-phosphate
  modified_base 16: mod_base = OTHER; note = 2'-deoxy-2'-fluoroguanosine-3'-phosphate
  modified_base 17: mod_base = OTHER; note = 2'-O-methylguanosine-3'-phosphate
  modified_base 18: mod_base = OTHER; note = 2'-O-methyladenosine-3'-phosphate
  modified_base 19: mod_base = OTHER; note = 2'-O-methyladenosine-3'-phosphate
  modified_base 20: mod_base = OTHER; note = 2'-O-methylguanosine-3'-phosphate
  modified_base 21: mod_base = OTHER; note = 2'-O-methylguanosine-3'-phosphorothioate
  modified_base 22: mod_base = OTHER; note = 2'-O-methylguanosine-3'-phosphorothioate
  modified_base 23: mod_base = OTHER; note = 2'-O-methyladenosine
tgagcattcagttctggaaggga

SEQ ID NO: 11953 - RNA, 23 nt, synthetic construct
  source 1..23: mol_type = other RNA
  modified_base 1: mod_base = OTHER; note = 2'-O-methyluridine-3'-phosphorothioate 5'-(E)-Vinylphosphonate
  modified_base 2: mod_base = OTHER; note = 2'-deoxy-2'-fluorouridine-3'-phosphorothioate
  modified_base 3: mod_base = OTHER; note = 2'-O-methylguanosine-3'-phosphate
  modified_base 4: mod_base = OTHER; note = 2'-O-methyladenosine-3'-phosphate
  modified_base 5: mod_base = OTHER; note = 2'-O-methylguanosine-3'-phosphate
  modified_base 6: mod_base = OTHER; note = 2'-deoxy-2'-fluorocytidine-3'-phosphate
  modified_base 7: mod_base = OTHER; note = 2'-O-methyladenosine-3'-phosphate
  modified_base 8: mod_base = OTHER; note = 2'-O-methyluridine-3'-phosphate
  modified_base 9: mod_base = OTHER; note = 2'-O-methyluridine-3'-phosphate
  modified_base 10: mod_base = OTHER; note = 2'-O-methylcytidine-3'-phosphate
  modified_base 11: mod_base = OTHER; note = 2'-O-methyladenosine-3'-phosphate
  modified_base 12: mod_base = OTHER; note = 2'-O-methylguanosine-3'-phosphate
  modified_base 13: mod_base = OTHER; note = 2'-O-methyluridine-3'-phosphate
  modified_base 14: mod_base = OTHER; note = 2'-deoxy-2'-fluorouridine-3'-phosphate
  modified_base 15: mod_base = OTHER; note = 2'-O-methylcytidine-3'-phosphate
  modified_base 16: mod_base = OTHER; note = 2'-deoxy-2'-fluorouridine-3'-phosphate
  modified_base 17: mod_base = OTHER; note = 2'-O-methylguanosine-3'-phosphate
  modified_base 18: mod_base = OTHER; note = 2'-O-methylguanosine-3'-phosphate
  modified_base 19: mod_base = OTHER; note = 2'-O-methyladenosine-3'-phosphate
  modified_base 20: mod_base = OTHER; note = 2'-O-methyladenosine-3'-phosphate
  modified_base 21: mod_base = OTHER; note = 2'-O-methylguanosine-3'-phosphorothioate
  modified_base 22: mod_base = OTHER; note = 2'-O-methylguanosine-3'-phosphorothioate
  modified_base 23: mod_base = OTHER; note = 2'-O-methylguanosine
ttgagcattcagttctggaaggg

SEQ ID NO: 11954 - RNA, 23 nt, synthetic construct
  source 1..23: mol_type = other RNA
  modified_base 1: mod_base = OTHER; note = 2'-O-methyluridine-3'-phosphorothioate 5'-(E)-Vinylphosphonate
  modified_base 2: mod_base = OTHER; note = 2'-deoxy-2'-fluorouridine-3'-phosphorothioate
  modified_base 3: mod_base = OTHER; note = 2'-O-methyluridine-3'-phosphate
  modified_base 4: mod_base = OTHER; note = 2'-O-methylguanosine-3'-phosphate
  modified_base 5: mod_base = OTHER; note = 2'-O-methyladenosine-3'-phosphate
  modified_base 6: mod_base = OTHER; note = 2'-deoxy-2'-fluoroguanosine-3'-phosphate
  modified_base 7: mod_base = OTHER; note = 2'-O-methylcytidine-3'-phosphate
  modified_base 8: mod_base = OTHER; note = 2'-O-methyladenosine-3'-phosphate
  modified_base 9: mod_base = OTHER; note = 2'-O-methyluridine-3'-phosphate
  modified_base 10: mod_base = OTHER; note = 2'-O-methyluridine-3'-phosphate
  modified_base 11: mod_base = OTHER; note = 2'-O-methylcytidine-3'-phosphate
  modified_base 12: mod_base = OTHER; note = 2'-O-methyladenosine-3'-phosphate
  modified_base 13: mod_base = OTHER; note = 2'-O-methylguanosine-3'-phosphate
  modified_base 14: mod_base = OTHER; note = 2'-deoxy-2'-fluorouridine-3'-phosphate
  modified_base 15: mod_base = OTHER; note = 2'-O-methyluridine-3'-phosphate
  modified_base 16: mod_base = OTHER; note = 2'-deoxy-2'-fluorocytidine-3'-phosphate
  modified_base 17: mod_base = OTHER; note = 2'-O-methyluridine-3'-phosphate
  modified_base 18: mod_base = OTHER; note = 2'-O-methylguanosine-3'-phosphate
  modified_base 19: mod_base = OTHER; note = 2'-O-methylguanosine-3'-phosphate
  modified_base 20: mod_base = OTHER; note = 2'-O-methyladenosine-3'-phosphate
  modified_base 21: mod_base = OTHER; note = 2'-O-methyladenosine-3'-phosphorothioate
  modified_base 22: mod_base = OTHER; note = 2'-O-methylguanosine-3'-phosphorothioate
  modified_base 23: mod_base = OTHER; note = 2'-O-methylguanosine
tttgagcattcagttctggaagg

SEQ ID NO: 11955 - RNA, 23 nt, synthetic construct
  source 1..23: mol_type = other RNA
  modified_base 1: mod_base = OTHER; note = 2'-O-methyluridine-3'-phosphorothioate 5'-(E)-Vinylphosphonate
  modified_base 2: mod_base = OTHER; note = 2'-deoxy-2'-fluorocytidine-3'-phosphorothioate
  modified_base 3: mod_base = OTHER; note = 2'-O-methyluridine-3'-phosphate
  modified_base 4: mod_base = OTHER; note = 2'-O-methyluridine-3'-phosphate
  modified_base 5: mod_base = OTHER; note = 2'-O-methylguanosine-3'-phosphate
  modified_base 6: mod_base = OTHER; note = 2'-deoxy-2'-fluoroadenosine-3'-phosphate
  modified_base 7: mod_base = OTHER; note = 2'-O-methylguanosine-3'-phosphate
  modified_base 8: mod_base = OTHER; note = 2'-O-methylcytidine-3'-phosphate
  modified_base 9: mod_base = OTHER; note = 2'-O-methyladenosine-3'-phosphate
  modified_base 10: mod_base = OTHER; note = 2'-O-methyluridine-3'-phosphate
  modified_base 11: mod_base = OTHER; note = 2'-O-methyluridine-3'-phosphate
  modified_base 12: mod_base = OTHER; note = 2'-O-methylcytidine-3'-phosphate
  modified_base 13: mod_base = OTHER; note = 2'-O-methyladenosine-3'-phosphate
  modified_base 14: mod_base = OTHER; note = 2'-deoxy-2'-fluoroguanosine-3'-phosphate
  modified_base 15: mod_base = OTHER; note = 2'-O-methyluridine-3'-phosphate
  modified_base 16: mod_base = OTHER; note = 2'-deoxy-2'-fluorouridine-3'-phosphate
  modified_base 17: mod_base = OTHER; note = 2'-O-methylcytidine-3'-phosphate
  modified_base 18: mod_base = OTHER; note = 2'-O-methyluridine-3'-phosphate
  modified_base 19: mod_base = OTHER; note = 2'-O-methylguanosine-3'-phosphate
  modified_base 20: mod_base = OTHER; note = 2'-O-methylguanosine-3'-phosphate
  modified_base 21: mod_base = OTHER; note = 2'-O-methyladenosine-3'-phosphorothioate
  modified_base 22: mod_base = OTHER; note = 2'-O-methyladenosine-3'-phosphorothioate
  modified_base 23: mod_base = OTHER; note = 2'-O-methylguanosine
tcttgagcattcagttctggaag

SEQ ID NO: 11956 - RNA, 23 nt, synthetic construct
  source 1..23: mol_type = other RNA
  modified_base 1: mod_base = OTHER; note = 2'-O-methyluridine-3'-phosphorothioate 5'-(E)-Vinylphosphonate
  modified_base 2: mod_base = OTHER; note = 2'-deoxy-2'-fluoroadenosine-3'-phosphorothioate
  modified_base 3: mod_base = OTHER; note = 2'-O-methylcytidine-3'-phosphate
  modified_base 4: mod_base = OTHER; note = 2'-O-methyluridine-3'-phosphate
  modified_base 5: mod_base = OTHER; note = 2'-O-methyluridine-3'-phosphate
  modified_base 6: mod_base = OTHER; note = 2'-deoxy-2'-fluoroguanosine-3'-phosphate
  modified_base 7: mod_base = OTHER; note = 2'-O-methyladenosine-3'-phosphate
  modified_base 8: mod_base = OTHER; note = 2'-O-methylguanosine-3'-phosphate
  modified_base 9: mod_base = OTHER; note = 2'-O-methylcytidine-3'-phosphate
  modified_base 10: mod_base = OTHER; note = 2'-O-methyladenosine-3'-phosphate
  modified_base 11: mod_base = OTHER; note = 2'-O-methyluridine-3'-phosphate
  modified_base 12: mod_base = OTHER; note = 2'-O-methyluridine-3'-phosphate
  modified_base 13: mod_base = OTHER; note = 2'-O-methylcytidine-3'-phosphate
  modified_base 14: mod_base = OTHER; note = 2'-deoxy-2'-fluoroadenosine-3'-phosphate
  modified_base 15: mod_base = OTHER; note = 2'-O-methylguanosine-3'-phosphate
  modified_base 16: mod_base = OTHER; note = 2'-deoxy-2'-fluorouridine-3'-phosphate
  modified_base 17: mod_base = OTHER; note = 2'-O-methyluridine-3'-phosphate
  modified_base 18: mod_base = OTHER; note = 2'-O-methylcytidine-3'-phosphate
  modified_base 19: mod_base = OTHER; note = 2'-O-methyluridine-3'-phosphate
  modified_base 20: mod_base = OTHER; note = 2'-O-methylguanosine-3'-phosphate
  modified_base 21: mod_base = OTHER; note = 2'-O-methylguanosine-3'-phosphorothioate
  modified_base 22: mod_base = OTHER; note = 2'-O-methyladenosine-3'-phosphorothioate
  modified_base 23: mod_base = OTHER; note = 2'-O-methyladenosine
tacttgagcattcagttctggaa

SEQ ID NO: 11957 - RNA, 23 nt, synthetic construct
  source 1..23: mol_type = other RNA
  modified_base 1: mod_base = OTHER; note = 2'-O-methyluridine-3'-phosphorothioate 5'-(E)-Vinylphosphonate
  modified_base 2: mod_base = OTHER; note = 2'-deoxy-2'-fluoroadenosine-3'-phosphorothioate
  modified_base 3: mod_base = OTHER; note = 2'-O-methylguanosine-3'-phosphate
  modified_base 4: mod_base = OTHER; note = 2'-O-methyladenosine-3'-phosphate
  modified_base 5: mod_base = OTHER; note = 2'-O-methylcytidine-3'-phosphate
  modified_base 6: mod_base = OTHER; note = 2'-deoxy-2'-fluorouridine-3'-phosphate
  modified_base 7: mod_base = OTHER; note = 2'-O-methyluridine-3'-phosphate
  modified_base 8: mod_base = OTHER; note = 2'-O-methylguanosine-3'-phosphate
  modified_base 9: mod_base = OTHER; note = 2'-O-methyladenosine-3'-phosphate
  modified_base 10: mod_base = OTHER; note = 2'-O-methylguanosine-3'-phosphate
  modified_base 11: mod_base = OTHER; note = 2'-O-methylcytidine-3'-phosphate
  modified_base 12: mod_base = OTHER; note = 2'-O-methyladenosine-3'-phosphate
  modified_base 13: mod_base = OTHER; note = 2'-O-methyluridine-3'-phosphate
  modified_base 14: mod_base = OTHER; note = 2'-deoxy-2'-fluorouridine-3'-phosphate
  modified_base 15: mod_base = OTHER; note = 2'-O-methylcytidine-3'-phosphate
  modified_base 16: mod_base = OTHER; note = 2'-deoxy-2'-fluoroadenosine-3'-phosphate
  modified_base 17: mod_base = OTHER; note = 2'-O-methylguanosine-3'-phosphate
  modified_base 18: mod_base = OTHER; note = 2'-O-methyluridine-3'-phosphate
  modified_base 19: mod_base = OTHER; note = 2'-O-methyluridine-3'-phosphate
  modified_base 20: mod_base = OTHER; note = 2'-O-methylcytidine-3'-phosphate
  modified_base 21: mod_base = OTHER; note = 2'-O-methyluridine-3'-phosphorothioate
  modified_base 22: mod_base = OTHER; note = 2'-O-methylguanosine-3'-phosphorothioate
  modified_base 23: mod_base = OTHER; note = 2'-O-methylguanosine
tagacttgagcattcagttctgg

SEQ ID NO: 11958 - RNA, 23 nt, synthetic construct
  source 1..23: mol_type = other RNA
  modified_base 1: mod_base = OTHER; note = 2'-O-methyluridine-3'-phosphorothioate 5'-(E)-Vinylphosphonate
  modified_base 2: mod_base = OTHER; note = 2'-deoxy-2'-fluoroadenosine-3'-phosphorothioate
  modified_base 3: mod_base = OTHER; note = 2'-O-methyladenosine-3'-phosphate
  modified_base 4: mod_base = OTHER; note = 2'-O-methylguanosine-3'-phosphate
  modified_base 5: mod_base = OTHER; note = 2'-O-methyladenosine-3'-phosphate
  modified_base 6: mod_base = OTHER; note = 2'-deoxy-2'-fluorocytidine-3'-phosphate
  modified_base 7: mod_base = OTHER; note = 2'-O-methyluridine-3'-phosphate
  modified_base 8: mod_base = OTHER; note = 2'-O-methyluridine-3'-phosphate
  modified_base 9: mod_base = OTHER; note = 2'-O-methylguanosine-3'-phosphate
  modified_base 10: mod_base = OTHER; note = 2'-O-methyladenosine-3'-phosphate
  modified_base 11: mod_base = OTHER; note = 2'-O-methylguanosine-3'-phosphate
  modified_base 12: mod_base = OTHER; note = 2'-O-methylcytidine-3'-phosphate
  modified_base 13: mod_base = OTHER; note = 2'-O-methyladenosine-3'-phosphate
  modified_base 14: mod_base = OTHER; note = 2'-deoxy-2'-fluorouridine-3'-phosphate
  modified_base 15: mod_base = OTHER; note = 2'-O-methyluridine-3'-phosphate
  modified_base 16: mod_base = OTHER; note = 2'-deoxy-2'-fluorocytidine-3'-phosphate
  modified_base 17: mod_base = OTHER; note = 2'-O-methyladenosine-3'-phosphate
  modified_base 18: mod_base = OTHER; note = 2'-O-methylguanosine-3'-phosphate
  modified_base 19: mod_base = OTHER; note = 2'-O-methyluridine-3'-phosphate
  modified_base 20: mod_base = OTHER; note = 2'-O-methyluridine-3'-phosphate
  modified_base 21: mod_base = OTHER; note = 2'-O-methylcytidine-3'-phosphorothioate
  modified_base 22: mod_base = OTHER; note = 2'-O-methyluridine-3'-phosphorothioate
  modified_base 23: mod_base = OTHER; note = 2'-O-methylguanosine
taagacttgagcattcagttctg

SEQ ID NO: 11959 - RNA, 23 nt, synthetic construct
  source 1..23: mol_type = other RNA
  modified_base 1: mod_base = OTHER; note = 2'-O-methyluridine-3'-phosphorothioate 5'-(E)-Vinylphosphonate
  modified_base 2: mod_base = OTHER; note = 2'-deoxy-2'-fluoroguanosine-3'-phosphorothioate
  modified_base 3: mod_base = OTHER; note = 2'-O-methyladenosine-3'-phosphate
  modified_base 4: mod_base = OTHER; note = 2'-O-methyladenosine-3'-phosphate
  modified_base 5: mod_base = OTHER; note = 2'-O-methylguanosine-3'-phosphate
  modified_base 6: mod_base = OTHER; note = 2'-deoxy-2'-fluoroadenosine-3'-phosphate
  modified_base 7: mod_base = OTHER; note = 2'-O-methylcytidine-3'-phosphate
  modified_base 8: mod_base = OTHER; note = 2'-O-methyluridine-3'-phosphate
  modified_base 9: mod_base = OTHER; note = 2'-O-methyluridine-3'-phosphate
  modified_base 10: mod_base = OTHER; note = 2'-O-methylguanosine-3'-phosphate
  modified_base 11: mod_base = OTHER; note = 2'-O-methyladenosine-3'-phosphate
  modified_base 12: mod_base = OTHER; note = 2'-O-methylguanosine-3'-phosphate
  modified_base 13: mod_base = OTHER; note = 2'-O-methylcytidine-3'-phosphate
  modified_base 14: mod_base = OTHER; note = 2'-deoxy-2'-fluoroadenosine-3'-phosphate
  modified_base 15: mod_base = OTHER; note = 2'-O-methyluridine-3'-phosphate
  modified_base 16: mod_base = OTHER; note = 2'-deoxy-2'-fluorouridine-3'-phosphate
  modified_base 17: mod_base = OTHER; note = 2'-O-methylcytidine-3'-phosphate
  modified_base 18: mod_base = OTHER; note = 2'-O-methyladenosine-3'-phosphate
  modified_base 19: mod_base = OTHER; note = 2'-O-methylguanosine-3'-phosphate
  modified_base 20: mod_base = OTHER; note = 2'-O-methyluridine-3'-phosphate
  modified_base 21: mod_base = OTHER; note = 2'-O-methyluridine-3'-phosphorothioate
  modified_base 22: mod_base = OTHER; note = 2'-O-methylcytidine-3'-phosphorothioate
  modified_base 23: mod_base = OTHER; note = 2'-O-methyluridine
tgaagacttgagcattcagttct

SEQ ID NO: 11960 - RNA, 23 nt, synthetic construct
  source 1..23: mol_type = other RNA
  modified_base 1: mod_base = OTHER; note = 2'-O-methyluridine-3'-phosphorothioate 5'-(E)-Vinylphosphonate
  modified_base 2: mod_base = OTHER; note = 2'-deoxy-2'-fluoroadenosine-3'-phosphorothioate
  modified_base 3: mod_base = OTHER; note = 2'-O-methylguanosine-3'-phosphate
  modified_base 4: mod_base = OTHER; note = 2'-O-methyladenosine-3'-phosphate
  modified_base 5: mod_base = OTHER; note = 2'-O-methyladenosine-3'-phosphate
  modified_base 6: mod_base = OTHER; note = 2'-deoxy-2'-fluoroguanosine-3'-phosphate
  modified_base 7: mod_base = OTHER; note = 2'-O-methyladenosine-3'-phosphate
  modified_base 8: mod_base = OTHER; note = 2'-O-methylcytidine-3'-phosphate
  modified_base 9: mod_base = OTHER; note = 2'-O-methyluridine-3'-phosphate
  modified_base 10: mod_base = OTHER; note = 2'-O-methyluridine-3'-phosphate
  modified_base 11: mod_base = OTHER; note = 2'-O-methylguanosine-3'-phosphate
  modified_base 12: mod_base = OTHER; note = 2'-O-methyladenosine-3'-phosphate
  modified_base 13: mod_base = OTHER; note = 2'-O-methylguanosine-3'-phosphate
  modified_base 14: mod_base = OTHER; note = 2'-deoxy-2'-fluorocytidine-3'-phosphate
  modified_base 15: mod_base = OTHER; note = 2'-O-methyladenosine-3'-phosphate
  modified_base 16: mod_base = OTHER; note = 2'-deoxy-2'-fluorouridine-3'-phosphate
  modified_base 17: mod_base = OTHER; note = 2'-O-methyluridine-3'-phosphate
  modified_base 18: mod_base = OTHER; note = 2'-O-methylcytidine-3'-phosphate
  modified_base 19: mod_base = OTHER; note = 2'-O-methyladenosine-3'-phosphate
  modified_base 20: mod_base = OTHER; note = 2'-O-methylguanosine-3'-phosphate
  modified_base 21: mod_base = OTHER; note = 2'-O-methyluridine-3'-phosphorothioate
  modified_base 22: mod_base = OTHER; note = 2'-O-methyluridine-3'-phosphorothioate
  modified_base 23: mod_base = OTHER; note = 2'-O-methylcytidine
tagaagacttgagcattcagttc

SEQ ID NO: 11961 - RNA, 23 nt, synthetic construct
  source 1..23: mol_type = other RNA
  modified_base 1: mod_base = OTHER; note = 2'-O-methyluridine-3'-phosphorothioate 5'-(E)-Vinylphosphonate
  modified_base 2: mod_base = OTHER; note = 2'-deoxy-2'-fluorocytidine-3'-phosphorothioate
  modified_base 3: mod_base = OTHER; note = 2'-O-methyladenosine-3'-phosphate
  modified_base 4: mod_base = OTHER; note = 2'-O-methylguanosine-3'-phosphate
  modified_base 5: mod_base = OTHER; note = 2'-O-methyladenosine-3'-phosphate
  modified_base 6: mod_base = OTHER; note = 2'-deoxy-2'-fluoroadenosine-3'-phosphate
  modified_base 7: mod_base = OTHER; note = 2'-O-methylguanosine-3'-phosphate
  modified_base 8: mod_base = OTHER; note = 2'-O-methyladenosine-3'-phosphate
  modified_base 9: mod_base = OTHER; note = 2'-O-methylcytidine-3'-phosphate
  modified_base 10: mod_base = OTHER; note = 2'-O-methyluridine-3'-phosphate
  modified_base 11: mod_base = OTHER; note = 2'-O-methyluridine-3'-phosphate
  modified_base 12: mod_base = OTHER; note = 2'-O-methylguanosine-3'-phosphate
  modified_base 13: mod_base = OTHER; note = 2'-O-methyladenosine-3'-phosphate
  modified_base 14: mod_base = OTHER; note = 2'-deoxy-2'-fluoroguanosine-3'-phosphate
  modified_base 15: mod_base = OTHER; note = 2'-O-methylcytidine-3'-phosphate
  modified_base 16: mod_base = OTHER; note = 2'-deoxy-2'-fluoroadenosine-3'-phosphate
  modified_base 17: mod_base = OTHER; note = 2'-O-methyluridine-3'-phosphate
  modified_base 18: mod_base = OTHER; note = 2'-O-methyluridine-3'-phosphate
  modified_base 19: mod_base = OTHER; note = 2'-O-methylcytidine-3'-phosphate
  modified_base 20: mod_base = OTHER; note = 2'-O-methyladenosine-3'-phosphate
  modified_base 21: mod_base = OTHER; note = 2'-O-methylguanosine-3'-phosphorothioate
  modified_base 22: mod_base = OTHER; note = 2'-O-methyluridine-3'-phosphorothioate
  modified_base 23: mod_base = OTHER; note = 2'-O-methyluridine
tcagaagacttgagcattcagtt

SEQ ID NO: 11962 - RNA, 23 nt, synthetic construct
  source 1..23: mol_type = other RNA
  modified_base 1: mod_base = OTHER; note = 2'-O-methyluridine-3'-phosphorothioate 5'-(E)-Vinylphosphonate
  modified_base 2: mod_base = OTHER; note = 2'-deoxy-2'-fluoroadenosine-3'-phosphorothioate
  modified_base 3: mod_base = OTHER; note = 2'-O-methylcytidine-3'-phosphate
  modified_base 4: mod_base = OTHER; note = 2'-O-methyladenosine-3'-phosphate
  modified_base 5: mod_base = OTHER; note = 2'-O-methylguanosine-3'-phosphate
  modified_base 6: mod_base = OTHER; note = 2'-deoxy-2'-fluoroadenosine-3'-phosphate
  modified_base 7: mod_base = OTHER; note = 2'-O-methyladenosine-3'-phosphate
  modified_base 8: mod_base = OTHER; note = 2'-O-methylguanosine-3'-phosphate
  modified_base 9: mod_base = OTHER; note = 2'-O-methyladenosine-3'-phosphate
  modified_base 10: mod_base = OTHER; note = 2'-O-methylcytidine-3'-phosphate
  modified_base 11: mod_base = OTHER; note = 2'-O-methyluridine-3'-phosphate
  modified_base 12: mod_base = OTHER; note = 2'-O-methyluridine-3'-phosphate
  modified_base 13: mod_base = OTHER; note = 2'-O-methylguanosine-3'-phosphate
  modified_base 14: mod_base = OTHER; note = 2'-deoxy-2'-fluoroadenosine-3'-phosphate
  modified_base 15: mod_base = OTHER; note = 2'-O-methylguanosine-3'-phosphate
  modified_base 16: mod_base = OTHER; note = 2'-deoxy-2'-fluorocytidine-3'-phosphate
  modified_base 17: mod_base = OTHER; note = 2'-O-methyladenosine-3'-phosphate
  modified_base 18: mod_base = OTHER; note = 2'-O-methyluridine-3'-phosphate
  modified_base 19: mod_base = OTHER; note = 2'-O-methyluridine-3'-phosphate
  modified_base 20: mod_base = OTHER; note = 2'-O-methylcytidine-3'-phosphate
  modified_base 21: mod_base = OTHER; note = 2'-O-methyladenosine-3'-phosphorothioate
  modified_base 22: mod_base = OTHER; note = 2'-O-methylguanosine-3'-phosphorothioate
  modified_base 23: mod_base = OTHER; note = 2'-O-methyluridine
tacagaagacttgagcattcagt

SEQ ID NO: 11963 - RNA, 23 nt, synthetic construct
  source 1..23: mol_type = other RNA
  modified_base 1: mod_base = OTHER; note = 2'-O-methyluridine-3'-phosphorothioate 5'-(E)-Vinylphosphonate
  modified_base 2: mod_base = OTHER; note = 2'-deoxy-2'-fluoroguanosine-3'-phosphorothioate
  modified_base 3: mod_base = OTHER; note = 2'-O-methyladenosine-3'-phosphate
  modified_base 4: mod_base = OTHER; note = 2'-O-methylcytidine-3'-phosphate
  modified_base 5: mod_base = OTHER; note = 2'-O-methyladenosine-3'-phosphate
  modified_base 6: mod_base = OTHER; note = 2'-deoxy-2'-fluoroguanosine-3'-phosphate
  modified_base 7: mod_base = OTHER; note = 2'-O-methyladenosine-3'-phosphate
  modified_base 8: mod_base = OTHER; note = 2'-O-methyladenosine-3'-phosphate
  modified_base 9: mod_base = OTHER; note = 2'-O-methylguanosine-3'-phosphate
  modified_base 10: mod_base = OTHER; note = 2'-O-methyladenosine-3'-phosphate
  modified_base 11: mod_base = OTHER; note = 2'-O-methylcytidine-3'-phosphate
  modified_base 12: mod_base = OTHER; note = 2'-O-methyluridine-3'-phosphate
  modified_base 13: mod_base = OTHER; note = 2'-O-methyluridine-3'-phosphate
  modified_base 14: mod_base = OTHER; note = 2'-deoxy-2'-fluoroguanosine-3'-phosphate
  modified_base 15: mod_base = OTHER; note = 2'-O-methyladenosine-3'-phosphate
  modified_base 16: mod_base = OTHER; note = 2'-deoxy-2'-fluoroguanosine-3'-phosphate
  modified_base 17: mod_base = OTHER; note = 2'-O-methylcytidine-3'-phosphate
  modified_base 18: mod_base = OTHER; note = 2'-O-methyladenosine-3'-phosphate
  modified_base 19: mod_base = OTHER; note = 2'-O-methyluridine-3'-phosphate
  modified_base 20: mod_base = OTHER; note = 2'-O-methyluridine-3'-phosphate
  modified_base 21: mod_base = OTHER; note = 2'-O-methylcytidine-3'-phosphorothioate
  modified_base 22: mod_base = OTHER; note = 2'-O-methyladenosine-3'-phosphorothioate
  modified_base 23: mod_base = OTHER; note = 2'-O-methylguanosine
tgacagaagacttgagcattcag

SEQ ID NO: 11964 - RNA, 23 nt, synthetic construct
  source 1..23: mol_type = other RNA
  modified_base 1: mod_base = OTHER; note = 2'-O-methyluridine-3'-phosphorothioate 5'-(E)-Vinylphosphonate
  modified_base 2: mod_base = OTHER; note = 2'-deoxy-2'-fluorouridine-3'-phosphorothioate
  modified_base 3: mod_base = OTHER; note = 2'-O-methylguanosine-3'-phosphate
  modified_base 4: mod_base = OTHER; note = 2'-O-methyladenosine-3'-phosphate
  modified_base 5: mod_base = OTHER; note = 2'-O-methylcytidine-3'-phosphate
  modified_base 6: mod_base = OTHER; note = 2'-deoxy-2'-fluoroadenosine-3'-phosphate
  modified_base 7: mod_base = OTHER; note = 2'-O-methylguanosine-3'-phosphate
  modified_base 8: mod_base = OTHER; note = 2'-O-methyladenosine-3'-phosphate
  modified_base 9: mod_base = OTHER; note = 2'-O-methyladenosine-3'-phosphate
  modified_base 10: mod_base = OTHER; note = 2'-O-methylguanosine-3'-phosphate
  modified_base 11: mod_base = OTHER; note = 2'-O-methyladenosine-3'-phosphate
  modified_base 12: mod_base = OTHER; note = 2'-O-methylcytidine-3'-phosphate
  modified_base 13: mod_base = OTHER; note = 2'-O-methyluridine-3'-phosphate
  modified_base 14: mod_base = OTHER; note = 2'-deoxy-2'-fluorouridine-3'-phosphate
  modified_base 15: mod_base = OTHER; note = 2'-O-methylguanosine-3'-phosphate
  modified_base 16: mod_base = OTHER; note = 2'-deoxy-2'-fluoroadenosine-3'-phosphate
  modified_base 17: mod_base = OTHER; note = 2'-O-methylguanosine-3'-phosphate
  modified_base 18: mod_base = OTHER; note = 2'-O-methylcytidine-3'-phosphate
  modified_base 19: mod_base = OTHER; note = 2'-O-methyladenosine-3'-phosphate
  modified_base 20: mod_base = OTHER; note = 2'-O-methyluridine-3'-phosphate
  modified_base 21: mod_base = OTHER; note = 2'-O-methyluridine-3'-phosphorothioate
  modified_base 22: mod_base = OTHER; note = 2'-O-methylcytidine-3'-phosphorothioate
  modified_base 23: mod_base = OTHER; note = 2'-O-methyladenosine
ttgacagaagacttgagcattca

SEQ ID NO: 11965 - RNA, 23 nt, synthetic construct
  source 1..23: mol_type = other RNA
  modified_base 1: mod_base = OTHER; note = 2'-O-methyluridine-3'-phosphorothioate 5'-(E)-Vinylphosphonate
  modified_base 2: mod_base = OTHER; note = 2'-deoxy-2'-fluoroadenosine-3'-phosphorothioate
  modified_base 3: mod_base = OTHER; note = 2'-O-methyluridine-3'-phosphate
  modified_base 4: mod_base = OTHER; note = 2'-O-methylguanosine-3'-phosphate
  modified_base 5: mod_base = OTHER; note = 2'-O-methyladenosine-3'-phosphate
  modified_base 6: mod_base = OTHER; note = 2'-deoxy-2'-fluorocytidine-3'-phosphate
  modified_base 7: mod_base = OTHER; note = 2'-O-methyladenosine-3'-phosphate
  modified_base 8: mod_base = OTHER; note = 2'-O-methylguanosine-3'-phosphate
  modified_base 9: mod_base = OTHER; note = 2'-O-methyladenosine-3'-phosphate
  modified_base 10: mod_base = OTHER; note = 2'-O-methyladenosine-3'-phosphate
  modified_base 11: mod_base = OTHER; note = 2'-O-methylguanosine-3'-phosphate
  modified_base 12: mod_base = OTHER; note = 2'-O-methyladenosine-3'-phosphate
  modified_base 13: mod_base = OTHER; note = 2'-O-methylcytidine-3'-phosphate
  modified_base 14: mod_base = OTHER; note = 2'-deoxy-2'-fluorouridine-3'-phosphate
  modified_base 15: mod_base = OTHER; note = 2'-O-methyluridine-3'-phosphate
  modified_base 16: mod_base = OTHER; note = 2'-deoxy-2'-fluoroguanosine-3'-phosphate
  modified_base 17: mod_base = OTHER; note = 2'-O-methyladenosine-3'-phosphate
  modified_base 18: mod_base = OTHER; note = 2'-O-methylguanosine-3'-phosphate
  modified_base 19: mod_base = OTHER; note = 2'-O-methylcytidine-3'-phosphate
  modified_base 20: mod_base = OTHER; note = 2'-O-methyladenosine-3'-phosphate
  modified_base 21: mod_base = OTHER; note = 2'-O-methyluridine-3'-phosphorothioate
  modified_base 22: mod_base = OTHER; note = 2'-O-methyluridine-3'-phosphorothioate
  modified_base 23: mod_base = OTHER; note = 2'-O-methylcytidine
tatgacagaagacttgagcattc

SEQ ID NO: 11966 - RNA, 23 nt, synthetic construct
  source 1..23: mol_type = other RNA
  modified_base 1: mod_base = OTHER; note = 2'-O-methyluridine-3'-phosphorothioate 5'-(E)-Vinylphosphonate
  modified_base 2: mod_base = OTHER; note = 2'-deoxy-2'-fluorouridine-3'-phosphorothioate
  modified_base 3: mod_base = OTHER; note = 2'-O-methyladenosine-3'-phosphate
  modified_base 4: mod_base = OTHER; note = 2'-O-methyluridine-3'-phosphate
  modified_base 5: mod_base = OTHER; note = 2'-O-methylguanosine-3'-phosphate
  modified_base 6: mod_base = OTHER; note = 2'-deoxy-2'-fluoroadenosine-3'-phosphate
  modified_base 7: mod_base = OTHER; note = 2'-O-methylcytidine-3'-phosphate
  modified_base 8: mod_base = OTHER; note = 2'-O-methyladenosine-3'-phosphate
  modified_base 9: mod_base = OTHER; note = 2'-O-methylguanosine-3'-phosphate
  modified_base 10: mod_base = OTHER; note = 2'-O-methyladenosine-3'-phosphate
  modified_base 11: mod_base = OTHER; note = 2'-O-methyladenosine-3'-phosphate
  modified_base 12: mod_base = OTHER; note = 2'-O-methylguanosine-3'-phosphate
  modified_base 13: mod_base = OTHER; note = 2'-O-methyladenosine-3'-phosphate
  modified_base 14: mod_base = OTHER; note = 2'-deoxy-2'-fluorocytidine-3'-phosphate
  modified_base 15: mod_base = OTHER; note = 2'-O-methyluridine-3'-phosphate
  modified_base 16: mod_base = OTHER; note = 2'-deoxy-2'-fluorouridine-3'-phosphate
  modified_base 17: mod_base = OTHER; note = 2'-O-methylguanosine-3'-phosphate
  modified_base 18: mod_base = OTHER; note = 2'-O-methyladenosine-3'-phosphate
  modified_base 19: mod_base = OTHER; note = 2'-O-methylguanosine-3'-phosphate
  modified_base 20: mod_base = OTHER; note = 2'-O-methylcytidine-3'-phosphate
  modified_base 21: mod_base = OTHER; note = 2'-O-methyladenosine-3'-phosphorothioate
  modified_base 22: mod_base = OTHER; note = 2'-O-methyluridine-3'-phosphorothioate
  modified_base 23: mod_base = OTHER; note = 2'-O-methyluridine
ttatgacagaagacttgagcatt

SEQ ID NO: 11967 - RNA, 23 nt, synthetic construct
  source 1..23: mol_type = other RNA
  modified_base 1: mod_base = OTHER; note = 2'-O-methyluridine-3'-phosphorothioate 5'-(E)-Vinylphosphonate
  modified_base 2: mod_base = OTHER; note = 2'-deoxy-2'-fluorocytidine-3'-phosphorothioate
  modified_base 3: mod_base = OTHER; note = 2'-O-methyluridine-3'-phosphate
  modified_base 4: mod_base = OTHER; note = 2'-O-methyladenosine-3'-phosphate
  modified_base 5: mod_base = OTHER; note = 2'-O-methyluridine-3'-phosphate
  modified_base 6: mod_base = OTHER; note = 2'-deoxy-2'-fluoroguanosine-3'-phosphate
  modified_base 7: mod_base = OTHER; note = 2'-O-methyladenosine-3'-phosphate
  modified_base 8: mod_base = OTHER; note = 2'-O-methylcytidine-3'-phosphate
  modified_base 9: mod_base = OTHER; note = 2'-O-methyladenosine-3'-phosphate
  modified_base 10: mod_base = OTHER; note = 2'-O-methylguanosine-3'-phosphate
  modified_base 11: mod_base = OTHER; note = 2'-O-methyladenosine-3'-phosphate
  modified_base 12: mod_base = OTHER; note = 2'-O-methyladenosine-3'-phosphate
  modified_base 13: mod_base = OTHER; note = 2'-O-methylguanosine-3'-phosphate
  modified_base 14: mod_base = OTHER; note = 2'-deoxy-2'-fluoroadenosine-3'-phosphate
  modified_base 15: mod_base = OTHER; note = 2'-O-methylcytidine-3'-phosphate
  modified_base 16: mod_base = OTHER; note = 2'-deoxy-2'-fluorouridine-3'-phosphate
  modified_base 17: mod_base = OTHER; note = 2'-O-methyluridine-3'-phosphate
  modified_base 18: mod_base = OTHER; note = 2'-O-methylguanosine-3'-phosphate
  modified_base 19: mod_base = OTHER; note = 2'-O-methyladenosine-3'-phosphate
  modified_base 20: mod_base = OTHER; note = 2'-O-methylguanosine-3'-phosphate
  modified_base 21: mod_base = OTHER; note = 2'-O-methylcytidine-3'-phosphorothioate
  modified_base 22: mod_base = OTHER; note = 2'-O-methyladenosine-3'-phosphorothioate
  modified_base 23: mod_base = OTHER; note = 2'-O-methyluridine
tctatgacagaagacttgagcat

SEQ ID NO: 11968 - RNA, 23 nt, synthetic construct
  source 1..23: mol_type = other RNA
  modified_base 1: mod_base = OTHER; note = 2'-O-methyluridine-3'-phosphorothioate 5'-(E)-Vinylphosphonate
  modified_base 2: mod_base = OTHER; note = 2'-deoxy-2'-fluoroadenosine-3'-phosphorothioate
  modified_base 3: mod_base = OTHER; note = 2'-O-methylcytidine-3'-phosphate
  modified_base 4: mod_base = OTHER; note = 2'-O-methyluridine-3'-phosphate
  modified_base 5: mod_base = OTHER; note = 2'-O-methyladenosine-3'-phosphate
  modified_base 6: mod_base = OTHER; note = 2'-deoxy-2'-fluorouridine-3'-phosphate
  modified_base 7: mod_base = OTHER; note = 2'-O-methylguanosine-3'-phosphate
  modified_base 8: mod_base = OTHER; note = 2'-O-methyladenosine-3'-phosphate
  modified_base 9: mod_base = OTHER; note = 2'-O-methylcytidine-3'-phosphate
  modified_base 10: mod_base = OTHER; note = 2'-O-methyladenosine-3'-phosphate
  modified_base 11: mod_base = OTHER; note = 2'-O-methylguanosine-3'-phosphate
  modified_base 12: mod_base = OTHER; note = 2'-O-methyladenosine-3'-phosphate
  modified_base 13: mod_base = OTHER; note = 2'-O-methyladenosine-3'-phosphate
  modified_base 14: mod_base = OTHER; note = 2'-deoxy-2'-fluoroguanosine-3'-phosphate
  modified_base 15: mod_base = OTHER; note = 2'-O-methyladenosine-3'-phosphate
  modified_base 16: mod_base = OTHER; note = 2'-deoxy-2'-fluorocytidine-3'-phosphate
  modified_base 17: mod_base = OTHER; note = 2'-O-methyluridine-3'-phosphate
  modified_base 18: mod_base = OTHER; note = 2'-O-methyluridine-3'-phosphate
  modified_base 19: mod_base = OTHER; note = 2'-O-methylguanosine-3'-phosphate
  modified_base 20: mod_base = OTHER; note = 2'-O-methyladenosine-3'-phosphate
  modified_base 21: mod_base = OTHER; note = 2'-O-methylguanosine-3'-phosphorothioate
  modified_base 22: mod_base = OTHER; note = 2'-O-methylcytidine-3'-phosphorothioate
  modified_base 23: mod_base = OTHER; note = 2'-O-methyladenosine
tactatgacagaagacttgagca

SEQ ID NO: 11969 - RNA, 23 nt, synthetic construct
  source 1..23: mol_type = other RNA
  modified_base 1: mod_base = OTHER; note = 2'-O-methyluridine-3'-phosphorothioate 5'-(E)-Vinylphosphonate
  modified_base 2: mod_base = OTHER; note = 2'-deoxy-2'-fluoroadenosine-3'-phosphorothioate
  modified_base 3: mod_base = OTHER; note = 2'-O-methyladenosine-3'-phosphate
  modified_base 4: mod_base = OTHER; note = 2'-O-methylcytidine-3'-phosphate
  modified_base 5: mod_base = OTHER; note = 2'-O-methyluridine-3'-phosphate
  modified_base 6: mod_base = OTHER; note = 2'-deoxy-2'-fluoroadenosine-3'-phosphate
  modified_base 7: mod_base = OTHER; note = 2'-O-methyluridine-3'-phosphate
  modified_base 8: mod_base = OTHER; note = 2'-O-methylguanosine-3'-phosphate
  modified_base 9: mod_base = OTHER; note = 2'-O-methyladenosine-3'-phosphate
  modified_base 10: mod_base = OTHER; note = 2'-O-methylcytidine-3'-phosphate
  modified_base 11: mod_base = OTHER; note = 2'-O-methyladenosine-3'-phosphate
  modified_base 12: mod_base = OTHER; note = 2'-O-methylguanosine-3'-phosphate
  modified_base 13: mod_base = OTHER; note = 2'-O-methyladenosine-3'-phosphate
  modified_base 14: mod_base = OTHER; note = 2'-deoxy-2'-fluoroadenosine-3'-phosphate
  modified_base 15: mod_base = OTHER; note = 2'-O-methylguanosine-3'-phosphate
  modified_base 16: mod_base = OTHER; note = 2'-deoxy-2'-fluoroadenosine-3'-phosphate
  modified_base 17: mod_base = OTHER; note = 2'-O-methylcytidine-3'-phosphate
  modified_base 18: mod_base = OTHER; note = 2'-O-methyluridine-3'-phosphate
  modified_base 19: mod_base = OTHER; note = 2'-O-methyluridine-3'-phosphate
  modified_base 20: mod_base = OTHER; note = 2'-O-methylguanosine-3'-phosphate
  modified_base 21: mod_base = OTHER; note = 2'-O-methyladenosine-3'-phosphorothioate
  modified_base 22: mod_base = OTHER; note = 2'-O-methylguanosine-3'-phosphorothioate
  modified_base 23: mod_base = OTHER; note = 2'-O-methylcytidine
taactatgacagaagacttgagc

SEQ ID NO: 11970 - RNA, 23 nt, synthetic construct
  source 1..23: mol_type = other RNA
  modified_base 1: mod_base = OTHER; note = 2'-O-methyluridine-3'-phosphorothioate 5'-(E)-Vinylphosphonate
  modified_base 2: mod_base = OTHER; note = 2'-deoxy-2'-fluoroguanosine-3'-phosphorothioate
  modified_base 3: mod_base = OTHER; note = 2'-O-methyluridine-3'-phosphate
  modified_base 4: mod_base = OTHER; note = 2'-O-methyluridine-3'-phosphate
  modified_base 5: mod_base = OTHER; note = 2'-O-methylguanosine-3'-phosphate
  modified_base 6: mod_base = OTHER; note = 2'-deoxy-2'-fluoroguanosine-3'-phosphate
  modified_base 7: mod_base = OTHER; note = 2'-O-methyladenosine-3'-phosphate
  modified_base 8: mod_base = OTHER; note = 2'-O-methyladenosine-3'-phosphate
  modified_base 9: mod_base = OTHER; note = 2'-O-methylcytidine-3'-phosphate
  modified_base 10: mod_base = OTHER; note = 2'-O-methyluridine-3'-phosphate
  modified_base 11: mod_base = OTHER; note = 2'-O-methyladenosine-3'-phosphate
  modified_base 12: mod_base = OTHER; note = 2'-O-methyluridine-3'-phosphate
  modified_base 13: mod_base = OTHER; note = 2'-O-methylguanosine-3'-phosphate
  modified_base 14: mod_base = OTHER; note = 2'-deoxy-2'-fluoroadenosine-3'-phosphate
  modified_base 15: mod_base = OTHER; note = 2'-O-methylcytidine-3'-phosphate
  modified_base 16: mod_base = OTHER; note = 2'-deoxy-2'-fluoroadenosine-3'-phosphate
  modified_base 17: mod_base = OTHER; note = 2'-O-methylguanosine-3'-phosphate
  modified_base 18: mod_base = OTHER; note = 2'-O-methyladenosine-3'-phosphate
  modified_base 19: mod_base = OTHER; note = 2'-O-methyladenosine-3'-phosphate
  modified_base 20: mod_base = OTHER; note = 2'-O-methylguanosine-3'-phosphate
  modified_base 21: mod_base = OTHER; note = 2'-O-methyladenosine-3'-phosphorothioate
  modified_base 22: mod_base = OTHER; note = 2'-O-methylcytidine-3'-phosphorothioate
  modified_base 23: mod_base = OTHER; note = 2'-O-methyluridine
tgttggaactatgacagaagact

SEQ ID NO: 11971 - RNA, 23 nt, synthetic construct
  source 1..23: mol_type = other RNA
  modified_base 1: mod_base = OTHER; note = 2'-O-methyluridine-3'-phosphorothioate 5'-(E)-Vinylphosphonate
  modified_base 2: mod_base = OTHER; note = 2'-deoxy-2'-fluoroguanosine-3'-phosphorothioate
  modified_base 3: mod_base = OTHER; note = 2'-O-methyladenosine-3'-phosphate
  modified_base 4: mod_base = OTHER; note = 2'-O-methyladenosine-3'-phosphate
  modified_base 5: mod_base = OTHER; note = 2'-O-methylcytidine-3'-phosphate
  modified_base 6: mod_base = OTHER; note = 2'-deoxy-2'-fluorouridine-3'-phosphate
  modified_base 7: mod_base = OTHER; note = 2'-O-methyladenosine-3'-phosphate
  modified_base 8: mod_base = OTHER; note = 2'-O-methyluridine-3'-phosphate
  modified_base 9: mod_base = OTHER; note = 2'-O-methylguanosine-3'-phosphate
  modified_base 10: mod_base = OTHER; note = 2'-O-methyladenosine-3'-phosphate
  modified_base 11: mod_base = OTHER; note = 2'-O-methylcytidine-3'-phosphate
  modified_base 12: mod_base = OTHER; note = 2'-O-methyladenosine-3'-phosphate
  modified_base 13: mod_base = OTHER; note = 2'-O-methylguanosine-3'-phosphate
  modified_base 14: mod_base = OTHER; note = 2'-deoxy-2'-fluoroadenosine-3'-phosphate
  modified_base 15: mod_base = OTHER; note = 2'-O-methyladenosine-3'-phosphate
  modified_base 16: mod_base = OTHER; note = 2'-deoxy-2'-fluoroguanosine-3'-phosphate
  modified_base 17: mod_base = OTHER; note = 2'-O-methyladenosine-3'-phosphate
  modified_base 18: mod_base = OTHER; note = 2'-O-methylcytidine-3'-phosphate
  modified_base 19: mod_base = OTHER; note = 2'-O-methyluridine-3'-phosphate
  modified_base 20: mod_base = OTHER; note = 2'-O-methyluridine-3'-phosphate
  modified_base 21: mod_base = OTHER; note = 2'-O-methylguanosine-3'-phosphorothioate
  modified_base 22: mod_base = OTHER; note = 2'-O-methyladenosine-3'-phosphorothioate
  modified_base 23: mod_base = OTHER; note = 2'-O-methylguanosine
tgaactatgacagaagacttgag

SEQ ID NO: 11972 - RNA, 23 nt, synthetic construct
  source 1..23: mol_type = other RNA
  modified_base 1: mod_base = OTHER; note = 2'-O-methyluridine-3'-phosphorothioate 5'-(E)-Vinylphosphonate
  modified_base 2: mod_base = OTHER; note = 2'-deoxy-2'-fluoroguanosine-3'-phosphorothioate
  modified_base 3: mod_base = OTHER; note = 2'-O-methylguanosine-3'-phosphate
  modified_base 4: mod_base = OTHER; note = 2'-O-methyladenosine-3'-phosphate
  modified_base 5: mod_base = OTHER; note = 2'-O-methyladenosine-3'-phosphate
  modified_base 6: mod_base = OTHER; note = 2'-deoxy-2'-fluorocytidine-3'-phosphate
  modified_base 7: mod_base = OTHER; note = 2'-O-methyluridine-3'-phosphate
  modified_base 8: mod_base = OTHER; note = 2'-O-methyladenosine-3'-phosphate
  modified_base 9: mod_base = OTHER; note = 2'-O-methyluridine-3'-phosphate
  modified_base 10: mod_base = OTHER; note = 2'-O-methylguanosine-3'-phosphate
  modified_base 11: mod_base = OTHER; note = 2'-O-methyladenosine-3'-phosphate
  modified_base 12: mod_base = OTHER; note = 2'-O-methylcytidine-3'-phosphate
  modified_base 13: mod_base = OTHER; note = 2'-O-methyladenosine-3'-phosphate
  modified_base 14: mod_base = OTHER; note = 2'-deoxy-2'-fluoroguanosine-3'-phosphate
  modified_base 15: mod_base = OTHER; note = 2'-O-methyladenosine-3'-phosphate
  modified_base 16: mod_base = OTHER; note = 2'-deoxy-2'-fluoroadenosine-3'-phosphate
  modified_base 17: mod_base = OTHER; note = 2'-O-methylguanosine-3'-phosphate
  modified_base 18: mod_base = OTHER; note = 2'-O-methyladenosine-3'-phosphate
  modified_base 19: mod_base = OTHER; note = 2'-O-methylcytidine-3'-phosphate
  modified_base 20: mod_base = OTHER; note = 2'-O-methyluridine-3'-phosphate
  modified_base 21: mod_base = OTHER; note = 2'-O-methyluridine-3'-phosphorothioate
  modified_base 22: mod_base = OTHER; note = 2'-O-methylguanosine-3'-phosphorothioate
  modified_base 23: mod_base = OTHER; note = 2'-O-methyladenosine
tggaactatgacagaagacttga

SEQ ID NO: 11973 - RNA, 23 nt, synthetic construct
  source 1..23: mol_type = other RNA
  modified_base 1: mod_base = OTHER; note = 2'-O-methyluridine-3'-phosphorothioate 5'-(E)-Vinylphosphonate
  modified_base 2: mod_base = OTHER; note = 2'-deoxy-2'-fluorouridine-3'-phosphorothioate
  modified_base 3: mod_base = OTHER; note = 2'-O-methylguanosine-3'-phosphate
  modified_base 4: mod_base = OTHER; note = 2'-O-methylguanosine-3'-phosphate
  modified_base 5: mod_base = OTHER; note = 2'-O-methyladenosine-3'-phosphate
  modified_base 6: mod_base = OTHER; note = 2'-deoxy-2'-fluoroadenosine-3'-phosphate
  modified_base 7: mod_base = OTHER; note = 2'-O-methylcytidine-3'-phosphate
  modified_base 8: mod_base = OTHER; note = 2'-O-methyluridine-3'-phosphate
  modified_base 9: mod_base = OTHER; note = 2'-O-methyladenosine-3'-phosphate
  modified_base 10: mod_base = OTHER; note = 2'-O-methyluridine-3'-phosphate
  modified_base 11: mod_base = OTHER; note = 2'-O-methylguanosine-3'-phosphate
  modified_base 12: mod_base = OTHER; note = 2'-O-methyladenosine-3'-phosphate
  modified_base 13: mod_base = OTHER; note = 2'-O-methylcytidine-3'-phosphate
  modified_base 14: mod_base = OTHER; note = 2'-deoxy-2'-fluoroadenosine-3'-phosphate
  modified_base 15: mod_base = OTHER; note = 2'-O-methylguanosine-3'-phosphate
  modified_base 16: mod_base = OTHER; note = 2'-deoxy-2'-fluoroadenosine-3'-phosphate
  modified_base 17: mod_base = OTHER; note = 2'-O-methyladenosine-3'-phosphate
  modified_base 18: mod_base = OTHER; note = 2'-O-methylguanosine-3'-phosphate
  modified_base 19: mod_base = OTHER; note = 2'-O-methyladenosine-3'-phosphate
  modified_base 20: mod_base = OTHER; note = 2'-O-methylcytidine-3'-phosphate
  modified_base 21: mod_base = OTHER; note = 2'-O-methyluridine-3'-phosphorothioate
  modified_base 22: mod_base = OTHER; note = 2'-O-methyluridine-3'-phosphorothioate
  modified_base 23: mod_base = OTHER; note = 2'-O-methylguanosine
ttggaactatgacagaagacttg

SEQ ID NO: 11974 - RNA, 23 nt, synthetic construct
  source 1..23: mol_type = other RNA
  modified_base 1: mod_base = OTHER; note = 2'-O-methyluridine-3'-phosphorothioate 5'-(E)-Vinylphosphonate
  modified_base 2: mod_base = OTHER; note = 2'-deoxy-2'-fluorouridine-3'-phosphorothioate
  modified_base 3: mod_base = OTHER; note = 2'-O-methyluridine-3'-phosphate
  modified_base 4: mod_base = OTHER; note = 2'-O-methylguanosine-3'-phosphate
  modified_base 5: mod_base = OTHER; note = 2'-O-methylguanosine-3'-phosphate
  modified_base 6: mod_base = OTHER; note = 2'-deoxy-2'-fluoroadenosine-3'-phosphate
  modified_base 7: mod_base = OTHER; note = 2'-O-methyladenosine-3'-phosphate
  modified_base 8: mod_base = OTHER; note = 2'-O-methylcytidine-3'-phosphate
  modified_base 9: mod_base = OTHER; note = 2'-O-methyluridine-3'-phosphate
  modified_base 10: mod_base = OTHER; note = 2'-O-methyladenosine-3'-phosphate
  modified_base 11: mod_base = OTHER; note = 2'-O-methyluridine-3'-phosphate
  modified_base 12: mod_base = OTHER; note = 2'-O-methylguanosine-3'-phosphate
  modified_base 13: mod_base = OTHER; note = 2'-O-methyladenosine-3'-phosphate
  modified_base 14: mod_base = OTHER; note = 2'-deoxy-2'-fluorocytidine-3'-phosphate
  modified_base 15: mod_base = OTHER; note = 2'-O-methyladenosine-3'-phosphate
  modified_base 16: mod_base = OTHER; note = 2'-deoxy-2'-fluoroguanosine-3'-phosphate
  modified_base 17: mod_base = OTHER; note = 2'-O-methyladenosine-3'-phosphate
  modified_base 18: mod_base = OTHER; note = 2'-O-methyladenosine-3'-phosphate
  modified_base 19: mod_base = OTHER; note = 2'-O-methylguanosine-3'-phosphate
  modified_base 20: mod_base = OTHER; note = 2'-O-methyladenosine-3'-phosphate
  modified_base 21: mod_base = OTHER; note = 2'-O-methylcytidine-3'-phosphorothioate
  modified_base 22: mod_base = OTHER; note = 2'-O-methyluridine-3'-phosphorothioate
  modified_base 23: mod_base = OTHER; note = 2'-O-methyluridine
tttggaactatgacagaagactt

SEQ ID NO: 11975 - RNA, 23 nt, synthetic construct
  source 1..23: mol_type = other RNA
  modified_base 1: mod_base = OTHER; note = 2'-O-methyluridine-3'-phosphorothioate 5'-(E)-Vinylphosphonate
  modified_base 2: mod_base = OTHER; note = 2'-deoxy-2'-fluorouridine-3'-phosphorothioate
  modified_base 3: mod_base = OTHER; note = 2'-O-methylguanosine-3'-phosphate
  modified_base 4: mod_base = OTHER; note = 2'-O-methyluridine-3'-phosphate
  modified_base 5: mod_base = OTHER; note = 2'-O-methyluridine-3'-phosphate
  modified_base 6: mod_base = OTHER; note = 2'-deoxy-2'-fluoroguanosine-3'-phosphate
  modified_base 7: mod_base = OTHER; note = 2'-O-methylguanosine-3'-phosphate
  modified_base 8: mod_base = OTHER; note = 2'-O-methyladenosine-3'-phosphate
  modified_base 9: mod_base = OTHER; note = 2'-O-methyladenosine-3'-phosphate
  modified_base 10: mod_base = OTHER; note = 2'-O-methylcytidine-3'-phosphate
  modified_base 11: mod_base = OTHER; note = 2'-O-methyluridine-3'-phosphate
  modified_base 12: mod_base = OTHER; note = 2'-O-methyladenosine-3'-phosphate
  modified_base 13: mod_base = OTHER; note = 2'-O-methyluridine-3'-phosphate
  modified_base 14: mod_base = OTHER; note = 2'-deoxy-2'-fluoroguanosine-3'-phosphate
  modified_base 15: mod_base = OTHER; note = 2'-O-methyladenosine-3'-phosphate
  modified_base 16: mod_base = OTHER; note = 2'-deoxy-2'-fluorocytidine-3'-phosphate
  modified_base 17: mod_base = OTHER; note = 2'-O-methyladenosine-3'-phosphate
  modified_base 18: mod_base = OTHER; note = 2'-O-methylguanosine-3'-phosphate
  modified_base 19: mod_base = OTHER; note = 2'-O-methyladenosine-3'-phosphate
  modified_base 20: mod_base = OTHER; note = 2'-O-methyladenosine-3'-phosphate
  modified_base 21: mod_base = OTHER; note = 2'-O-methylguanosine-3'-phosphorothioate
  modified_base 22: mod_base = OTHER; note = 2'-O-methyladenosine-3'-phosphorothioate
  modified_base 23: mod_base = OTHER; note = 2'-O-methylcytidine
ttgttggaactatgacagaagac

SEQ ID NO: 11976 - RNA, 23 nt, synthetic construct
  source 1..23: mol_type = other RNA
  modified_base 1: mod_base = OTHER; note = 2'-O-methyluridine-3'-phosphorothioate 5'-(E)-Vinylphosphonate
  modified_base 2: mod_base = OTHER; note = 2'-deoxy-2'-fluorouridine-3'-phosphorothioate
  modified_base 3: mod_base = OTHER; note = 2'-O-methyluridine-3'-phosphate
  modified_base 4: mod_base = OTHER; note = 2'-O-methylguanosine-3'-phosphate
  modified_base 5: mod_base = OTHER; note = 2'-O-methyluridine-3'-phosphate
  modified_base 6: mod_base = OTHER; note = 2'-deoxy-2'-fluorouridine-3'-phosphate
  modified_base 7: mod_base = OTHER; note = 2'-O-methylguanosine-3'-phosphate
  modified_base 8: mod_base = OTHER; note = 2'-O-methylguanosine-3'-phosphate
  modified_base 9: mod_base = OTHER; note = 2'-O-methyladenosine-3'-phosphate
  modified_base 10: mod_base = OTHER; note = 2'-O-methyladenosine-3'-phosphate
  modified_base 11: mod_base = OTHER; note = 2'-O-methylcytidine-3'-phosphate
  modified_base 12: mod_base = OTHER; note = 2'-O-methyluridine-3'-phosphate
  modified_base 13: mod_base = OTHER; note = 2'-O-methyladenosine-3'-phosphate
  modified_base 14: mod_base = OTHER; note = 2'-deoxy-2'-fluorouridine-3'-phosphate
  modified_base 15: mod_base = OTHER; note = 2'-O-methylguanosine-3'-phosphate
  modified_base 16: mod_base = OTHER; note = 2'-deoxy-2'-fluoroadenosine-3'-phosphate
  modified_base 17: mod_base = OTHER; note = 2'-O-methylcytidine-3'-phosphate
  modified_base 18: mod_base = OTHER; note = 2'-O-methyladenosine-3'-phosphate
  modified_base 19: mod_base = OTHER; note = 2'-O-methylguanosine-3'-phosphate
  modified_base 20: mod_base = OTHER; note = 2'-O-methyladenosine-3'-phosphate
  modified_base 21: mod_base = OTHER; note = 2'-O-methyladenosine-3'-phosphorothioate
  modified_base 22: mod_base = OTHER; note = 2'-O-methylguanosine-3'-phosphorothioate
  modified_base 23: mod_base = OTHER; note = 2'-O-methyladenosine
tttgttggaactatgacagaaga

SEQ ID NO: 11977 - RNA, 23 nt, synthetic construct
  source 1..23: mol_type = other RNA
  modified_base 1: mod_base = OTHER; note = 2'-O-methyluridine-3'-phosphorothioate 5'-(E)-Vinylphosphonate
  modified_base 2: mod_base = OTHER; note = 2'-deoxy-2'-fluoroadenosine-3'-phosphorothioate
  modified_base 3: mod_base = OTHER; note = 2'-O-methyluridine-3'-phosphate
  modified_base 4: mod_base = OTHER; note = 2'-O-methyluridine-3'-phosphate
  modified_base 5: mod_base = OTHER; note = 2'-O-methylguanosine-3'-phosphate
  modified_base 6: mod_base = OTHER; note = 2'-deoxy-2'-fluorouridine-3'-phosphate
  modified_base 7: mod_base = OTHER; note = 2'-O-methyluridine-3'-phosphate
  modified_base 8: mod_base = OTHER; note = 2'-O-methylguanosine-3'-phosphate
  modified_base 9: mod_base = OTHER; note = 2'-O-methylguanosine-3'-phosphate
  modified_base 10: mod_base = OTHER; note = 2'-O-methyladenosine-3'-phosphate
  modified_base 11: mod_base = OTHER; note = 2'-O-methyladenosine-3'-phosphate
  modified_base 12: mod_base = OTHER; note = 2'-O-methylcytidine-3'-phosphate
  modified_base 13: mod_base = OTHER; note = 2'-O-methyluridine-3'-phosphate
  modified_base 14: mod_base = OTHER; note = 2'-deoxy-2'-fluoroadenosine-3'-phosphate
  modified_base 15: mod_base = OTHER; note = 2'-O-methyluridine-3'-phosphate
  modified_base 16: mod_base = OTHER; note = 2'-deoxy-2'-fluoroguanosine-3'-phosphate
  modified_base 17: mod_base = OTHER; note = 2'-O-methyladenosine-3'-phosphate
  modified_base 18: mod_base = OTHER; note = 2'-O-methylcytidine-3'-phosphate
  modified_base 19: mod_base = OTHER; note = 2'-O-methyladenosine-3'-phosphate
  modified_base 20: mod_base = OTHER; note = 2'-O-methylguanosine-3'-phosphate
  modified_base 21: mod_base = OTHER; note = 2'-O-methyladenosine-3'-phosphorothioate
  modified_base 22: mod_base = OTHER; note = 2'-O-methyladenosine-3'-phosphorothioate
  modified_base 23: mod_base = OTHER; note = 2'-O-methylguanosine
tattgttggaactatgacagaag

SEQ ID NO: 11978 - RNA, 23 nt, synthetic construct
  source 1..23: mol_type = other RNA
  modified_base 1: mod_base = OTHER; note = 2'-O-methyluridine-3'-phosphorothioate 5'-(E)-Vinylphosphonate
  modified_base 2: mod_base = OTHER; note = 2'-deoxy-2'-fluorocytidine-3'-phosphorothioate
  modified_base 3: mod_base = OTHER; note = 2'-O-methyladenosine-3'-phosphate
  modified_base 4: mod_base = OTHER; note = 2'-O-methyluridine-3'-phosphate
  modified_base 5: mod_base = OTHER; note = 2'-O-methyluridine-3'-phosphate
  modified_base 6: mod_base = OTHER; note = 2'-deoxy-2'-fluoroguanosine-3'-phosphate
  modified_base 7: mod_base = OTHER; note = 2'-O-methyluridine-3'-phosphate
  modified_base 8: mod_base = OTHER; note = 2'-O-methyluridine-3'-phosphate
  modified_base 9: mod_base = OTHER; note = 2'-O-methylguanosine-3'-phosphate
  modified_base 10: mod_base = OTHER; note = 2'-O-methylguanosine-3'-phosphate
  modified_base 11: mod_base = OTHER; note = 2'-O-methyladenosine-3'-phosphate
  modified_base 12: mod_base = OTHER; note = 2'-O-methyladenosine-3'-phosphate
  modified_base 13: mod_base = OTHER; note = 2'-O-methylcytidine-3'-phosphate
  modified_base 14: mod_base = OTHER; note = 2'-deoxy-2'-fluorouridine-3'-phosphate
  modified_base 15: mod_base = OTHER; note = 2'-O-methyladenosine-3'-phosphate
  modified_base 16: mod_base = OTHER; note = 2'-deoxy-2'-fluorouridine-3'-phosphate
  modified_base 17: mod_base = OTHER; note = 2'-O-methylguanosine-3'-phosphate
  modified_base 18: mod_base = OTHER; note = 2'-O-methyladenosine-3'-phosphate
  modified_base 19: mod_base = OTHER; note = 2'-O-methylcytidine-3'-phosphate
  modified_base 20: mod_base = OTHER; note = 2'-O-methyladenosine-3'-phosphate
  modified_base 21: mod_base = OTHER; note = 2'-O-methylguanosine-3'-phosphorothioate
  modified_base 22: mod_base = OTHER; note = 2'-O-methyladenosine-3'-phosphorothioate
  modified_base 23: mod_base = OTHER; note = 2'-O-methyladenosine
tcattgttggaactatgacagaa

SEQ ID NO: 11979 - RNA, 23 nt, synthetic construct
  source 1..23: mol_type = other RNA
  modified_base 1: mod_base = OTHER; note = 2'-O-methyluridine-3'-phosphorothioate 5'-(E)-Vinylphosphonate
  modified_base 2: mod_base = OTHER; note = 2'-deoxy-2'-fluoroadenosine-3'-phosphorothioate
  modified_base 3: mod_base = OTHER; note = 2'-O-methylcytidine-3'-phosphate
  modified_base 4: mod_base = OTHER; note = 2'-O-methyladenosine-3'-phosphate
  modified_base 5: mod_base = OTHER; note = 2'-O-methyluridine-3'-phosphate
  modified_base 6: mod_base = OTHER; note = 2'-deoxy-2'-fluorouridine-3'-phosphate
  modified_base 7: mod_base = OTHER; note = 2'-O-methylguanosine-3'-phosphate
  modified_base 8: mod_base = OTHER; note = 2'-O-methyluridine-3'-phosphate
  modified_base 9: mod_base = OTHER; note = 2'-O-methyluridine-3'-phosphate
  modified_base 10: mod_base = OTHER; note = 2'-O-methylguanosine-3'-phosphate
  modified_base 11: mod_base = OTHER; note = 2'-O-methylguanosine-3'-phosphate
  modified_base 12: mod_base = OTHER; note = 2'-O-methyladenosine-3'-phosphate
  modified_base 13: mod_base = OTHER; note = 2'-O-methyladenosine-3'-phosphate
  modified_base 14: mod_base = OTHER; note = 2'-deoxy-2'-fluorocytidine-3'-phosphate
  modified_base 15: mod_base = OTHER; note = 2'-O-methyluridine-3'-phosphate
  modified_base 16: mod_base = OTHER; note = 2'-deoxy-2'-fluoroadenosine-3'-phosphate
  modified_base 17: mod_base = OTHER; note = 2'-O-methyluridine-3'-phosphate
  modified_base 18: mod_base = OTHER; note = 2'-O-methylguanosine-3'-phosphate
  modified_base 19: mod_base = OTHER; note = 2'-O-methyladenosine-3'-phosphate
  modified_base 20: mod_base = OTHER; note = 2'-O-methylcytidine-3'-phosphate
  modified_base 21: mod_base = OTHER; note = 2'-O-methyladenosine-3'-phosphorothioate
  modified_base 22: mod_base = OTHER; note = 2'-O-methylguanosine-3'-phosphorothioate
  modified_base 23: mod_base = OTHER; note = 2'-O-methyladenosine
tacattgttggaactatgacaga

SEQ ID NO: 11980 - RNA, 23 nt, synthetic construct
  source 1..23: mol_type = other RNA
  modified_base 1: mod_base = OTHER; note = 2'-O-methyluridine-3'-phosphorothioate 5'-(E)-Vinylphosphonate
  modified_base 2: mod_base = OTHER; note = 2'-deoxy-2'-fluoroadenosine-3'-phosphorothioate
  modified_base 3: mod_base = OTHER; note = 2'-O-methyladenosine-3'-phosphate
  modified_base 4: mod_base = OTHER; note = 2'-O-methylcytidine-3'-phosphate
  modified_base 5: mod_base = OTHER; note = 2'-O-methyladenosine-3'-phosphate
  modified_base 6: mod_base = OTHER; note = 2'-deoxy-2'-fluorouridine-3'-phosphate
  modified_base 7: mod_base = OTHER; note = 2'-O-methyluridine-3'-phosphate
  modified_base 8: mod_base = OTHER; note = 2'-O-methylguanosine-3'-phosphate
  modified_base 9: mod_base = OTHER; note = 2'-O-methyluridine-3'-phosphate
  modified_base 10: mod_base = OTHER; note = 2'-O-methyluridine-3'-phosphate
  modified_base 11: mod_base = OTHER; note = 2'-O-methylguanosine-3'-phosphate
  modified_base 12: mod_base = OTHER; note = 2'-O-methylguanosine-3'-phosphate
  modified_base 13: mod_base = OTHER; note = 2'-O-methyladenosine-3'-phosphate
  modified_base 14: mod_base = OTHER; note = 2'-deoxy-2'-fluoroadenosine-3'-phosphate
  modified_base 15: mod_base = OTHER; note = 2'-O-methylcytidine-3'-phosphate
  modified_base 16: mod_base = OTHER; note = 2'-deoxy-2'-fluorouridine-3'-phosphate
  modified_base 17: mod_base = OTHER; note = 2'-O-methyladenosine-3'-phosphate
  modified_base 18: mod_base = OTHER; note = 2'-O-methyluridine-3'-phosphate
  modified_base 19: mod_base = OTHER; note = 2'-O-methylguanosine-3'-phosphate
  modified_base 20: mod_base = OTHER; note = 2'-O-methyladenosine-3'-phosphate
  modified_base 21: mod_base = OTHER; note = 2'-O-methylcytidine-3'-phosphorothioate
  modified_base 22: mod_base = OTHER; note = 2'-O-methyladenosine-3'-phosphorothioate
  modified_base 23: mod_base = OTHER; note = 2'-O-methylguanosine
taacattgttggaactatgacag

SEQ ID NO: 11981 - RNA, 23 nt, synthetic construct
  source 1..23: mol_type = other RNA
  modified_base 1: mod_base = OTHER; note = 2'-O-methyluridine-3'-phosphorothioate 5'-(E)-Vinylphosphonate
  modified_base 2: mod_base = OTHER; note = 2'-deoxy-2'-fluorouridine-3'-phosphorothioate
  modified_base 3: mod_base = OTHER; note = 2'-O-methyladenosine-3'-phosphate
  modified_base 4: mod_base = OTHER; note = 2'-O-methyladenosine-3'-phosphate
  modified_base 5: mod_base = OTHER; note = 2'-O-methylcytidine-3'-phosphate
  modified_base 6: mod_base = OTHER; note = 2'-deoxy-2'-fluoroadenosine-3'-phosphate
  modified_base 7: mod_base = OTHER; note = 2'-O-methyluridine-3'-phosphate
  modified_base 8: mod_base = OTHER; note = 2'-O-methyluridine-3'-phosphate
  modified_base 9: mod_base = OTHER; note = 2'-O-methylguanosine-3'-phosphate
  modified_base 10: mod_base = OTHER; note = 2'-O-methyluridine-3'-phosphate
  modified_base 11: mod_base = OTHER; note = 2'-O-methyluridine-3'-phosphate
  modified_base 12: mod_base = OTHER; note = 2'-O-methylguanosine-3'-phosphate
  modified_base 13: mod_base = OTHER; note = 2'-O-methylguanosine-3'-phosphate
  modified_base 14: mod_base = OTHER; note = 2'-deoxy-2'-fluoroadenosine-3'-phosphate
  modified_base 15: mod_base = OTHER; note = 2'-O-methyladenosine-3'-phosphate
  modified_base 16: mod_base = OTHER; note = 2'-deoxy-2'-fluorocytidine-3'-phosphate
  modified_base 17: mod_base = OTHER; note = 2'-O-methyluridine-3'-phosphate
  modified_base 18: mod_base = OTHER; note = 2'-O-methyladenosine-3'-phosphate
  modified_base 19: mod_base = OTHER; note = 2'-O-methyluridine-3'-phosphate
  modified_base 20: mod_base = OTHER; note = 2'-O-methylguanosine-3'-phosphate
  modified_base 21: mod_base = OTHER; note = 2'-O-methyladenosine-3'-phosphorothioate
  modified_base 22: mod_base = OTHER; note = 2'-O-methylcytidine-3'-phosphorothioate
  modified_base 23: mod_base = OTHER; note = 2'-O-methyladenosine
ttaacattgttggaactatgaca

SEQ ID NO: 11982 - RNA, 23 nt, synthetic construct
  source 1..23: mol_type = other RNA
  modified_base 1: mod_base = OTHER; note = 2'-O-methyluridine-3'-phosphorothioate 5'-(E)-Vinylphosphonate
  modified_base 2: mod_base = OTHER; note = 2'-deoxy-2'-fluoroguanosine-3'-phosphorothioate
  modified_base 3: mod_base = OTHER; note = 2'-O-methyluridine-3'-phosphate
  modified_base 4: mod_base = OTHER; note = 2'-O-methyladenosine-3'-phosphate
  modified_base 5: mod_base = OTHER; note = 2'-O-methyladenosine-3'-phosphate
  modified_base 6: mod_base = OTHER; note = 2'-deoxy-2'-fluorocytidine-3'-phosphate
  modified_base 7: mod_base = OTHER; note = 2'-O-methyladenosine-3'-phosphate
  modified_base 8: mod_base = OTHER; note = 2'-O-methyluridine-3'-phosphate
  modified_base 9: mod_base = OTHER; note = 2'-O-methyluridine-3'-phosphate
  modified_base 10: mod_base = OTHER; note = 2'-O-methylguanosine-3'-phosphate
  modified_base 11: mod_base = OTHER; note = 2'-O-methyluridine-3'-phosphate
  modified_base 12: mod_base = OTHER; note = 2'-O-methyluridine-3'-phosphate
  modified_base 13: mod_base = OTHER; note = 2'-O-methylguanosine-3'-phosphate
  modified_base 14: mod_base = OTHER; note = 2'-deoxy-2'-fluoroguanosine-3'-phosphate
  modified_base 15: mod_base = OTHER; note = 2'-O-methyladenosine-3'-phosphate
  modified_base 16: mod_base = OTHER; note = 2'-deoxy-2'-fluoroadenosine-3'-phosphate
  modified_base 17: mod_base = OTHER; note = 2'-O-methylcytidine-3'-phosphate
  modified_base 18: mod_base = OTHER; note = 2'-O-methyluridine-3'-phosphate
  modified_base 19: mod_base = OTHER; note = 2'-O-methyladenosine-3'-phosphate
  modified_base 20: mod_base = OTHER; note = 2'-O-methyluridine-3'-phosphate
  modified_base 21: mod_base = OTHER; note = 2'-O-methylguanosine-3'-phosphorothioate
  modified_base 22: mod_base = OTHER; note = 2'-O-methyladenosine-3'-phosphorothioate
  modified_base 23: mod_base = OTHER; note = 2'-O-methylcytidine
tgtaacattgttggaactatgac

SEQ ID NO: 11983 - RNA, 23 nt, synthetic construct
  source 1..23: mol_type = other RNA
  modified_base 1: mod_base = OTHER; note = 2'-O-methyluridine-3'-phosphorothioate 5'-(E)-Vinylphosphonate
  modified_base 2: mod_base = OTHER; note = 2'-deoxy-2'-fluoroguanosine-3'-phosphorothioate
  modified_base 3: mod_base = OTHER; note = 2'-O-methylguanosine-3'-phosphate
  modified_base 4: mod_base = OTHER; note = 2'-O-methyluridine-3'-phosphate
  modified_base 5: mod_base = OTHER; note = 2'-O-methyladenosine-3'-phosphate
  modified_base 6: mod_base = OTHER; note = 2'-deoxy-2'-fluoroadenosine-3'-phosphate
  modified_base 7: mod_base = OTHER; note = 2'-O-methylcytidine-3'-phosphate
  modified_base 8: mod_base = OTHER; note = 2'-O-methyladenosine-3'-phosphate
  modified_base 9: mod_base = OTHER; note = 2'-O-methyluridine-3'-phosphate
  modified_base 10: mod_base = OTHER; note = 2'-O-methyluridine-3'-phosphate
  modified_base 11: mod_base = OTHER; note = 2'-O-methylguanosine-3'-phosphate
  modified_base 12: mod_base = OTHER; note = 2'-O-methyluridine-3'-phosphate
  modified_base 13: mod_base = OTHER; note = 2'-O-methyluridine-3'-phosphate
  modified_base 14: mod_base = OTHER; note = 2'-deoxy-2'-fluoroguanosine-3'-phosphate
  modified_base 15: mod_base = OTHER; note = 2'-O-methylguanosine-3'-phosphate
  modified_base 16: mod_base = OTHER; note = 2'-deoxy-2'-fluoroadenosine-3'-phosphate
  modified_base 17: mod_base = OTHER; note = 2'-O-methyladenosine-3'-phosphate
  modified_base 18: mod_base = OTHER; note = 2'-O-methylcytidine-3'-phosphate
  modified_base 19: mod_base = OTHER; note = 2'-O-methyluridine-3'-phosphate
  modified_base 20: mod_base = OTHER; note = 2'-O-methyladenosine-3'-phosphate
  modified_base 21: mod_base = OTHER; note = 2'-O-methyluridine-3'-phosphorothioate
  modified_base 22: mod_base = OTHER; note = 2'-O-methylguanosine-3'-phosphorothioate
  modified_base 23: mod_base = OTHER; note = 2'-O-methyladenosine
tggtaacattgttggaactatga

SEQ ID NO: 11984 - RNA, 23 nt, synthetic construct
  source 1..23: mol_type = other RNA
  modified_base 1: mod_base = OTHER; note = 2'-O-methyluridine-3'-phosphorothioate 5'-(E)-Vinylphosphonate
  modified_base 2: mod_base = OTHER; note = 2'-deoxy-2'-fluorouridine-3'-phosphorothioate
  modified_base 3: mod_base = OTHER; note = 2'-O-methylguanosine-3'-phosphate
  modified_base 4: mod_base = OTHER; note = 2'-O-methylguanosine-3'-phosphate
  modified_base 5: mod_base = OTHER; note = 2'-O-methyluridine-3'-phosphate
  modified_base 6: mod_base = OTHER; note = 2'-deoxy-2'-fluoroadenosine-3'-phosphate
  modified_base 7: mod_base = OTHER; note = 2'-O-methyladenosine-3'-phosphate
  modified_base 8: mod_base = OTHER; note = 2'-O-methylcytidine-3'-phosphate
  modified_base 9: mod_base = OTHER; note = 2'-O-methyladenosine-3'-phosphate
  modified_base 10: mod_base = OTHER; note = 2'-O-methyluridine-3'-phosphate
  modified_base 11: mod_base = OTHER; note = 2'-O-methyluridine-3'-phosphate
  modified_base 12: mod_base = OTHER; note = 2'-O-methylguanosine-3'-phosphate
  modified_base 13: mod_base = OTHER; note = 2'-O-methyluridine-3'-phosphate
  modified_base 14: mod_base = OTHER; note = 2'-deoxy-2'-fluorouridine-3'-phosphate
  modified_base 15: mod_base = OTHER; note = 2'-O-methylguanosine-3'-phosphate
  modified_base 16: mod_base = OTHER; note = 2'-deoxy-2'-fluoroguanosine-3'-phosphate
  modified_base 17: mod_base = OTHER; note = 2'-O-methyladenosine-3'-phosphate
  modified_base 18: mod_base = OTHER; note = 2'-O-methyladenosine-3'-phosphate
  modified_base 19: mod_base = OTHER; note = 2'-O-methylcytidine-3'-phosphate
  modified_base 20: mod_base = OTHER; note = 2'-O-methyluridine-3'-phosphate
  modified_base 21: mod_base = OTHER; note = 2'-O-methyladenosine-3'-phosphorothioate
  modified_base 22: mod_base = OTHER; note = 2'-O-methyluridine-3'-phosphorothioate
  modified_base 23: mod_base = OTHER; note = 2'-O-methylguanosine
ttggtaacattgttggaactatg

SEQ ID NO: 11985 - RNA, 23 nt, synthetic construct
  source 1..23: mol_type = other RNA
  modified_base 1: mod_base = OTHER; note = 2'-O-methyluridine-3'-phosphorothioate 5'-(E)-Vinylphosphonate
  modified_base 2: mod_base = OTHER; note = 2'-deoxy-2'-fluorouridine-3'-phosphorothioate
  modified_base 3: mod_base = OTHER; note = 2'-O-methyluridine-3'-phosphate
  modified_base 4: mod_base = OTHER; note = 2'-O-methylguanosine-3'-phosphate
  modified_base 5: mod_base = OTHER; note = 2'-O-methylguanosine-3'-phosphate
  modified_base 6: mod_base = OTHER; note = 2'-deoxy-2'-fluorouridine-3'-phosphate
  modified_base 7: mod_base = OTHER; note = 2'-O-methyladenosine-3'-phosphate
  modified_base 8: mod_base = OTHER; note = 2'-O-methyladenosine-3'-phosphate
  modified_base 9: mod_base = OTHER; note = 2'-O-methylcytidine-3'-phosphate
  modified_base 10: mod_base = OTHER; note = 2'-O-methyladenosine-3'-phosphate
  modified_base 11: mod_base = OTHER; note = 2'-O-methyluridine-3'-phosphate
  modified_base 12: mod_base = OTHER; note = 2'-O-methyluridine-3'-phosphate
  modified_base 13: mod_base = OTHER; note = 2'-O-methylguanosine-3'-phosphate
  modified_base 14: mod_base = OTHER; note = 2'-deoxy-2'-fluorouridine-3'-phosphate
  modified_base 15: mod_base = OTHER; note = 2'-O-methyluridine-3'-phosphate
  modified_base 16: mod_base = OTHER; note = 2'-deoxy-2'-fluoroguanosine-3'-phosphate
  modified_base 17: mod_base = OTHER; note = 2'-O-methylguanosine-3'-phosphate
  modified_base 18: mod_base = OTHER; note = 2'-O-methyladenosine-3'-phosphate
  modified_base 19: mod_base = OTHER; note = 2'-O-methyladenosine-3'-phosphate
  modified_base 20: mod_base = OTHER; note = 2'-O-methylcytidine-3'-phosphate
  modified_base 21: mod_base = OTHER; note = 2'-O-methyluridine-3'-phosphorothioate
  modified_base 22: mod_base = OTHER; note = 2'-O-methyladenosine-3'-phosphorothioate
  modified_base 23: mod_base = OTHER; note = 2'-O-methyluridine
tttggtaacattgttggaactat

SEQ ID NO: 11986 - RNA, 23 nt, synthetic construct
  source 1..23: mol_type = other RNA
  modified_base 1: mod_base = OTHER; note = 2'-O-methyluridine-3'-phosphorothioate 5'-(E)-Vinylphosphonate
  modified_base 2: mod_base = OTHER; note = 2'-deoxy-2'-fluorouridine-3'-phosphorothioate
  modified_base 3: mod_base = OTHER; note = 2'-O-methyluridine-3'-phosphate
  modified_base 4: mod_base = OTHER; note = 2'-O-methyluridine-3'-phosphate
  modified_base 5: mod_base = OTHER; note = 2'-O-methylguanosine-3'-phosphate
  modified_base 6: mod_base = OTHER; note = 2'-deoxy-2'-fluoroguanosine-3'-phosphate
  modified_base 7: mod_base = OTHER; note = 2'-O-methyluridine-3'-phosphate
  modified_base 8: mod_base = OTHER; note = 2'-O-methyladenosine-3'-phosphate
  modified_base 9: mod_base = OTHER; note = 2'-O-methyladenosine-3'-phosphate
  modified_base 10: mod_base = OTHER; note = 2'-O-methylcytidine-3'-phosphate
  modified_base 11: mod_base = OTHER; note = 2'-O-methyladenosine-3'-phosphate
  modified_base 12: mod_base = OTHER; note = 2'-O-methyluridine-3'-phosphate
  modified_base 13: mod_base = OTHER; note = 2'-O-methyluridine-3'-phosphate
  modified_base 14: mod_base = OTHER; note = 2'-deoxy-2'-fluoroguanosine-3'-phosphate
  modified_base 15: mod_base = OTHER; note = 2'-O-methyluridine-3'-phosphate
  modified_base 16: mod_base = OTHER; note = 2'-deoxy-2'-fluorouridine-3'-phosphate
  modified_base 17: mod_base = OTHER; note = 2'-O-methylguanosine-3'-phosphate
  modified_base 18: mod_base = OTHER; note = 2'-O-methylguanosine-3'-phosphate
  modified_base 19: mod_base = OTHER; note = 2'-O-methyladenosine-3'-phosphate
  modified_base 20: mod_base = OTHER; note = 2'-O-methyladenosine-3'-phosphate
  modified_base 21: mod_base = OTHER; note = 2'-O-methylcytidine-3'-phosphorothioate
  modified_base 22: mod_base = OTHER; note = 2'-O-methyluridine-3'-phosphorothioate
  modified_base 23: mod_base = OTHER; note = 2'-O-methyladenosine
ttttggtaacattgttggaacta

SEQ ID NO: 11987 - RNA, 23 nt, synthetic construct
  source 1..23: mol_type = other RNA
  modified_base 1: mod_base = OTHER; note = 2'-O-methyluridine-3'-phosphorothioate 5'-(E)-Vinylphosphonate
  modified_base 2: mod_base = OTHER; note = 2'-deoxy-2'-fluorouridine-3'-phosphorothioate
  modified_base 3: mod_base = OTHER; note = 2'-O-methyluridine-3'-phosphate
  modified_base 4: mod_base = OTHER; note = 2'-O-methyluridine-3'-phosphate
  modified_base 5: mod_base = OTHER; note = 2'-O-methyluridine-3'-phosphate
  modified_base 6: mod_base = OTHER; note = 2'-deoxy-2'-fluoroguanosine-3'-phosphate
  modified_base 7: mod_base = OTHER; note = 2'-O-methylguanosine-3'-phosphate
  modified_base 8: mod_base = OTHER; note = 2'-O-methyluridine-3'-phosphate
  modified_base 9: mod_base = OTHER; note = 2'-O-methyladenosine-3'-phosphate
  modified_base 10: mod_base = OTHER; note = 2'-O-methyladenosine-3'-phosphate
  modified_base 11: mod_base = OTHER; note = 2'-O-methylcytidine-3'-phosphate
  modified_base 12: mod_base = OTHER; note = 2'-O-methyladenosine-3'-phosphate
  modified_base 13: mod_base = OTHER; note = 2'-O-methyluridine-3'-phosphate
  modified_base 14: mod_base = OTHER; note = 2'-deoxy-2'-fluorouridine-3'-phosphate
  modified_base 15: mod_base = OTHER; note = 2'-O-methylguanosine-3'-phosphate
  modified_base 16: mod_base = OTHER; note = 2'-deoxy-2'-fluorouridine-3'-phosphate
  modified_base 17: mod_base = OTHER; note = 2'-O-methyluridine-3'-phosphate
  modified_base 18: mod_base = OTHER; note = 2'-O-methylguanosine-3'-phosphate
  modified_base 19: mod_base = OTHER; note = 2'-O-methylguanosine-3'-phosphate
  modified_base 20: mod_base = OTHER; note = 2'-O-methyladenosine-3'-phosphate
  modified_base 21: mod_base = OTHER; note = 2'-O-methyladenosine-3'-phosphorothioate
  modified_base 22: mod_base = OTHER; note = 2'-O-methylcytidine-3'-phosphorothioate
  modified_base 23: mod_base = OTHER; note = 2'-O-methyluridine
tttttggtaacattgttggaact

SEQ ID NO: 11988 - RNA, 23 nt, synthetic construct
  source 1..23: mol_type = other RNA
  modified_base 1: mod_base = OTHER; note = 2'-O-methyluridine-3'-phosphorothioate 5'-(E)-Vinylphosphonate
  modified_base 2: mod_base = OTHER; note = 2'-deoxy-2'-fluoroguanosine-3'-phosphorothioate
  modified_base 3: mod_base = OTHER; note = 2'-O-methyluridine-3'-phosphate
  modified_base 4: mod_base = OTHER; note = 2'-O-methyluridine-3'-phosphate
  modified_base 5: mod_base = OTHER; note = 2'-O-methyluridine-3'-phosphate
  modified_base 6: mod_base = OTHER; note = 2'-deoxy-2'-fluorouridine-3'-phosphate
  modified_base 7: mod_base = OTHER; note = 2'-O-methylguanosine-3'-phosphate
  modified_base 8: mod_base = OTHER; note = 2'-O-methylguanosine-3'-phosphate
  modified_base 9: mod_base = OTHER; note = 2'-O-methyluridine-3'-phosphate
  modified_base 10: mod_base = OTHER; note = 2'-O-methyladenosine-3'-phosphate
  modified_base 11: mod_base = OTHER; note = 2'-O-methyladenosine-3'-phosphate
  modified_base 12: mod_base = OTHER; note = 2'-O-methylcytidine-3'-phosphate
  modified_base 13: mod_base = OTHER; note = 2'-O-methyladenosine-3'-phosphate
  modified_base 14: mod_base = OTHER; note = 2'-deoxy-2'-fluorouridine-3'-phosphate
  modified_base 15: mod_base = OTHER; note = 2'-O-methyluridine-3'-phosphate
  modified_base 16: mod_base = OTHER; note = 2'-deoxy-2'-fluoroguanosine-3'-phosphate
  modified_base 17: mod_base = OTHER; note = 2'-O-methyluridine-3'-phosphate
  modified_base 18: mod_base = OTHER; note = 2'-O-methyluridine-3'-phosphate
  modified_base 19: mod_base = OTHER; note = 2'-O-methylguanosine-3'-phosphate
  modified_base 20: mod_base = OTHER; note = 2'-O-methylguanosine-3'-phosphate
  modified_base 21: mod_base = OTHER; note = 2'-O-methyladenosine-3'-phosphorothioate
  modified_base 22: mod_base = OTHER; note = 2'-O-methyladenosine-3'-phosphorothioate
  modified_base 23: mod_base = OTHER; note = 2'-O-methylcytidine
tgttttggtaacattgttggaac

SEQ ID NO: 11989 - RNA, 23 nt, synthetic construct
  source 1..23: mol_type = other RNA
  modified_base 1: mod_base = OTHER; note = 2'-O-methyluridine-3'-phosphorothioate 5'-(E)-Vinylphosphonate
  modified_base 2: mod_base = OTHER; note = 2'-deoxy-2'-fluoroguanosine-3'-phosphorothioate
  modified_base 3: mod_base = OTHER; note = 2'-O-methylguanosine-3'-phosphate
  modified_base 4: mod_base = OTHER; note = 2'-O-methyluridine-3'-phosphate
  modified_base 5: mod_base = OTHER; note = 2'-O-methyluridine-3'-phosphate
  modified_base 6: mod_base = OTHER; note = 2'-deoxy-2'-fluorouridine-3'-phosphate
  modified_base 7: mod_base = OTHER; note = 2'-O-methyluridine-3'-phosphate
  modified_base 8: mod_base = OTHER; note = 2'-O-methylguanosine-3'-phosphate
  modified_base 9: mod_base = OTHER; note = 2'-O-methylguanosine-3'-phosphate
  modified_base 10: mod_base = OTHER; note = 2'-O-methyluridine-3'-phosphate
  modified_base 11: mod_base = OTHER; note = 2'-O-methyladenosine-3'-phosphate
  modified_base 12: mod_base = OTHER; note = 2'-O-methyladenosine-3'-phosphate
  modified_base 13: mod_base = OTHER; note = 2'-O-methylcytidine-3'-phosphate
  modified_base 14: mod_base = OTHER; note = 2'-deoxy-2'-fluoroadenosine-3'-phosphate
  modified_base 15: mod_base = OTHER; note = 2'-O-methyluridine-3'-phosphate
  modified_base 16: mod_base = OTHER; note = 2'-deoxy-2'-fluorouridine-3'-phosphate
  modified_base 17: mod_base = OTHER; note = 2'-O-methylguanosine-3'-phosphate
  modified_base 18: mod_base = OTHER; note = 2'-O-methyluridine-3'-phosphate
  modified_base 19: mod_base = OTHER; note = 2'-O-methyluridine-3'-phosphate
  modified_base 20: mod_base = OTHER; note = 2'-O-methylguanosine-3'-phosphate
  modified_base 21: mod_base = OTHER; note = 2'-O-methylguanosine-3'-phosphorothioate
  modified_base 22: mod_base = OTHER; note = 2'-O-methyladenosine-3'-phosphorothioate
  modified_base 23: mod_base = OTHER; note = 2'-O-methyladenosine
tggttttggtaacattgttggaa

SEQ ID NO: 11990 - RNA, 23 nt, synthetic construct
  source 1..23: mol_type = other RNA
  modified_base 1: mod_base = OTHER; note = 2'-O-methyluridine-3'-phosphorothioate 5'-(E)-Vinylphosphonate
  modified_base 2: mod_base = OTHER; note = 2'-deoxy-2'-fluorocytidine-3'-phosphorothioate
  modified_base 3: mod_base = OTHER; note = 2'-O-methylguanosine-3'-phosphate
  modified_base 4: mod_base = OTHER; note = 2'-O-methylguanosine-3'-phosphate
  modified_base 5: mod_base = OTHER; note = 2'-O-methyluridine-3'-phosphate
  modified_base 6: mod_base = OTHER; note = 2'-deoxy-2'-fluorouridine-3'-phosphate
  modified_base 7: mod_base = OTHER; note = 2'-O-methyluridine-3'-phosphate
  modified_base 8: mod_base = OTHER; note = 2'-O-methyluridine-3'-phosphate
  modified_base 9: mod_base = OTHER; note = 2'-O-methylguanosine-3'-phosphate
  modified_base 10: mod_base = OTHER; note = 2'-O-methylguanosine-3'-phosphate
  modified_base 11: mod_base = OTHER; note = 2'-O-methyluridine-3'-phosphate
  modified_base 12: mod_base = OTHER; note = 2'-O-methyladenosine-3'-phosphate
  modified_base 13: mod_base = OTHER; note = 2'-O-methyladenosine-3'-phosphate
  modified_base 14: mod_base = OTHER; note = 2'-deoxy-2'-fluorocytidine-3'-phosphate
  modified_base 15: mod_base = OTHER; note = 2'-O-methyladenosine-3'-phosphate
  modified_base 16: mod_base = OTHER; note = 2'-deoxy-2'-fluorouridine-3'-phosphate
  modified_base 17: mod_base = OTHER; note = 2'-O-methyluridine-3'-phosphate
  modified_base 18: mod_base = OTHER; note = 2'-O-methylguanosine-3'-phosphate
  modified_base 19: mod_base = OTHER; note = 2'-O-methyluridine-3'-phosphate
  modified_base 20: mod_base = OTHER; note = 2'-O-methyluridine-3'-phosphate
  modified_base 21: mod_base = OTHER; note = 2'-O-methylguanosine-3'-phosphorothioate
  modified_base 22: mod_base = OTHER; note = 2'-O-methylguanosine-3'-phosphorothioate
  modified_base 23: mod_base = OTHER; note = 2'-O-methyladenosine
tcggttttggtaacattgttgga

SEQ ID NO: 11991 - RNA, 23 nt, synthetic construct
  source 1..23: mol_type = other RNA
  modified_base 1: mod_base = OTHER; note = 2'-O-methyluridine-3'-phosphorothioate 5'-(E)-Vinylphosphonate
  modified_base 2: mod_base = OTHER; note = 2'-deoxy-2'-fluorouridine-3'-phosphorothioate
  modified_base 3: mod_base = OTHER; note = 2'-O-methylcytidine-3'-phosphate
  modified_base 4: mod_base = OTHER; note = 2'-O-methylguanosine-3'-phosphate
  modified_base 5: mod_base = OTHER; note = 2'-O-methylguanosine-3'-phosphate
  modified_base 6: mod_base = OTHER; note = 2'-deoxy-2'-fluorouridine-3'-phosphate
  modified_base 7: mod_base = OTHER; note = 2'-O-methyluridine-3'-phosphate
  modified_base 8: mod_base = OTHER; note = 2'-O-methyluridine-3'-phosphate
  modified_base 9: mod_base = OTHER; note = 2'-O-methyluridine-3'-phosphate
  modified_base 10: mod_base = OTHER; note = 2'-O-methylguanosine-3'-phosphate
  modified_base 11: mod_base = OTHER; note = 2'-O-methylguanosine-3'-phosphate
  modified_base 12: mod_base = OTHER; note = 2'-O-methyluridine-3'-phosphate
  modified_base 13: mod_base = OTHER; note = 2'-O-methyladenosine-3'-phosphate
  modified_base 14: mod_base = OTHER; note = 2'-deoxy-2'-fluoroadenosine-3'-phosphate
  modified_base 15: mod_base = OTHER; note = 2'-O-methylcytidine-3'-phosphate
  modified_base 16: mod_base = OTHER; note = 2'-deoxy-2'-fluoroadenosine-3'-phosphate
  modified_base 17: mod_base = OTHER; note = 2'-O-methyluridine-3'-phosphate
  modified_base 18: mod_base = OTHER; note = 2'-O-methyluridine-3'-phosphate
  modified_base 19: mod_base = OTHER; note = 2'-O-methylguanosine-3'-phosphate
  modified_base 20: mod_base = OTHER; note = 2'-O-methyluridine-3'-phosphate
  modified_base 21: mod_base = OTHER; note = 2'-O-methyluridine-3'-phosphorothioate
  modified_base 22: mod_base = OTHER; note = 2'-O-methylguanosine-3'-phosphorothioate
  modified_base 23: mod_base = OTHER; note = 2'-O-methylguanosine
ttcggttttggtaacattgttgg

SEQ ID NO: 11992 - RNA, 23 nt, synthetic construct
  source 1..23: mol_type = other RNA
  modified_base 1: mod_base = OTHER; note = 2'-O-methyluridine-3'-phosphorothioate 5'-(E)-Vinylphosphonate
  modified_base 2: mod_base = OTHER; note = 2'-deoxy-2'-fluorouridine-3'-phosphorothioate
  modified_base 3: mod_base = OTHER; note = 2'-O-methyluridine-3'-phosphate
  modified_base 4: mod_base = OTHER; note = 2'-O-methylcytidine-3'-phosphate
  modified_base 5: mod_base = OTHER; note = 2'-O-methylguanosine-3'-phosphate
  modified_base 6: mod_base = OTHER; note = 2'-deoxy-2'-fluoroguanosine-3'-phosphate
  modified_base 7: mod_base = OTHER; note = 2'-O-methyluridine-3'-phosphate
  modified_base 8: mod_base = OTHER; note = 2'-O-methyluridine-3'-phosphate
  modified_base 9: mod_base = OTHER; note = 2'-O-methyluridine-3'-phosphate
  modified_base 10: mod_base = OTHER; note = 2'-O-methyluridine-3'-phosphate
  modified_base 11: mod_base = OTHER; note = 2'-O-methylguanosine-3'-phosphate
  modified_base 12: mod_base = OTHER; note = 2'-O-methylguanosine-3'-phosphate
  modified_base 13: mod_base = OTHER; note = 2'-O-methyluridine-3'-phosphate
  modified_base 14: mod_base = OTHER; note = 2'-deoxy-2'-fluoroadenosine-3'-phosphate
  modified_base 15: mod_base = OTHER; note = 2'-O-methyladenosine-3'-phosphate
  modified_base 16: mod_base = OTHER; note = 2'-deoxy-2'-fluorocytidine-3'-phosphate
  modified_base 17: mod_base = OTHER; note = 2'-O-methyladenosine-3'-phosphate
  modified_base 18: mod_base = OTHER; note = 2'-O-methyluridine-3'-phosphate
  modified_base 19: mod_base = OTHER; note = 2'-O-methyluridine-3'-phosphate
  modified_base 20: mod_base = OTHER; note = 2'-O-methylguanosine-3'-phosphate
  modified_base 21: mod_base = OTHER; note = 2'-O-methyluridine-3'-phosphorothioate
  modified_base 22: mod_base = OTHER; note = 2'-O-methyluridine-3'-phosphorothioate
  modified_base 23: mod_base = OTHER; note = 2'-O-methylguanosine
tttcggttttggtaacattgttg

SEQ ID NO: 11993 - RNA, 23 nt, synthetic construct
  source 1..23: mol_type = other RNA
  modified_base 1: mod_base = OTHER; note = 2'-O-methyluridine-3'-phosphorothioate 5'-(E)-Vinylphosphonate
  modified_base 2: mod_base = OTHER; note = 2'-deoxy-2'-fluoroadenosine-3'-phosphorothioate
  modified_base 3: mod_base = OTHER; note = 2'-O-methyluridine-3'-phosphate
  modified_base 4: mod_base = OTHER; note = 2'-O-methyluridine-3'-phosphate
  modified_base 5: mod_base = OTHER; note = 2'-O-methylcytidine-3'-phosphate
  modified_base 6: mod_base = OTHER; note = 2'-deoxy-2'-fluoroguanosine-3'-phosphate
  modified_base 7: mod_base = OTHER; note = 2'-O-methylguanosine-3'-phosphate
  modified_base 8: mod_base = OTHER; note = 2'-O-methyluridine-3'-phosphate
  modified_base 9: mod_base = OTHER; note = 2'-O-methyluridine-3'-phosphate
  modified_base 10: mod_base = OTHER; note = 2'-O-methyluridine-3'-phosphate
  modified_base 11: mod_base = OTHER; note = 2'-O-methyluridine-3'-phosphate
  modified_base 12: mod_base = OTHER; note = 2'-O-methylguanosine-3'-phosphate
  modified_base 13: mod_base = OTHER; note = 2'-O-methylguanosine-3'-phosphate
  modified_base 14: mod_base = OTHER; note = 2'-deoxy-2'-fluorouridine-3'-phosphate
  modified_base 15: mod_base = OTHER; note = 2'-O-methyladenosine-3'-phosphate
  modified_base 16: mod_base = OTHER; note = 2'-deoxy-2'-fluoroadenosine-3'-phosphate
  modified_base 17: mod_base = OTHER; note = 2'-O-methylcytidine-3'-phosphate
  modified_base 18: mod_base = OTHER; note = 2'-O-methyladenosine-3'-phosphate
  modified_base 19: mod_base = OTHER; note = 2'-O-methyluridine-3'-phosphate
  modified_base 20: mod_base = OTHER; note = 2'-O-methyluridine-3'-phosphate
  modified_base 21: mod_base = OTHER; note = 2'-O-methylguanosine-3'-phosphorothioate
  modified_base 22: mod_base = OTHER; note = 2'-O-methyluridine-3'-phosphorothioate
  modified_base 23: mod_base = OTHER; note = 2'-O-methyluridine
tattcggttttggtaacattgtt

SEQ ID NO: 11994 - RNA, 23 nt, synthetic construct
  source 1..23: mol_type = other RNA
  modified_base 1: mod_base = OTHER; note = 2'-O-methyluridine-3'-phosphorothioate 5'-(E)-Vinylphosphonate
  modified_base 2: mod_base = OTHER; note = 2'-deoxy-2'-fluorocytidine-3'-phosphorothioate
  modified_base 3: mod_base = OTHER; note = 2'-O-methyladenosine-3'-phosphate
  modified_base 4: mod_base = OTHER; note = 2'-O-methyluridine-3'-phosphate
  modified_base 5: mod_base = OTHER; note = 2'-O-methyluridine-3'-phosphate
  modified_base 6: mod_base = OTHER; note = 2'-deoxy-2'-fluorocytidine-3'-phosphate
  modified_base 7: mod_base = OTHER; note = 2'-O-methylguanosine-3'-phosphate
  modified_base 8: mod_base = OTHER; note = 2'-O-methylguanosine-3'-phosphate
  modified_base 9: mod_base = OTHER; note = 2'-O-methyluridine-3'-phosphate
  modified_base 10: mod_base = OTHER; note = 2'-O-methyluridine-3'-phosphate
  modified_base 11: mod_base = OTHER; note = 2'-O-methyluridine-3'-phosphate
  modified_base 12: mod_base = OTHER; note = 2'-O-methyluridine-3'-phosphate
  modified_base 13: mod_base = OTHER; note = 2'-O-methylguanosine-3'-phosphate
  modified_base 14: mod_base = OTHER; note = 2'-deoxy-2'-fluoroguanosine-3'-phosphate
  modified_base 15: mod_base = OTHER; note = 2'-O-methyluridine-3'-phosphate
  modified_base 16: mod_base = OTHER; note = 2'-deoxy-2'-fluoroadenosine-3'-phosphate
  modified_base 17: mod_base = OTHER; note = 2'-O-methyladenosine-3'-phosphate
  modified_base 18: mod_base = OTHER; note = 2'-O-methylcytidine-3'-phosphate
  modified_base 19: mod_base = OTHER; note = 2'-O-methyladenosine-3'-phosphate
  modified_base 20: mod_base = OTHER; note = 2'-O-methyluridine-3'-phosphate
  modified_base 21: mod_base = OTHER; note = 2'-O-methyluridine-3'-phosphorothioate
  modified_base 22: mod_base = OTHER; note = 2'-O-methylguanosine-3'-phosphorothioate
  modified_base 23: mod_base = OTHER; note = 2'-O-methyluridine
tcattcggttttggtaacattgt

SEQ ID NO: 11995 - RNA, 23 nt, synthetic construct
  source 1..23: mol_type = other RNA
  modified_base 1: mod_base = OTHER; note = 2'-O-methyluridine-3'-phosphorothioate 5'-(E)-Vinylphosphonate
  modified_base 2: mod_base = OTHER; note = 2'-deoxy-2'-fluoroguanosine-3'-phosphorothioate
  modified_base 3: mod_base = OTHER; note = 2'-O-methylcytidine-3'-phosphate
  modified_base 4: mod_base = OTHER; note = 2'-O-methyladenosine-3'-phosphate
  modified_base 5: mod_base = OTHER; note = 2'-O-methyluridine-3'-phosphate
  modified_base 6: mod_base = OTHER; note = 2'-deoxy-2'-fluorouridine-3'-phosphate
  modified_base 7: mod_base = OTHER; note = 2'-O-methylcytidine-3'-phosphate
  modified_base 8: mod_base = OTHER; note = 2'-O-methylguanosine-3'-phosphate
  modified_base 9: mod_base = OTHER; note = 2'-O-methylguanosine-3'-phosphate
  modified_base 10: mod_base = OTHER; note = 2'-O-methyluridine-3'-phosphate
  modified_base 11: mod_base = OTHER; note = 2'-O-methyluridine-3'-phosphate
  modified_base 12: mod_base = OTHER; note = 2'-O-methyluridine-3'-phosphate
  modified_base 13: mod_base = OTHER; note = 2'-O-methyluridine-3'-phosphate
  modified_base 14: mod_base = OTHER; note = 2'-deoxy-2'-fluoroguanosine-3'-phosphate
  modified_base 15: mod_base = OTHER; note = 2'-O-methylguanosine-3'-phosphate
  modified_base 16: mod_base = OTHER; note = 2'-deoxy-2'-fluorouridine-3'-phosphate
  modified_base 17: mod_base = OTHER; note = 2'-O-methyladenosine-3'-phosphate
  modified_base 18: mod_base = OTHER; note = 2'-O-methyladenosine-3'-phosphate
  modified_base 19: mod_base = OTHER; note = 2'-O-methylcytidine-3'-phosphate
  modified_base 20: mod_base = OTHER; note = 2'-O-methyladenosine-3'-phosphate
  modified_base 21: mod_base = OTHER; note = 2'-O-methyluridine-3'-phosphorothioate
  modified_base 22: mod_base = OTHER; note = 2'-O-methyluridine-3'-phosphorothioate
  modified_base 23: mod_base = OTHER; note = 2'-O-methylguanosine
tgcattcggttttggtaacattg

SEQ ID NO: 11996 - RNA, 23 nt, synthetic construct
  source 1..23: mol_type = other RNA
  modified_base 1: mod_base = OTHER; note = 2'-O-methyluridine-3'-phosphorothioate 5'-(E)-Vinylphosphonate
  modified_base 2: mod_base = OTHER; note = 2'-deoxy-2'-fluoroadenosine-3'-phosphorothioate
  modified_base 3: mod_base = OTHER; note = 2'-O-methylguanosine-3'-phosphate
  modified_base 4: mod_base = OTHER; note = 2'-O-methylcytidine-3'-phosphate
  modified_base 5: mod_base = OTHER; note = 2'-O-methyladenosine-3'-phosphate
  modified_base 6: mod_base = OTHER; note = 2'-deoxy-2'-fluorouridine-3'-phosphate
  modified_base 7: mod_base = OTHER; note = 2'-O-methyluridine-3'-phosphate
  modified_base 8: mod_base = OTHER; note = 2'-O-methylcytidine-3'-phosphate
  modified_base 9: mod_base = OTHER; note = 2'-O-methylguanosine-3'-phosphate
  modified_base 10: mod_base = OTHER; note = 2'-O-methylguanosine-3'-phosphate
  modified_base 11: mod_base = OTHER; note = 2'-O-methyluridine-3'-phosphate
  modified_base 12: mod_base = OTHER; note = 2'-O-methyluridine-3'-phosphate
  modified_base 13: mod_base = OTHER; note = 2'-O-methyluridine-3'-phosphate
  modified_base 14: mod_base = OTHER; note = 2'-deoxy-2'-fluorouridine-3'-phosphate
  modified_base 15: mod_base = OTHER; note = 2'-O-methylguanosine-3'-phosphate
  modified_base 16: mod_base = OTHER; note = 2'-deoxy-2'-fluoroguanosine-3'-phosphate
  modified_base 17: mod_base = OTHER; note = 2'-O-methyluridine-3'-phosphate
  modified_base 18: mod_base = OTHER; note = 2'-O-methyladenosine-3'-phosphate
  modified_base 19: mod_base = OTHER; note = 2'-O-methyladenosine-3'-phosphate
  modified_base 20: mod_base = OTHER; note = 2'-O-methylcytidine-3'-phosphate
  modified_base 21: mod_base = OTHER; note = 2'-O-methyladenosine-3'-phosphorothioate
  modified_base 22: mod_base = OTHER; note = 2'-O-methyluridine-3'-phosphorothioate
  modified_base 23: mod_base = OTHER; note = 2'-O-methyluridine
tagcattcggttttggtaacatt

SEQ ID NO: 11997 - RNA, 23 nt, synthetic construct
  source 1..23: mol_type = other RNA
  modified_base 1: mod_base = OTHER; note = 2'-O-methyluridine-3'-phosphorothioate 5'-(E)-Vinylphosphonate
  modified_base 2: mod_base = OTHER; note = 2'-deoxy-2'-fluorocytidine-3'-phosphorothioate
  modified_base 3: mod_base = OTHER; note = 2'-O-methyladenosine-3'-phosphate
  modified_base 4: mod_base = OTHER; note = 2'-O-methylguanosine-3'-phosphate
  modified_base 5: mod_base = OTHER; note = 2'-O-methylcytidine-3'-phosphate
  modified_base 6: mod_base = OTHER; note = 2'-deoxy-2'-fluoroadenosine-3'-phosphate
  modified_base 7: mod_base = OTHER; note = 2'-O-methyluridine-3'-phosphate
  modified_base 8: mod_base = OTHER; note = 2'-O-methyluridine-3'-phosphate
  modified_base 9: mod_base = OTHER; note = 2'-O-methylcytidine-3'-phosphate
  modified_base 10: mod_base = OTHER; note = 2'-O-methylguanosine-3'-phosphate
  modified_base 11: mod_base = OTHER; note = 2'-O-methylguanosine-3'-phosphate
  modified_base 12: mod_base = OTHER; note = 2'-O-methyluridine-3'-phosphate
  modified_base 13: mod_base = OTHER; note = 2'-O-methyluridine-3'-phosphate
  modified_base 14: mod_base = OTHER; note = 2'-deoxy-2'-fluorouridine-3'-phosphate
  modified_base 15: mod_base = OTHER; note = 2'-O-methyluridine-3'-phosphate
  modified_base 16: mod_base = OTHER; note = 2'-deoxy-2'-fluoroguanosine-3'-phosphate
  modified_base 17: mod_base = OTHER; note = 2'-O-methylguanosine-3'-phosphate
  modified_base 18: mod_base = OTHER; note = 2'-O-methyluridine-3'-phosphate
  modified_base 19: mod_base = OTHER; note = 2'-O-methyladenosine-3'-phosphate
  modified_base 20: mod_base = OTHER; note = 2'-O-methyladenosine-3'-phosphate
  modified_base 21: mod_base = OTHER; note = 2'-O-methylcytidine-3'-phosphorothioate
  modified_base 22: mod_base = OTHER; note = 2'-O-methyladenosine-3'-phosphorothioate
  modified_base 23: mod_base = OTHER; note = 2'-O-methyluridine
tcagcattcggttttggtaacat

SEQ ID NO: 11998 - RNA, 23 nt, synthetic construct
  source 1..23: mol_type = other RNA
  modified_base 1: mod_base = OTHER; note = 2'-O-methyluridine-3'-phosphorothioate 5'-(E)-Vinylphosphonate
  modified_base 2: mod_base = OTHER; note = 2'-deoxy-2'-fluoroguanosine-3'-phosphorothioate
  modified_base 3: mod_base = OTHER; note = 2'-O-methylcytidine-3'-phosphate
  modified_base 4: mod_base = OTHER; note = 2'-O-methyladenosine-3'-phosphate
  modified_base 5: mod_base = OTHER; note = 2'-O-methylguanosine-3'-phosphate
  modified_base 6: mod_base = OTHER; note = 2'-deoxy-2'-fluorocytidine-3'-phosphate
  modified_base 7: mod_base = OTHER; note = 2'-O-methyladenosine-3'-phosphate
  modified_base 8: mod_base = OTHER; note = 2'-O-methyluridine-3'-phosphate
  modified_base 9: mod_base = OTHER; note = 2'-O-methyluridine-3'-phosphate
  modified_base 10: mod_base = OTHER; note = 2'-O-methylcytidine-3'-phosphate
  modified_base 11: mod_base = OTHER; note = 2'-O-methylguanosine-3'-phosphate
  modified_base 12: mod_base = OTHER; note = 2'-O-methylguanosine-3'-phosphate
  modified_base 13: mod_base = OTHER; note = 2'-O-methyluridine-3'-phosphate
  modified_base 14: mod_base = OTHER; note = 2'-deoxy-2'-fluorouridine-3'-phosphate
  modified_base 15: mod_base = OTHER; note = 2'-O-methyluridine-3'-phosphate
  modified_base 16: mod_base = OTHER; note = 2'-deoxy-2'-fluorouridine-3'-phosphate
  modified_base 17: mod_base = OTHER; note = 2'-O-methylguanosine-3'-phosphate
  modified_base 18: mod_base = OTHER; note = 2'-O-methylguanosine-3'-phosphate
  modified_base 19: mod_base = OTHER; note = 2'-O-methyluridine-3'-phosphate
  modified_base 20: mod_base = OTHER; note = 2'-O-methyladenosine-3'-phosphate
  modified_base 21: mod_base = OTHER; note = 2'-O-methyladenosine-3'-phosphorothioate
  modified_base 22: mod_base = OTHER; note = 2'-O-methylcytidine-3'-phosphorothioate
  modified_base 23: mod_base = OTHER; note = 2'-O-methyladenosine
tgcagcattcggttttggtaaca

SEQ ID NO: 11999 - RNA, 23 nt, synthetic construct
  source 1..23: mol_type = other RNA
  modified_base 1: mod_base = OTHER; note = 2'-O-methyluridine-3'-phosphorothioate 5'-(E)-Vinylphosphonate
  modified_base 2: mod_base = OTHER; note = 2'-deoxy-2'-fluoroadenosine-3'-phosphorothioate
  modified_base 3: mod_base = OTHER; note = 2'-O-methylguanosine-3'-phosphate
  modified_base 4: mod_base = OTHER; note = 2'-O-methylcytidine-3'-phosphate
  modified_base 5: mod_base = OTHER; note = 2'-O-methyladenosine-3'-phosphate
  modified_base 6: mod_base = OTHER; note = 2'-deoxy-2'-fluoroguanosine-3'-phosphate
  modified_base 7: mod_base = OTHER; note = 2'-O-methylcytidine-3'-phosphate
  modified_base 8: mod_base = OTHER; note = 2'-O-methyladenosine-3'-phosphate
  modified_base 9: mod_base = OTHER; note = 2'-O-methyluridine-3'-phosphate
  modified_base 10: mod_base = OTHER; note = 2'-O-methyluridine-3'-phosphate
  modified_base 11: mod_base = OTHER; note = 2'-O-methylcytidine-3'-phosphate
  modified_base 12: mod_base = OTHER; note = 2'-O-methylguanosine-3'-phosphate
  modified_base 13: mod_base = OTHER; note = 2'-O-methylguanosine-3'-phosphate
  modified_base 14: mod_base = OTHER; note = 2'-deoxy-2'-fluorouridine-3'-phosphate
  modified_base 15: mod_base = OTHER; note = 2'-O-methyluridine-3'-phosphate
  modified_base 16: mod_base = OTHER; note = 2'-deoxy-2'-fluorouridine-3'-phosphate
  modified_base 17: mod_base = OTHER; note = 2'-O-methyluridine-3'-phosphate
  modified_base 18: mod_base = OTHER; note = 2'-O-methylguanosine-3'-phosphate
  modified_base 19: mod_base = OTHER; note = 2'-O-methylguanosine-3'-phosphate
  modified_base 20: mod_base = OTHER; note = 2'-O-methyluridine-3'-phosphate
  modified_base 21: mod_base = OTHER; note = 2'-O-methyladenosine-3'-phosphorothioate
  modified_base 22: mod_base = OTHER; note = 2'-O-methyladenosine-3'-phosphorothioate
  modified_base 23: mod_base = OTHER; note = 2'-O-methylcytidine
tagcagcattcggttttggtaac

SEQ ID NO: 12000 - RNA, 23 nt, synthetic construct
  source 1..23: mol_type = other RNA
  modified_base 1: mod_base = OTHER; note = 2'-O-methyluridine-3'-phosphorothioate 5'-(E)-Vinylphosphonate
  modified_base 2: mod_base = OTHER; note = 2'-deoxy-2'-fluoroadenosine-3'-phosphorothioate
  modified_base 3: mod_base = OTHER; note = 2'-O-methyladenosine-3'-phosphate
  modified_base 4: mod_base = OTHER; note = 2'-O-methylguanosine-3'-phosphate
  modified_base 5: mod_base = OTHER; note = 2'-O-methylcytidine-3'-phosphate
  modified_base 6: mod_base = OTHER; note = 2'-deoxy-2'-fluoroadenosine-3'-phosphate
  modified_base 7: mod_base = OTHER; note = 2'-O-methylguanosine-3'-phosphate
  modified_base 8: mod_base = OTHER; note = 2'-O-methylcytidine-3'-phosphate
  modified_base 9: mod_base = OTHER; note = 2'-O-methyladenosine-3'-phosphate
  modified_base 10: mod_base = OTHER; note = 2'-O-methyluridine-3'-phosphate
  modified_base 11: mod_base = OTHER; note = 2'-O-methyluridine-3'-phosphate
  modified_base 12: mod_base = OTHER; note = 2'-O-methylcytidine-3'-phosphate
  modified_base 13: mod_base = OTHER; note = 2'-O-methylguanosine-3'-phosphate
  modified_base 14: mod_base = OTHER; note = 2'-deoxy-2'-fluoroguanosine-3'-phosphate
  modified_base 15: mod_base = OTHER; note = 2'-O-methyluridine-3'-phosphate
  modified_base 16: mod_base = OTHER; note = 2'-deoxy-2'-fluorouridine-3'-phosphate
  modified_base 17: mod_base = OTHER; note = 2'-O-methyluridine-3'-phosphate
  modified_base 18: mod_base = OTHER; note = 2'-O-methyluridine-3'-phosphate
  modified_base 19: mod_base = OTHER; note = 2'-O-methylguanosine-3'-phosphate
  modified_base 20: mod_base = OTHER; note = 2'-O-methylguanosine-3'-phosphate
  modified_base 21: mod_base = OTHER; note = 2'-O-methyluridine-3'-phosphorothioate
  modified_base 22: mod_base = OTHER; note = 2'-O-methyladenosine-3'-phosphorothioate
  modified_base 23: mod_base = OTHER; note = 2'-O-methyladenosine
taagcagcattcggttttggtaa

SEQ ID NO: 12001 - RNA, 23 nt, synthetic construct
  source 1..23: mol_type = other RNA
  modified_base 1: mod_base = OTHER; note = 2'-O-methyluridine-3'-phosphorothioate 5'-(E)-Vinylphosphonate
  modified_base 2: mod_base = OTHER; note = 2'-deoxy-2'-fluoroguanosine-3'-phosphorothioate
  modified_base 3: mod_base = OTHER; note = 2'-O-methyladenosine-3'-phosphate
  modified_base 4: mod_base = OTHER; note = 2'-O-methyladenosine-3'-phosphate
  modified_base 5: mod_base = OTHER; note = 2'-O-methylguanosine-3'-phosphate
  modified_base 6: mod_base = OTHER; note = 2'-deoxy-2'-fluorocytidine-3'-phosphate
  modified_base 7: mod_base = OTHER; note = 2'-O-methyladenosine-3'-phosphate
  modified_base 8: mod_base = OTHER; note = 2'-O-methylguanosine-3'-phosphate
  modified_base 9: mod_base = OTHER; note = 2'-O-methylcytidine-3'-phosphate
  modified_base 10: mod_base = OTHER; note = 2'-O-methyladenosine-3'-phosphate
  modified_base 11: mod_base = OTHER; note = 2'-O-methyluridine-3'-phosphate
  modified_base 12: mod_base = OTHER; note = 2'-O-methyluridine-3'-phosphate
  modified_base 13: mod_base = OTHER; note = 2'-O-methylcytidine-3'-phosphate
  modified_base 14: mod_base = OTHER; note = 2'-deoxy-2'-fluoroguanosine-3'-phosphate
  modified_base 15: mod_base = OTHER; note = 2'-O-methylguanosine-3'-phosphate
  modified_base 16: mod_base = OTHER; note = 2'-deoxy-2'-fluorouridine-3'-phosphate
  modified_base 17: mod_base = OTHER; note = 2'-O-methyluridine-3'-phosphate
  modified_base 18: mod_base = OTHER; note = 2'-O-methyluridine-3'-phosphate
  modified_base 19: mod_base = OTHER; note = 2'-O-methyluridine-3'-phosphate
  modified_base 20: mod_base = OTHER; note = 2'-O-methylguanosine-3'-phosphate
  modified_base 21: mod_base = OTHER; note = 2'-O-methylguanosine-3'-phosphorothioate
  modified_base 22: mod_base = OTHER; note = 2'-O-methyluridine-3'-phosphorothioate
  modified_base 23: mod_base = OTHER; note = 2'-O-methyladenosine
tgaagcagcattcggttttggta

SEQ ID NO: 12002 - RNA, 23 nt, synthetic construct
  source 1..23: mol_type = other RNA
  modified_base 1: mod_base = OTHER; note = 2'-O-methyluridine-3'-phosphorothioate 5'-(E)-Vinylphosphonate
  modified_base 2: mod_base = OTHER; note = 2'-deoxy-2'-fluorouridine-3'-phosphorothioate
  modified_base 3: mod_base = OTHER; note = 2'-O-methylguanosine-3'-phosphate
  modified_base 4: mod_base = OTHER; note = 2'-O-methyladenosine-3'-phosphate
  modified_base 5: mod_base = OTHER; note = 2'-O-methyladenosine-3'-phosphate
  modified_base 6: mod_base = OTHER; note = 2'-deoxy-2'-fluoroguanosine-3'-phosphate
  modified_base 7: mod_base = OTHER; note = 2'-O-methylcytidine-3'-phosphate
  modified_base 8: mod_base = OTHER; note = 2'-O-methyladenosine-3'-phosphate
  modified_base 9: mod_base = OTHER; note = 2'-O-methylguanosine-3'-phosphate
  modified_base 10: mod_base = OTHER; note = 2'-O-methylcytidine-3'-phosphate
  modified_base 11: mod_base = OTHER; note = 2'-O-methyladenosine-3'-phosphate
  modified_base 12: mod_base = OTHER; note = 2'-O-methyluridine-3'-phosphate
  modified_base 13: mod_base = OTHER; note = 2'-O-methyluridine-3'-phosphate
  modified_base 14: mod_base = OTHER; note = 2'-deoxy-2'-fluorocytidine-3'-phosphate
  modified_base 15: mod_base = OTHER; note = 2'-O-methylguanosine-3'-phosphate
  modified_base 16: mod_base = OTHER; note = 2'-deoxy-2'-fluoroguanosine-3'-phosphate
  modified_base 17: mod_base = OTHER; note = 2'-O-methyluridine-3'-phosphate
  modified_base 18: mod_base = OTHER; note = 2'-O-methyluridine-3'-phosphate
  modified_base 19: mod_base = OTHER; note = 2'-O-methyluridine-3'-phosphate
  modified_base 20: mod_base = OTHER; note = 2'-O-methyluridine-3'-phosphate
  modified_base 21: mod_base = OTHER; note = 2'-O-methylguanosine-3'-phosphorothioate
  modified_base 22: mod_base = OTHER; note = 2'-O-methylguanosine-3'-phosphorothioate
  modified_base 23: mod_base = OTHER; note = 2'-O-methyluridine
ttgaagcagcattcggttttggt

SEQ ID NO: 12003 - RNA, 23 nt, synthetic construct
  source 1..23: mol_type = other RNA
  modified_base 1: mod_base = OTHER; note = 2'-O-methyluridine-3'-phosphorothioate 5'-(E)-Vinylphosphonate
  modified_base 2: mod_base = OTHER; note = 2'-deoxy-2'-fluoroguanosine-3'-phosphorothioate
  modified_base 3: mod_base = OTHER; note = 2'-O-methyluridine-3'-phosphate
  modified_base 4: mod_base = OTHER; note = 2'-O-methylguanosine-3'-phosphate
  modified_base 5: mod_base = OTHER; note = 2'-O-methyladenosine-3'-phosphate
  modified_base 6: mod_base = OTHER; note = 2'-deoxy-2'-fluoroadenosine-3'-phosphate
  modified_base 7: mod_base = OTHER; note = 2'-O-methylguanosine-3'-phosphate
  modified_base 8: mod_base = OTHER; note = 2'-O-methylcytidine-3'-phosphate
  modified_base 9: mod_base = OTHER; note = 2'-O-methyladenosine-3'-phosphate
  modified_base 10: mod_base = OTHER; note = 2'-O-methylguanosine-3'-phosphate
  modified_base 11: mod_base = OTHER; note = 2'-O-methylcytidine-3'-phosphate
  modified_base 12: mod_base = OTHER; note = 2'-O-methyladenosine-3'-phosphate
  modified_base 13: mod_base = OTHER; note = 2'-O-methyluridine-3'-phosphate
  modified_base 14: mod_base = OTHER; note = 2'-deoxy-2'-fluorouridine-3'-phosphate
  modified_base 15: mod_base = OTHER; note = 2'-O-methylcytidine-3'-phosphate
  modified_base 16: mod_base = OTHER; note = 2'-deoxy-2'-fluoroguanosine-3'-phosphate
  modified_base 17: mod_base = OTHER; note = 2'-O-methylguanosine-3'-phosphate
  modified_base 18: mod_base = OTHER; note = 2'-O-methyluridine-3'-phosphate
  modified_base 19: mod_base = OTHER; note = 2'-O-methyluridine-3'-phosphate
  modified_base 20: mod_base = OTHER; note = 2'-O-methyluridine-3'-phosphate
  modified_base 21: mod_base = OTHER; note = 2'-O-methyluridine-3'-phosphorothioate
  modified_base 22: mod_base = OTHER; note = 2'-O-methylguanosine-3'-phosphorothioate
  modified_base 23: mod_base = OTHER; note = 2'-O-methylguanosine
tgtgaagcagcattcggttttgg

SEQ ID NO: 12004 - RNA, 23 nt, synthetic construct
  source 1..23: mol_type = other RNA
  modified_base 1: mod_base = OTHER; note = 2'-O-methyluridine-3'-phosphorothioate 5'-(E)-Vinylphosphonate
  modified_base 2: mod_base = OTHER; note = 2'-deoxy-2'-fluorouridine-3'-phosphorothioate
  modified_base 3: mod_base = OTHER; note = 2'-O-methylguanosine-3'-phosphate
  modified_base 4: mod_base = OTHER; note = 2'-O-methyluridine-3'-phosphate
  modified_base 5: mod_base = OTHER; note = 2'-O-methylguanosine-3'-phosphate
  modified_base 6: mod_base = OTHER; note = 2'-deoxy-2'-fluoroadenosine-3'-phosphate
  modified_base 7: mod_base = OTHER; note = 2'-O-methyladenosine-3'-phosphate
  modified_base 8: mod_base = OTHER; note = 2'-O-methylguanosine-3'-phosphate
  modified_base 9: mod_base = OTHER; note = 2'-O-methylcytidine-3'-phosphate
  modified_base 10: mod_base = OTHER; note = 2'-O-methyladenosine-3'-phosphate
  modified_base 11: mod_base = OTHER; note = 2'-O-methylguanosine-3'-phosphate
  modified_base 12: mod_base = OTHER; note = 2'-O-methylcytidine-3'-phosphate
  modified_base 13: mod_base = OTHER; note = 2'-O-methyladenosine-3'-phosphate
  modified_base 14: mod_base = OTHER; note = 2'-deoxy-2'-fluorouridine-3'-phosphate
  modified_base 15: mod_base = OTHER; note = 2'-O-methyluridine-3'-phosphate
  modified_base 16: mod_base = OTHER; note = 2'-deoxy-2'-fluorocytidine-3'-phosphate
  modified_base 17: mod_base = OTHER; note = 2'-O-methylguanosine-3'-phosphate
  modified_base 18: mod_base = OTHER; note = 2'-O-methylguanosine-3'-phosphate
  modified_base 19: mod_base = OTHER; note = 2'-O-methyluridine-3'-phosphate
  modified_base 20: mod_base = OTHER; note = 2'-O-methyluridine-3'-phosphate
  modified_base 21: mod_base = OTHER; note = 2'-O-methyluridine-3'-phosphorothioate
  modified_base 22: mod_base = OTHER; note = 2'-O-methyluridine-3'-phosphorothioate
  modified_base 23: mod_base = OTHER; note = 2'-O-methylguanosine
ttgtgaagcagcattcggttttg

SEQ ID NO: 12005 - RNA, 23 nt, synthetic construct
  source 1..23: mol_type = other RNA
  modified_base 1: mod_base = OTHER; note = 2'-O-methyluridine-3'-phosphorothioate 5'-(E)-Vinylphosphonate
  modified_base 2: mod_base = OTHER; note = 2'-deoxy-2'-fluorocytidine-3'-phosphorothioate
  modified_base 3: mod_base = OTHER; note = 2'-O-methyluridine-3'-phosphate
  modified_base 4: mod_base = OTHER; note = 2'-O-methylguanosine-3'-phosphate
  modified_base 5: mod_base = OTHER; note = 2'-O-methyluridine-3'-phosphate
  modified_base 6: mod_base = OTHER; note = 2'-deoxy-2'-fluoroguanosine-3'-phosphate
  modified_base 7: mod_base = OTHER; note = 2'-O-methyladenosine-3'-phosphate
  modified_base 8: mod_base = OTHER; note = 2'-O-methyladenosine-3'-phosphate
  modified_base 9: mod_base = OTHER; note = 2'-O-methylguanosine-3'-phosphate
  modified_base 10: mod_base = OTHER; note = 2'-O-methylcytidine-3'-phosphate
  modified_base 11: mod_base = OTHER; note = 2'-O-methyladenosine-3'-phosphate
  modified_base 12: mod_base = OTHER; note = 2'-O-methylguanosine-3'-phosphate
  modified_base 13: mod_base = OTHER; note = 2'-O-methylcytidine-3'-phosphate
  modified_base 14: mod_base = OTHER; note = 2'-deoxy-2'-fluoroadenosine-3'-phosphate
  modified_base 15: mod_base = OTHER; note = 2'-O-methyluridine-3'-phosphate
  modified_base 16: mod_base = OTHER; note = 2'-deoxy-2'-fluorouridine-3'-phosphate
  modified_base 17: mod_base = OTHER; note = 2'-O-methylcytidine-3'-phosphate
  modified_base 18: mod_base = OTHER; note = 2'-O-methylguanosine-3'-phosphate
  modified_base 19: mod_base = OTHER; note = 2'-O-methylguanosine-3'-phosphate
  modified_base 20: mod_base = OTHER; note = 2'-O-methyluridine-3'-phosphate
  modified_base 21: mod_base = OTHER; note = 2'-O-methyluridine-3'-phosphorothioate
  modified_base 22: mod_base = OTHER; note = 2'-O-methyluridine-3'-phosphorothioate
  modified_base 23: mod_base = OTHER; note = 2'-O-methyluridine
tctgtgaagcagcattcggtttt

SEQ ID NO: 12006 - RNA, 23 nt, synthetic construct
  source 1..23: mol_type = other RNA
  modified_base 1: mod_base = OTHER; note = 2'-O-methyluridine-3'-phosphorothioate 5'-(E)-Vinylphosphonate
  modified_base 2: mod_base = OTHER; note = 2'-deoxy-2'-fluorouridine-3'-phosphorothioate
  modified_base 3: mod_base = OTHER; note = 2'-O-methylcytidine-3'-phosphate
  modified_base 4: mod_base = OTHER; note = 2'-O-methyluridine-3'-phosphate
  modified_base 5: mod_base = OTHER; note = 2'-O-methylguanosine-3'-phosphate
  modified_base 6: mod_base = OTHER; note = 2'-deoxy-2'-fluorouridine-3'-phosphate
  modified_base 7: mod_base = OTHER; note = 2'-O-methylguanosine-3'-phosphate
  modified_base 8: mod_base = OTHER; note = 2'-O-methyladenosine-3'-phosphate
  modified_base 9: mod_base = OTHER; note = 2'-O-methyladenosine-3'-phosphate
  modified_base 10: mod_base = OTHER; note = 2'-O-methylguanosine-3'-phosphate
  modified_base 11: mod_base = OTHER; note = 2'-O-methylcytidine-3'-phosphate
  modified_base 12: mod_base = OTHER; note = 2'-O-methyladenosine-3'-phosphate
  modified_base 13: mod_base = OTHER; note = 2'-O-methylguanosine-3'-phosphate
  modified_base 14: mod_base = OTHER; note = 2'-deoxy-2'-fluorocytidine-3'-phosphate
  modified_base 15: mod_base = OTHER; note = 2'-O-methyladenosine-3'-phosphate
  modified_base 16: mod_base = OTHER; note = 2'-deoxy-2'-fluorouridine-3'-phosphate
  modified_base 17: mod_base = OTHER; note = 2'-O-methyluridine-3'-phosphate
  modified_base 18: mod_base = OTHER; note = 2'-O-methylcytidine-3'-phosphate
  modified_base 19: mod_base = OTHER; note = 2'-O-methylguanosine-3'-phosphate
  modified_base 20: mod_base = OTHER; note = 2'-O-methylguanosine-3'-phosphate
  modified_base 21: mod_base = OTHER; note = 2'-O-methyluridine-3'-phosphorothioate
  modified_base 22: mod_base = OTHER; note = 2'-O-methyluridine-3'-phosphorothioate
  modified_base 23: mod_base = OTHER; note = 2'-O-methyluridine
ttctgtgaagcagcattcggttt

SEQ ID NO: 12007 - RNA, 23 nt, synthetic construct
  source 1..23: mol_type = other RNA
  modified_base 1: mod_base = OTHER; note = 2'-O-methyluridine-3'-phosphorothioate 5'-(E)-Vinylphosphonate
  modified_base 2: mod_base = OTHER; note = 2'-deoxy-2'-fluoroadenosine-3'-phosphorothioate
  modified_base 3: mod_base = OTHER; note = 2'-O-methyladenosine-3'-phosphate
  modified_base 4: mod_base = OTHER; note = 2'-O-methyluridine-3'-phosphate
  modified_base 5: mod_base = OTHER; note = 2'-O-methylcytidine-3'-phosphate
  modified_base 6: mod_base = OTHER; note = 2'-deoxy-2'-fluorouridine-3'-phosphate
  modified_base 7: mod_base = OTHER; note = 2'-O-methylguanosine-3'-phosphate
  modified_base 8: mod_base = OTHER; note = 2'-O-methyluridine-3'-phosphate
  modified_base 9: mod_base = OTHER; note = 2'-O-methylguanosine-3'-phosphate
  modified_base 10: mod_base = OTHER; note = 2'-O-methyladenosine-3'-phosphate
  modified_base 11: mod_base = OTHER; note = 2'-O-methyladenosine-3'-phosphate
  modified_base 12: mod_base = OTHER; note = 2'-O-methylguanosine-3'-phosphate
  modified_base 13: mod_base = OTHER; note = 2'-O-methylcytidine-3'-phosphate
  modified_base 14: mod_base = OTHER; note = 2'-deoxy-2'-fluoroadenosine-3'-phosphate
  modified_base 15: mod_base = OTHER; note = 2'-O-methylguanosine-3'-phosphate
  modified_base 16: mod_base = OTHER; note = 2'-deoxy-2'-fluorocytidine-3'-phosphate
  modified_base 17: mod_base = OTHER; note = 2'-O-methyladenosine-3'-phosphate
  modified_base 18: mod_base = OTHER; note = 2'-O-methyluridine-3'-phosphate
  modified_base 19: mod_base = OTHER; note = 2'-O-methyluridine-3'-phosphate
  modified_base 20: mod_base = OTHER; note = 2'-O-methylcytidine-3'-phosphate
  modified_base 21: mod_base = OTHER; note = 2'-O-methylguanosine-3'-phosphorothioate
  modified_base 22: mod_base = OTHER; note = 2'-O-methylguanosine-3'-phosphorothioate
  modified_base 23: mod_base = OTHER; note = 2'-O-methyluridine
taatctgtgaagcagcattcggt

SEQ ID NO: 12008 - RNA, 23 nt, synthetic construct
  source 1..23: mol_type = other RNA
  modified_base 1: mod_base = OTHER; note = 2'-O-methyluridine-3'-phosphorothioate 5'-(E)-Vinylphosphonate
  modified_base 2: mod_base = OTHER; note = 2'-deoxy-2'-fluoroadenosine-3'-phosphorothioate
  modified_base 3: mod_base = OTHER; note = 2'-O-methyladenosine-3'-phosphate
  modified_base 4: mod_base = OTHER; note = 2'-O-methyladenosine-3'-phosphate
  modified_base 5: mod_base = OTHER; note = 2'-O-methyladenosine-3'-phosphate
  modified_base 6: mod_base = OTHER; note = 2'-deoxy-2'-fluoroadenosine-3'-phosphate
  modified_base 7: mod_base = OTHER; note = 2'-O-methyluridine-3'-phosphate
  modified_base 8: mod_base = OTHER; note = 2'-O-methylcytidine-3'-phosphate
  modified_base 9: mod_base = OTHER; note = 2'-O-methyluridine-3'-phosphate
  modified_base 10: mod_base = OTHER; note = 2'-O-methylguanosine-3'-phosphate
  modified_base 11: mod_base = OTHER; note = 2'-O-methyluridine-3'-phosphate
  modified_base 12: mod_base = OTHER; note = 2'-O-methylguanosine-3'-phosphate
  modified_base 13: mod_base = OTHER; note = 2'-O-methyladenosine-3'-phosphate
  modified_base 14: mod_base = OTHER; note = 2'-deoxy-2'-fluoroadenosine-3'-phosphate
  modified_base 15: mod_base = OTHER; note = 2'-O-methylguanosine-3'-phosphate
  modified_base 16: mod_base = OTHER; note = 2'-deoxy-2'-fluorocytidine-3'-phosphate
  modified_base 17: mod_base = OTHER; note = 2'-O-methyladenosine-3'-phosphate
  modified_base 18: mod_base = OTHER; note = 2'-O-methylguanosine-3'-phosphate
  modified_base 19: mod_base = OTHER; note = 2'-O-methylcytidine-3'-phosphate
  modified_base 20: mod_base = OTHER; note = 2'-O-methyladenosine-3'-phosphate
  modified_base 21: mod_base = OTHER; note = 2'-O-methyluridine-3'-phosphorothioate
  modified_base 22: mod_base = OTHER; note = 2'-O-methyluridine-3'-phosphorothioate
  modified_base 23: mod_base = OTHER; note = 2'-O-methylcytidine
taaaaatctgtgaagcagcattc

SEQ ID NO: 12009 - RNA, 23 nt, synthetic construct
  source 1..23: mol_type = other RNA
  modified_base 1: mod_base = OTHER; note = 2'-O-methyluridine-3'-phosphorothioate 5'-(E)-Vinylphosphonate
  modified_base 2: mod_base = OTHER; note = 2'-deoxy-2'-fluorocytidine-3'-phosphorothioate
  modified_base 3: mod_base = OTHER; note = 2'-O-methyladenosine-3'-phosphate
  modified_base 4: mod_base = OTHER; note = 2'-O-methyladenosine-3'-phosphate
  modified_base 5: mod_base = OTHER; note = 2'-O-methyladenosine-3'-phosphate
  modified_base 6: mod_base = OTHER; note = 2'-deoxy-2'-fluoroadenosine-3'-phosphate
  modified_base 7: mod_base = OTHER; note = 2'-O-methyladenosine-3'-phosphate
  modified_base 8: mod_base = OTHER; note = 2'-O-methyluridine-3'-phosphate
  modified_base 9: mod_base = OTHER; note = 2'-O-methylcytidine-3'-phosphate
  modified_base 10: mod_base = OTHER; note = 2'-O-methyluridine-3'-phosphate
  modified_base 11: mod_base = OTHER; note = 2'-O-methylguanosine-3'-phosphate
  modified_base 12: mod_base = OTHER; note = 2'-O-methyluridine-3'-phosphate
  modified_base 13: mod_base = OTHER; note = 2'-O-methylguanosine-3'-phosphate
  modified_base 14: mod_base = OTHER; note = 2'-deoxy-2'-fluoroadenosine-3'-phosphate
  modified_base 15: mod_base = OTHER; note = 2'-O-methyladenosine-3'-phosphate
  modified_base 16: mod_base = OTHER; note = 2'-deoxy-2'-fluoroguanosine-3'-phosphate
  modified_base 17: mod_base = OTHER; note = 2'-O-methylcytidine-3'-phosphate
  modified_base 18: mod_base = OTHER; note = 2'-O-methyladenosine-3'-phosphate
  modified_base 19: mod_base = OTHER; note = 2'-O-methylguanosine-3'-phosphate
  modified_base 20: mod_base = OTHER; note = 2'-O-methylcytidine-3'-phosphate
  modified_base 21: mod_base = OTHER; note = 2'-O-methyladenosine-3'-phosphorothioate
  modified_base 22: mod_base = OTHER; note = 2'-O-methyluridine-3'-phosphorothioate
  modified_base 23: mod_base = OTHER; note = 2'-O-methyluridine
tcaaaaatctgtgaagcagcatt

SEQ ID NO: 12010 - RNA, 23 nt, synthetic construct
  source 1..23: mol_type = other RNA
  modified_base 1: mod_base = OTHER; note = 2'-O-methyluridine-3'-phosphorothioate 5'-(E)-Vinylphosphonate
  modified_base 2: mod_base = OTHER; note = 2'-deoxy-2'-fluoroguanosine-3'-phosphorothioate
  modified_base 3: mod_base = OTHER; note = 2'-O-methylcytidine-3'-phosphate
  modified_base 4: mod_base = OTHER; note = 2'-O-methyladenosine-3'-phosphate
  modified_base 5: mod_base = OTHER; note = 2'-O-methyladenosine-3'-phosphate
  modified_base 6: mod_base = OTHER; note = 2'-deoxy-2'-fluoroadenosine-3'-phosphate
  modified_base 7: mod_base = OTHER; note = 2'-O-methyladenosine-3'-phosphate
  modified_base 8: mod_base = OTHER; note = 2'-O-methyladenosine-3'-phosphate
  modified_base 9: mod_base = OTHER; note = 2'-O-methyluridine-3'-phosphate
  modified_base 10: mod_base = OTHER; note = 2'-O-methylcytidine-3'-phosphate
  modified_base 11: mod_base = OTHER; note = 2'-O-methyluridine-3'-phosphate
  modified_base 12: mod_base = OTHER; note = 2'-O-methylguanosine-3'-phosphate
  modified_base 13: mod_base = OTHER; note = 2'-O-methyluridine-3'-phosphate
  modified_base 14: mod_base = OTHER; note = 2'-deoxy-2'-fluoroguanosine-3'-phosphate
  modified_base 15: mod_base = OTHER; note = 2'-O-methyladenosine-3'-phosphate
  modified_base 16: mod_base = OTHER; note = 2'-deoxy-2'-fluoroadenosine-3'-phosphate
  modified_base 17: mod_base = OTHER; note = 2'-O-methylguanosine-3'-phosphate
  modified_base 18: mod_base = OTHER; note = 2'-O-methylcytidine-3'-phosphate
  modified_base 19: mod_base = OTHER; note = 2'-O-methyladenosine-3'-phosphate
  modified_base 20: mod_base = OTHER; note = 2'-O-methylguanosine-3'-phosphate
  modified_base 21: mod_base = OTHER; note = 2'-O-methylcytidine-3'-phosphorothioate
  modified_base 22: mod_base = OTHER; note = 2'-O-methyladenosine-3'-phosphorothioate
  modified_base 23: mod_base = OTHER; note = 2'-O-methyluridine
tgcaaaaatctgtgaagcagcat

SEQ ID NO: 12011 - RNA, 23 nt, synthetic construct
  source 1..23: mol_type = other RNA
  modified_base 1: mod_base = OTHER; note = 2'-O-methyluridine-3'-phosphorothioate 5'-(E)-Vinylphosphonate
  modified_base 2: mod_base = OTHER; note = 2'-deoxy-2'-fluorouridine-3'-phosphorothioate
  modified_base 3: mod_base = OTHER; note = 2'-O-methylguanosine-3'-phosphate
  modified_base 4: mod_base = OTHER; note = 2'-O-methylcytidine-3'-phosphate
  modified_base 5: mod_base = OTHER; note = 2'-O-methyladenosine-3'-phosphate
  modified_base 6: mod_base = OTHER; note = 2'-deoxy-2'-fluoroadenosine-3'-phosphate
  modified_base 7: mod_base = OTHER; note = 2'-O-methyladenosine-3'-phosphate
  modified_base 8: mod_base = OTHER; note = 2'-O-methyladenosine-3'-phosphate
  modified_base 9: mod_base = OTHER; note = 2'-O-methyladenosine-3'-phosphate
  modified_base 10: mod_base = OTHER; note = 2'-O-methyluridine-3'-phosphate
  modified_base 11: mod_base = OTHER; note = 2'-O-methylcytidine-3'-phosphate
  modified_base 12: mod_base = OTHER; note = 2'-O-methyluridine-3'-phosphate
  modified_base 13: mod_base = OTHER; note = 2'-O-methylguanosine-3'-phosphate
  modified_base 14: mod_base = OTHER; note = 2'-deoxy-2'-fluorouridine-3'-phosphate
  modified_base 15: mod_base = OTHER; note = 2'-O-methylguanosine-3'-phosphate
  modified_base 16: mod_base = OTHER; note = 2'-deoxy-2'-fluoroadenosine-3'-phosphate
  modified_base 17: mod_base = OTHER; note = 2'-O-methyladenosine-3'-phosphate
  modified_base 18: mod_base = OTHER; note = 2'-O-methylguanosine-3'-phosphate
  modified_base 19: mod_base = OTHER; note = 2'-O-methylcytidine-3'-phosphate
  modified_base 20: mod_base = OTHER; note = 2'-O-methyladenosine-3'-phosphate
  modified_base 21: mod_base = OTHER; note = 2'-O-methylguanosine-3'-phosphorothioate
  modified_base 22: mod_base = OTHER; note = 2'-O-methylcytidine-3'-phosphorothioate
  modified_base 23: mod_base = OTHER; note = 2'-O-methyladenosine
ttgcaaaaatctgtgaagcagca

SEQ ID NO: 12012 - RNA, 23 nt, synthetic construct
  source 1..23: mol_type = other RNA
  modified_base 1: mod_base = OTHER; note = 2'-O-methyluridine-3'-phosphorothioate 5'-(E)-Vinylphosphonate
  modified_base 2: mod_base = OTHER; note = 2'-deoxy-2'-fluorouridine-3'-phosphorothioate
  modified_base 3: mod_base = OTHER; note = 2'-O-methyluridine-3'-phosphate
  modified_base 4: mod_base = OTHER; note = 2'-O-methylguanosine-3'-phosphate
  modified_base 5: mod_base = OTHER; note = 2'-O-methylcytidine-3'-phosphate
  modified_base 6: mod_base = OTHER; note = 2'-deoxy-2'-fluoroadenosine-3'-phosphate
  modified_base 7: mod_base = OTHER; note = 2'-O-methyladenosine-3'-phosphate
  modified_base 8: mod_base = OTHER; note = 2'-O-methyladenosine-3'-phosphate
  modified_base 9: mod_base = OTHER; note = 2'-O-methyladenosine-3'-phosphate
  modified_base 10: mod_base = OTHER; note = 2'-O-methyladenosine-3'-phosphate
  modified_base 11: mod_base = OTHER; note = 2'-O-methyluridine-3'-phosphate
  modified_base 12: mod_base = OTHER; note = 2'-O-methylcytidine-3'-phosphate
  modified_base 13: mod_base = OTHER; note = 2'-O-methyluridine-3'-phosphate
  modified_base 14: mod_base = OTHER; note = 2'-deoxy-2'-fluoroguanosine-3'-phosphate
  modified_base 15: mod_base = OTHER; note = 2'-O-methyluridine-3'-phosphate
  modified_base 16: mod_base = OTHER; note = 2'-deoxy-2'-fluoroguanosine-3'-phosphate
  modified_base 17: mod_base = OTHER; note = 2'-O-methyladenosine-3'-phosphate
  modified_base 18: mod_base = OTHER; note = 2'-O-methyladenosine-3'-phosphate
  modified_base 19: mod_base = OTHER; note = 2'-O-methylguanosine-3'-phosphate
  modified_base 20: mod_base = OTHER; note = 2'-O-methylcytidine-3'-phosphate
  modified_base 21: mod_base = OTHER; note = 2'-O-methyladenosine-3'-phosphorothioate
  modified_base 22: mod_base = OTHER; note = 2'-O-methylguanosine-3'-phosphorothioate
  modified_base 23: mod_base = OTHER; note = 2'-O-methylcytidine
tttgcaaaaatctgtgaagcagc

SEQ ID NO: 12013 - RNA, 23 nt, synthetic construct
  source 1..23: mol_type = other RNA
  modified_base 1: mod_base = OTHER; note = 2'-O-methyluridine-3'-phosphorothioate 5'-(E)-Vinylphosphonate
  modified_base 2: mod_base = OTHER; note = 2'-deoxy-2'-fluoroguanosine-3'-phosphorothioate
  modified_base 3: mod_base = OTHER; note = 2'-O-methyluridine-3'-phosphate
  modified_base 4: mod_base = OTHER; note = 2'-O-methyluridine-3'-phosphate
  modified_base 5: mod_base = OTHER; note = 2'-O-methylguanosine-3'-phosphate
  modified_base 6: mod_base = OTHER; note = 2'-deoxy-2'-fluorocytidine-3'-phosphate
  modified_base 7: mod_base = OTHER; note = 2'-O-methyladenosine-3'-phosphate
  modified_base 8: mod_base = OTHER; note = 2'-O-methyladenosine-3'-phosphate
  modified_base 9: mod_base = OTHER; note = 2'-O-methyladenosine-3'-phosphate
  modified_base 10: mod_base = OTHER; note = 2'-O-methyladenosine-3'-phosphate
  modified_base 11: mod_base = OTHER; note = 2'-O-methyladenosine-3'-phosphate
  modified_base 12: mod_base = OTHER; note = 2'-O-methyluridine-3'-phosphate
  modified_base 13: mod_base = OTHER; note = 2'-O-methylcytidine-3'-phosphate
  modified_base 14: mod_base = OTHER; note = 2'-deoxy-2'-fluorouridine-3'-phosphate
  modified_base 15: mod_base = OTHER; note = 2'-O-methylguanosine-3'-phosphate
  modified_base 16: mod_base = OTHER; note = 2'-deoxy-2'-fluorouridine-3'-phosphate
  modified_base 17: mod_base = OTHER; note = 2'-O-methylguanosine-3'-phosphate
  modified_base 18: mod_base = OTHER; note = 2'-O-methyladenosine-3'-phosphate
  modified_base 19: mod_base = OTHER; note = 2'-O-methyladenosine-3'-phosphate
  modified_base 20: mod_base = OTHER; note = 2'-O-methylguanosine-3'-phosphate
  modified_base 21: mod_base = OTHER; note = 2'-O-methylcytidine-3'-phosphorothioate
  modified_base 22: mod_base = OTHER; note = 2'-O-methyladenosine-3'-phosphorothioate
  modified_base 23: mod_base = OTHER; note = 2'-O-methylguanosine
tgttgcaaaaatctgtgaagcag

SEQ ID NO: 12014 - RNA, 23 nt, synthetic construct
  source 1..23: mol_type = other RNA
  modified_base 1: mod_base = OTHER; note = 2'-O-methyluridine-3'-phosphorothioate 5'-(E)-Vinylphosphonate
  modified_base 2: mod_base = OTHER; note = 2'-deoxy-2'-fluorouridine-3'-phosphorothioate
  modified_base 3: mod_base = OTHER; note = 2'-O-methylguanosine-3'-phosphate
  modified_base 4: mod_base = OTHER; note = 2'-O-methyluridine-3'-phosphate
  modified_base 5: mod_base = OTHER; note = 2'-O-methyluridine-3'-phosphate
  modified_base 6: mod_base = OTHER; note = 2'-deoxy-2'-fluoroguanosine-3'-phosphate
  modified_base 7: mod_base = OTHER; note = 2'-O-methylcytidine-3'-phosphate
  modified_base 8: mod_base = OTHER; note = 2'-O-methyladenosine-3'-phosphate
  modified_base 9: mod_base = OTHER; note = 2'-O-methyladenosine-3'-phosphate
  modified_base 10: mod_base = OTHER; note = 2'-O-methyladenosine-3'-phosphate
  modified_base 11: mod_base = OTHER; note = 2'-O-methyladenosine-3'-phosphate
  modified_base 12: mod_base = OTHER; note = 2'-O-methyladenosine-3'-phosphate
  modified_base 13: mod_base = OTHER; note = 2'-O-methyluridine-3'-phosphate
  modified_base 14: mod_base = OTHER; note = 2'-deoxy-2'-fluorocytidine-3'-phosphate
  modified_base 15: mod_base = OTHER; note = 2'-O-methyluridine-3'-phosphate
  modified_base 16: mod_base = OTHER; note = 2'-deoxy-2'-fluoroguanosine-3'-phosphate
  modified_base 17: mod_base = OTHER; note = 2'-O-methyluridine-3'-phosphate
  modified_base 18: mod_base = OTHER; note = 2'-O-methylguanosine-3'-phosphate
  modified_base 19: mod_base = OTHER; note = 2'-O-methyladenosine-3'-phosphate
  modified_base 20: mod_base = OTHER; note = 2'-O-methyladenosine-3'-phosphate
  modified_base 21: mod_base = OTHER; note = 2'-O-methylguanosine-3'-phosphorothioate
  modified_base 22: mod_base = OTHER; note = 2'-O-methylcytidine-3'-phosphorothioate
  modified_base 23: mod_base = OTHER; note = 2'-O-methyladenosine
ttgttgcaaaaatctgtgaagca

SEQ ID NO: 12015 - RNA, 23 nt, synthetic construct
  source 1..23: mol_type = other RNA
  modified_base 1: mod_base = OTHER; note = 2'-O-methyluridine-3'-phosphorothioate 5'-(E)-Vinylphosphonate
  modified_base 2: mod_base = OTHER; note = 2'-deoxy-2'-fluorouridine-3'-phosphorothioate
  modified_base 3: mod_base = OTHER; note = 2'-O-methyluridine-3'-phosphate
  modified_base 4: mod_base = OTHER; note = 2'-O-methylguanosine-3'-phosphate
  modified_base 5: mod_base = OTHER; note = 2'-O-methyluridine-3'-phosphate
  modified_base 6: mod_base = OTHER; note = 2'-deoxy-2'-fluorouridine-3'-phosphate
  modified_base 7: mod_base = OTHER; note = 2'-O-methylguanosine-3'-phosphate
  modified_base 8: mod_base = OTHER; note = 2'-O-methylcytidine-3'-phosphate
  modified_base 9: mod_base = OTHER; note = 2'-O-methyladenosine-3'-phosphate
  modified_base 10: mod_base = OTHER; note = 2'-O-methyladenosine-3'-phosphate
  modified_base 11: mod_base = OTHER; note = 2'-O-methyladenosine-3'-phosphate
  modified_base 12: mod_base = OTHER; note = 2'-O-methyladenosine-3'-phosphate
  modified_base 13: mod_base = OTHER; note = 2'-O-methyladenosine-3'-phosphate
  modified_base 14: mod_base = OTHER; note = 2'-deoxy-2'-fluorouridine-3'-phosphate
  modified_base 15: mod_base = OTHER; note = 2'-O-methylcytidine-3'-phosphate
  modified_base 16: mod_base = OTHER; note = 2'-deoxy-2'-fluorouridine-3'-phosphate
  modified_base 17: mod_base = OTHER; note = 2'-O-methylguanosine-3'-phosphate
  modified_base 18: mod_base = OTHER; note = 2'-O-methyluridine-3'-phosphate
  modified_base 19: mod_base = OTHER; note = 2'-O-methylguanosine-3'-phosphate
  modified_base 20: mod_base = OTHER; note = 2'-O-methyladenosine-3'-phosphate
  modified_base 21: mod_base = OTHER; note = 2'-O-methyladenosine-3'-phosphorothioate
  modified_base 22: mod_base = OTHER; note = 2'-O-methylguanosine-3'-phosphorothioate
  modified_base 23: mod_base = OTHER; note = 2'-O-methylcytidine
tttgttgcaaaaatctgtgaagc

SEQ ID NO: 12016 - RNA, 23 nt, synthetic construct
  source 1..23: mol_type = other RNA
  modified_base 1: mod_base = OTHER; note = 2'-O-methyluridine-3'-phosphorothioate 5'-(E)-Vinylphosphonate
  modified_base 2: mod_base = OTHER; note = 2'-deoxy-2'-fluoroguanosine-3'-phosphorothioate
  modified_base 3: mod_base = OTHER; note = 2'-O-methyluridine-3'-phosphate
  modified_base 4: mod_base = OTHER; note = 2'-O-methyluridine-3'-phosphate
  modified_base 5: mod_base = OTHER; note = 2'-O-methylguanosine-3'-phosphate
  modified_base 6: mod_base = OTHER; note = 2'-deoxy-2'-fluorouridine-3'-phosphate
  modified_base 7: mod_base = OTHER; note = 2'-O-methyluridine-3'-phosphate
  modified_base 8: mod_base = OTHER; note = 2'-O-methylguanosine-3'-phosphate
  modified_base 9: mod_base = OTHER; note = 2'-O-methylcytidine-3'-phosphate
  modified_base 10: mod_base = OTHER; note = 2'-O-methyladenosine-3'-phosphate
  modified_base 11: mod_base = OTHER; note = 2'-O-methyladenosine-3'-phosphate
  modified_base 12: mod_base = OTHER; note = 2'-O-methyladenosine-3'-phosphate
  modified_base 13: mod_base = OTHER; note = 2'-O-methyladenosine-3'-phosphate
  modified_base 14: mod_base = OTHER; note = 2'-deoxy-2'-fluoroadenosine-3'-phosphate
  modified_base 15: mod_base = OTHER; note = 2'-O-methyluridine-3'-phosphate
  modified_base 16: mod_base = OTHER; note = 2'-deoxy-2'-fluorocytidine-3'-phosphate
  modified_base 17: mod_base = OTHER; note = 2'-O-methyluridine-3'-phosphate
  modified_base 18: mod_base = OTHER; note = 2'-O-methylguanosine-3'-phosphate
  modified_base 19: mod_base = OTHER; note = 2'-O-methyluridine-3'-phosphate
  modified_base 20: mod_base = OTHER; note = 2'-O-methylguanosine-3'-phosphate
  modified_base 21: mod_base = OTHER; note = 2'-O-methyladenosine-3'-phosphorothioate
  modified_base 22: mod_base = OTHER; note = 2'-O-methyladenosine-3'-phosphorothioate
  modified_base 23: mod_base = OTHER; note = 2'-O-methylguanosine
tgttgttgcaaaaatctgtgaag

SEQ ID NO: 12017 - RNA, 23 nt, synthetic construct
  source 1..23: mol_type = other RNA
  modified_base 1: mod_base = OTHER; note = 2'-O-methyluridine-3'-phosphorothioate 5'-(E)-Vinylphosphonate
  modified_base 2: mod_base = OTHER; note = 2'-deoxy-2'-fluorouridine-3'-phosphorothioate
  modified_base 3: mod_base = OTHER; note = 2'-O-methylguanosine-3'-phosphate
  modified_base 4: mod_base = OTHER; note = 2'-O-methyluridine-3'-phosphate
  modified_base 5: mod_base = OTHER; note = 2'-O-methyluridine-3'-phosphate
  modified_base 6: mod_base = OTHER; note = 2'-deoxy-2'-fluoroguanosine-3'-phosphate
  modified_base 7: mod_base = OTHER; note = 2'-O-methyluridine-3'-phosphate
  modified_base 8: mod_base = OTHER; note = 2'-O-methyluridine-3'-phosphate
  modified_base 9: mod_base = OTHER; note = 2'-O-methylguanosine-3'-phosphate
  modified_base 10: mod_base = OTHER; note = 2'-O-methylcytidine-3'-phosphate
  modified_base 11: mod_base = OTHER; note = 2'-O-methyladenosine-3'-phosphate
  modified_base 12: mod_base = OTHER; note = 2'-O-methyladenosine-3'-phosphate
  modified_base 13: mod_base = OTHER; note = 2'-O-methyladenosine-3'-phosphate
  modified_base 14: mod_base = OTHER; note = 2'-deoxy-2'-fluoroadenosine-3'-phosphate
  modified_base 15: mod_base = OTHER; note = 2'-O-methyladenosine-3'-phosphate
  modified_base 16: mod_base = OTHER; note = 2'-deoxy-2'-fluorouridine-3'-phosphate
  modified_base 17: mod_base = OTHER; note = 2'-O-methylcytidine-3'-phosphate
  modified_base 18: mod_base = OTHER; note = 2'-O-methyluridine-3'-phosphate
  modified_base 19: mod_base = OTHER; note = 2'-O-methylguanosine-3'-phosphate
  modified_base 20: mod_base = OTHER; note = 2'-O-methyluridine-3'-phosphate
  modified_base 21: mod_base = OTHER; note = 2'-O-methylguanosine-3'-phosphorothioate
  modified_base 22: mod_base = OTHER; note = 2'-O-methyladenosine-3'-phosphorothioate
  modified_base 23: mod_base = OTHER; note = 2'-O-methyladenosine
ttgttgttgcaaaaatctgtgaa

SEQ ID NO: 12018 - RNA, 23 nt, synthetic construct
  source 1..23: mol_type = other RNA
  modified_base 1: mod_base = OTHER; note = 2'-O-methyluridine-3'-phosphorothioate 5'-(E)-Vinylphosphonate
  modified_base 2: mod_base = OTHER; note = 2'-deoxy-2'-fluoroadenosine-3'-phosphorothioate
  modified_base 3: mod_base = OTHER; note = 2'-O-methyluridine-3'-phosphate
  modified_base 4: mod_base = OTHER; note = 2'-O-methylguanosine-3'-phosphate
  modified_base 5: mod_base = OTHER; note = 2'-O-methyluridine-3'-phosphate
  modified_base 6: mod_base = OTHER; note = 2'-deoxy-2'-fluorouridine-3'-phosphate
  modified_base 7: mod_base = OTHER; note = 2'-O-methylguanosine-3'-phosphate
  modified_base 8: mod_base = OTHER; note = 2'-O-methyluridine-3'-phosphate
  modified_base 9: mod_base = OTHER; note = 2'-O-methyluridine-3'-phosphate
  modified_base 10: mod_base = OTHER; note = 2'-O-methylguanosine-3'-phosphate
  modified_base 11: mod_base = OTHER; note = 2'-O-methylcytidine-3'-phosphate
  modified_base 12: mod_base = OTHER; note = 2'-O-methyladenosine-3'-phosphate
  modified_base 13: mod_base = OTHER; note = 2'-O-methyladenosine-3'-phosphate
  modified_base 14: mod_base = OTHER; note = 2'-deoxy-2'-fluoroadenosine-3'-phosphate
  modified_base 15: mod_base = OTHER; note = 2'-O-methyladenosine-3'-phosphate
  modified_base 16: mod_base = OTHER; note = 2'-deoxy-2'-fluoroadenosine-3'-phosphate
  modified_base 17: mod_base = OTHER; note = 2'-O-methyluridine-3'-phosphate
  modified_base 18: mod_base = OTHER; note = 2'-O-methylcytidine-3'-phosphate
  modified_base 19: mod_base = OTHER; note = 2'-O-methyluridine-3'-phosphate
  modified_base 20: mod_base = OTHER; note = 2'-O-methylguanosine-3'-phosphate
  modified_base 21: mod_base = OTHER; note = 2'-O-methyluridine-3'-phosphorothioate
  modified_base 22: mod_base = OTHER; note = 2'-O-methylguanosine-3'-phosphorothioate
  modified_base 23: mod_base = OTHER; note = 2'-O-methyladenosine
tatgttgttgcaaaaatctgtga

SEQ ID NO: 12019 - RNA, 23 nt, synthetic construct
  source 1..23: mol_type = other RNA
  modified_base 1: mod_base = OTHER; note = 2'-O-methyluridine-3'-phosphorothioate 5'-(E)-Vinylphosphonate
  modified_base 2: mod_base = OTHER; note = 2'-deoxy-2'-fluorocytidine-3'-phosphorothioate
  modified_base 3: mod_base = OTHER; note = 2'-O-methyladenosine-3'-phosphate
  modified_base 4: mod_base = OTHER; note = 2'-O-methylguanosine-3'-phosphate
  modified_base 5: mod_base = OTHER; note = 2'-O-methyluridine-3'-phosphate
  modified_base 6: mod_base = OTHER; note = 2'-deoxy-2'-fluoroguanosine-3'-phosphate
  modified_base 7: mod_base = OTHER; note = 2'-O-methyluridine-3'-phosphate
  modified_base 8: mod_base = OTHER; note = 2'-O-methyluridine-3'-phosphate
  modified_base 9: mod_base = OTHER; note = 2'-O-methyladenosine-3'-phosphate
  modified_base 10: mod_base = OTHER; note = 2'-O-methyluridine-3'-phosphate
  modified_base 11: mod_base = OTHER; note = 2'-O-methylguanosine-3'-phosphate
  modified_base 12: mod_base = OTHER; note = 2'-O-methyluridine-3'-phosphate
  modified_base 13: mod_base = OTHER; note = 2'-O-methyluridine-3'-phosphate
  modified_base 14: mod_base = OTHER; note = 2'-deoxy-2'-fluoroguanosine-3'-phosphate
  modified_base 15: mod_base = OTHER; note = 2'-O-methyluridine-3'-phosphate
  modified_base 16: mod_base = OTHER; note = 2'-deoxy-2'-fluorouridine-3'-phosphate
  modified_base 17: mod_base = OTHER; note = 2'-O-methylguanosine-3'-phosphate
  modified_base 18: mod_base = OTHER; note = 2'-O-methylcytidine-3'-phosphate
  modified_base 19: mod_base = OTHER; note = 2'-O-methyladenosine-3'-phosphate
  modified_base 20: mod_base = OTHER; note = 2'-O-methyladenosine-3'-phosphate
  modified_base 21: mod_base = OTHER; note = 2'-O-methyladenosine-3'-phosphorothioate
  modified_base 22: mod_base = OTHER; note = 2'-O-methyladenosine-3'-phosphorothioate
  modified_base 23: mod_base = OTHER; note = 2'-O-methyladenosine
tcagtgttatgttgttgcaaaaa

SEQ ID NO: 12020 - RNA, 23 nt, synthetic construct
  source 1..23: mol_type = other RNA
  modified_base 1: mod_base = OTHER; note = 2'-O-methyluridine-3'-phosphorothioate 5'-(E)-Vinylphosphonate
  modified_base 2: mod_base = OTHER; note = 2'-deoxy-2'-fluoroadenosine-3'-phosphorothioate
  modified_base 3: mod_base = OTHER; note = 2'-O-methyluridine-3'-phosphate
  modified_base 4: mod_base = OTHER; note = 2'-O-methyluridine-3'-phosphate
  modified_base 5: mod_base = OTHER; note = 2'-O-methyluridine-3'-phosphate
  modified_base 6: mod_base = OTHER; note = 2'-deoxy-2'-fluoroguanosine-3'-phosphate
  modified_base 7: mod_base = OTHER; note = 2'-O-methylguanosine-3'-phosphate
  modified_base 8: mod_base = OTHER; note = 2'-O-methyluridine-3'-phosphate
  modified_base 9: mod_base = OTHER; note = 2'-O-methylguanosine-3'-phosphate
  modified_base 10: mod_base = OTHER; note = 2'-O-methyladenosine-3'-phosphate
  modified_base 11: mod_base = OTHER; note = 2'-O-methyluridine-3'-phosphate
  modified_base 12: mod_base = OTHER; note = 2'-O-methylguanosine-3'-phosphate
  modified_base 13: mod_base = OTHER; note = 2'-O-methylcytidine-3'-phosphate
  modified_base 14: mod_base = OTHER; note = 2'-deoxy-2'-fluorouridine-3'-phosphate
  modified_base 15: mod_base = OTHER; note = 2'-O-methylguanosine-3'-phosphate
  modified_base 16: mod_base = OTHER; note = 2'-deoxy-2'-fluorouridine-3'-phosphate
  modified_base 17: mod_base = OTHER; note = 2'-O-methyluridine-3'-phosphate
  modified_base 18: mod_base = OTHER; note = 2'-O-methylguanosine-3'-phosphate
  modified_base 19: mod_base = OTHER; note = 2'-O-methylguanosine-3'-phosphate
  modified_base 20: mod_base = OTHER; note = 2'-O-methyladenosine-3'-phosphate
  modified_base 21: mod_base = OTHER; note = 2'-O-methyladenosine-3'-phosphorothioate
  modified_base 22: mod_base = OTHER; note = 2'-O-methylguanosine-3'-phosphorothioate
  modified_base 23: mod_base = OTHER; note = 2'-O-methylguanosine
tatttggtgatgctgttggaagg

SEQ ID NO: 12021 - RNA, 23 nt, synthetic construct
  source 1..23: mol_type = other RNA
  modified_base 1: mod_base = OTHER; note = 2'-O-methyluridine-3'-phosphorothioate 5'-(E)-Vinylphosphonate
  modified_base 2: mod_base = OTHER; note = 2'-deoxy-2'-fluorouridine-3'-phosphorothioate
  modified_base 3: mod_base = OTHER; note = 2'-O-methyladenosine-3'-phosphate
  modified_base 4: mod_base = OTHER; note = 2'-O-methyluridine-3'-phosphate
  modified_base 5: mod_base = OTHER; note = 2'-O-methylguanosine-3'-phosphate
  modified_base 6: mod_base = OTHER; note = 2'-deoxy-2'-fluorouridine-3'-phosphate
  modified_base 7: mod_base = OTHER; note = 2'-O-methyluridine-3'-phosphate
  modified_base 8: mod_base = OTHER; note = 2'-O-methylguanosine-3'-phosphate
  modified_base 9: mod_base = OTHER; note = 2'-O-methyluridine-3'-phosphate
  modified_base 10: mod_base = OTHER; note = 2'-O-methyluridine-3'-phosphate
  modified_base 11: mod_base = OTHER; note = 2'-O-methylguanosine-3'-phosphate
  modified_base 12: mod_base = OTHER; note = 2'-O-methylcytidine-3'-phosphate
  modified_base 13: mod_base = OTHER; note = 2'-O-methyladenosine-3'-phosphate
  modified_base 14: mod_base = OTHER; note = 2'-deoxy-2'-fluoroadenosine-3'-phosphate
  modified_base 15: mod_base = OTHER; note = 2'-O-methyladenosine-3'-phosphate
  modified_base 16: mod_base = OTHER; note = 2'-deoxy-2'-fluoroadenosine-3'-phosphate
  modified_base 17: mod_base = OTHER; note = 2'-O-methyladenosine-3'-phosphate
  modified_base 18: mod_base = OTHER; note = 2'-O-methyluridine-3'-phosphate
  modified_base 19: mod_base = OTHER; note = 2'-O-methylcytidine-3'-phosphate
  modified_base 20: mod_base = OTHER; note = 2'-O-methyluridine-3'-phosphate
  modified_base 21: mod_base = OTHER; note = 2'-O-methylguanosine-3'-phosphorothioate
  modified_base 22: mod_base = OTHER; note = 2'-O-methyluridine-3'-phosphorothioate
  modified_base 23: mod_base = OTHER; note = 2'-O-methylguanosine
ttatgttgttgcaaaaatctgtg

SEQ ID NO: 12022 - RNA, 23 nt, synthetic construct
  source 1..23: mol_type = other RNA
  modified_base 1: mod_base = OTHER; note = 2'-O-methyluridine-3'-phosphorothioate 5'-(E)-Vinylphosphonate
  modified_base 2: mod_base = OTHER; note = 2'-deoxy-2'-fluorouridine-3'-phosphorothioate
  modified_base 3: mod_base = OTHER; note = 2'-O-methyluridine-3'-phosphate
  modified_base 4: mod_base = OTHER; note = 2'-O-methyladenosine-3'-phosphate
  modified_base 5: mod_base = OTHER; note = 2'-O-methyluridine-3'-phosphate
  modified_base 6: mod_base = OTHER; note = 2'-deoxy-2'-fluoroguanosine-3'-phosphate
  modified_base 7: mod_base = OTHER; note = 2'-O-methyluridine-3'-phosphate
  modified_base 8: mod_base = OTHER; note = 2'-O-methyluridine-3'-phosphate
  modified_base 9: mod_base = OTHER; note = 2'-O-methylguanosine-3'-phosphate
  modified_base 10: mod_base = OTHER; note = 2'-O-methyluridine-3'-phosphate
  modified_base 11: mod_base = OTHER; note = 2'-O-methyluridine-3'-phosphate
  modified_base 12: mod_base = OTHER; note = 2'-O-methylguanosine-3'-phosphate
  modified_base 13: mod_base = OTHER; note = 2'-O-methylcytidine-3'-phosphate
  modified_base 14: mod_base = OTHER; note = 2'-deoxy-2'-fluoroadenosine-3'-phosphate
  modified_base 15: mod_base = OTHER; note = 2'-O-methyladenosine-3'-phosphate
  modified_base 16: mod_base = OTHER; note = 2'-deoxy-2'-fluoroadenosine-3'-phosphate
  modified_base 17: mod_base = OTHER; note = 2'-O-methyladenosine-3'-phosphate
  modified_base 18: mod_base = OTHER; note = 2'-O-methyladenosine-3'-phosphate
  modified_base 19: mod_base = OTHER; note = 2'-O-methyluridine-3'-phosphate
  modified_base 20: mod_base = OTHER; note = 2'-O-methylcytidine-3'-phosphate
  modified_base 21: mod_base = OTHER; note = 2'-O-methyluridine-3'-phosphorothioate
  modified_base 22: mod_base = OTHER; note = 2'-O-methylguanosine-3'-phosphorothioate
  modified_base 23: mod_base = OTHER; note = 2'-O-methyluridine
tttatgttgttgcaaaaatctgt

SEQ ID NO: 12023 - RNA, 23 nt, synthetic construct
  source 1..23: mol_type = other RNA
  modified_base 1: mod_base = OTHER; note = 2'-O-methyluridine-3'-phosphorothioate 5'-(E)-Vinylphosphonate
  modified_base 2: mod_base = OTHER; note = 2'-deoxy-2'-fluoroguanosine-3'-phosphorothioate
  modified_base 3: mod_base = OTHER; note = 2'-O-methyluridine-3'-phosphate
  modified_base 4: mod_base = OTHER; note = 2'-O-methyluridine-3'-phosphate
  modified_base 5: mod_base = OTHER; note = 2'-O-methyladenosine-3'-phosphate
  modified_base 6: mod_base = OTHER; note = 2'-deoxy-2'-fluorouridine-3'-phosphate
  modified_base 7: mod_base = OTHER; note = 2'-O-methylguanosine-3'-phosphate
  modified_base 8: mod_base = OTHER; note = 2'-O-methyluridine-3'-phosphate
  modified_base 9: mod_base = OTHER; note = 2'-O-methyluridine-3'-phosphate
  modified_base 10: mod_base = OTHER; note = 2'-O-methylguanosine-3'-phosphate
  modified_base 11: mod_base = OTHER; note = 2'-O-methyluridine-3'-phosphate
  modified_base 12: mod_base = OTHER; note = 2'-O-methyluridine-3'-phosphate
  modified_base 13: mod_base = OTHER; note = 2'-O-methylguanosine-3'-phosphate
  modified_base 14: mod_base = OTHER; note = 2'-deoxy-2'-fluorocytidine-3'-phosphate
  modified_base 15: mod_base = OTHER; note = 2'-O-methyladenosine-3'-phosphate
  modified_base 16: mod_base = OTHER; note = 2'-deoxy-2'-fluoroadenosine-3'-phosphate
  modified_base 17: mod_base = OTHER; note = 2'-O-methyladenosine-3'-phosphate
  modified_base 18: mod_base = OTHER; note = 2'-O-methyladenosine-3'-phosphate
  modified_base 19: mod_base = OTHER; note = 2'-O-methyladenosine-3'-phosphate
  modified_base 20: mod_base = OTHER; note = 2'-O-methyluridine-3'-phosphate
  modified_base 21: mod_base = OTHER; note = 2'-O-methylcytidine-3'-phosphorothioate
  modified_base 22: mod_base = OTHER; note = 2'-O-methyluridine-3'-phosphorothioate
  modified_base 23: mod_base = OTHER; note = 2'-O-methylguanosine
tgttatgttgttgcaaaaatctg

SEQ ID NO: 12024 - RNA, 23 nt, synthetic construct
  source 1..23: mol_type = other RNA
  modified_base 1: mod_base = OTHER; note = 2'-O-methyluridine-3'-phosphorothioate 5'-(E)-Vinylphosphonate
  modified_base 2: mod_base = OTHER; note = 2'-deoxy-2'-fluorouridine-3'-phosphorothioate
  modified_base 3: mod_base = OTHER; note = 2'-O-methylguanosine-3'-phosphate
  modified_base 4: mod_base = OTHER; note = 2'-O-methyluridine-3'-phosphate
  modified_base 5: mod_base = OTHER; note = 2'-O-methyluridine-3'-phosphate
  modified_base 6: mod_base = OTHER; note = 2'-deoxy-2'-fluoroadenosine-3'-phosphate
  modified_base 7: mod_base = OTHER; note = 2'-O-methyluridine-3'-phosphate
  modified_base 8: mod_base = OTHER; note = 2'-O-methylguanosine-3'-phosphate
  modified_base 9: mod_base = OTHER; note = 2'-O-methyluridine-3'-phosphate
  modified_base 10: mod_base = OTHER; note = 2'-O-methyluridine-3'-phosphate
  modified_base 11: mod_base = OTHER; note = 2'-O-methylguanosine-3'-phosphate
  modified_base 12: mod_base = OTHER; note = 2'-O-methyluridine-3'-phosphate
  modified_base 13: mod_base = OTHER; note = 2'-O-methyluridine-3'-phosphate
  modified_base 14: mod_base = OTHER; note = 2'-deoxy-2'-fluoroguanosine-3'-phosphate
  modified_base 15: mod_base = OTHER; note = 2'-O-methylcytidine-3'-phosphate
  modified_base 16: mod_base = OTHER; note = 2'-deoxy-2'-fluoroadenosine-3'-phosphate
  modified_base 17: mod_base = OTHER; note = 2'-O-methyladenosine-3'-phosphate
  modified_base 18: mod_base = OTHER; note = 2'-O-methyladenosine-3'-phosphate
  modified_base 19: mod_base = OTHER; note = 2'-O-methyladenosine-3'-phosphate
  modified_base 20: mod_base = OTHER; note = 2'-O-methyladenosine-3'-phosphate
  modified_base 21: mod_base = OTHER; note = 2'-O-methyluridine-3'-phosphorothioate
  modified_base 22: mod_base = OTHER; note = 2'-O-methylcytidine-3'-phosphorothioate
  modified_base 23: mod_base = OTHER; note = 2'-O-methyluridine
ttgttatgttgttgcaaaaatct

SEQ ID NO: 12025 - RNA, 23 nt, synthetic construct
  source 1..23: mol_type = other RNA
  modified_base 1: mod_base = OTHER; note = 2'-O-methyluridine-3'-phosphorothioate 5'-(E)-Vinylphosphonate
  modified_base 2: mod_base = OTHER; note = 2'-deoxy-2'-fluoroguanosine-3'-phosphorothioate
  modified_base 3: mod_base = OTHER; note = 2'-O-methyluridine-3'-phosphate
  modified_base 4: mod_base = OTHER; note = 2'-O-methylguanosine-3'-phosphate
  modified_base 5: mod_base = OTHER; note = 2'-O-methyluridine-3'-phosphate
  modified_base 6: mod_base = OTHER; note = 2'-deoxy-2'-fluorouridine-3'-phosphate
  modified_base 7: mod_base = OTHER; note = 2'-O-methyladenosine-3'-phosphate
  modified_base 8: mod_base = OTHER; note = 2'-O-methyluridine-3'-phosphate
  modified_base 9: mod_base = OTHER; note = 2'-O-methylguanosine-3'-phosphate
  modified_base 10: mod_base = OTHER; note = 2'-O-methyluridine-3'-phosphate
  modified_base 11: mod_base = OTHER; note = 2'-O-methyluridine-3'-phosphate
  modified_base 12: mod_base = OTHER; note = 2'-O-methylguanosine-3'-phosphate
  modified_base 13: mod_base = OTHER; note = 2'-O-methyluridine-3'-phosphate
  modified_base 14: mod_base = OTHER; note = 2'-deoxy-2'-fluorouridine-3'-phosphate
  modified_base 15: mod_base = OTHER; note = 2'-O-methylguanosine-3'-phosphate
  modified_base 16: mod_base = OTHER; note = 2'-deoxy-2'-fluorocytidine-3'-phosphate
  modified_base 17: mod_base = OTHER; note = 2'-O-methyladenosine-3'-phosphate
  modified_base 18: mod_base = OTHER; note = 2'-O-methyladenosine-3'-phosphate
  modified_base 19: mod_base = OTHER; note = 2'-O-methyladenosine-3'-phosphate
  modified_base 20: mod_base = OTHER; note = 2'-O-methyladenosine-3'-phosphate
  modified_base 21: mod_base = OTHER; note = 2'-O-methyladenosine-3'-phosphorothioate
  modified_base 22: mod_base = OTHER; note = 2'-O-methyluridine-3'-phosphorothioate
  modified_base 23: mod_base = OTHER; note = 2'-O-methylcytidine
tgtgttatgttgttgcaaaaatc

SEQ ID NO: 12026 - RNA, 23 nt, synthetic construct
  source 1..23: mol_type = other RNA
  modified_base 1: mod_base = OTHER; note = 2'-O-methyluridine-3'-phosphorothioate 5'-(E)-Vinylphosphonate
  modified_base 2: mod_base = OTHER; note = 2'-deoxy-2'-fluoroadenosine-3'-phosphorothioate
  modified_base 3: mod_base = OTHER; note = 2'-O-methylguanosine-3'-phosphate
  modified_base 4: mod_base = OTHER; note = 2'-O-methyluridine-3'-phosphate
  modified_base 5: mod_base = OTHER; note = 2'-O-methylguanosine-3'-phosphate
  modified_base 6: mod_base = OTHER; note = 2'-deoxy-2'-fluorouridine-3'-phosphate
  modified_base 7: mod_base = OTHER; note = 2'-O-methyluridine-3'-phosphate
  modified_base 8: mod_base = OTHER; note = 2'-O-methyladenosine-3'-phosphate
  modified_base 9: mod_base = OTHER; note = 2'-O-methyluridine-3'-phosphate
  modified_base 10: mod_base = OTHER; note = 2'-O-methylguanosine-3'-phosphate
  modified_base 11: mod_base = OTHER; note = 2'-O-methyluridine-3'-phosphate
  modified_base 12: mod_base = OTHER; note = 2'-O-methyluridine-3'-phosphate
  modified_base 13: mod_base = OTHER; note = 2'-O-methylguanosine-3'-phosphate
  modified_base 14: mod_base = OTHER; note = 2'-deoxy-2'-fluorouridine-3'-phosphate
  modified_base 15: mod_base = OTHER; note = 2'-O-methyluridine-3'-phosphate
  modified_base 16: mod_base = OTHER; note = 2'-deoxy-2'-fluoroguanosine-3'-phosphate
  modified_base 17: mod_base = OTHER; note = 2'-O-methylcytidine-3'-phosphate
  modified_base 18: mod_base = OTHER; note = 2'-O-methyladenosine-3'-phosphate
  modified_base 19: mod_base = OTHER; note = 2'-O-methyladenosine-3'-phosphate
  modified_base 20: mod_base = OTHER; note = 2'-O-methyladenosine-3'-phosphate
  modified_base 21: mod_base = OTHER; note = 2'-O-methyladenosine-3'-phosphorothioate
  modified_base 22: mod_base = OTHER; note = 2'-O-methyladenosine-3'-phosphorothioate
  modified_base 23: mod_base = OTHER; note = 2'-O-methyluridine
tagtgttatgttgttgcaaaaat

SEQ ID NO: 12027 - RNA, 23 nt, synthetic construct
  source 1..23: mol_type = other RNA
  modified_base 1: mod_base = OTHER; note = 2'-O-methyluridine-3'-phosphorothioate 5'-(E)-Vinylphosphonate
  modified_base 2: mod_base = OTHER; note = 2'-deoxy-2'-fluoroguanosine-3'-phosphorothioate
  modified_base 3: mod_base = OTHER; note = 2'-O-methylcytidine-3'-phosphate
  modified_base 4: mod_base = OTHER; note = 2'-O-methyladenosine-3'-phosphate
  modified_base 5: mod_base = OTHER; note = 2'-O-methylguanosine-3'-phosphate
  modified_base 6: mod_base = OTHER; note = 2'-deoxy-2'-fluorouridine-3'-phosphate
  modified_base 7: mod_base = OTHER; note = 2'-O-methylguanosine-3'-phosphate
  modified_base 8: mod_base = OTHER; note = 2'-O-methyluridine-3'-phosphate
  modified_base 9: mod_base = OTHER; note = 2'-O-methyluridine-3'-phosphate
  modified_base 10: mod_base = OTHER; note = 2'-O-methyladenosine-3'-phosphate
  modified_base 11: mod_base = OTHER; note = 2'-O-methyluridine-3'-phosphate
  modified_base 12: mod_base = OTHER; note = 2'-O-methylguanosine-3'-phosphate
  modified_base 13: mod_base = OTHER; note = 2'-O-methyluridine-3'-phosphate
  modified_base 14: mod_base = OTHER; note = 2'-deoxy-2'-fluorouridine-3'-phosphate
  modified_base 15: mod_base = OTHER; note = 2'-O-methylguanosine-3'-phosphate
  modified_base 16: mod_base = OTHER; note = 2'-deoxy-2'-fluorouridine-3'-phosphate
  modified_base 17: mod_base = OTHER; note = 2'-O-methyluridine-3'-phosphate
  modified_base 18: mod_base = OTHER; note = 2'-O-methylguanosine-3'-phosphate
  modified_base 19: mod_base = OTHER; note = 2'-O-methylcytidine-3'-phosphate
  modified_base 20: mod_base = OTHER; note = 2'-O-methyladenosine-3'-phosphate
  modified_base 21: mod_base = OTHER; note = 2'-O-methyladenosine-3'-phosphorothioate
  modified_base 22: mod_base = OTHER; note = 2'-O-methyladenosine-3'-phosphorothioate
  modified_base 23: mod_base = OTHER; note = 2'-O-methyladenosine
tgcagtgttatgttgttgcaaaa

SEQ ID NO: 12028 - RNA, 23 nt, synthetic construct
  source 1..23: mol_type = other RNA
  modified_base 1: mod_base = OTHER; note = 2'-O-methyluridine-3'-phosphorothioate 5'-(E)-Vinylphosphonate
  modified_base 2: mod_base = OTHER; note = 2'-deoxy-2'-fluorouridine-3'-phosphorothioate
  modified_base 3: mod_base = OTHER; note = 2'-O-methylguanosine-3'-phosphate
  modified_base 4: mod_base = OTHER; note = 2'-O-methylcytidine-3'-phosphate
  modified_base 5: mod_base = OTHER; note = 2'-O-methyladenosine-3'-phosphate
  modified_base 6: mod_base = OTHER; note = 2'-deoxy-2'-fluoroguanosine-3'-phosphate
  modified_base 7: mod_base = OTHER; note = 2'-O-methyluridine-3'-phosphate
  modified_base 8: mod_base = OTHER; note = 2'-O-methylguanosine-3'-phosphate
  modified_base 9: mod_base = OTHER; note = 2'-O-methyluridine-3'-phosphate
  modified_base 10: mod_base = OTHER; note = 2'-O-methyluridine-3'-phosphate
  modified_base 11: mod_base = OTHER; note = 2'-O-methyladenosine-3'-phosphate
  modified_base 12: mod_base = OTHER; note = 2'-O-methyluridine-3'-phosphate
  modified_base 13: mod_base = OTHER; note = 2'-O-methylguanosine-3'-phosphate
  modified_base 14: mod_base = OTHER; note = 2'-deoxy-2'-fluorouridine-3'-phosphate
  modified_base 15: mod_base = OTHER; note = 2'-O-methyluridine-3'-phosphate
  modified_base 16: mod_base = OTHER; note = 2'-deoxy-2'-fluoroguanosine-3'-phosphate
  modified_base 17: mod_base = OTHER; note = 2'-O-methyluridine-3'-phosphate
  modified_base 18: mod_base = OTHER; note = 2'-O-methyluridine-3'-phosphate
  modified_base 19: mod_base = OTHER; note = 2'-O-methylguanosine-3'-phosphate
  modified_base 20: mod_base = OTHER; note = 2'-O-methylcytidine-3'-phosphate
  modified_base 21: mod_base = OTHER; note = 2'-O-methyladenosine-3'-phosphorothioate
  modified_base 22: mod_base = OTHER; note = 2'-O-methyladenosine-3'-phosphorothioate
  modified_base 23: mod_base = OTHER; note = 2'-O-methyladenosine
ttgcagtgttatgttgttgcaaa

SEQ ID NO: 12029 - RNA, 23 nt, synthetic construct
  source 1..23: mol_type = other RNA
  modified_base 1: mod_base = OTHER; note = 2'-O-methyluridine-3'-phosphorothioate 5'-(E)-Vinylphosphonate
  modified_base 2: mod_base = OTHER; note = 2'-deoxy-2'-fluoroguanosine-3'-phosphorothioate
  modified_base 3: mod_base = OTHER; note = 2'-O-methyluridine-3'-phosphate
  modified_base 4: mod_base = OTHER; note = 2'-O-methylguanosine-3'-phosphate
  modified_base 5: mod_base = OTHER; note = 2'-O-methylcytidine-3'-phosphate
  modified_base 6: mod_base = OTHER; note = 2'-deoxy-2'-fluoroadenosine-3'-phosphate
  modified_base 7: mod_base = OTHER; note = 2'-O-methylguanosine-3'-phosphate
  modified_base 8: mod_base = OTHER; note = 2'-O-methyluridine-3'-phosphate
  modified_base 9: mod_base = OTHER; note = 2'-O-methylguanosine-3'-phosphate
  modified_base 10: mod_base = OTHER; note = 2'-O-methyluridine-3'-phosphate
  modified_base 11: mod_base = OTHER; note = 2'-O-methyluridine-3'-phosphate
  modified_base 12: mod_base = OTHER; note = 2'-O-methyladenosine-3'-phosphate
  modified_base 13: mod_base = OTHER; note = 2'-O-methyluridine-3'-phosphate
  modified_base 14: mod_base = OTHER; note = 2'-deoxy-2'-fluoroguanosine-3'-phosphate
  modified_base 15: mod_base = OTHER; note = 2'-O-methyluridine-3'-phosphate
  modified_base 16: mod_base = OTHER; note = 2'-deoxy-2'-fluorouridine-3'-phosphate
  modified_base 17: mod_base = OTHER; note = 2'-O-methylguanosine-3'-phosphate
  modified_base 18: mod_base = OTHER; note = 2'-O-methyluridine-3'-phosphate
  modified_base 19: mod_base = OTHER; note = 2'-O-methyluridine-3'-phosphate
  modified_base 20: mod_base = OTHER; note = 2'-O-methylguanosine-3'-phosphate
  modified_base 21: mod_base = OTHER; note = 2'-O-methylcytidine-3'-phosphorothioate
  modified_base 22: mod_base = OTHER; note = 2'-O-methyladenosine-3'-phosphorothioate
  modified_base 23: mod_base = OTHER; note = 2'-O-methyladenosine
tgtgcagtgttatgttgttgcaa

SEQ ID NO: 12030 - RNA, 23 nt, synthetic construct
  source 1..23: mol_type = other RNA
  modified_base 1: mod_base = OTHER; note = 2'-O-methyluridine-3'-phosphorothioate 5'-(E)-Vinylphosphonate
  modified_base 2: mod_base = OTHER; note = 2'-deoxy-2'-fluoroguanosine-3'-phosphorothioate
  modified_base 3: mod_base = OTHER; note = 2'-O-methylguanosine-3'-phosphate
  modified_base 4: mod_base = OTHER; note = 2'-O-methyluridine-3'-phosphate
  modified_base 5: mod_base = OTHER; note = 2'-O-methylguanosine-3'-phosphate
  modified_base 6: mod_base = OTHER; note = 2'-deoxy-2'-fluorocytidine-3'-phosphate
  modified_base 7: mod_base = OTHER; note = 2'-O-methyladenosine-3'-phosphate
  modified_base 8: mod_base = OTHER; note = 2'-O-methylguanosine-3'-phosphate
  modified_base 9: mod_base = OTHER; note = 2'-O-methyluridine-3'-phosphate
  modified_base 10: mod_base = OTHER; note = 2'-O-methylguanosine-3'-phosphate
  modified_base 11: mod_base = OTHER; note = 2'-O-methyluridine-3'-phosphate
  modified_base 12: mod_base = OTHER; note = 2'-O-methyluridine-3'-phosphate
  modified_base 13: mod_base = OTHER; note = 2'-O-methyladenosine-3'-phosphate
  modified_base 14: mod_base = OTHER; note = 2'-deoxy-2'-fluorouridine-3'-phosphate
  modified_base 15: mod_base = OTHER; note = 2'-O-methylguanosine-3'-phosphate
  modified_base 16: mod_base = OTHER; note = 2'-deoxy-2'-fluorouridine-3'-phosphate
  modified_base 17: mod_base = OTHER; note = 2'-O-methyluridine-3'-phosphate
  modified_base 18: mod_base = OTHER; note = 2'-O-methylguanosine-3'-phosphate
  modified_base 19: mod_base = OTHER; note = 2'-O-methyluridine-3'-phosphate
  modified_base 20: mod_base = OTHER; note = 2'-O-methyluridine-3'-phosphate
  modified_base 21: mod_base = OTHER; note = 2'-O-methylguanosine-3'-phosphorothioate
  modified_base 22: mod_base = OTHER; note = 2'-O-methylcytidine-3'-phosphorothioate
  modified_base 23: mod_base = OTHER; note = 2'-O-methyladenosine
tggtgcagtgttatgttgttgca

SEQ ID NO: 12031 - RNA, 23 nt, synthetic construct
  source 1..23: mol_type = other RNA
  modified_base 1: mod_base = OTHER; note = 2'-O-methyluridine-3'-phosphorothioate 5'-(E)-Vinylphosphonate
  modified_base 2: mod_base = OTHER; note = 2'-deoxy-2'-fluoroadenosine-3'-phosphorothioate
  modified_base 3: mod_base = OTHER; note = 2'-O-methylguanosine-3'-phosphate
  modified_base 4: mod_base = OTHER; note = 2'-O-methylguanosine-3'-phosphate
  modified_base 5: mod_base = OTHER; note = 2'-O-methyluridine-3'-phosphate
  modified_base 6: mod_base = OTHER; note = 2'-deoxy-2'-fluoroguanosine-3'-phosphate
  modified_base 7: mod_base = OTHER; note = 2'-O-methylcytidine-3'-phosphate
  modified_base 8: mod_base = OTHER; note = 2'-O-methyladenosine-3'-phosphate
  modified_base 9: mod_base = OTHER; note = 2'-O-methylguanosine-3'-phosphate
  modified_base 10: mod_base = OTHER; note = 2'-O-methyluridine-3'-phosphate
  modified_base 11: mod_base = OTHER; note = 2'-O-methylguanosine-3'-phosphate
  modified_base 12: mod_base = OTHER; note = 2'-O-methyluridine-3'-phosphate
  modified_base 13: mod_base = OTHER; note = 2'-O-methyluridine-3'-phosphate
  modified_base 14: mod_base = OTHER; note = 2'-deoxy-2'-fluoroadenosine-3'-phosphate
  modified_base 15: mod_base = OTHER; note = 2'-O-methyluridine-3'-phosphate
  modified_base 16: mod_base = OTHER; note = 2'-deoxy-2'-fluoroguanosine-3'-phosphate
  modified_base 17: mod_base = OTHER; note = 2'-O-methyluridine-3'-phosphate
  modified_base 18: mod_base = OTHER; note = 2'-O-methyluridine-3'-phosphate
  modified_base 19: mod_base = OTHER; note = 2'-O-methylguanosine-3'-phosphate
  modified_base 20: mod_base = OTHER; note = 2'-O-methyluridine-3'-phosphate
  modified_base 21: mod_base = OTHER; note = 2'-O-methyluridine-3'-phosphorothioate
  modified_base 22: mod_base = OTHER; note = 2'-O-methylguanosine-3'-phosphorothioate
  modified_base 23: mod_base = OTHER; note = 2'-O-methylcytidine
taggtgcagtgttatgttgttgc

SEQ ID NO: 12032 - RNA, 23 nt, synthetic construct
  source 1..23: mol_type = other RNA
  modified_base 1: mod_base = OTHER; note = 2'-O-methyluridine-3'-phosphorothioate 5'-(E)-Vinylphosphonate
  modified_base 2: mod_base = OTHER; note = 2'-deoxy-2'-fluoroadenosine-3'-phosphorothioate
  modified_base 3: mod_base = OTHER; note = 2'-O-methyladenosine-3'-phosphate
  modified_base 4: mod_base = OTHER; note = 2'-O-methylguanosine-3'-phosphate
  modified_base 5: mod_base = OTHER; note = 2'-O-methylguanosine-3'-phosphate
  modified_base 6: mod_base = OTHER; note = 2'-deoxy-2'-fluorouridine-3'-phosphate
  modified_base 7: mod_base = OTHER; note = 2'-O-methylguanosine-3'-phosphate
  modified_base 8: mod_base = OTHER; note = 2'-O-methylcytidine-3'-phosphate
  modified_base 9: mod_base = OTHER; note = 2'-O-methyladenosine-3'-phosphate
  modified_base 10: mod_base = OTHER; note = 2'-O-methylguanosine-3'-phosphate
  modified_base 11: mod_base = OTHER; note = 2'-O-methyluridine-3'-phosphate
  modified_base 12: mod_base = OTHER; note = 2'-O-methylguanosine-3'-phosphate
  modified_base 13: mod_base = OTHER; note = 2'-O-methyluridine-3'-phosphate
  modified_base 14: mod_base = OTHER; note = 2'-deoxy-2'-fluorouridine-3'-phosphate
  modified_base 15: mod_base = OTHER; note = 2'-O-methyladenosine-3'-phosphate
  modified_base 16: mod_base = OTHER; note = 2'-deoxy-2'-fluorouridine-3'-phosphate
  modified_base 17: mod_base = OTHER; note = 2'-O-methylguanosine-3'-phosphate
  modified_base 18: mod_base = OTHER; note = 2'-O-methyluridine-3'-phosphate
  modified_base 19: mod_base = OTHER; note = 2'-O-methyluridine-3'-phosphate
  modified_base 20: mod_base = OTHER; note = 2'-O-methylguanosine-3'-phosphate
  modified_base 21: mod_base = OTHER; note = 2'-O-methyluridine-3'-phosphorothioate
  modified_base 22: mod_base = OTHER; note = 2'-O-methyluridine-3'-phosphorothioate
  modified_base 23: mod_base = OTHER; note = 2'-O-methylguanosine
taaggtgcagtgttatgttgttg

SEQ ID NO: 12033 - RNA, 23 nt, synthetic construct
  source 1..23: mol_type = other RNA
  modified_base 1: mod_base = OTHER; note = 2'-O-methyluridine-3'-phosphorothioate 5'-(E)-Vinylphosphonate
  modified_base 2: mod_base = OTHER; note = 2'-deoxy-2'-fluoroguanosine-3'-phosphorothioate
  modified_base 3: mod_base = OTHER; note = 2'-O-methyladenosine-3'-phosphate
  modified_base 4: mod_base = OTHER; note = 2'-O-methyladenosine-3'-phosphate
  modified_base 5: mod_base = OTHER; note = 2'-O-methylguanosine-3'-phosphate
  modified_base 6: mod_base = OTHER; note = 2'-deoxy-2'-fluoroguanosine-3'-phosphate
  modified_base 7: mod_base = OTHER; note = 2'-O-methyluridine-3'-phosphate
  modified_base 8: mod_base = OTHER; note = 2'-O-methylguanosine-3'-phosphate
  modified_base 9: mod_base = OTHER; note = 2'-O-methylcytidine-3'-phosphate
  modified_base 10: mod_base = OTHER; note = 2'-O-methyladenosine-3'-phosphate
  modified_base 11: mod_base = OTHER; note = 2'-O-methylguanosine-3'-phosphate
  modified_base 12: mod_base = OTHER; note = 2'-O-methyluridine-3'-phosphate
  modified_base 13: mod_base = OTHER; note = 2'-O-methylguanosine-3'-phosphate
  modified_base 14: mod_base = OTHER; note = 2'-deoxy-2'-fluorouridine-3'-phosphate
  modified_base 15: mod_base = OTHER; note = 2'-O-methyluridine-3'-phosphate
  modified_base 16: mod_base = OTHER; note = 2'-deoxy-2'-fluoroadenosine-3'-phosphate
  modified_base 17: mod_base = OTHER; note = 2'-O-methyluridine-3'-phosphate
  modified_base 18: mod_base = OTHER; note = 2'-O-methylguanosine-3'-phosphate
  modified_base 19: mod_base = OTHER; note = 2'-O-methyluridine-3'-phosphate
  modified_base 20: mod_base = OTHER; note = 2'-O-methyluridine-3'-phosphate
  modified_base 21: mod_base = OTHER; note = 2'-O-methylguanosine-3'-phosphorothioate
  modified_base 22: mod_base = OTHER; note = 2'-O-methyluridine-3'-phosphorothioate
  modified_base 23: mod_base = OTHER; note = 2'-O-methyluridine
tgaaggtgcagtgttatgttgtt

SEQ ID NO: 12034 - RNA, 23 nt, synthetic construct
  source 1..23: mol_type = other RNA
  modified_base 1: mod_base = OTHER; note = 2'-O-methyluridine-3'-phosphorothioate 5'-(E)-Vinylphosphonate
  modified_base 2: mod_base = OTHER; note = 2'-deoxy-2'-fluoroguanosine-3'-phosphorothioate
  modified_base 3: mod_base = OTHER; note = 2'-O-methylguanosine-3'-phosphate
  modified_base 4: mod_base = OTHER; note = 2'-O-methyladenosine-3'-phosphate
  modified_base 5: mod_base = OTHER; note = 2'-O-methyladenosine-3'-phosphate
  modified_base 6: mod_base = OTHER; note = 2'-deoxy-2'-fluoroguanosine-3'-phosphate
  modified_base 7: mod_base = OTHER; note = 2'-O-methylguanosine-3'-phosphate
  modified_base 8: mod_base = OTHER; note = 2'-O-methyluridine-3'-phosphate
  modified_base 9: mod_base = OTHER; note = 2'-O-methylguanosine-3'-phosphate
  modified_base 10: mod_base = OTHER; note = 2'-O-methylcytidine-3'-phosphate
  modified_base 11: mod_base = OTHER; note = 2'-O-methyladenosine-3'-phosphate
  modified_base 12: mod_base = OTHER; note = 2'-O-methylguanosine-3'-phosphate
  modified_base 13: mod_base = OTHER; note = 2'-O-methyluridine-3'-phosphate
  modified_base 14: mod_base = OTHER; note = 2'-deoxy-2'-fluoroguanosine-3'-phosphate
  modified_base 15: mod_base = OTHER; note = 2'-O-methyluridine-3'-phosphate
  modified_base 16: mod_base = OTHER; note = 2'-deoxy-2'-fluorouridine-3'-phosphate
  modified_base 17: mod_base = OTHER; note = 2'-O-methyladenosine-3'-phosphate
  modified_base 18: mod_base = OTHER; note = 2'-O-methyluridine-3'-phosphate
  modified_base 19: mod_base = OTHER; note = 2'-O-methylguanosine-3'-phosphate
  modified_base 20: mod_base = OTHER; note = 2'-O-methyluridine-3'-phosphate
  modified_base 21: mod_base = OTHER; note = 2'-O-methyluridine-3'-phosphorothioate
  modified_base 22: mod_base = OTHER; note = 2'-O-methylguanosine-3'-phosphorothioate
  modified_base 23: mod_base = OTHER; note = 2'-O-methyluridine
tggaaggtgcagtgttatgttgt

SEQ ID NO: 12035 - RNA, 23 nt, synthetic construct
  source 1..23: mol_type = other RNA
  modified_base 1: mod_base = OTHER; note = 2'-O-methyluridine-3'-phosphorothioate 5'-(E)-Vinylphosphonate
  modified_base 2: mod_base = OTHER; note = 2'-deoxy-2'-fluorouridine-3'-phosphorothioate
  modified_base 3: mod_base = OTHER; note = 2'-O-methylguanosine-3'-phosphate
  modified_base 4: mod_base = OTHER; note = 2'-O-methylguanosine-3'-phosphate
  modified_base 5: mod_base = OTHER; note = 2'-O-methyladenosine-3'-phosphate
  modified_base 6: mod_base = OTHER; note = 2'-deoxy-2'-fluoroadenosine-3'-phosphate
  modified_base 7: mod_base = OTHER; note = 2'-O-methylguanosine-3'-phosphate
  modified_base 8: mod_base = OTHER; note = 2'-O-methylguanosine-3'-phosphate
  modified_base 9: mod_base = OTHER; note = 2'-O-methyluridine-3'-phosphate
  modified_base 10: mod_base = OTHER; note = 2'-O-methylguanosine-3'-phosphate
  modified_base 11: mod_base = OTHER; note = 2'-O-methylcytidine-3'-phosphate
  modified_base 12: mod_base = OTHER; note = 2'-O-methyladenosine-3'-phosphate
  modified_base 13: mod_base = OTHER; note = 2'-O-methylguanosine-3'-phosphate
  modified_base 14: mod_base = OTHER; note = 2'-deoxy-2'-fluorouridine-3'-phosphate
  modified_base 15: mod_base = OTHER; note = 2'-O-methylguanosine-3'-phosphate
  modified_base 16: mod_base = OTHER; note = 2'-deoxy-2'-fluorouridine-3'-phosphate
  modified_base 17: mod_base = OTHER; note = 2'-O-methyluridine-3'-phosphate
  modified_base 18: mod_base = OTHER; note = 2'-O-methyladenosine-3'-phosphate
  modified_base 19: mod_base = OTHER; note = 2'-O-methyluridine-3'-phosphate
  modified_base 20: mod_base = OTHER; note = 2'-O-methylguanosine-3'-phosphate
  modified_base 21: mod_base = OTHER; note = 2'-O-methyluridine-3'-phosphorothioate
  modified_base 22: mod_base = OTHER; note = 2'-O-methyluridine-3'-phosphorothioate
  modified_base 23: mod_base = OTHER; note = 2'-O-methylguanosine
ttggaaggtgcagtgttatgttg

SEQ ID NO: 12036 - RNA, 23 nt, synthetic construct
  source 1..23: mol_type = other RNA
  modified_base 1: mod_base = OTHER; note = 2'-O-methyluridine-3'-phosphorothioate 5'-(E)-Vinylphosphonate
  modified_base 2: mod_base = OTHER; note = 2'-deoxy-2'-fluorouridine-3'-phosphorothioate
  modified_base 3: mod_base = OTHER; note = 2'-O-methyluridine-3'-phosphate
  modified_base 4: mod_base = OTHER; note = 2'-O-methylguanosine-3'-phosphate
  modified_base 5: mod_base = OTHER; note = 2'-O-methylguanosine-3'-phosphate
  modified_base 6: mod_base = OTHER; note = 2'-deoxy-2'-fluoroadenosine-3'-phosphate
  modified_base 7: mod_base = OTHER; note = 2'-O-methyladenosine-3'-phosphate
  modified_base 8: mod_base = OTHER; note = 2'-O-methylguanosine-3'-phosphate
  modified_base 9: mod_base = OTHER; note = 2'-O-methylguanosine-3'-phosphate
  modified_base 10: mod_base = OTHER; note = 2'-O-methyluridine-3'-phosphate
  modified_base 11: mod_base = OTHER; note = 2'-O-methylguanosine-3'-phosphate
  modified_base 12: mod_base = OTHER; note = 2'-O-methylcytidine-3'-phosphate
  modified_base 13: mod_base = OTHER; note = 2'-O-methyladenosine-3'-phosphate
  modified_base 14: mod_base = OTHER; note = 2'-deoxy-2'-fluoroguanosine-3'-phosphate
  modified_base 15: mod_base = OTHER; note = 2'-O-methyluridine-3'-phosphate
  modified_base 16: mod_base = OTHER; note = 2'-deoxy-2'-fluoroguanosine-3'-phosphate
  modified_base 17: mod_base = OTHER; note = 2'-O-methyluridine-3'-phosphate
  modified_base 18: mod_base = OTHER; note = 2'-O-methyluridine-3'-phosphate
  modified_base 19: mod_base = OTHER; note = 2'-O-methyladenosine-3'-phosphate
  modified_base 20: mod_base = OTHER; note = 2'-O-methyluridine-3'-phosphate
  modified_base 21: mod_base = OTHER; note = 2'-O-methylguanosine-3'-phosphorothioate
  modified_base 22: mod_base = OTHER; note = 2'-O-methyluridine-3'-phosphorothioate
  modified_base 23: mod_base = OTHER; note = 2'-O-methyluridine
tttggaaggtgcagtgttatgtt

SEQ ID NO: 12037 - RNA, 23 nt, synthetic construct
  source 1..23: mol_type = other RNA
  modified_base 1: mod_base = OTHER; note = 2'-O-methyluridine-3'-phosphorothioate 5'-(E)-Vinylphosphonate
  modified_base 2: mod_base = OTHER; note = 2'-deoxy-2'-fluoroguanosine-3'-phosphorothioate
  modified_base 3: mod_base = OTHER; note = 2'-O-methyluridine-3'-phosphate
  modified_base 4: mod_base = OTHER; note = 2'-O-methyluridine-3'-phosphate
  modified_base 5: mod_base = OTHER; note = 2'-O-methylguanosine-3'-phosphate
  modified_base 6: mod_base = OTHER; note = 2'-deoxy-2'-fluoroguanosine-3'-phosphate
  modified_base 7: mod_base = OTHER; note = 2'-O-methyladenosine-3'-phosphate
  modified_base 8: mod_base = OTHER; note = 2'-O-methyladenosine-3'-phosphate
  modified_base 9: mod_base = OTHER; note = 2'-O-methylguanosine-3'-phosphate
  modified_base 10: mod_base = OTHER; note = 2'-O-methylguanosine-3'-phosphate
  modified_base 11: mod_base = OTHER; note = 2'-O-methyluridine-3'-phosphate
  modified_base 12: mod_base = OTHER; note = 2'-O-methylguanosine-3'-phosphate
  modified_base 13: mod_base = OTHER; note = 2'-O-methylcytidine-3'-phosphate
  modified_base 14: mod_base = OTHER; note = 2'-deoxy-2'-fluoroadenosine-3'-phosphate
  modified_base 15: mod_base = OTHER; note = 2'-O-methylguanosine-3'-phosphate
  modified_base 16: mod_base = OTHER; note = 2'-deoxy-2'-fluorouridine-3'-phosphate
  modified_base 17: mod_base = OTHER; note = 2'-O-methylguanosine-3'-phosphate
  modified_base 18: mod_base = OTHER; note = 2'-O-methyluridine-3'-phosphate
  modified_base 19: mod_base = OTHER; note = 2'-O-methyluridine-3'-phosphate
  modified_base 20: mod_base = OTHER; note = 2'-O-methyladenosine-3'-phosphate
  modified_base 21: mod_base = OTHER; note = 2'-O-methyluridine-3'-phosphorothioate
  modified_base 22: mod_base = OTHER; note = 2'-O-methylguanosine-3'-phosphorothioate
  modified_base 23: mod_base = OTHER; note = 2'-O-methyluridine
tgttggaaggtgcagtgttatgt

SEQ ID NO: 12038 - RNA, 23 nt, synthetic construct
  source 1..23: mol_type = other RNA
  modified_base 1: mod_base = OTHER; note = 2'-O-methyluridine-3'-phosphorothioate 5'-(E)-Vinylphosphonate
  modified_base 2: mod_base = OTHER; note = 2'-deoxy-2'-fluorouridine-3'-phosphorothioate
  modified_base 3: mod_base = OTHER; note = 2'-O-methylguanosine-3'-phosphate
  modified_base 4: mod_base = OTHER; note = 2'-O-methyluridine-3'-phosphate
  modified_base 5: mod_base = OTHER; note = 2'-O-methyluridine-3'-phosphate
  modified_base 6: mod_base = OTHER; note = 2'-deoxy-2'-fluoroguanosine-3'-phosphate
  modified_base 7: mod_base = OTHER; note = 2'-O-methylguanosine-3'-phosphate
  modified_base 8: mod_base = OTHER; note = 2'-O-methyladenosine-3'-phosphate
  modified_base 9: mod_base = OTHER; note = 2'-O-methyladenosine-3'-phosphate
  modified_base 10: mod_base = OTHER; note = 2'-O-methylguanosine-3'-phosphate
  modified_base 11: mod_base = OTHER; note = 2'-O-methylguanosine-3'-phosphate
  modified_base 12: mod_base = OTHER; note = 2'-O-methyluridine-3'-phosphate
  modified_base 13: mod_base = OTHER; note = 2'-O-methylguanosine-3'-phosphate
  modified_base 14: mod_base = OTHER; note = 2'-deoxy-2'-fluorocytidine-3'-phosphate
  modified_base 15: mod_base = OTHER; note = 2'-O-methyladenosine-3'-phosphate
  modified_base 16: mod_base = OTHER; note = 2'-deoxy-2'-fluoroguanosine-3'-phosphate
  modified_base 17: mod_base = OTHER; note = 2'-O-methyluridine-3'-phosphate
  modified_base 18: mod_base = OTHER; note = 2'-O-methylguanosine-3'-phosphate
  modified_base 19: mod_base = OTHER; note = 2'-O-methyluridine-3'-phosphate
  modified_base 20: mod_base = OTHER; note = 2'-O-methyluridine-3'-phosphate
  modified_base 21: mod_base = OTHER; note = 2'-O-methyladenosine-3'-phosphorothioate
  modified_base 22: mod_base = OTHER; note = 2'-O-methyluridine-3'-phosphorothioate
  modified_base 23: mod_base = OTHER; note = 2'-O-methylguanosine
ttgttggaaggtgcagtgttatg

SEQ ID NO: 12039 - RNA, 23 nt, synthetic construct
  source 1..23: mol_type = other RNA
  modified_base 1: mod_base = OTHER; note = 2'-O-methyluridine-3'-phosphorothioate 5'-(E)-Vinylphosphonate
  modified_base 2: mod_base = OTHER; note = 2'-deoxy-2'-fluorocytidine-3'-phosphorothioate
  modified_base 3: mod_base = OTHER; note = 2'-O-methyluridine-3'-phosphate
  modified_base 4: mod_base = OTHER; note = 2'-O-methylguanosine-3'-phosphate
  modified_base 5: mod_base = OTHER; note = 2'-O-methyluridine-3'-phosphate
  modified_base 6: mod_base = OTHER; note = 2'-deoxy-2'-fluorouridine-3'-phosphate
  modified_base 7: mod_base = OTHER; note = 2'-O-methylguanosine-3'-phosphate
  modified_base 8: mod_base = OTHER; note = 2'-O-methylguanosine-3'-phosphate
  modified_base 9: mod_base = OTHER; note = 2'-O-methyladenosine-3'-phosphate
  modified_base 10: mod_base = OTHER; note = 2'-O-methyladenosine-3'-phosphate
  modified_base 11: mod_base = OTHER; note = 2'-O-methylguanosine-3'-phosphate
  modified_base 12: mod_base = OTHER; note = 2'-O-methylguanosine-3'-phosphate
  modified_base 13: mod_base = OTHER; note = 2'-O-methyluridine-3'-phosphate
  modified_base 14: mod_base = OTHER; note = 2'-deoxy-2'-fluoroguanosine-3'-phosphate
  modified_base 15: mod_base = OTHER; note = 2'-O-methylcytidine-3'-phosphate
  modified_base 16: mod_base = OTHER; note = 2'-deoxy-2'-fluoroadenosine-3'-phosphate
  modified_base 17: mod_base = OTHER; note = 2'-O-methylguanosine-3'-phosphate
  modified_base 18: mod_base = OTHER; note = 2'-O-methyluridine-3'-phosphate
  modified_base 19: mod_base = OTHER; note = 2'-O-methylguanosine-3'-phosphate
  modified_base 20: mod_base = OTHER; note = 2'-O-methyluridine-3'-phosphate
  modified_base 21: mod_base = OTHER; note = 2'-O-methyluridine-3'-phosphorothioate
  modified_base 22: mod_base = OTHER; note = 2'-O-methyladenosine-3'-phosphorothioate
  modified_base 23: mod_base = OTHER; note = 2'-O-methyluridine
tctgttggaaggtgcagtgttat

SEQ ID NO: 12040 - RNA, 23 nt, synthetic construct
  source 1..23: mol_type = other RNA
  modified_base 1: mod_base = OTHER; note = 2'-O-methyluridine-3'-phosphorothioate 5'-(E)-Vinylphosphonate
  modified_base 2: mod_base = OTHER; note = 2'-deoxy-2'-fluoroguanosine-3'-phosphorothioate
  modified_base 3: mod_base = OTHER; note = 2'-O-methylcytidine-3'-phosphate
  modified_base 4: mod_base = OTHER; note = 2'-O-methyluridine-3'-phosphate
  modified_base 5: mod_base = OTHER; note = 2'-O-methylguanosine-3'-phosphate
  modified_base 6: mod_base = OTHER; note = 2'-deoxy-2'-fluorouridine-3'-phosphate
  modified_base 7: mod_base = OTHER; note = 2'-O-methyluridine-3'-phosphate
  modified_base 8: mod_base = OTHER; note = 2'-O-methylguanosine-3'-phosphate
  modified_base 9: mod_base = OTHER; note = 2'-O-methylguanosine-3'-phosphate
  modified_base 10: mod_base = OTHER; note = 2'-O-methyladenosine-3'-phosphate
  modified_base 11: mod_base = OTHER; note = 2'-O-methyladenosine-3'-phosphate
  modified_base 12: mod_base = OTHER; note = 2'-O-methylguanosine-3'-phosphate
  modified_base 13: mod_base = OTHER; note = 2'-O-methylguanosine-3'-phosphate
  modified_base 14: mod_base = OTHER; note = 2'-deoxy-2'-fluorouridine-3'-phosphate
  modified_base 15: mod_base = OTHER; note = 2'-O-methylguanosine-3'-phosphate
  modified_base 16: mod_base = OTHER; note = 2'-deoxy-2'-fluorocytidine-3'-phosphate
  modified_base 17: mod_base = OTHER; note = 2'-O-methyladenosine-3'-phosphate
  modified_base 18: mod_base = OTHER; note = 2'-O-methylguanosine-3'-phosphate
  modified_base 19: mod_base = OTHER; note = 2'-O-methyluridine-3'-phosphate
  modified_base 20: mod_base = OTHER; note = 2'-O-methylguanosine-3'-phosphate
  modified_base 21: mod_base = OTHER; note = 2'-O-methyluridine-3'-phosphorothioate
  modified_base 22: mod_base = OTHER; note = 2'-O-methyluridine-3'-phosphorothioate
  modified_base 23: mod_base = OTHER; note = 2'-O-methyladenosine
tgctgttggaaggtgcagtgtta

SEQ ID NO: 12041 - RNA, 23 nt, synthetic construct
  source 1..23: mol_type = other RNA
  modified_base 1: mod_base = OTHER; note = 2'-O-methyluridine-3'-phosphorothioate 5'-(E)-Vinylphosphonate
  modified_base 2: mod_base = OTHER; note = 2'-deoxy-2'-fluorouridine-3'-phosphorothioate
  modified_base 3: mod_base = OTHER; note = 2'-O-methylguanosine-3'-phosphate
  modified_base 4: mod_base = OTHER; note = 2'-O-methylcytidine-3'-phosphate
  modified_base 5: mod_base = OTHER; note = 2'-O-methyluridine-3'-phosphate
  modified_base 6: mod_base = OTHER; note = 2'-deoxy-2'-fluoroguanosine-3'-phosphate
  modified_base 7: mod_base = OTHER; note = 2'-O-methyluridine-3'-phosphate
  modified_base 8: mod_base = OTHER; note = 2'-O-methyluridine-3'-phosphate
  modified_base 9: mod_base = OTHER; note = 2'-O-methylguanosine-3'-phosphate
  modified_base 10: mod_base = OTHER; note = 2'-O-methylguanosine-3'-phosphate
  modified_base 11: mod_base = OTHER; note = 2'-O-methyladenosine-3'-phosphate
  modified_base 12: mod_base = OTHER; note = 2'-O-methyladenosine-3'-phosphate
  modified_base 13: mod_base = OTHER; note = 2'-O-methylguanosine-3'-phosphate
  modified_base 14: mod_base = OTHER; note = 2'-deoxy-2'-fluoroguanosine-3'-phosphate
  modified_base 15: mod_base = OTHER; note = 2'-O-methyluridine-3'-phosphate
  modified_base 16: mod_base = OTHER; note = 2'-deoxy-2'-fluoroguanosine-3'-phosphate
  modified_base 17: mod_base = OTHER; note = 2'-O-methylcytidine-3'-phosphate
  modified_base 18: mod_base = OTHER; note = 2'-O-methyladenosine-3'-phosphate
  modified_base 19: mod_base = OTHER; note = 2'-O-methylguanosine-3'-phosphate
  modified_base 20: mod_base = OTHER; note = 2'-O-methyluridine-3'-phosphate
  modified_base 21: mod_base = OTHER; note = 2'-O-methylguanosine-3'-phosphorothioate
  modified_base 22: mod_base = OTHER; note = 2'-O-methyluridine-3'-phosphorothioate
  modified_base 23: mod_base = OTHER; note = 2'-O-methyluridine
ttgctgttggaaggtgcagtgtt

SEQ ID NO: 12042 - RNA, 23 nt, synthetic construct
  source 1..23: mol_type = other RNA
  modified_base 1: mod_base = OTHER; note = 2'-O-methyluridine-3'-phosphorothioate 5'-(E)-Vinylphosphonate
  modified_base 2: mod_base = OTHER; note = 2'-deoxy-2'-fluoroadenosine-3'-phosphorothioate
  modified_base 3: mod_base = OTHER; note = 2'-O-methyluridine-3'-phosphate
  modified_base 4: mod_base = OTHER; note = 2'-O-methylguanosine-3'-phosphate
  modified_base 5: mod_base = OTHER; note = 2'-O-methylcytidine-3'-phosphate
  modified_base 6: mod_base = OTHER; note = 2'-deoxy-2'-fluorouridine-3'-phosphate
  modified_base 7: mod_base = OTHER; note = 2'-O-methylguanosine-3'-phosphate
  modified_base 8: mod_base = OTHER; note = 2'-O-methyluridine-3'-phosphate
  modified_base 9: mod_base = OTHER; note = 2'-O-methyluridine-3'-phosphate
  modified_base 10: mod_base = OTHER; note = 2'-O-methylguanosine-3'-phosphate
  modified_base 11: mod_base = OTHER; note = 2'-O-methylguanosine-3'-phosphate
  modified_base 12: mod_base = OTHER; note = 2'-O-methyladenosine-3'-phosphate
  modified_base 13: mod_base = OTHER; note = 2'-O-methyladenosine-3'-phosphate
  modified_base 14: mod_base = OTHER; note = 2'-deoxy-2'-fluoroguanosine-3'-phosphate
  modified_base 15: mod_base = OTHER; note = 2'-O-methylguanosine-3'-phosphate
  modified_base 16: mod_base = OTHER; note = 2'-deoxy-2'-fluorouridine-3'-phosphate
  modified_base 17: mod_base = OTHER; note = 2'-O-methylguanosine-3'-phosphate
  modified_base 18: mod_base = OTHER; note = 2'-O-methylcytidine-3'-phosphate
  modified_base 19: mod_base = OTHER; note = 2'-O-methyladenosine-3'-phosphate
  modified_base 20: mod_base = OTHER; note = 2'-O-methylguanosine-3'-phosphate
  modified_base 21: mod_base = OTHER; note = 2'-O-methyluridine-3'-phosphorothioate
  modified_base 22: mod_base = OTHER; note = 2'-O-methylguanosine-3'-phosphorothioate
  modified_base 23: mod_base = OTHER; note = 2'-O-methyluridine
tatgctgttggaaggtgcagtgt

SEQ ID NO: 12043 - RNA, 23 nt, synthetic construct
  source 1..23: mol_type = other RNA
  modified_base 1: mod_base = OTHER; note = 2'-O-methyluridine-3'-phosphorothioate 5'-(E)-Vinylphosphonate
  modified_base 2: mod_base = OTHER; note = 2'-deoxy-2'-fluoroguanosine-3'-phosphorothioate
  modified_base 3: mod_base = OTHER; note = 2'-O-methyladenosine-3'-phosphate
  modified_base 4: mod_base = OTHER; note = 2'-O-methyluridine-3'-phosphate
  modified_base 5: mod_base = OTHER; note = 2'-O-methylguanosine-3'-phosphate
  modified_base 6: mod_base = OTHER; note = 2'-deoxy-2'-fluorocytidine-3'-phosphate
  modified_base 7: mod_base = OTHER; note = 2'-O-methyluridine-3'-phosphate
  modified_base 8: mod_base = OTHER; note = 2'-O-methylguanosine-3'-phosphate
  modified_base 9: mod_base = OTHER; note = 2'-O-methyluridine-3'-phosphate
  modified_base 10: mod_base = OTHER; note = 2'-O-methyluridine-3'-phosphate
  modified_base 11: mod_base = OTHER; note = 2'-O-methylguanosine-3'-phosphate
  modified_base 12: mod_base = OTHER; note = 2'-O-methylguanosine-3'-phosphate
  modified_base 13: mod_base = OTHER; note = 2'-O-methyladenosine-3'-phosphate
  modified_base 14: mod_base = OTHER; note = 2'-deoxy-2'-fluoroadenosine-3'-phosphate
  modified_base 15: mod_base = OTHER; note = 2'-O-methylguanosine-3'-phosphate
  modified_base 16: mod_base = OTHER; note = 2'-deoxy-2'-fluoroguanosine-3'-phosphate
  modified_base 17: mod_base = OTHER; note = 2'-O-methyluridine-3'-phosphate
  modified_base 18: mod_base = OTHER; note = 2'-O-methylguanosine-3'-phosphate
  modified_base 19: mod_base = OTHER; note = 2'-O-methylcytidine-3'-phosphate
  modified_base 20: mod_base = OTHER; note = 2'-O-methyladenosine-3'-phosphate
  modified_base 21: mod_base = OTHER; note = 2'-O-methylguanosine-3'-phosphorothioate
  modified_base 22: mod_base = OTHER; note = 2'-O-methyluridine-3'-phosphorothioate
  modified_base 23: mod_base = OTHER; note = 2'-O-methylguanosine
tgatgctgttggaaggtgcagtg

SEQ ID NO: 12044 - RNA, 23 nt, synthetic construct
  source 1..23: mol_type = other RNA
  modified_base 1: mod_base = OTHER; note = 2'-O-methyluridine-3'-phosphorothioate 5'-(E)-Vinylphosphonate
  modified_base 2: mod_base = OTHER; note = 2'-deoxy-2'-fluorouridine-3'-phosphorothioate
  modified_base 3: mod_base = OTHER; note = 2'-O-methylguanosine-3'-phosphate
  modified_base 4: mod_base = OTHER; note = 2'-O-methyladenosine-3'-phosphate
  modified_base 5: mod_base = OTHER; note = 2'-O-methyluridine-3'-phosphate
  modified_base 6: mod_base = OTHER; note = 2'-deoxy-2'-fluoroguanosine-3'-phosphate
  modified_base 7: mod_base = OTHER; note = 2'-O-methylcytidine-3'-phosphate
  modified_base 8: mod_base = OTHER; note = 2'-O-methyluridine-3'-phosphate
  modified_base 9: mod_base = OTHER; note = 2'-O-methylguanosine-3'-phosphate
  modified_base 10: mod_base = OTHER; note = 2'-O-methyluridine-3'-phosphate
  modified_base 11: mod_base = OTHER; note = 2'-O-methyluridine-3'-phosphate
  modified_base 12: mod_base = OTHER; note = 2'-O-methylguanosine-3'-phosphate
  modified_base 13: mod_base = OTHER; note = 2'-O-methylguanosine-3'-phosphate
  modified_base 14: mod_base = OTHER; note = 2'-deoxy-2'-fluoroadenosine-3'-phosphate
  modified_base 15: mod_base = OTHER; note = 2'-O-methyladenosine-3'-phosphate
  modified_base 16: mod_base = OTHER; note = 2'-deoxy-2'-fluoroguanosine-3'-phosphate
  modified_base 17: mod_base = OTHER; note = 2'-O-methylguanosine-3'-phosphate
  modified_base 18: mod_base = OTHER; note = 2'-O-methyluridine-3'-phosphate
  modified_base 19: mod_base = OTHER; note = 2'-O-methylguanosine-3'-phosphate
  modified_base 20: mod_base = OTHER; note = 2'-O-methylcytidine-3'-phosphate
  modified_base 21: mod_base = OTHER; note = 2'-O-methyladenosine-3'-phosphorothioate
  modified_base 22: mod_base = OTHER; note = 2'-O-methylguanosine-3'-phosphorothioate
  modified_base 23: mod_base = OTHER; note = 2'-O-methyluridine
ttgatgctgttggaaggtgcagt

SEQ ID NO: 12045 - RNA, 23 nt, synthetic construct
  source 1..23: mol_type = other RNA
  modified_base 1: mod_base = OTHER; note = 2'-O-methyluridine-3'-phosphorothioate 5'-(E)-Vinylphosphonate
  modified_base 2: mod_base = OTHER; note = 2'-deoxy-2'-fluoroguanosine-3'-phosphorothioate
  modified_base 3: mod_base = OTHER; note = 2'-O-methyluridine-3'-phosphate
  modified_base 4: mod_base = OTHER; note = 2'-O-methylguanosine-3'-phosphate
  modified_base 5: mod_base = OTHER; note = 2'-O-methyladenosine-3'-phosphate
  modified_base 6: mod_base = OTHER; note = 2'-deoxy-2'-fluorouridine-3'-phosphate
  modified_base 7: mod_base = OTHER; note = 2'-O-methylguanosine-3'-phosphate
  modified_base 8: mod_base = OTHER; note = 2'-O-methylcytidine-3'-phosphate
  modified_base 9: mod_base = OTHER; note = 2'-O-methyluridine-3'-phosphate
  modified_base 10: mod_base = OTHER; note = 2'-O-methylguanosine-3'-phosphate
  modified_base 11: mod_base = OTHER; note = 2'-O-methyluridine-3'-phosphate
  modified_base 12: mod_base = OTHER; note = 2'-O-methyluridine-3'-phosphate
  modified_base 13: mod_base = OTHER; note = 2'-O-methylguanosine-3'-phosphate
  modified_base 14: mod_base = OTHER; note = 2'-deoxy-2'-fluoroguanosine-3'-phosphate
  modified_base 15: mod_base = OTHER; note = 2'-O-methyladenosine-3'-phosphate
  modified_base 16: mod_base = OTHER; note = 2'-deoxy-2'-fluoroadenosine-3'-phosphate
  modified_base 17: mod_base = OTHER; note = 2'-O-methylguanosine-3'-phosphate
  modified_base 18: mod_base = OTHER; note = 2'-O-methylguanosine-3'-phosphate
  modified_base 19: mod_base = OTHER; note = 2'-O-methyluridine-3'-phosphate
  modified_base 20: mod_base = OTHER; note = 2'-O-methylguanosine-3'-phosphate
  modified_base 21: mod_base = OTHER; note = 2'-O-methylcytidine-3'-phosphorothioate
  modified_base 22: mod_base = OTHER; note = 2'-O-methyladenosine-3'-phosphorothioate
  modified_base 23: mod_base = OTHER; note = 2'-O-methylguanosine
tgtgatgctgttggaaggtgcag

SEQ ID NO: 12046 - RNA, 23 nt, synthetic construct
  source 1..23: mol_type = other RNA
  modified_base 1: mod_base = OTHER; note = 2'-O-methyluridine-3'-phosphorothioate 5'-(E)-Vinylphosphonate
  modified_base 2: mod_base = OTHER; note = 2'-deoxy-2'-fluoroguanosine-3'-phosphorothioate
  modified_base 3: mod_base = OTHER; note = 2'-O-methylguanosine-3'-phosphate
  modified_base 4: mod_base = OTHER; note = 2'-O-methyluridine-3'-phosphate
  modified_base 5: mod_base = OTHER; note = 2'-O-methylguanosine-3'-phosphate
  modified_base 6: mod_base = OTHER; note = 2'-deoxy-2'-fluoroadenosine-3'-phosphate
  modified_base 7: mod_base = OTHER; note = 2'-O-methyluridine-3'-phosphate
  modified_base 8: mod_base = OTHER; note = 2'-O-methylguanosine-3'-phosphate
  modified_base 9: mod_base = OTHER; note = 2'-O-methylcytidine-3'-phosphate
  modified_base 10: mod_base = OTHER; note = 2'-O-methyluridine-3'-phosphate
  modified_base 11: mod_base = OTHER; note = 2'-O-methylguanosine-3'-phosphate
  modified_base 12: mod_base = OTHER; note = 2'-O-methyluridine-3'-phosphate
  modified_base 13: mod_base = OTHER; note = 2'-O-methyluridine-3'-phosphate
  modified_base 14: mod_base = OTHER; note = 2'-deoxy-2'-fluoroguanosine-3'-phosphate
  modified_base 15: mod_base = OTHER; note = 2'-O-methylguanosine-3'-phosphate
  modified_base 16: mod_base = OTHER; note = 2'-deoxy-2'-fluoroadenosine-3'-phosphate
  modified_base 17: mod_base = OTHER; note = 2'-O-methyladenosine-3'-phosphate
  modified_base 18: mod_base = OTHER; note = 2'-O-methylguanosine-3'-phosphate
  modified_base 19: mod_base = OTHER; note = 2'-O-methylguanosine-3'-phosphate
  modified_base 20: mod_base = OTHER; note = 2'-O-methyluridine-3'-phosphate
  modified_base 21: mod_base = OTHER; note = 2'-O-methylguanosine-3'-phosphorothioate
  modified_base 22: mod_base = OTHER; note = 2'-O-methylcytidine-3'-phosphorothioate
  modified_base 23: mod_base = OTHER; note = 2'-O-methyladenosine
tggtgatgctgttggaaggtgca

SEQ ID NO: 12047 - RNA, 23 nt, synthetic construct
  source 1..23: mol_type = other RNA
  modified_base 1: mod_base = OTHER; note = 2'-O-methyluridine-3'-phosphorothioate 5'-(E)-Vinylphosphonate
  modified_base 2: mod_base = OTHER; note = 2'-deoxy-2'-fluorouridine-3'-phosphorothioate
  modified_base 3: mod_base = OTHER; note = 2'-O-methylguanosine-3'-phosphate
  modified_base 4: mod_base = OTHER; note = 2'-O-methylguanosine-3'-phosphate
  modified_base 5: mod_base = OTHER; note = 2'-O-methyluridine-3'-phosphate
  modified_base 6: mod_base = OTHER; note = 2'-deoxy-2'-fluoroguanosine-3'-phosphate
  modified_base 7: mod_base = OTHER; note = 2'-O-methyladenosine-3'-phosphate
  modified_base 8: mod_base = OTHER; note = 2'-O-methyluridine-3'-phosphate
  modified_base 9: mod_base = OTHER; note = 2'-O-methylguanosine-3'-phosphate
  modified_base 10: mod_base = OTHER; note = 2'-O-methylcytidine-3'-phosphate
  modified_base 11: mod_base = OTHER; note = 2'-O-methyluridine-3'-phosphate
  modified_base 12: mod_base = OTHER; note = 2'-O-methylguanosine-3'-phosphate
  modified_base 13: mod_base = OTHER; note = 2'-O-methyluridine-3'-phosphate
  modified_base 14: mod_base = OTHER; note = 2'-deoxy-2'-fluorouridine-3'-phosphate
  modified_base 15: mod_base = OTHER; note = 2'-O-methylguanosine-3'-phosphate
  modified_base 16: mod_base = OTHER; note = 2'-deoxy-2'-fluoroguanosine-3'-phosphate
  modified_base 17: mod_base = OTHER; note = 2'-O-methyladenosine-3'-phosphate
  modified_base 18: mod_base = OTHER; note = 2'-O-methyladenosine-3'-phosphate
  modified_base 19: mod_base = OTHER; note = 2'-O-methylguanosine-3'-phosphate
  modified_base 20: mod_base = OTHER; note = 2'-O-methylguanosine-3'-phosphate
  modified_base 21: mod_base = OTHER; note = 2'-O-methyluridine-3'-phosphorothioate
  modified_base 22: mod_base = OTHER; note = 2'-O-methylguanosine-3'-phosphorothioate
  modified_base 23: mod_base = OTHER; note = 2'-O-methylcytidine
ttggtgatgctgttggaaggtgc

SEQ ID NO: 12048 - RNA, 23 nt, synthetic construct
  source 1..23: mol_type = other RNA
  modified_base 1: mod_base = OTHER; note = 2'-O-methyluridine-3'-phosphorothioate 5'-(E)-Vinylphosphonate
  modified_base 2: mod_base = OTHER; note = 2'-deoxy-2'-fluorouridine-3'-phosphorothioate
  modified_base 3: mod_base = OTHER; note = 2'-O-methyluridine-3'-phosphate
  modified_base 4: mod_base = OTHER; note = 2'-O-methylguanosine-3'-phosphate
  modified_base 5: mod_base = OTHER; note = 2'-O-methylguanosine-3'-phosphate
  modified_base 6: mod_base = OTHER; note = 2'-deoxy-2'-fluorouridine-3'-phosphate
  modified_base 7: mod_base = OTHER; note = 2'-O-methylguanosine-3'-phosphate
  modified_base 8: mod_base = OTHER; note = 2'-O-methyladenosine-3'-phosphate
  modified_base 9: mod_base = OTHER; note = 2'-O-methyluridine-3'-phosphate
  modified_base 10: mod_base = OTHER; note = 2'-O-methylguanosine-3'-phosphate
  modified_base 11: mod_base = OTHER; note = 2'-O-methylcytidine-3'-phosphate
  modified_base 12: mod_base = OTHER; note = 2'-O-methyluridine-3'-phosphate
  modified_base 13: mod_base = OTHER; note = 2'-O-methylguanosine-3'-phosphate
  modified_base 14: mod_base = OTHER; note = 2'-deoxy-2'-fluorouridine-3'-phosphate
  modified_base 15: mod_base = OTHER; note = 2'-O-methyluridine-3'-phosphate
  modified_base 16: mod_base = OTHER; note = 2'-deoxy-2'-fluoroguanosine-3'-phosphate
  modified_base 17: mod_base = OTHER; note = 2'-O-methylguanosine-3'-phosphate
  modified_base 18: mod_base = OTHER; note = 2'-O-methyladenosine-3'-phosphate
  modified_base 19: mod_base = OTHER; note = 2'-O-methyladenosine-3'-phosphate
  modified_base 20: mod_base = OTHER; note = 2'-O-methylguanosine-3'-phosphate
  modified_base 21: mod_base = OTHER; note = 2'-O-methylguanosine-3'-phosphorothioate
  modified_base 22: mod_base = OTHER; note = 2'-O-methyluridine-3'-phosphorothioate
  modified_base 23: mod_base = OTHER; note = 2'-O-methylguanosine
tttggtgatgctgttggaaggtg

SEQ ID NO: 12049 - RNA, 23 nt, synthetic construct
  source 1..23: mol_type = other RNA
  modified_base 1: mod_base = OTHER; note = 2'-O-methyluridine-3'-phosphorothioate 5'-(E)-Vinylphosphonate
  modified_base 2: mod_base = OTHER; note = 2'-deoxy-2'-fluorouridine-3'-phosphorothioate
  modified_base 3: mod_base = OTHER; note = 2'-O-methyluridine-3'-phosphate
  modified_base 4: mod_base = OTHER; note = 2'-O-methyluridine-3'-phosphate
  modified_base 5: mod_base = OTHER; note = 2'-O-methylguanosine-3'-phosphate
  modified_base 6: mod_base = OTHER; note = 2'-deoxy-2'-fluoroguanosine-3'-phosphate
  modified_base 7: mod_base = OTHER; note = 2'-O-methyluridine-3'-phosphate
  modified_base 8: mod_base = OTHER; note = 2'-O-methylguanosine-3'-phosphate
  modified_base 9: mod_base = OTHER; note = 2'-O-methyladenosine-3'-phosphate
  modified_base 10: mod_base = OTHER; note = 2'-O-methyluridine-3'-phosphate
  modified_base 11: mod_base = OTHER; note = 2'-O-methylguanosine-3'-phosphate
  modified_base 12: mod_base = OTHER; note = 2'-O-methylcytidine-3'-phosphate
  modified_base 13: mod_base = OTHER; note = 2'-O-methyluridine-3'-phosphate
  modified_base 14: mod_base = OTHER; note = 2'-deoxy-2'-fluoroguanosine-3'-phosphate
  modified_base 15: mod_base = OTHER; note = 2'-O-methyluridine-3'-phosphate
  modified_base 16: mod_base = OTHER; note = 2'-deoxy-2'-fluorouridine-3'-phosphate
  modified_base 17: mod_base = OTHER; note = 2'-O-methylguanosine-3'-phosphate
  modified_base 18: mod_base = OTHER; note = 2'-O-methylguanosine-3'-phosphate
  modified_base 19: mod_base = OTHER; note = 2'-O-methyladenosine-3'-phosphate
  modified_base 20: mod_base = OTHER; note = 2'-O-methyladenosine-3'-phosphate
  modified_base 21: mod_base = OTHER; note = 2'-O-methylguanosine-3'-phosphorothioate
  modified_base 22: mod_base = OTHER; note = 2'-O-methylguanosine-3'-phosphorothioate
  modified_base 23: mod_base = OTHER; note = 2'-O-methyluridine
ttttggtgatgctgttggaaggt

SEQ ID NO: 12050 - RNA, 23 nt, synthetic construct
  source 1..23: mol_type = other RNA
  modified_base 1: mod_base = OTHER; note = 2'-O-methyluridine-3'-phosphorothioate 5'-(E)-Vinylphosphonate
  modified_base 2: mod_base = OTHER; note = 2'-deoxy-2'-fluorocytidine-3'-phosphorothioate
  modified_base 3: mod_base = OTHER; note = 2'-O-methyladenosine-3'-phosphate
  modified_base 4: mod_base = OTHER; note = 2'-O-methyluridine-3'-phosphate
  modified_base 5: mod_base = OTHER; note = 2'-O-methyluridine-3'-phosphate
  modified_base 6: mod_base = OTHER; note = 2'-deoxy-2'-fluorouridine-3'-phosphate
  modified_base 7: mod_base = OTHER; note = 2'-O-methylguanosine-3'-phosphate
  modified_base 8: mod_base = OTHER; note = 2'-O-methylguanosine-3'-phosphate
  modified_base 9: mod_base = OTHER; note = 2'-O-methyluridine-3'-phosphate
  modified_base 10: mod_base = OTHER; note = 2'-O-methylguanosine-3'-phosphate
  modified_base 11: mod_base = OTHER; note = 2'-O-methyladenosine-3'-phosphate
  modified_base 12: mod_base = OTHER; note = 2'-O-methyluridine-3'-phosphate
  modified_base 13: mod_base = OTHER; note = 2'-O-methylguanosine-3'-phosphate
  modified_base 14: mod_base = OTHER; note = 2'-deoxy-2'-fluorocytidine-3'-phosphate
  modified_base 15: mod_base = OTHER; note = 2'-O-methyluridine-3'-phosphate
  modified_base 16: mod_base = OTHER; note = 2'-deoxy-2'-fluoroguanosine-3'-phosphate
  modified_base 17: mod_base = OTHER; note = 2'-O-methyluridine-3'-phosphate
  modified_base 18: mod_base = OTHER; note = 2'-O-methyluridine-3'-phosphate
  modified_base 19: mod_base = OTHER; note = 2'-O-methylguanosine-3'-phosphate
  modified_base 20: mod_base = OTHER; note = 2'-O-methylguanosine-3'-phosphate
  modified_base 21: mod_base = OTHER; note = 2'-O-methyladenosine-3'-phosphorothioate
  modified_base 22: mod_base = OTHER; note = 2'-O-methyladenosine-3'-phosphorothioate
  modified_base 23: mod_base = OTHER; note = 2'-O-methylguanosine
tcatttggtgatgctgttggaag

SEQ ID NO: 12051 - RNA, 23 nt, synthetic construct
  source 1..23: mol_type = other RNA
  modified_base 1: mod_base = OTHER; note = 2'-O-methyluridine-3'-phosphorothioate 5'-(E)-Vinylphosphonate
  modified_base 2: mod_base = OTHER; note = 2'-deoxy-2'-fluoroguanosine-3'-phosphorothioate
  modified_base 3: mod_base = OTHER; note = 2'-O-methylcytidine-3'-phosphate
  modified_base 4: mod_base = OTHER; note = 2'-O-methyladenosine-3'-phosphate
  modified_base 5: mod_base = OTHER; note = 2'-O-methyluridine-3'-phosphate
  modified_base 6: mod_base = OTHER; note = 2'-deoxy-2'-fluorouridine-3'-phosphate
  modified_base 7: mod_base = OTHER; note = 2'-O-methyluridine-3'-phosphate
  modified_base 8: mod_base = OTHER; note = 2'-O-methylguanosine-3'-phosphate
  modified_base 9: mod_base = OTHER; note = 2'-O-methylguanosine-3'-phosphate
  modified_base 10: mod_base = OTHER; note = 2'-O-methyluridine-3'-phosphate
  modified_base 11: mod_base = OTHER; note = 2'-O-methylguanosine-3'-phosphate
  modified_base 12: mod_base = OTHER; note = 2'-O-methyladenosine-3'-phosphate
  modified_base 13: mod_base = OTHER; note = 2'-O-methyluridine-3'-phosphate
  modified_base 14: mod_base = OTHER; note = 2'-deoxy-2'-fluoroguanosine-3'-phosphate
  modified_base 15: mod_base = OTHER; note = 2'-O-methylcytidine-3'-phosphate
  modified_base 16: mod_base = OTHER; note = 2'-deoxy-2'-fluorouridine-3'-phosphate
  modified_base 17: mod_base = OTHER; note = 2'-O-methylguanosine-3'-phosphate
  modified_base 18: mod_base = OTHER; note = 2'-O-methyluridine-3'-phosphate
  modified_base 19: mod_base = OTHER; note = 2'-O-methyluridine-3'-phosphate
  modified_base 20: mod_base = OTHER; note = 2'-O-methylguanosine-3'-phosphate
  modified_base 21: mod_base = OTHER; note = 2'-O-methylguanosine-3'-phosphorothioate
  modified_base 22: mod_base = OTHER; note = 2'-O-methyladenosine-3'-phosphorothioate
  modified_base 23: mod_base = OTHER; note = 2'-O-methyladenosine
tgcatttggtgatgctgttggaa

SEQ ID NO: 12052 - RNA, 23 nt, synthetic construct
  source 1..23: mol_type = other RNA
  modified_base 1: mod_base = OTHER; note = 2'-O-methyluridine-3'-phosphorothioate 5'-(E)-Vinylphosphonate
  modified_base 2: mod_base = OTHER; note = 2'-deoxy-2'-fluoroguanosine-3'-phosphorothioate
  modified_base 3: mod_base = OTHER; note = 2'-O-methylguanosine-3'-phosphate
  modified_base 4: mod_base = OTHER; note = 2'-O-methylcytidine-3'-phosphate
  modified_base 5: mod_base = OTHER; note = 2'-O-methyladenosine-3'-phosphate
  modified_base 6: mod_base = OTHER; note = 2'-deoxy-2'-fluorouridine-3'-phosphate
  modified_base 7: mod_base = OTHER; note = 2'-O-methyluridine-3'-phosphate
  modified_base 8: mod_base = OTHER; note = 2'-O-methyluridine-3'-phosphate
  modified_base 9: mod_base = OTHER; note = 2'-O-methylguanosine-3'-phosphate
  modified_base 10: mod_base = OTHER; note = 2'-O-methylguanosine-3'-phosphate
  modified_base 11: mod_base = OTHER; note = 2'-O-methyluridine-3'-phosphate
  modified_base 12: mod_base = OTHER; note = 2'-O-methylguanosine-3'-phosphate
  modified_base 13: mod_base = OTHER; note = 2'-O-methyladenosine-3'-phosphate
  modified_base 14: mod_base = OTHER; note = 2'-deoxy-2'-fluorouridine-3'-phosphate
  modified_base 15: mod_base = OTHER; note = 2'-O-methylguanosine-3'-phosphate
  modified_base 16: mod_base = OTHER; note = 2'-deoxy-2'-fluorocytidine-3'-phosphate
  modified_base 17: mod_base = OTHER; note = 2'-O-methyluridine-3'-phosphate
  modified_base 18: mod_base = OTHER; note = 2'-O-methylguanosine-3'-phosphate
  modified_base 19: mod_base = OTHER; note = 2'-O-methyluridine-3'-phosphate
  modified_base 20: mod_base = OTHER; note = 2'-O-methyluridine-3'-phosphate
  modified_base 21: mod_base = OTHER; note = 2'-O-methylguanosine-3'-phosphorothioate
  modified_base 22: mod_base = OTHER; note = 2'-O-methylguanosine-3'-phosphorothioate
  modified_base 23: mod_base = OTHER; note = 2'-O-methyladenosine
tggcatttggtgatgctgttgga

SEQ ID NO: 12053 - RNA, 23 nt, synthetic construct
  source 1..23: mol_type = other RNA
  modified_base 1: mod_base = OTHER; note = 2'-O-methyluridine-3'-phosphorothioate 5'-(E)-Vinylphosphonate
  modified_base 2: mod_base = OTHER; note = 2'-deoxy-2'-fluorouridine-3'-phosphorothioate
  modified_base 3: mod_base = OTHER; note = 2'-O-methyladenosine-3'-phosphate
  modified_base 4: mod_base = OTHER; note = 2'-O-methyladenosine-3'-phosphate
  modified_base 5: mod_base = OTHER; note = 2'-O-methyluridine-3'-phosphate
  modified_base 6: mod_base = OTHER; note = 2'-deoxy-2'-fluoroadenosine-3'-phosphate
  modified_base 7: mod_base = OTHER; note = 2'-O-methyladenosine-3'-phosphate
  modified_base 8: mod_base = OTHER; note = 2'-O-methyluridine-3'-phosphate
  modified_base 9: mod_base = OTHER; note = 2'-O-methylguanosine-3'-phosphate
  modified_base 10: mod_base = OTHER; note = 2'-O-methyladenosine-3'-phosphate
  modified_base 11: mod_base = OTHER; note = 2'-O-methyluridine-3'-phosphate
  modified_base 12: mod_base = OTHER; note = 2'-O-methylguanosine-3'-phosphate
  modified_base 13: mod_base = OTHER; note = 2'-O-methylguanosine-3'-phosphate
  modified_base 14: mod_base = OTHER; note = 2'-deoxy-2'-fluorocytidine-3'-phosphate
  modified_base 15: mod_base = OTHER; note = 2'-O-methylcytidine-3'-phosphate
  modified_base 16: mod_base = OTHER; note = 2'-deoxy-2'-fluoroadenosine-3'-phosphate
  modified_base 17: mod_base = OTHER; note = 2'-O-methylguanosine-3'-phosphate
  modified_base 18: mod_base = OTHER; note = 2'-O-methylcytidine-3'-phosphate
  modified_base 19: mod_base = OTHER; note = 2'-O-methyluridine-3'-phosphate
  modified_base 20: mod_base = OTHER; note = 2'-O-methylcytidine-3'-phosphate
  modified_base 21: mod_base = OTHER; note = 2'-O-methylcytidine-3'-phosphorothioate
  modified_base 22: mod_base = OTHER; note = 2'-O-methyladenosine-3'-phosphorothioate
  modified_base 23: mod_base = OTHER; note = 2'-O-methyluridine
ttaataatgatggccagctccat

SEQ ID NO: 12054 - RNA, 23 nt, synthetic construct
  source 1..23: mol_type = other RNA
  modified_base 1: mod_base = OTHER; note = 2'-O-methyluridine-3'-phosphorothioate 5'-(E)-Vinylphosphonate
  modified_base 2: mod_base = OTHER; note = 2'-deoxy-2'-fluoroadenosine-3'-phosphorothioate
  modified_base 3: mod_base = OTHER; note = 2'-O-methylcytidine-3'-phosphate
  modified_base 4: mod_base = OTHER; note = 2'-O-methyladenosine-3'-phosphate
  modified_base 5: mod_base = OTHER; note = 2'-O-methylguanosine-3'-phosphate
  modified_base 6: mod_base = OTHER; note = 2'-deoxy-2'-fluorouridine-3'-phosphate
  modified_base 7: mod_base = OTHER; note = 2'-O-methyladenosine-3'-phosphate
  modified_base 8: mod_base = OTHER; note = 2'-O-methyladenosine-3'-phosphate
  modified_base 9: mod_base = OTHER; note = 2'-O-methyluridine-3'-phosphate
  modified_base 10: mod_base = OTHER; note = 2'-O-methyladenosine-3'-phosphate
  modified_base 11: mod_base = OTHER; note = 2'-O-methyladenosine-3'-phosphate
  modified_base 12: mod_base = OTHER; note = 2'-O-methyluridine-3'-phosphate
  modified_base 13: mod_base = OTHER; note = 2'-O-methylguanosine-3'-phosphate
  modified_base 14: mod_base = OTHER; note = 2'-deoxy-2'-fluoroadenosine-3'-phosphate
  modified_base 15: mod_base = OTHER; note = 2'-O-methyluridine-3'-phosphate
  modified_base 16: mod_base = OTHER; note = 2'-deoxy-2'-fluoroguanosine-3'-phosphate
  modified_base 17: mod_base = OTHER; note = 2'-O-methylguanosine-3'-phosphate
  modified_base 18: mod_base = OTHER; note = 2'-O-methylcytidine-3'-phosphate
  modified_base 19: mod_base = OTHER; note = 2'-O-methylcytidine-3'-phosphate
  modified_base 20: mod_base = OTHER; note = 2'-O-methyladenosine-3'-phosphate
  modified_base 21: mod_base = OTHER; note = 2'-O-methylguanosine-3'-phosphorothioate
  modified_base 22: mod_base = OTHER; note = 2'-O-methylcytidine-3'-phosphorothioate
  modified_base 23: mod_base = OTHER; note = 2'-O-methyluridine
tacagtaataatgatggccagct

SEQ ID NO: 12055 - RNA, 23 nt, synthetic construct
  source 1..23: mol_type = other RNA
  modified_base 1: mod_base = OTHER; note = 2'-O-methyluridine-3'-phosphorothioate 5'-(E)-Vinylphosphonate
  modified_base 2: mod_base = OTHER; note = 2'-deoxy-2'-fluorocytidine-3'-phosphorothioate
  modified_base 3: mod_base = OTHER; note = 2'-O-methyladenosine-3'-phosphate
  modified_base 4: mod_base = OTHER; note = 2'-O-methylguanosine-3'-phosphate
  modified_base 5: mod_base = OTHER; note = 2'-O-methyluridine-3'-phosphate
  modified_base 6: mod_base = OTHER; note = 2'-deoxy-2'-fluoroadenosine-3'-phosphate
  modified_base 7: mod_base = OTHER; note = 2'-O-methyladenosine-3'-phosphate
  modified_base 8: mod_base = OTHER; note = 2'-O-methyluridine-3'-phosphate
  modified_base 9: mod_base = OTHER; note = 2'-O-methyladenosine-3'-phosphate
  modified_base 10: mod_base = OTHER; note = 2'-O-methyladenosine-3'-phosphate
  modified_base 11: mod_base = OTHER; note = 2'-O-methyluridine-3'-phosphate
  modified_base 12: mod_base = OTHER; note = 2'-O-methylguanosine-3'-phosphate
  modified_base 13: mod_base = OTHER; note = 2'-O-methyladenosine-3'-phosphate
  modified_base 14: mod_base = OTHER; note = 2'-deoxy-2'-fluorouridine-3'-phosphate
  modified_base 15: mod_base = OTHER; note = 2'-O-methylguanosine-3'-phosphate
  modified_base 16: mod_base = OTHER; note = 2'-deoxy-2'-fluoroguanosine-3'-phosphate
  modified_base 17: mod_base = OTHER; note = 2'-O-methylcytidine-3'-phosphate
  modified_base 18: mod_base = OTHER; note = 2'-O-methylcytidine-3'-phosphate
  modified_base 19: mod_base = OTHER; note = 2'-O-methyladenosine-3'-phosphate
  modified_base 20: mod_base = OTHER; note = 2'-O-methylguanosine-3'-phosphate
  modified_base 21: mod_base = OTHER; note = 2'-O-methylcytidine-3'-phosphorothioate
  modified_base 22: mod_base = OTHER; note = 2'-O-methyluridine-3'-phosphorothioate
  modified_base 23: mod_base = OTHER; note = 2'-O-methylcytidine
tcagtaataatgatggccagctc

SEQ ID NO: 12056 - RNA, 23 nt, synthetic construct
  source 1..23: mol_type = other RNA
  modified_base 1: mod_base = OTHER; note = 2'-O-methyluridine-3'-phosphorothioate 5'-(E)-Vinylphosphonate
  modified_base 2: mod_base = OTHER; note = 2'-deoxy-2'-fluoroguanosine-3'-phosphorothioate
  modified_base 3: mod_base = OTHER; note = 2'-O-methylcytidine-3'-phosphate
  modified_base 4: mod_base = OTHER; note = 2'-O-methyladenosine-3'-phosphate
  modified_base 5: mod_base = OTHER; note = 2'-O-methylcytidine-3'-phosphate
  modified_base 6: mod_base = OTHER; note = 2'-deoxy-2'-fluoroadenosine-3'-phosphate
  modified_base 7: mod_base = OTHER; note = 2'-O-methylguanosine-3'-phosphate
  modified_base 8: mod_base = OTHER; note = 2'-O-methyluridine-3'-phosphate
  modified_base 9: mod_base = OTHER; note = 2'-O-methyladenosine-3'-phosphate
  modified_base 10: mod_base = OTHER; note = 2'-O-methyladenosine-3'-phosphate
  modified_base 11: mod_base = OTHER; note = 2'-O-methyluridine-3'-phosphate
  modified_base 12: mod_base = OTHER; note = 2'-O-methyladenosine-3'-phosphate
  modified_base 13: mod_base = OTHER; note = 2'-O-methyladenosine-3'-phosphate
  modified_base 14: mod_base = OTHER; note = 2'-deoxy-2'-fluorouridine-3'-phosphate
  modified_base 15: mod_base = OTHER; note = 2'-O-methylguanosine-3'-phosphate
  modified_base 16: mod_base = OTHER; note = 2'-deoxy-2'-fluoroadenosine-3'-phosphate
  modified_base 17: mod_base = OTHER; note = 2'-O-methyluridine-3'-phosphate
  modified_base 18: mod_base = OTHER; note = 2'-O-methylguanosine-3'-phosphate
  modified_base 19: mod_base = OTHER; note = 2'-O-methylguanosine-3'-phosphate
  modified_base 20: mod_base = OTHER; note = 2'-O-methylcytidine-3'-phosphate
  modified_base 21: mod_base = OTHER; note = 2'-O-methylcytidine-3'-phosphorothioate
  modified_base 22: mod_base = OTHER; note = 2'-O-methyladenosine-3'-phosphorothioate
  modified_base 23: mod_base = OTHER; note = 2'-O-methylguanosine
tgcacagtaataatgatggccag

SEQ ID NO: 12057 - RNA, 23 nt, synthetic construct
  source 1..23: mol_type = other RNA
  modified_base 1: mod_base = OTHER; note = 2'-O-methyluridine-3'-phosphorothioate 5'-(E)-Vinylphosphonate
  modified_base 2: mod_base = OTHER; note = 2'-deoxy-2'-fluoroadenosine-3'-phosphorothioate
  modified_base 3: mod_base = OTHER; note = 2'-O-methyladenosine-3'-phosphate
  modified_base 4: mod_base = OTHER; note = 2'-O-methyladenosine-3'-phosphate
  modified_base 5: mod_base = OTHER; note = 2'-O-methylcytidine-3'-phosphate
  modified_base 6: mod_base = OTHER; note = 2'-deoxy-2'-fluoroadenosine-3'-phosphate
  modified_base 7: mod_base = OTHER; note = 2'-O-methylguanosine-3'-phosphate
  modified_base 8: mod_base = OTHER; note = 2'-O-methylguanosine-3'-phosphate
  modified_base 9: mod_base = OTHER; note = 2'-O-methylcytidine-3'-phosphate
  modified_base 10: mod_base = OTHER; note = 2'-O-methyladenosine-3'-phosphate
  modified_base 11: mod_base = OTHER; note = 2'-O-methylcytidine-3'-phosphate
  modified_base 12: mod_base = OTHER; note = 2'-O-methyladenosine-3'-phosphate
  modified_base 13: mod_base = OTHER; note = 2'-O-methylguanosine-3'-phosphate
  modified_base 14: mod_base = OTHER; note = 2'-deoxy-2'-fluorouridine-3'-phosphate
  modified_base 15: mod_base = OTHER; note = 2'-O-methyladenosine-3'-phosphate
  modified_base 16: mod_base = OTHER; note = 2'-deoxy-2'-fluoroadenosine-3'-phosphate
  modified_base 17: mod_base = OTHER; note = 2'-O-methyluridine-3'-phosphate
  modified_base 18: mod_base = OTHER; note = 2'-O-methyladenosine-3'-phosphate
  modified_base 19: mod_base = OTHER; note = 2'-O-methyladenosine-3'-phosphate
  modified_base 20: mod_base = OTHER; note = 2'-O-methyluridine-3'-phosphate
  modified_base 21: mod_base = OTHER; note = 2'-O-methylguanosine-3'-phosphorothioate
  modified_base 22: mod_base = OTHER; note = 2'-O-methyladenosine-3'-phosphorothioate
  modified_base 23: mod_base = OTHER; note = 2'-O-methyluridine
taaacaggcacagtaataatgat

SEQ ID NO: 12058 - RNA, 23 nt, synthetic construct
  source 1..23: mol_type = other RNA
  modified_base 1: mod_base = OTHER; note = 2'-O-methyluridine-3'-phosphorothioate 5'-(E)-Vinylphosphonate
  modified_base 2: mod_base = OTHER; note = 2'-deoxy-2'-fluoroadenosine-3'-phosphorothioate
  modified_base 3: mod_base = OTHER; note = 2'-O-methylguanosine-3'-phosphate
  modified_base 4: mod_base = OTHER; note = 2'-O-methylguanosine-3'-phosphate
  modified_base 5: mod_base = OTHER; note = 2'-O-methylcytidine-3'-phosphate
  modified_base 6: mod_base = OTHER; note = 2'-deoxy-2'-fluoroadenosine-3'-phosphate
  modified_base 7: mod_base = OTHER; note = 2'-O-methyladenosine-3'-phosphate
  modified_base 8: mod_base = OTHER; note = 2'-O-methyladenosine-3'-phosphate
  modified_base 9: mod_base = OTHER; note = 2'-O-methylcytidine-3'-phosphate
  modified_base 10: mod_base = OTHER; note = 2'-O-methyladenosine-3'-phosphate
  modified_base 11: mod_base = OTHER; note = 2'-O-methylguanosine-3'-phosphate
  modified_base 12: mod_base = OTHER; note = 2'-O-methylguanosine-3'-phosphate
  modified_base 13: mod_base = OTHER; note = 2'-O-methylcytidine-3'-phosphate
  modified_base 14: mod_base = OTHER; note = 2'-deoxy-2'-fluoroadenosine-3'-phosphate
  modified_base 15: mod_base = OTHER; note = 2'-O-methylcytidine-3'-phosphate
  modified_base 16: mod_base = OTHER; note = 2'-deoxy-2'-fluoroadenosine-3'-phosphate
  modified_base 17: mod_base = OTHER; note = 2'-O-methylguanosine-3'-phosphate
  modified_base 18: mod_base = OTHER; note = 2'-O-methyluridine-3'-phosphate
  modified_base 19: mod_base = OTHER; note = 2'-O-methyladenosine-3'-phosphate
  modified_base 20: mod_base = OTHER; note = 2'-O-methyladenosine-3'-phosphate
  modified_base 21: mod_base = OTHER; note = 2'-O-methyluridine-3'-phosphorothioate
  modified_base 22: mod_base = OTHER; note = 2'-O-methyladenosine-3'-phosphorothioate
  modified_base 23: mod_base = OTHER; note = 2'-O-methyladenosine
taggcaaacaggcacagtaataa

SEQ ID NO: 12059 - RNA, 23 nt, synthetic construct
  source 1..23: mol_type = other RNA
  modified_base 1: mod_base = OTHER; note = 2'-O-methyluridine-3'-phosphorothioate 5'-(E)-Vinylphosphonate
  modified_base 2: mod_base = OTHER; note = 2'-deoxy-2'-fluorouridine-3'-phosphorothioate
  modified_base 3: mod_base = OTHER; note = 2'-O-methylguanosine-3'-phosphate
  modified_base 4: mod_base = OTHER; note = 2'-O-methylguanosine-3'-phosphate
  modified_base 5: mod_base = OTHER; note = 2'-O-methyladenosine-3'-phosphate
  modified_base 6: mod_base = OTHER; note = 2'-deoxy-2'-fluorocytidine-3'-phosphate
  modified_base 7: mod_base = OTHER; note = 2'-O-methyladenosine-3'-phosphate
  modified_base 8: mod_base = OTHER; note = 2'-O-methylguanosine-3'-phosphate
  modified_base 9: mod_base = OTHER; note = 2'-O-methylguanosine-3'-phosphate
  modified_base 10: mod_base = OTHER; note = 2'-O-methyladenosine-3'-phosphate
  modified_base 11: mod_base = OTHER; note = 2'-O-methylguanosine-3'-phosphate
  modified_base 12: mod_base = OTHER; note = 2'-O-methylguanosine-3'-phosphate
  modified_base 13: mod_base = OTHER; note = 2'-O-methylcytidine-3'-phosphate
  modified_base 14: mod_base = OTHER; note = 2'-deoxy-2'-fluoroadenosine-3'-phosphate
  modified_base 15: mod_base = OTHER; note = 2'-O-methyladenosine-3'-phosphate
  modified_base 16: mod_base = OTHER; note = 2'-deoxy-2'-fluoroadenosine-3'-phosphate
  modified_base 17: mod_base = OTHER; note = 2'-O-methylcytidine-3'-phosphate
  modified_base 18: mod_base = OTHER; note = 2'-O-methyladenosine-3'-phosphate
  modified_base 19: mod_base = OTHER; note = 2'-O-methylguanosine-3'-phosphate
  modified_base 20: mod_base = OTHER; note = 2'-O-methylguanosine-3'-phosphate
  modified_base 21: mod_base = OTHER; note = 2'-O-methylcytidine-3'-phosphorothioate
  modified_base 22: mod_base = OTHER; note = 2'-O-methyladenosine-3'-phosphorothioate
  modified_base 23: mod_base = OTHER; note = 2'-O-methylcytidine
ttggacaggaggcaaacaggcac

SEQ ID NO: 12060 - RNA, 23 nt, synthetic construct
  source 1..23: mol_type = other RNA
  modified_base 1: mod_base = OTHER; note = 2'-O-methyluridine-3'-phosphorothioate 5'-(E)-Vinylphosphonate
  modified_base 2: mod_base = OTHER; note = 2'-deoxy-2'-fluoroadenosine-3'-phosphorothioate
  modified_base 3: mod_base = OTHER; note = 2'-O-methyluridine-3'-phosphate
  modified_base 4: mod_base = OTHER; note = 2'-O-methyladenosine-3'-phosphate
  modified_base 5: mod_base = OTHER; note = 2'-O-methylcytidine-3'-phosphate
  modified_base 6: mod_base = OTHER; note = 2'-deoxy-2'-fluorouridine-3'-phosphate
  modified_base 7: mod_base = OTHER; note = 2'-O-methylguanosine-3'-phosphate
  modified_base 8: mod_base = OTHER; note = 2'-O-methyluridine-3'-phosphate
  modified_base 9: mod_base = OTHER; note = 2'-O-methylcytidine-3'-phosphate
  modified_base 10: mod_base = OTHER; note = 2'-O-methyladenosine-3'-phosphate
  modified_base 11: mod_base = OTHER; note = 2'-O-methylguanosine-3'-phosphate
  modified_base 12: mod_base = OTHER; note = 2'-O-methylcytidine-3'-phosphate
  modified_base 13: mod_base = OTHER; note = 2'-O-methyladenosine-3'-phosphate
  modified_base 14: mod_base = OTHER; note = 2'-deoxy-2'-fluorouridine-3'-phosphate
  modified_base 15: mod_base = OTHER; note = 2'-O-methylcytidine-3'-phosphate
  modified_base 16: mod_base = OTHER; note = 2'-deoxy-2'-fluoroguanosine-3'-phosphate
  modified_base 17: mod_base = OTHER; note = 2'-O-methylcytidine-3'-phosphate
  modified_base 18: mod_base = OTHER; note = 2'-O-methyladenosine-3'-phosphate
  modified_base 19: mod_base = OTHER; note = 2'-O-methylguanosine-3'-phosphate
  modified_base 20: mod_base = OTHER; note = 2'-O-methylcytidine-3'-phosphate
  modified_base 21: mod_base = OTHER; note = 2'-O-methyluridine-3'-phosphorothioate
  modified_base 22: mod_base = OTHER; note = 2'-O-methyladenosine-3'-phosphorothioate
  modified_base 23: mod_base = OTHER; note = 2'-O-methyluridine
tatactgtcagcatcgcagctat

SEQ ID NO: 12061 - RNA, 23 nt, synthetic construct
  source 1..23: mol_type = other RNA
  modified_base 1: mod_base = OTHER; note = 2'-O-methyluridine-3'-phosphorothioate 5'-(E)-Vinylphosphonate
  modified_base 2: mod_base = OTHER; note = 2'-deoxy-2'-fluorouridine-3'-phosphorothioate
  modified_base 3: mod_base = OTHER; note = 2'-O-methyluridine-3'-phosphate
  modified_base 4: mod_base = OTHER; note = 2'-O-methyluridine-3'-phosphate
  modified_base 5: mod_base = OTHER; note = 2'-O-methyluridine-3'-phosphate
  modified_base 6: mod_base = OTHER; note = 2'-deoxy-2'-fluorocytidine-3'-phosphate
  modified_base 7: mod_base = OTHER; note = 2'-O-methyluridine-3'-phosphate
  modified_base 8: mod_base = OTHER; note = 2'-O-methyluridine-3'-phosphate
  modified_base 9: mod_base = OTHER; note = 2'-O-methylcytidine-3'-phosphate
  modified_base 10: mod_base = OTHER; note = 2'-O-methylcytidine-3'-phosphate
  modified_base 11: mod_base = OTHER; note = 2'-O-methyluridine-3'-phosphate
  modified_base 12: mod_base = OTHER; note = 2'-O-methylguanosine-3'-phosphate
  modified_base 13: mod_base = OTHER; note = 2'-O-methyluridine-3'-phosphate
  modified_base 14: mod_base = OTHER; note = 2'-deoxy-2'-fluoroadenosine-3'-phosphate
  modified_base 15: mod_base = OTHER; note = 2'-O-methylguanosine-3'-phosphate
  modified_base 16: mod_base = OTHER; note = 2'-deoxy-2'-fluoroguanosine-3'-phosphate
  modified_base 17: mod_base = OTHER; note = 2'-O-methyladenosine-3'-phosphate
  modified_base 18: mod_base = OTHER; note = 2'-O-methylguanosine-3'-phosphate
  modified_base 19: mod_base = OTHER; note = 2'-O-methylcytidine-3'-phosphate
  modified_base 20: mod_base = OTHER; note = 2'-O-methyladenosine-3'-phosphate
  modified_base 21: mod_base = OTHER; note = 2'-O-methylcytidine-3'-phosphorothioate
  modified_base 22: mod_base = OTHER; note = 2'-O-methyluridine-3'-phosphorothioate
  modified_base 23: mod_base = OTHER; note = 2'-O-methylguanosine
tttttcttcctgtaggagcactg

SEQ ID NO: 12062 - RNA, 23 nt, synthetic construct
  source 1..23: mol_type = other RNA
  modified_base 1: mod_base = OTHER; note = 2'-O-methyluridine-3'-phosphorothioate 5'-(E)-Vinylphosphonate
  modified_base 2: mod_base = OTHER; note = 2'-deoxy-2'-fluorouridine-3'-phosphorothioate
  modified_base 3: mod_base = OTHER; note = 2'-O-methyluridine-3'-phosphate
  modified_base 4: mod_base = OTHER; note = 2'-O-methyluridine-3'-phosphate
  modified_base 5: mod_base = OTHER; note = 2'-O-methyluridine-3'-phosphate
  modified_base 6: mod_base = OTHER; note = 2'-deoxy-2'-fluorouridine-3'-phosphate
  modified_base 7: mod_base = OTHER; note = 2'-O-methylcytidine-3'-phosphate
  modified_base 8: mod_base = OTHER; note = 2'-O-methyluridine-3'-phosphate
  modified_base 9: mod_base = OTHER; note = 2'-O-methyluridine-3'-phosphate
  modified_base 10: mod_base = OTHER; note = 2'-O-methylcytidine-3'-phosphate
  modified_base 11: mod_base = OTHER; note = 2'-O-methylcytidine-3'-phosphate
  modified_base 12: mod_base = OTHER; note = 2'-O-methyluridine-3'-phosphate
  modified_base 13: mod_base = OTHER; note = 2'-O-methylguanosine-3'-phosphate
  modified_base 14: mod_base = OTHER; note = 2'-deoxy-2'-fluorouridine-3'-phosphate
  modified_base 15: mod_base = OTHER; note = 2'-O-methyladenosine-3'-phosphate
  modified_base 16: mod_base = OTHER; note = 2'-deoxy-2'-fluoroguanosine-3'-phosphate
  modified_base 17: mod_base = OTHER; note = 2'-O-methylguanosine-3'-phosphate
  modified_base 18: mod_base = OTHER; note = 2'-O-methyladenosine-3'-phosphate
  modified_base 19: mod_base = OTHER; note = 2'-O-methylguanosine-3'-phosphate
  modified_base 20: mod_base = OTHER; note = 2'-O-methylcytidine-3'-phosphate
  modified_base 21: mod_base = OTHER; note = 2'-O-methyladenosine-3'-phosphorothioate
  modified_base 22: mod_base = OTHER; note = 2'-O-methylcytidine-3'-phosphorothioate
  modified_base 23: mod_base = OTHER; note = 2'-O-methyluridine
ttttttcttcctgtaggagcact

SEQ ID NO: 12063 - RNA, 23 nt, synthetic construct
  source 1..23: mol_type = other RNA
  modified_base 1: mod_base = OTHER; note = 2'-O-methyluridine-3'-phosphorothioate 5'-(E)-Vinylphosphonate
  modified_base 2: mod_base = OTHER; note = 2'-deoxy-2'-fluorouridine-3'-phosphorothioate
  modified_base 3: mod_base = OTHER; note = 2'-O-methylcytidine-3'-phosphate
  modified_base 4: mod_base = OTHER; note = 2'-O-methyluridine-3'-phosphate
  modified_base 5: mod_base = OTHER; note = 2'-O-methyluridine-3'-phosphate
  modified_base 6: mod_base = OTHER; note = 2'-deoxy-2'-fluorouridine-3'-phosphate
  modified_base 7: mod_base = OTHER; note = 2'-O-methyluridine-3'-phosphate
  modified_base 8: mod_base = OTHER; note = 2'-O-methyluridine-3'-phosphate
  modified_base 9: mod_base = OTHER; note = 2'-O-methylcytidine-3'-phosphate
  modified_base 10: mod_base = OTHER; note = 2'-O-methyluridine-3'-phosphate
  modified_base 11: mod_base = OTHER; note = 2'-O-methyluridine-3'-phosphate
  modified_base 12: mod_base = OTHER; note = 2'-O-methylcytidine-3'-phosphate
  modified_base 13: mod_base = OTHER; note = 2'-O-methylcytidine-3'-phosphate
  modified_base 14: mod_base = OTHER; note = 2'-deoxy-2'-fluorouridine-3'-phosphate
  modified_base 15: mod_base = OTHER; note = 2'-O-methylguanosine-3'-phosphate
  modified_base 16: mod_base = OTHER; note = 2'-deoxy-2'-fluorouridine-3'-phosphate
  modified_base 17: mod_base = OTHER; note = 2'-O-methyladenosine-3'-phosphate
  modified_base 18: mod_base = OTHER; note = 2'-O-methylguanosine-3'-phosphate
  modified_base 19: mod_base = OTHER; note = 2'-O-methylguanosine-3'-phosphate
  modified_base 20: mod_base = OTHER; note = 2'-O-methyladenosine-3'-phosphate
  modified_base 21: mod_base = OTHER; note = 2'-O-methylguanosine-3'-phosphorothioate
  modified_base 22: mod_base = OTHER; note = 2'-O-methylcytidine-3'-phosphorothioate
  modified_base 23: mod_base = OTHER; note = 2'-O-methyladenosine
ttctttttcttcctgtaggagca

SEQ ID NO: 12064 - RNA, 23 nt, synthetic construct
  source 1..23: mol_type = other RNA
  modified_base 1: mod_base = OTHER; note = 2'-O-methyluridine-3'-phosphorothioate 5'-(E)-Vinylphosphonate
  modified_base 2: mod_base = OTHER; note = 2'-deoxy-2'-fluoroguanosine-3'-phosphorothioate
  modified_base 3: mod_base = OTHER; note = 2'-O-methyluridine-3'-phosphate
  modified_base 4: mod_base = OTHER; note = 2'-O-methylcytidine-3'-phosphate
  modified_base 5: mod_base = OTHER; note = 2'-O-methyluridine-3'-phosphate
  modified_base 6: mod_base = OTHER; note = 2'-deoxy-2'-fluorocytidine-3'-phosphate
  modified_base 7: mod_base = OTHER; note = 2'-O-methyluridine-3'-phosphate
  modified_base 8: mod_base = OTHER; note = 2'-O-methyluridine-3'-phosphate
  modified_base 9: mod_base = OTHER; note = 2'-O-methyluridine-3'-phosphate
  modified_base 10: mod_base = OTHER; note = 2'-O-methyluridine-3'-phosphate
  modified_base 11: mod_base = OTHER; note = 2'-O-methyluridine-3'-phosphate
  modified_base 12: mod_base = OTHER; note = 2'-O-methylcytidine-3'-phosphate
  modified_base 13: mod_base = OTHER; note = 2'-O-methyluridine-3'-phosphate
  modified_base 14: mod_base = OTHER; note = 2'-deoxy-2'-fluorouridine-3'-phosphate
  modified_base 15: mod_base = OTHER; note = 2'-O-methylcytidine-3'-phosphate
  modified_base 16: mod_base = OTHER; note = 2'-deoxy-2'-fluorocytidine-3'-phosphate
  modified_base 17: mod_base = OTHER; note = 2'-O-methyluridine-3'-phosphate
  modified_base 18: mod_base = OTHER; note = 2'-O-methylguanosine-3'-phosphate
  modified_base 19: mod_base = OTHER; note = 2'-O-methyluridine-3'-phosphate
  modified_base 20: mod_base = OTHER; note = 2'-O-methyladenosine-3'-phosphate
  modified_base 21: mod_base = OTHER; note = 2'-O-methylguanosine-3'-phosphorothioate
  modified_base 22: mod_base = OTHER; note = 2'-O-methylguanosine-3'-phosphorothioate
  modified_base 23: mod_base = OTHER; note = 2'-O-methyladenosine
tgtctctttttcttcctgtagga

SEQ ID NO: 12065 - RNA, 23 nt, synthetic construct
  source 1..23: mol_type = other RNA
  modified_base 1: mod_base = OTHER; note = 2'-O-methyluridine-3'-phosphorothioate 5'-(E)-Vinylphosphonate
  modified_base 2: mod_base = OTHER; note = 2'-deoxy-2'-fluorouridine-3'-phosphorothioate
  modified_base 3: mod_base = OTHER; note = 2'-O-methyluridine-3'-phosphate
  modified_base 4: mod_base = OTHER; note = 2'-O-methyluridine-3'-phosphate
  modified_base 5: mod_base = OTHER; note = 2'-O-methylcytidine-3'-phosphate
  modified_base 6: mod_base = OTHER; note = 2'-deoxy-2'-fluorocytidine-3'-phosphate
  modified_base 7: mod_base = OTHER; note = 2'-O-methyladenosine-3'-phosphate
  modified_base 8: mod_base = OTHER; note = 2'-O-methylguanosine-3'-phosphate
  modified_base 9: mod_base = OTHER; note = 2'-O-methylcytidine-3'-phosphate
  modified_base 10: mod_base = OTHER; note = 2'-O-methyladenosine-3'-phosphate
  modified_base 11: mod_base = OTHER; note = 2'-O-methyluridine-3'-phosphate
  modified_base 12: mod_base = OTHER; note = 2'-O-methyluridine-3'-phosphate
  modified_base 13: mod_base = OTHER; note = 2'-O-methyluridine-3'-phosphate
  modified_base 14: mod_base = OTHER; note = 2'-deoxy-2'-fluoroadenosine-3'-phosphate
  modified_base 15: mod_base = OTHER; note = 2'-O-methylcytidine-3'-phosphate
  modified_base 16: mod_base = OTHER; note = 2'-deoxy-2'-fluorocytidine-3'-phosphate
  modified_base 17: mod_base = OTHER; note = 2'-O-methyladenosine-3'-phosphate
  modified_base 18: mod_base = OTHER; note = 2'-O-methylguanosine-3'-phosphate
  modified_base 19: mod_base = OTHER; note = 2'-O-methyladenosine-3'-phosphate
  modified_base 20: mod_base = OTHER; note = 2'-O-methyluridine-3'-phosphate
  modified_base 21: mod_base = OTHER; note = 2'-O-methyluridine-3'-phosphorothioate
  modified_base 22: mod_base = OTHER; note = 2'-O-methylguanosine-3'-phosphorothioate
  modified_base 23: mod_base = OTHER; note = 2'-O-methylcytidine
ttttccagcatttaccagattgc

SEQ ID NO: 12066 - RNA, 23 nt, synthetic construct
  source 1..23: mol_type = other RNA
  modified_base 1: mod_base = OTHER; note = 2'-O-methyluridine-3'-phosphorothioate 5'-(E)-Vinylphosphonate
  modified_base 2: mod_base = OTHER; note = 2'-deoxy-2'-fluorocytidine-3'-phosphorothioate
  modified_base 3: mod_base = OTHER; note = 2'-O-methyladenosine-3'-phosphate
  modified_base 4: mod_base = OTHER; note = 2'-O-methylguanosine-3'-phosphate
  modified_base 5: mod_base = OTHER; note = 2'-O-methyladenosine-3'-phosphate
  modified_base 6: mod_base = OTHER; note = 2'-deoxy-2'-fluorouridine-3'-phosphate
  modified_base 7: mod_base = OTHER; note = 2'-O-methyluridine-3'-phosphate
  modified_base 8: mod_base = OTHER; note = 2'-O-methylguanosine-3'-phosphate
  modified_base 9: mod_base = OTHER; note = 2'-O-methylcytidine-3'-phosphate
  modified_base 10: mod_base = OTHER; note = 2'-O-methyladenosine-3'-phosphate
  modified_base 11: mod_base = OTHER; note = 2'-O-methylcytidine-3'-phosphate
  modified_base 12: mod_base = OTHER; note = 2'-O-methyluridine-3'-phosphate
  modified_base 13: mod_base = OTHER; note = 2'-O-methylcytidine-3'-phosphate
  modified_base 14: mod_base = OTHER; note = 2'-deoxy-2'-fluoroadenosine-3'-phosphate
  modified_base 15: mod_base = OTHER; note = 2'-O-methylguanosine-3'-phosphate
  modified_base 16: mod_base = OTHER; note = 2'-deoxy-2'-fluoroadenosine-3'-phosphate
  modified_base 17: mod_base = OTHER; note = 2'-O-methylguanosine-3'-phosphate
  modified_base 18: mod_base = OTHER; note = 2'-O-methyladenosine-3'-phosphate
  modified_base 19: mod_base = OTHER; note = 2'-O-methylguanosine-3'-phosphate
  modified_base 20: mod_base = OTHER; note = 2'-O-methyluridine-3'-phosphate
  modified_base 21: mod_base = OTHER; note = 2'-O-methylguanosine-3'-phosphorothioate
  modified_base 22: mod_base = OTHER; note = 2'-O-methylguanosine-3'-phosphorothioate
  modified_base 23: mod_base = OTHER; note = 2'-O-methyluridine
tcagattgcactcagagagtggt

SEQ ID NO: 12067 - RNA, 23 nt, synthetic construct
  source 1..23: mol_type = other RNA
  modified_base 1: mod_base = OTHER; note = 2'-O-methyluridine-3'-phosphorothioate 5'-(E)-Vinylphosphonate
  modified_base 2: mod_base = OTHER; note = 2'-deoxy-2'-fluorouridine-3'-phosphorothioate
  modified_base 3: mod_base = OTHER; note = 2'-O-methyluridine-3'-phosphate
  modified_base 4: mod_base = OTHER; note = 2'-O-methyladenosine-3'-phosphate
  modified_base 5: mod_base = OTHER; note = 2'-O-methylcytidine-3'-phosphate
  modified_base 6: mod_base = OTHER; note = 2'-deoxy-2'-fluorocytidine-3'-phosphate
  modified_base 7: mod_base = OTHER; note = 2'-O-methyladenosine-3'-phosphate
  modified_base 8: mod_base = OTHER; note = 2'-O-methylguanosine-3'-phosphate
  modified_base 9: mod_base = OTHER; note = 2'-O-methyladenosine-3'-phosphate
  modified_base 10: mod_base = OTHER; note = 2'-O-methyluridine-3'-phosphate
  modified_base 11: mod_base = OTHER; note = 2'-O-methyluridine-3'-phosphate
  modified_base 12: mod_base = OTHER; note = 2'-O-methylguanosine-3'-phosphate
  modified_base 13: mod_base = OTHER; note = 2'-O-methylcytidine-3'-phosphate
  modified_base 14: mod_base = OTHER; note = 2'-deoxy-2'-fluoroadenosine-3'-phosphate
  modified_base 15: mod_base = OTHER; note = 2'-O-methylcytidine-3'-phosphate
  modified_base 16: mod_base = OTHER; note = 2'-deoxy-2'-fluorouridine-3'-phosphate
  modified_base 17: mod_base = OTHER; note = 2'-O-methylcytidine-3'-phosphate
  modified_base 18: mod_base = OTHER; note = 2'-O-methyladenosine-3'-phosphate
  modified_base 19: mod_base = OTHER; note = 2'-O-methylguanosine-3'-phosphate
  modified_base 20: mod_base = OTHER; note = 2'-O-methyladenosine-3'-phosphate
  modified_base 21: mod_base = OTHER; note = 2'-O-methylguanosine-3'-phosphorothioate
  modified_base 22: mod_base = OTHER; note = 2'-O-methyladenosine-3'-phosphorothioate
  modified_base 23: mod_base = OTHER; note = 2'-O-methylguanosine
tttaccagattgcactcagagag

SEQ ID NO: 12068 - RNA, 23 nt, synthetic construct
  source 1..23: mol_type = other RNA
  modified_base 1: mod_base = OTHER; note = 2'-O-methyluridine-3'-phosphorothioate 5'-(E)-Vinylphosphonate
  modified_base 2: mod_base = OTHER; note = 2'-deoxy-2'-fluorocytidine-3'-phosphorothioate
  modified_base 3: mod_base = OTHER; note = 2'-O-methyladenosine-3'-phosphate
  modified_base 4: mod_base = OTHER; note = 2'-O-methyluridine-3'-phosphate
  modified_base 5: mod_base = OTHER; note = 2'-O-methyluridine-3'-phosphate
  modified_base 6: mod_base = OTHER; note = 2'-deoxy-2'-fluorouridine-3'-phosphate
  modified_base 7: mod_base = OTHER; note = 2'-O-methyladenosine-3'-phosphate
  modified_base 8: mod_base = OTHER; note = 2'-O-methylcytidine-3'-phosphate
  modified_base 9: mod_base = OTHER; note = 2'-O-methylcytidine-3'-phosphate
  modified_base 10: mod_base = OTHER; note = 2'-O-methyladenosine-3'-phosphate
  modified_base 11: mod_base = OTHER; note = 2'-O-methylguanosine-3'-phosphate
  modified_base 12: mod_base = OTHER; note = 2'-O-methyladenosine-3'-phosphate
  modified_base 13: mod_base = OTHER; note = 2'-O-methyluridine-3'-phosphate
  modified_base 14: mod_base = OTHER; note = 2'-deoxy-2'-fluorouridine-3'-phosphate
  modified_base 15: mod_base = OTHER; note = 2'-O-methylguanosine-3'-phosphate
  modified_base 16: mod_base = OTHER; note = 2'-deoxy-2'-fluorocytidine-3'-phosphate
  modified_base 17: mod_base = OTHER; note = 2'-O-methyladenosine-3'-phosphate
  modified_base 18: mod_base = OTHER; note = 2'-O-methylcytidine-3'-phosphate
  modified_base 19: mod_base = OTHER; note = 2'-O-methyluridine-3'-phosphate
  modified_base 20: mod_base = OTHER; note = 2'-O-methylcytidine-3'-phosphate
  modified_base 21: mod_base = OTHER; note = 2'-O-methyladenosine-3'-phosphorothioate
  modified_base 22: mod_base = OTHER; note = 2'-O-methylguanosine-3'-phosphorothioate
  modified_base 23: mod_base = OTHER; note = 2'-O-methyladenosine
tcatttaccagattgcactcaga

SEQ ID NO: 12069 - RNA, 23 nt, synthetic construct
  source 1..23: mol_type = other RNA
  modified_base 1: mod_base = OTHER; note = 2'-O-methyluridine-3'-phosphorothioate 5'-(E)-Vinylphosphonate
  modified_base 2: mod_base = OTHER; note = 2'-deoxy-2'-fluoroguanosine-3'-phosphorothioate
  modified_base 3: mod_base = OTHER; note = 2'-O-methyluridine-3'-phosphate
  modified_base 4: mod_base = OTHER; note = 2'-O-methyluridine-3'-phosphate
  modified_base 5: mod_base = OTHER; note = 2'-O-methyluridine-3'-phosphate
  modified_base 6: mod_base = OTHER; note = 2'-deoxy-2'-fluorouridine-3'-phosphate
  modified_base 7: mod_base = OTHER; note = 2'-O-methyluridine-3'-phosphate
  modified_base 8: mod_base = OTHER; note = 2'-O-methylcytidine-3'-phosphate
  modified_base 9: mod_base = OTHER; note = 2'-O-methylcytidine-3'-phosphate
  modified_base 10: mod_base = OTHER; note = 2'-O-methyladenosine-3'-phosphate
  modified_base 11: mod_base = OTHER; note = 2'-O-methylguanosine-3'-phosphate
  modified_base 12: mod_base = OTHER; note = 2'-O-methylcytidine-3'-phosphate
  modified_base 13: mod_base = OTHER; note = 2'-O-methyladenosine-3'-phosphate
  modified_base 14: mod_base = OTHER; note = 2'-deoxy-2'-fluorouridine-3'-phosphate
  modified_base 15: mod_base = OTHER; note = 2'-O-methyluridine-3'-phosphate
  modified_base 16: mod_base = OTHER; note = 2'-deoxy-2'-fluorouridine-3'-phosphate
  modified_base 17: mod_base = OTHER; note = 2'-O-methyladenosine-3'-phosphate
  modified_base 18: mod_base = OTHER; note = 2'-O-methylcytidine-3'-phosphate
  modified_base 19: mod_base = OTHER; note = 2'-O-methylcytidine-3'-phosphate
  modified_base 20: mod_base = OTHER; note = 2'-O-methyladenosine-3'-phosphate
  modified_base 21: mod_base = OTHER; note = 2'-O-methylguanosine-3'-phosphorothioate
  modified_base 22: mod_base = OTHER; note = 2'-O-methyladenosine-3'-phosphorothioate
  modified_base 23: mod_base = OTHER; note = 2'-O-methyluridine
tgtttttccagcatttaccagat

SEQ ID NO: 12070 - RNA, 23 nt, synthetic construct
  source 1..23: mol_type = other RNA
  modified_base 1: mod_base = OTHER; note = 2'-O-methyluridine-3'-phosphorothioate 5'-(E)-Vinylphosphonate
  modified_base 2: mod_base = OTHER; note = 2'-deoxy-2'-fluorouridine-3'-phosphorothioate
  modified_base 3: mod_base = OTHER; note = 2'-O-methylcytidine-3'-phosphate
  modified_base 4: mod_base = OTHER; note = 2'-O-methyluridine-3'-phosphate
  modified_base 5: mod_base = OTHER; note = 2'-O-methyluridine-3'-phosphate
  modified_base 6: mod_base = OTHER; note = 2'-deoxy-2'-fluorouridine-3'-phosphate
  modified_base 7: mod_base = OTHER; note = 2'-O-methylcytidine-3'-phosphate
  modified_base 8: mod_base = OTHER; note = 2'-O-methyladenosine-3'-phosphate
  modified_base 9: mod_base = OTHER; note = 2'-O-methylguanosine-3'-phosphate
  modified_base 10: mod_base = OTHER; note = 2'-O-methyladenosine-3'-phosphate
  modified_base 11: mod_base = OTHER; note = 2'-O-methylguanosine-3'-phosphate
  modified_base 12: mod_base = OTHER; note = 2'-O-methyluridine-3'-phosphate
  modified_base 13: mod_base = OTHER; note = 2'-O-methyluridine-3'-phosphate
  modified_base 14: mod_base = OTHER; note = 2'-deoxy-2'-fluorouridine-3'-phosphate
  modified_base 15: mod_base = OTHER; note = 2'-O-methyluridine-3'-phosphate
  modified_base 16: mod_base = OTHER; note = 2'-deoxy-2'-fluorouridine-3'-phosphate
  modified_base 17: mod_base = OTHER; note = 2'-O-methylcytidine-3'-phosphate
  modified_base 18: mod_base = OTHER; note = 2'-O-methylcytidine-3'-phosphate
  modified_base 19: mod_base = OTHER; note = 2'-O-methyladenosine-3'-phosphate
  modified_base 20: mod_base = OTHER; note = 2'-O-methylguanosine-3'-phosphate
  modified_base 21: mod_base = OTHER; note = 2'-O-methylcytidine-3'-phosphorothioate
  modified_base 22: mod_base = OTHER; note = 2'-O-methyladenosine-3'-phosphorothioate
  modified_base 23: mod_base = OTHER; note = 2'-O-methyluridine
ttctttcagagtttttccagcat

SEQ ID NO: 12071 - RNA, 23 nt, synthetic construct
  source 1..23: mol_type = other RNA
  modified_base 1: mod_base = OTHER; note = 2'-O-methyluridine-3'-phosphorothioate 5'-(E)-Vinylphosphonate
  modified_base 2: mod_base = OTHER; note = 2'-deoxy-2'-fluoroguanosine-3'-phosphorothioate
  modified_base 3: mod_base = OTHER; note = 2'-O-methyladenosine-3'-phosphate
  modified_base 4: mod_base = OTHER; note = 2'-O-methyluridine-3'-phosphate
  modified_base 5: mod_base = OTHER; note = 2'-O-methylcytidine-3'-phosphate
  modified_base 6: mod_base = OTHER; note = 2'-deoxy-2'-fluorouridine-3'-phosphate
  modified_base 7: mod_base = OTHER; note = 2'-O-methyluridine-3'-phosphate
  modified_base 8: mod_base = OTHER; note = 2'-O-methyluridine-3'-phosphate
  modified_base 9: mod_base = OTHER; note = 2'-O-methylcytidine-3'-phosphate
  modified_base 10: mod_base = OTHER; note = 2'-O-methyladenosine-3'-phosphate
  modified_base 11: mod_base = OTHER; note = 2'-O-methylguanosine-3'-phosphate
  modified_base 12: mod_base = OTHER; note = 2'-O-methyladenosine-3'-phosphate
  modified_base 13: mod_base = OTHER; note = 2'-O-methylguanosine-3'-phosphate
  modified_base 14: mod_base = OTHER; note = 2'-deoxy-2'-fluorouridine-3'-phosphate
  modified_base 15: mod_base = OTHER; note = 2'-O-methyluridine-3'-phosphate
  modified_base 16: mod_base = OTHER; note = 2'-deoxy-2'-fluorouridine-3'-phosphate
  modified_base 17: mod_base = OTHER; note = 2'-O-methyluridine-3'-phosphate
  modified_base 18: mod_base = OTHER; note = 2'-O-methyluridine-3'-phosphate
  modified_base 19: mod_base = OTHER; note = 2'-O-methylcytidine-3'-phosphate
  modified_base 20: mod_base = OTHER; note = 2'-O-methylcytidine-3'-phosphate
  modified_base 21: mod_base = OTHER; note = 2'-O-methyladenosine-3'-phosphorothioate
  modified_base 22: mod_base = OTHER; note = 2'-O-methylguanosine-3'-phosphorothioate
  modified_base 23: mod_base = OTHER; note = 2'-O-methylcytidine
tgatctttcagagtttttccagc

SEQ ID NO: 12072 - RNA, 23 nt, synthetic construct
  source 1..23: mol_type = other RNA
  modified_base 1: mod_base = OTHER; note = 2'-O-methyluridine-3'-phosphorothioate 5'-(E)-Vinylphosphonate
  modified_base 2: mod_base = OTHER; note = 2'-deoxy-2'-fluoroadenosine-3'-phosphorothioate
  modified_base 3: mod_base = OTHER; note = 2'-O-methylguanosine-3'-phosphate
  modified_base 4: mod_base = OTHER; note = 2'-O-methyladenosine-3'-phosphate
  modified_base 5: mod_base = OTHER; note = 2'-O-methyluridine-3'-phosphate
  modified_base 6: mod_base = OTHER; note = 2'-deoxy-2'-fluorocytidine-3'-phosphate
  modified_base 7: mod_base = OTHER; note = 2'-O-methyluridine-3'-phosphate
  modified_base 8: mod_base = OTHER; note = 2'-O-methyluridine-3'-phosphate
  modified_base 9: mod_base = OTHER; note = 2'-O-methyluridine-3'-phosphate
  modified_base 10: mod_base = OTHER; note = 2'-O-methylcytidine-3'-phosphate
  modified_base 11: mod_base = OTHER; note = 2'-O-methyladenosine-3'-phosphate
  modified_base 12: mod_base = OTHER; note = 2'-O-methylguanosine-3'-phosphate
  modified_base 13: mod_base = OTHER; note = 2'-O-methyladenosine-3'-phosphate
  modified_base 14: mod_base = OTHER; note = 2'-deoxy-2'-fluoroguanosine-3'-phosphate
  modified_base 15: mod_base = OTHER; note = 2'-O-methyluridine-3'-phosphate
  modified_base 16: mod_base = OTHER; note = 2'-deoxy-2'-fluorouridine-3'-phosphate
  modified_base 17: mod_base = OTHER; note = 2'-O-methyluridine-3'-phosphate
  modified_base 18: mod_base = OTHER; note = 2'-O-methyluridine-3'-phosphate
  modified_base 19: mod_base = OTHER; note = 2'-O-methyluridine-3'-phosphate
  modified_base 20: mod_base = OTHER; note = 2'-O-methylcytidine-3'-phosphate
  modified_base 21: mod_base = OTHER; note = 2'-O-methylcytidine-3'-phosphorothioate
  modified_base 22: mod_base = OTHER; note = 2'-O-methyladenosine-3'-phosphorothioate
  modified_base 23: mod_base = OTHER; note = 2'-O-methylguanosine
tagatctttcagagtttttccag

SEQ ID NO: 12073 - RNA, 23 nt, synthetic construct
  source 1..23: mol_type = other RNA
  modified_base 1: mod_base = OTHER; note = 2'-O-methyluridine-3'-phosphorothioate 5'-(E)-Vinylphosphonate
  modified_base 2: mod_base = OTHER; note = 2'-deoxy-2'-fluorocytidine-3'-phosphorothioate
  modified_base 3: mod_base = OTHER; note = 2'-O-methyladenosine-3'-phosphate
  modified_base 4: mod_base = OTHER; note = 2'-O-methylguanosine-3'-phosphate
  modified_base 5: mod_base = OTHER; note = 2'-O-methyladenosine-3'-phosphate
  modified_base 6: mod_base = OTHER; note = 2'-deoxy-2'-fluorouridine-3'-phosphate
  modified_base 7: mod_base = OTHER; note = 2'-O-methylcytidine-3'-phosphate
  modified_base 8: mod_base = OTHER; note = 2'-O-methyluridine-3'-phosphate
  modified_base 9: mod_base = OTHER; note = 2'-O-methyluridine-3'-phosphate
  modified_base 10: mod_base = OTHER; note = 2'-O-methyluridine-3'-phosphate
  modified_base 11: mod_base = OTHER; note = 2'-O-methylcytidine-3'-phosphate
  modified_base 12: mod_base = OTHER; note = 2'-O-methyladenosine-3'-phosphate
  modified_base 13: mod_base = OTHER; note = 2'-O-methylguanosine-3'-phosphate
  modified_base 14: mod_base = OTHER; note = 2'-deoxy-2'-fluoroadenosine-3'-phosphate
  modified_base 15: mod_base = OTHER; note = 2'-O-methylguanosine-3'-phosphate
  modified_base 16: mod_base = OTHER; note = 2'-deoxy-2'-fluorouridine-3'-phosphate
  modified_base 17: mod_base = OTHER; note = 2'-O-methyluridine-3'-phosphate
  modified_base 18: mod_base = OTHER; note = 2'-O-methyluridine-3'-phosphate
  modified_base 19: mod_base = OTHER; note = 2'-O-methyluridine-3'-phosphate
  modified_base 20: mod_base = OTHER; note = 2'-O-methyluridine-3'-phosphate
  modified_base 21: mod_base = OTHER; note = 2'-O-methylcytidine-3'-phosphorothioate
  modified_base 22: mod_base = OTHER; note = 2'-O-methylcytidine-3'-phosphorothioate
  modified_base 23: mod_base = OTHER; note = 2'-O-methyladenosine
tcagatctttcagagtttttcca

SEQ ID NO: 12074 - RNA, 23 nt, synthetic construct
  source 1..23: mol_type = other RNA
  modified_base 1: mod_base = OTHER; note = 2'-O-methyluridine-3'-phosphorothioate 5'-(E)-Vinylphosphonate
  modified_base 2: mod_base = OTHER; note = 2'-deoxy-2'-fluorouridine-3'-phosphorothioate
  modified_base 3: mod_base = OTHER; note = 2'-O-methyladenosine-3'-phosphate
  modified_base 4: mod_base = OTHER; note = 2'-O-methyladenosine-3'-phosphate
  modified_base 5: mod_base = OTHER; note = 2'-O-methyladenosine-3'-phosphate
  modified_base 6: mod_base = OTHER; note = 2'-deoxy-2'-fluorouridine-3'-phosphate
  modified_base 7: mod_base = OTHER; note = 2'-O-methylcytidine-3'-phosphate
  modified_base 8: mod_base = OTHER; note = 2'-O-methyladenosine-3'-phosphate
  modified_base 9: mod_base = OTHER; note = 2'-O-methylguanosine-3'-phosphate
  modified_base 10: mod_base = OTHER; note = 2'-O-methyladenosine-3'-phosphate
  modified_base 11: mod_base = OTHER; note = 2'-O-methyluridine-3'-phosphate
  modified_base 12: mod_base = OTHER; note = 2'-O-methylcytidine-3'-phosphate
  modified_base 13: mod_base = OTHER; note = 2'-O-methyluridine-3'-phosphate
  modified_base 14: mod_base = OTHER; note = 2'-deoxy-2'-fluorouridine-3'-phosphate
  modified_base 15: mod_base = OTHER; note = 2'-O-methyluridine-3'-phosphate
  modified_base 16: mod_base = OTHER; note = 2'-deoxy-2'-fluorocytidine-3'-phosphate
  modified_base 17: mod_base = OTHER; note = 2'-O-methyladenosine-3'-phosphate
  modified_base 18: mod_base = OTHER; note = 2'-O-methylguanosine-3'-phosphate
  modified_base 19: mod_base = OTHER; note = 2'-O-methyladenosine-3'-phosphate
  modified_base 20: mod_base = OTHER; note = 2'-O-methylguanosine-3'-phosphate
  modified_base 21: mod_base = OTHER; note = 2'-O-methyluridine-3'-phosphorothioate
  modified_base 22: mod_base = OTHER; note = 2'-O-methyluridine-3'-phosphorothioate
  modified_base 23: mod_base = OTHER; note = 2'-O-methyluridine
ttaaatcagatctttcagagttt

SEQ ID NO: 12075 - RNA, 23 nt, synthetic construct
  source 1..23: mol_type = other RNA
  modified_base 1: mod_base = OTHER; note = 2'-O-methyluridine-3'-phosphorothioate 5'-(E)-Vinylphosphonate
  modified_base 2: mod_base = OTHER; note = 2'-deoxy-2'-fluorouridine-3'-phosphorothioate
  modified_base 3: mod_base = OTHER; note = 2'-O-methylcytidine-3'-phosphate
  modified_base 4: mod_base = OTHER; note = 2'-O-methyladenosine-3'-phosphate
  modified_base 5: mod_base = OTHER; note = 2'-O-methylguanosine-3'-phosphate
  modified_base 6: mod_base = OTHER; note = 2'-deoxy-2'-fluoroadenosine-3'-phosphate
  modified_base 7: mod_base = OTHER; note = 2'-O-methyluridine-3'-phosphate
  modified_base 8: mod_base = OTHER; note = 2'-O-methylcytidine-3'-phosphate
  modified_base 9: mod_base = OTHER; note = 2'-O-methyluridine-3'-phosphate
  modified_base 10: mod_base = OTHER; note = 2'-O-methyluridine-3'-phosphate
  modified_base 11: mod_base = OTHER; note = 2'-O-methyluridine-3'-phosphate
  modified_base 12: mod_base = OTHER; note = 2'-O-methylcytidine-3'-phosphate
  modified_base 13: mod_base = OTHER; note = 2'-O-methyladenosine-3'-phosphate
  modified_base 14: mod_base = OTHER; note = 2'-deoxy-2'-fluoroguanosine-3'-phosphate
  modified_base 15: mod_base = OTHER; note = 2'-O-methyladenosine-3'-phosphate
  modified_base 16: mod_base = OTHER; note = 2'-deoxy-2'-fluoroguanosine-3'-phosphate
  modified_base 17: mod_base = OTHER; note = 2'-O-methyluridine-3'-phosphate
  modified_base 18: mod_base = OTHER; note = 2'-O-methyluridine-3'-phosphate
  modified_base 19: mod_base = OTHER; note = 2'-O-methyluridine-3'-phosphate
  modified_base 20: mod_base = OTHER; note = 2'-O-methyluridine-3'-phosphate
  modified_base 21: mod_base = OTHER; note = 2'-O-methyluridine-3'-phosphorothioate
  modified_base 22: mod_base = OTHER; note = 2'-O-methylcytidine-3'-phosphorothioate
  modified_base 23: mod_base = OTHER; note = 2'-O-methylcytidine
ttcagatctttcagagtttttcc

SEQ ID NO: 12076 - RNA, 23 nt, synthetic construct
  source 1..23: mol_type = other RNA
  modified_base 1: mod_base = OTHER; note = 2'-O-methyluridine-3'-phosphorothioate 5'-(E)-Vinylphosphonate
  modified_base 2: mod_base = OTHER; note = 2'-deoxy-2'-fluoroadenosine-3'-phosphorothioate
  modified_base 3: mod_base = OTHER; note = 2'-O-methyluridine-3'-phosphate
  modified_base 4: mod_base = OTHER; note = 2'-O-methylcytidine-3'-phosphate
  modified_base 5: mod_base = OTHER; note = 2'-O-methyladenosine-3'-phosphate
  modified_base 6: mod_base = OTHER; note = 2'-deoxy-2'-fluoroguanosine-3'-phosphate
  modified_base 7: mod_base = OTHER; note = 2'-O-methyladenosine-3'-phosphate
  modified_base 8: mod_base = OTHER; note = 2'-O-methyluridine-3'-phosphate
  modified_base 9: mod_base = OTHER; note = 2'-O-methylcytidine-3'-phosphate
  modified_base 10: mod_base = OTHER; note = 2'-O-methyluridine-3'-phosphate
  modified_base 11: mod_base = OTHER; note = 2'-O-methyluridine-3'-phosphate
  modified_base 12: mod_base = OTHER; note = 2'-O-methyluridine-3'-phosphate
  modified_base 13: mod_base = OTHER; note = 2'-O-methylcytidine-3'-phosphate
  modified_base 14: mod_base = OTHER; note = 2'-deoxy-2'-fluoroadenosine-3'-phosphate
  modified_base 15: mod_base = OTHER; note = 2'-O-methylguanosine-3'-phosphate
  modified_base 16: mod_base = OTHER; note = 2'-deoxy-2'-fluoroadenosine-3'-phosphate
  modified_base 17: mod_base = OTHER; note = 2'-O-methylguanosine-3'-phosphate
  modified_base 18: mod_base = OTHER; note = 2'-O-methyluridine-3'-phosphate
  modified_base 19: mod_base = OTHER; note = 2'-O-methyluridine-3'-phosphate
  modified_base 20: mod_base = OTHER; note = 2'-O-methyluridine-3'-phosphate
  modified_base 21: mod_base = OTHER; note = 2'-O-methyluridine-3'-phosphorothioate
  modified_base 22: mod_base = OTHER; note = 2'-O-methyluridine-3'-phosphorothioate
  modified_base 23: mod_base = OTHER; note = 2'-O-methylcytidine
tatcagatctttcagagtttttc

SEQ ID NO: 12077 - RNA, 23 nt, synthetic construct
  source 1..23: mol_type = other RNA
  modified_base 1: mod_base = OTHER; note = 2'-O-methyluridine-3'-phosphorothioate 5'-(E)-Vinylphosphonate
  modified_base 2: mod_base = OTHER; note = 2'-deoxy-2'-fluoroadenosine-3'-phosphorothioate
  modified_base 3: mod_base = OTHER; note = 2'-O-methyladenosine-3'-phosphate
  modified_base 4: mod_base = OTHER; note = 2'-O-methyluridine-3'-phosphate
  modified_base 5: mod_base = OTHER; note = 2'-O-methylcytidine-3'-phosphate
  modified_base 6: mod_base = OTHER; note = 2'-deoxy-2'-fluoroadenosine-3'-phosphate
  modified_base 7: mod_base = OTHER; note = 2'-O-methylguanosine-3'-phosphate
  modified_base 8: mod_base = OTHER; note = 2'-O-methyladenosine-3'-phosphate
  modified_base 9: mod_base = OTHER; note = 2'-O-methyluridine-3'-phosphate
  modified_base 10: mod_base = OTHER; note = 2'-O-methylcytidine-3'-phosphate
  modified_base 11: mod_base = OTHER; note = 2'-O-methyluridine-3'-phosphate
  modified_base 12: mod_base = OTHER; note = 2'-O-methyluridine-3'-phosphate
  modified_base 13: mod_base = OTHER; note = 2'-O-methyluridine-3'-phosphate
  modified_base 14: mod_base = OTHER; note = 2'-deoxy-2'-fluorocytidine-3'-phosphate
  modified_base 15: mod_base = OTHER; note = 2'-O-methyladenosine-3'-phosphate
  modified_base 16: mod_base = OTHER; note = 2'-deoxy-2'-fluoroguanosine-3'-phosphate
  modified_base 17: mod_base = OTHER; note = 2'-O-methyladenosine-3'-phosphate
  modified_base 18: mod_base = OTHER; note = 2'-O-methylguanosine-3'-phosphate
  modified_base 19: mod_base = OTHER; note = 2'-O-methyluridine-3'-phosphate
  modified_base 20: mod_base = OTHER; note = 2'-O-methyluridine-3'-phosphate
  modified_base 21: mod_base = OTHER; note = 2'-O-methyluridine-3'-phosphorothioate
  modified_base 22: mod_base = OTHER; note = 2'-O-methyluridine-3'-phosphorothioate
  modified_base 23: mod_base = OTHER; note = 2'-O-methyluridine
taatcagatctttcagagttttt

SEQ ID NO: 12078 - RNA, 23 nt, synthetic construct
  source 1..23: mol_type = other RNA
  modified_base 1: mod_base = OTHER; note = 2'-O-methyluridine-3'-phosphorothioate 5'-(E)-Vinylphosphonate
  modified_base 2: mod_base = OTHER; note = 2'-deoxy-2'-fluoroadenosine-3'-phosphorothioate
  modified_base 3: mod_base = OTHER; note = 2'-O-methyladenosine-3'-phosphate
  modified_base 4: mod_base = OTHER; note = 2'-O-methyladenosine-3'-phosphate
  modified_base 5: mod_base = OTHER; note = 2'-O-methyluridine-3'-phosphate
  modified_base 6: mod_base = OTHER; note = 2'-deoxy-2'-fluorocytidine-3'-phosphate
  modified_base 7: mod_base = OTHER; note = 2'-O-methyladenosine-3'-phosphate
  modified_base 8: mod_base = OTHER; note = 2'-O-methylguanosine-3'-phosphate
  modified_base 9: mod_base = OTHER; note = 2'-O-methyladenosine-3'-phosphate
  modified_base 10: mod_base = OTHER; note = 2'-O-methyluridine-3'-phosphate
  modified_base 11: mod_base = OTHER; note = 2'-O-methylcytidine-3'-phosphate
  modified_base 12: mod_base = OTHER; note = 2'-O-methyluridine-3'-phosphate
  modified_base 13: mod_base = OTHER; note = 2'-O-methyluridine-3'-phosphate
  modified_base 14: mod_base = OTHER; note = 2'-deoxy-2'-fluorouridine-3'-phosphate
  modified_base 15: mod_base = OTHER; note = 2'-O-methylcytidine-3'-phosphate
  modified_base 16: mod_base = OTHER; note = 2'-deoxy-2'-fluoroadenosine-3'-phosphate
  modified_base 17: mod_base = OTHER; note = 2'-O-methylguanosine-3'-phosphate
  modified_base 18: mod_base = OTHER; note = 2'-O-methyladenosine-3'-phosphate
  modified_base 19: mod_base = OTHER; note = 2'-O-methylguanosine-3'-phosphate
  modified_base 20: mod_base = OTHER; note = 2'-O-methyluridine-3'-phosphate
  modified_base 21: mod_base = OTHER; note = 2'-O-methyluridine-3'-phosphorothioate
  modified_base 22: mod_base = OTHER; note = 2'-O-methyluridine-3'-phosphorothioate
  modified_base 23: mod_base = OTHER; note = 2'-O-methyluridine
taaatcagatctttcagagtttt

SEQ ID NO: 12079 - RNA, 23 nt, synthetic construct
  source 1..23: mol_type = other RNA
  modified_base 1: mod_base = OTHER; note = 2'-O-methyluridine-3'-phosphorothioate 5'-(E)-Vinylphosphonate
  modified_base 2: mod_base = OTHER; note = 2'-deoxy-2'-fluoroadenosine-3'-phosphorothioate
  modified_base 3: mod_base = OTHER; note = 2'-O-methyluridine-3'-phosphate
  modified_base 4: mod_base = OTHER; note = 2'-O-methyladenosine-3'-phosphate
  modified_base 5: mod_base = OTHER; note = 2'-O-methyladenosine-3'-phosphate
  modified_base 6: mod_base = OTHER; note = 2'-deoxy-2'-fluoroadenosine-3'-phosphate
  modified_base 7: mod_base = OTHER; note = 2'-O-methyluridine-3'-phosphate
  modified_base 8: mod_base = OTHER; note = 2'-O-methylcytidine-3'-phosphate
  modified_base 9: mod_base = OTHER; note = 2'-O-methyladenosine-3'-phosphate
  modified_base 10: mod_base = OTHER; note = 2'-O-methylguanosine-3'-phosphate
  modified_base 11: mod_base = OTHER; note = 2'-O-methyladenosine-3'-phosphate
  modified_base 12: mod_base = OTHER; note = 2'-O-methyluridine-3'-phosphate
  modified_base 13: mod_base = OTHER; note = 2'-O-methylcytidine-3'-phosphate
  modified_base 14: mod_base = OTHER; note = 2'-deoxy-2'-fluorouridine-3'-phosphate
  modified_base 15: mod_base = OTHER; note = 2'-O-methyluridine-3'-phosphate
  modified_base 16: mod_base = OTHER; note = 2'-deoxy-2'-fluorouridine-3'-phosphate
  modified_base 17: mod_base = OTHER; note = 2'-O-methylcytidine-3'-phosphate
  modified_base 18: mod_base = OTHER; note = 2'-O-methyladenosine-3'-phosphate
  modified_base 19: mod_base = OTHER; note = 2'-O-methylguanosine-3'-phosphate
  modified_base 20: mod_base = OTHER; note = 2'-O-methyladenosine-3'-phosphate
  modified_base 21: mod_base = OTHER; note = 2'-O-methylguanosine-3'-phosphorothioate
  modified_base 22: mod_base = OTHER; note = 2'-O-methyluridine-3'-phosphorothioate
  modified_base 23: mod_base = OTHER; note = 2'-O-methyluridine
tataaatcagatctttcagagtt

SEQ ID NO: 12080 - RNA, 23 nt, synthetic construct
  source 1..23: mol_type = other RNA
  modified_base 1: mod_base = OTHER; note = 2'-O-methyluridine-3'-phosphorothioate 5'-(E)-Vinylphosphonate
  modified_base 2: mod_base = OTHER; note = 2'-deoxy-2'-fluorocytidine-3'-phosphorothioate
  modified_base 3: mod_base = OTHER; note = 2'-O-methyladenosine-3'-phosphate
  modified_base 4: mod_base = OTHER; note = 2'-O-methyluridine-3'-phosphate
  modified_base 5: mod_base = OTHER; note = 2'-O-methyladenosine-3'-phosphate
  modified_base 6: mod_base = OTHER; note = 2'-deoxy-2'-fluoroadenosine-3'-phosphate
  modified_base 7: mod_base = OTHER; note = 2'-O-methyladenosine-3'-phosphate
  modified_base 8: mod_base = OTHER; note = 2'-O-methyluridine-3'-phosphate
  modified_base 9: mod_base = OTHER; note = 2'-O-methylcytidine-3'-phosphate
  modified_base 10: mod_base = OTHER; note = 2'-O-methyladenosine-3'-phosphate
  modified_base 11: mod_base = OTHER; note = 2'-O-methylguanosine-3'-phosphate
  modified_base 12: mod_base = OTHER; note = 2'-O-methyladenosine-3'-phosphate
  modified_base 13: mod_base = OTHER; note = 2'-O-methyluridine-3'-phosphate
  modified_base 14: mod_base = OTHER; note = 2'-deoxy-2'-fluorocytidine-3'-phosphate
  modified_base 15: mod_base = OTHER; note = 2'-O-methyluridine-3'-phosphate
  modified_base 16: mod_base = OTHER; note = 2'-deoxy-2'-fluorouridine-3'-phosphate
  modified_base 17: mod_base = OTHER; note = 2'-O-methyluridine-3'-phosphate
  modified_base 18: mod_base = OTHER; note = 2'-O-methylcytidine-3'-phosphate
  modified_base 19: mod_base = OTHER; note = 2'-O-methyladenosine-3'-phosphate
  modified_base 20: mod_base = OTHER; note = 2'-O-methylguanosine-3'-phosphate
  modified_base 21: mod_base = OTHER; note = 2'-O-methyladenosine-3'-phosphorothioate
  modified_base 22: mod_base = OTHER; note = 2'-O-methylguanosine-3'-phosphorothioate
  modified_base 23: mod_base = OTHER; note = 2'-O-methyluridine
tcataaatcagatctttcagagt

SEQ ID NO: 12081 - RNA, 23 nt, synthetic construct
  source 1..23: mol_type = other RNA
  modified_base 1: mod_base = OTHER; note = 2'-O-methyluridine-3'-phosphorothioate 5'-(E)-Vinylphosphonate
  modified_base 2: mod_base = OTHER; note = 2'-deoxy-2'-fluorouridine-3'-phosphorothioate
  modified_base 3: mod_base = OTHER; note = 2'-O-methylcytidine-3'-phosphate
  modified_base 4: mod_base = OTHER; note = 2'-O-methyladenosine-3'-phosphate
  modified_base 5: mod_base = OTHER; note = 2'-O-methyluridine-3'-phosphate
  modified_base 6: mod_base = OTHER; note = 2'-deoxy-2'-fluoroadenosine-3'-phosphate
  modified_base 7: mod_base = OTHER; note = 2'-O-methyladenosine-3'-phosphate
  modified_base 8: mod_base = OTHER; note = 2'-O-methyladenosine-3'-phosphate
  modified_base 9: mod_base = OTHER; note = 2'-O-methyluridine-3'-phosphate
  modified_base 10: mod_base = OTHER; note = 2'-O-methylcytidine-3'-phosphate
  modified_base 11: mod_base = OTHER; note = 2'-O-methyladenosine-3'-phosphate
  modified_base 12: mod_base = OTHER; note = 2'-O-methylguanosine-3'-phosphate
  modified_base 13: mod_base = OTHER; note = 2'-O-methyladenosine-3'-phosphate
  modified_base 14: mod_base = OTHER; note = 2'-deoxy-2'-fluorouridine-3'-phosphate
  modified_base 15: mod_base = OTHER; note = 2'-O-methylcytidine-3'-phosphate
  modified_base 16: mod_base = OTHER; note = 2'-deoxy-2'-fluorouridine-3'-phosphate
  modified_base 17: mod_base = OTHER; note = 2'-O-methyluridine-3'-phosphate
  modified_base 18: mod_base = OTHER; note = 2'-O-methyluridine-3'-phosphate
  modified_base 19: mod_base = OTHER; note = 2'-O-methylcytidine-3'-phosphate
  modified_base 20: mod_base = OTHER; note = 2'-O-methyladenosine-3'-phosphate
  modified_base 21: mod_base = OTHER; note = 2'-O-methylguanosine-3'-phosphorothioate
  modified_base 22: mod_base = OTHER; note = 2'-O-methyladenosine-3'-phosphorothioate
  modified_base 23: mod_base = OTHER; note = 2'-O-methylguanosine
ttcataaatcagatctttcagag

SEQ ID NO: 12082 - RNA, 23 nt, synthetic construct
  source 1..23: mol_type = other RNA
  modified_base 1: mod_base = OTHER; note = 2'-O-methyluridine-3'-phosphorothioate 5'-(E)-Vinylphosphonate
  modified_base 2: mod_base = OTHER; note = 2'-deoxy-2'-fluoroadenosine-3'-phosphorothioate
  modified_base 3: mod_base = OTHER; note = 2'-O-methyluridine-3'-phosphate
  modified_base 4: mod_base = OTHER; note = 2'-O-methylcytidine-3'-phosphate
  modified_base 5: mod_base = OTHER; note = 2'-O-methyladenosine-3'-phosphate
  modified_base 6: mod_base = OTHER; note = 2'-deoxy-2'-fluorouridine-3'-phosphate
  modified_base 7: mod_base = OTHER; note = 2'-O-methyladenosine-3'-phosphate
  modified_base 8: mod_base = OTHER; note = 2'-O-methyladenosine-3'-phosphate
  modified_base 9: mod_base = OTHER; note = 2'-O-methyladenosine-3'-phosphate
  modified_base 10: mod_base = OTHER; note = 2'-O-methyluridine-3'-phosphate
  modified_base 11: mod_base = OTHER; note = 2'-O-methylcytidine-3'-phosphate
  modified_base 12: mod_base = OTHER; note = 2'-O-methyladenosine-3'-phosphate
  modified_base 13: mod_base = OTHER; note = 2'-O-methylguanosine-3'-phosphate
  modified_base 14: mod_base = OTHER; note = 2'-deoxy-2'-fluoroadenosine-3'-phosphate
  modified_base 15: mod_base = OTHER; note = 2'-O-methyluridine-3'-phosphate
  modified_base 16: mod_base = OTHER; note = 2'-deoxy-2'-fluorocytidine-3'-phosphate
  modified_base 17: mod_base = OTHER; note = 2'-O-methyluridine-3'-phosphate
  modified_base 18: mod_base = OTHER; note = 2'-O-methyluridine-3'-phosphate
  modified_base 19: mod_base = OTHER; note = 2'-O-methyluridine-3'-phosphate
  modified_base 20: mod_base = OTHER; note = 2'-O-methylcytidine-3'-phosphate
  modified_base 21: mod_base = OTHER; note = 2'-O-methyladenosine-3'-phosphorothioate
  modified_base 22: mod_base = OTHER; note = 2'-O-methylguanosine-3'-phosphorothioate
  modified_base 23: mod_base = OTHER; note = 2'-O-methyladenosine
tatcataaatcagatctttcaga

SEQ ID NO: 12083 - RNA, 23 nt, synthetic construct
  source 1..23: mol_type = other RNA
  modified_base 1: mod_base = OTHER; note = 2'-O-methyluridine-3'-phosphorothioate 5'-(E)-Vinylphosphonate
  modified_base 2: mod_base = OTHER; note = 2'-deoxy-2'-fluorocytidine-3'-phosphorothioate
  modified_base 3: mod_base = OTHER; note = 2'-O-methyladenosine-3'-phosphate
  modified_base 4: mod_base = OTHER; note = 2'-O-methyluridine-3'-phosphate
  modified_base 5: mod_base = OTHER; note = 2'-O-methylcytidine-3'-phosphate
  modified_base 6: mod_base = OTHER; note = 2'-deoxy-2'-fluoroadenosine-3'-phosphate
  modified_base 7: mod_base = OTHER; note = 2'-O-methyluridine-3'-phosphate
  modified_base 8: mod_base = OTHER; note = 2'-O-methyladenosine-3'-phosphate
  modified_base 9: mod_base = OTHER; note = 2'-O-methyladenosine-3'-phosphate
  modified_base 10: mod_base = OTHER; note = 2'-O-methyladenosine-3'-phosphate
  modified_base 11: mod_base = OTHER; note = 2'-O-methyluridine-3'-phosphate
  modified_base 12: mod_base = OTHER; note = 2'-O-methylcytidine-3'-phosphate
  modified_base 13: mod_base = OTHER; note = 2'-O-methyladenosine-3'-phosphate
  modified_base 14: mod_base = OTHER; note = 2'-deoxy-2'-fluoroguanosine-3'-phosphate
  modified_base 15: mod_base = OTHER; note = 2'-O-methyladenosine-3'-phosphate
  modified_base 16: mod_base = OTHER; note = 2'-deoxy-2'-fluorouridine-3'-phosphate
  modified_base 17: mod_base = OTHER; note = 2'-O-methylcytidine-3'-phosphate
  modified_base 18: mod_base = OTHER; note = 2'-O-methyluridine-3'-phosphate
  modified_base 19: mod_base = OTHER; note = 2'-O-methyluridine-3'-phosphate
  modified_base 20: mod_base = OTHER; note = 2'-O-methyluridine-3'-phosphate
  modified_base 21: mod_base = OTHER; note = 2'-O-methylcytidine-3'-phosphorothioate
  modified_base 22: mod_base = OTHER; note = 2'-O-methyladenosine-3'-phosphorothioate
  modified_base 23: mod_base = OTHER; note = 2'-O-methylguanosine
tcatcataaatcagatctttcag

SEQ ID NO: 12084 - RNA, 23 nt, synthetic construct
  source 1..23: mol_type = other RNA
  modified_base 1: mod_base = OTHER; note = 2'-O-methyluridine-3'-phosphorothioate 5'-(E)-Vinylphosphonate
  modified_base 2: mod_base = OTHER; note = 2'-deoxy-2'-fluoroadenosine-3'-phosphorothioate
  modified_base 3: mod_base = OTHER; note = 2'-O-methylcytidine-3'-phosphate
  modified_base 4: mod_base = OTHER; note = 2'-O-methyladenosine-3'-phosphate
  modified_base 5: mod_base = OTHER; note = 2'-O-methyluridine-3'-phosphate
  modified_base 6: mod_base = OTHER; note = 2'-deoxy-2'-fluorocytidine-3'-phosphate
  modified_base 7: mod_base = OTHER; note = 2'-O-methyladenosine-3'-phosphate
  modified_base 8: mod_base = OTHER; note = 2'-O-methyluridine-3'-phosphate
  modified_base 9: mod_base = OTHER; note = 2'-O-methyladenosine-3'-phosphate
  modified_base 10: mod_base = OTHER; note = 2'-O-methyladenosine-3'-phosphate
  modified_base 11: mod_base = OTHER; note = 2'-O-methyladenosine-3'-phosphate
  modified_base 12: mod_base = OTHER; note = 2'-O-methyluridine-3'-phosphate
  modified_base 13: mod_base = OTHER; note = 2'-O-methylcytidine-3'-phosphate
  modified_base 14: mod_base = OTHER; note = 2'-deoxy-2'-fluoroadenosine-3'-phosphate
  modified_base 15: mod_base = OTHER; note = 2'-O-methylguanosine-3'-phosphate
  modified_base 16: mod_base = OTHER; note = 2'-deoxy-2'-fluoroadenosine-3'-phosphate
  modified_base 17: mod_base = OTHER; note = 2'-O-methyluridine-3'-phosphate
  modified_base 18: mod_base = OTHER; note = 2'-O-methylcytidine-3'-phosphate
  modified_base 19: mod_base = OTHER; note = 2'-O-methyluridine-3'-phosphate
  modified_base 20: mod_base = OTHER; note = 2'-O-methyluridine-3'-phosphate
  modified_base 21: mod_base = OTHER; note = 2'-O-methyluridine-3'-phosphorothioate
  modified_base 22: mod_base = OTHER; note = 2'-O-methylcytidine-3'-phosphorothioate
  modified_base 23: mod_base = OTHER; note = 2'-O-methyladenosine
tacatcataaatcagatctttca

SEQ ID NO: 12085 - RNA, 23 nt, synthetic construct
  source 1..23: mol_type = other RNA
  modified_base 1: mod_base = OTHER; note = 2'-O-methyluridine-3'-phosphorothioate 5'-(E)-Vinylphosphonate
  modified_base 2: mod_base = OTHER; note = 2'-deoxy-2'-fluorocytidine-3'-phosphorothioate
  modified_base 3: mod_base = OTHER; note = 2'-O-methyladenosine-3'-phosphate
  modified_base 4: mod_base = OTHER; note = 2'-O-methylcytidine-3'-phosphate
  modified_base 5: mod_base = OTHER; note = 2'-O-methyladenosine-3'-phosphate
  modified_base 6: mod_base = OTHER; note = 2'-deoxy-2'-fluorouridine-3'-phosphate
  modified_base 7: mod_base = OTHER; note = 2'-O-methylcytidine-3'-phosphate
  modified_base 8: mod_base = OTHER; note = 2'-O-methyladenosine-3'-phosphate
  modified_base 9: mod_base = OTHER; note = 2'-O-methyluridine-3'-phosphate
  modified_base 10: mod_base = OTHER; note = 2'-O-methyladenosine-3'-phosphate
  modified_base 11: mod_base = OTHER; note = 2'-O-methyladenosine-3'-phosphate
  modified_base 12: mod_base = OTHER; note = 2'-O-methyladenosine-3'-phosphate
  modified_base 13: mod_base = OTHER; note = 2'-O-methyluridine-3'-phosphate
  modified_base 14: mod_base = OTHER; note = 2'-deoxy-2'-fluorocytidine-3'-phosphate
  modified_base 15: mod_base = OTHER; note = 2'-O-methyladenosine-3'-phosphate
  modified_base 16: mod_base = OTHER; note = 2'-deoxy-2'-fluoroguanosine-3'-phosphate
  modified_base 17: mod_base = OTHER; note = 2'-O-methyladenosine-3'-phosphate
  modified_base 18: mod_base = OTHER; note = 2'-O-methyluridine-3'-phosphate
  modified_base 19: mod_base = OTHER; note = 2'-O-methylcytidine-3'-phosphate
  modified_base 20: mod_base = OTHER; note = 2'-O-methyluridine-3'-phosphate
  modified_base 21: mod_base = OTHER; note = 2'-O-methyluridine-3'-phosphorothioate
  modified_base 22: mod_base = OTHER; note = 2'-O-methyluridine-3'-phosphorothioate
  modified_base 23: mod_base = OTHER; note = 2'-O-methylcytidine
tcacatcataaatcagatctttc

SEQ ID NO: 12086 - RNA, 23 nt, synthetic construct
  source 1..23: mol_type = other RNA
  modified_base 1: mod_base = OTHER; note = 2'-O-methyluridine-3'-phosphorothioate 5'-(E)-Vinylphosphonate
  modified_base 2: mod_base = OTHER; note = 2'-deoxy-2'-fluorouridine-3'-phosphorothioate
  modified_base 3: mod_base = OTHER; note = 2'-O-methylcytidine-3'-phosphate
  modified_base 4: mod_base = OTHER; note = 2'-O-methyladenosine-3'-phosphate
  modified_base 5: mod_base = OTHER; note = 2'-O-methylcytidine-3'-phosphate
  modified_base 6: mod_base = OTHER; note = 2'-deoxy-2'-fluoroadenosine-3'-phosphate
  modified_base 7: mod_base = OTHER; note = 2'-O-methyluridine-3'-phosphate
  modified_base 8: mod_base = OTHER; note = 2'-O-methylcytidine-3'-phosphate
  modified_base 9: mod_base = OTHER; note = 2'-O-methyladenosine-3'-phosphate
  modified_base 10: mod_base = OTHER; note = 2'-O-methyluridine-3'-phosphate
  modified_base 11: mod_base = OTHER; note = 2'-O-methyladenosine-3'-phosphate
  modified_base 12: mod_base = OTHER; note = 2'-O-methyladenosine-3'-phosphate
  modified_base 13: mod_base = OTHER; note = 2'-O-methyladenosine-3'-phosphate
  modified_base 14: mod_base = OTHER; note = 2'-deoxy-2'-fluorouridine-3'-phosphate
  modified_base 15: mod_base = OTHER; note = 2'-O-methylcytidine-3'-phosphate
  modified_base 16: mod_base = OTHER; note = 2'-deoxy-2'-fluoroadenosine-3'-phosphate
  modified_base 17: mod_base = OTHER; note = 2'-O-methylguanosine-3'-phosphate
  modified_base 18: mod_base = OTHER; note = 2'-O-methyladenosine-3'-phosphate
  modified_base 19: mod_base = OTHER; note = 2'-O-methyluridine-3'-phosphate
  modified_base 20: mod_base = OTHER; note = 2'-O-methylcytidine-3'-phosphate
  modified_base 21: mod_base = OTHER; note = 2'-O-methyluridine-3'-phosphorothioate
  modified_base 22: mod_base = OTHER; note = 2'-O-methyluridine-3'-phosphorothioate
  modified_base 23: mod_base = OTHER; note = 2'-O-methyluridine
ttcacatcataaatcagatcttt

SEQ ID NO: 12087 - RNA, 23 nt, synthetic construct
  source 1..23: mol_type = other RNA
  modified_base 1: mod_base = OTHER; note = 2'-O-methyluridine-3'-phosphorothioate 5'-(E)-Vinylphosphonate
  modified_base 2: mod_base = OTHER; note = 2'-deoxy-2'-fluoroguanosine-3'-phosphorothioate
  modified_base 3: mod_base = OTHER; note = 2'-O-methyluridine-3'-phosphate
  modified_base 4: mod_base = OTHER; note = 2'-O-methylcytidine-3'-phosphate
  modified_base 5: mod_base = OTHER; note = 2'-O-methyladenosine-3'-phosphate
  modified_base 6: mod_base = OTHER; note = 2'-deoxy-2'-fluorocytidine-3'-phosphate
  modified_base 7: mod_base = OTHER; note = 2'-O-methyladenosine-3'-phosphate
  modified_base 8: mod_base = OTHER; note = 2'-O-methyluridine-3'-phosphate
  modified_base 9: mod_base = OTHER; note = 2'-O-methylcytidine-3'-phosphate
  modified_base 10: mod_base = OTHER; note = 2'-O-methyladenosine-3'-phosphate
  modified_base 11: mod_base = OTHER; note = 2'-O-methyluridine-3'-phosphate
  modified_base 12: mod_base = OTHER; note = 2'-O-methyladenosine-3'-phosphate
  modified_base 13: mod_base = OTHER; note = 2'-O-methyladenosine-3'-phosphate
  modified_base 14: mod_base = OTHER; note = 2'-deoxy-2'-fluoroadenosine-3'-phosphate
  modified_base 15: mod_base = OTHER; note = 2'-O-methyluridine-3'-phosphate
  modified_base 16: mod_base = OTHER; note = 2'-deoxy-2'-fluorocytidine-3'-phosphate
  modified_base 17: mod_base = OTHER; note = 2'-O-methyladenosine-3'-phosphate
  modified_base 18: mod_base = OTHER; note = 2'-O-methylguanosine-3'-phosphate
  modified_base 19: mod_base = OTHER; note = 2'-O-methyladenosine-3'-phosphate
  modified_base 20: mod_base = OTHER; note = 2'-O-methyluridine-3'-phosphate
  modified_base 21: mod_base = OTHER; note = 2'-O-methylcytidine-3'-phosphorothioate
  modified_base 22: mod_base = OTHER; note = 2'-O-methyluridine-3'-phosphorothioate
  modified_base 23: mod_base = OTHER; note = 2'-O-methyluridine
tgtcacatcataaatcagatctt

SEQ ID NO: 12088 - RNA, 23 nt, synthetic construct
  source 1..23: mol_type = other RNA
  modified_base 1: mod_base = OTHER; note = 2'-O-methyluridine-3'-phosphorothioate 5'-(E)-Vinylphosphonate
  modified_base 2: mod_base = OTHER; note = 2'-deoxy-2'-fluoroadenosine-3'-phosphorothioate
  modified_base 3: mod_base = OTHER; note = 2'-O-methyladenosine-3'-phosphate
  modified_base 4: mod_base = OTHER; note = 2'-O-methyluridine-3'-phosphate
  modified_base 5: mod_base = OTHER; note = 2'-O-methyluridine-3'-phosphate
  modified_base 6: mod_base = OTHER; note = 2'-deoxy-2'-fluoroguanosine-3'-phosphate
  modified_base 7: mod_base = OTHER; note = 2'-O-methyluridine-3'-phosphate
  modified_base 8: mod_base = OTHER; note = 2'-O-methylcytidine-3'-phosphate
  modified_base 9: mod_base = OTHER; note = 2'-O-methylcytidine-3'-phosphate
  modified_base 10: mod_base = OTHER; note = 2'-O-methyluridine-3'-phosphate
  modified_base 11: mod_base = OTHER; note = 2'-O-methyluridine-3'-phosphate
  modified_base 12: mod_base = OTHER; note = 2'-O-methyluridine-3'-phosphate
  modified_base 13: mod_base = OTHER; note = 2'-O-methylguanosine-3'-phosphate
  modified_base 14: mod_base = OTHER; note = 2'-deoxy-2'-fluoroadenosine-3'-phosphate
  modified_base 15: mod_base = OTHER; note = 2'-O-methyladenosine-3'-phosphate
  modified_base 16: mod_base = OTHER; note = 2'-deoxy-2'-fluorocytidine-3'-phosphate
  modified_base 17: mod_base = OTHER; note = 2'-O-methylcytidine-3'-phosphate
  modified_base 18: mod_base = OTHER; note = 2'-O-methyladenosine-3'-phosphate
  modified_base 19: mod_base = OTHER; note = 2'-O-methyladenosine-3'-phosphate
  modified_base 20: mod_base = OTHER; note = 2'-O-methylcytidine-3'-phosphate
  modified_base 21: mod_base = OTHER; note = 2'-O-methyladenosine-3'-phosphorothioate
  modified_base 22: mod_base = OTHER; note = 2'-O-methylguanosine-3'-phosphorothioate
  modified_base 23: mod_base = OTHER; note = 2'-O-methyladenosine
taattgtcctttgaaccaacaga

SEQ ID NO: 12089 - RNA, 23 nt, synthetic construct
  source 1..23: mol_type = other RNA
  modified_base 1: mod_base = OTHER; note = 2'-O-methyluridine-3'-phosphorothioate 5'-(E)-Vinylphosphonate
  modified_base 2: mod_base = OTHER; note = 2'-deoxy-2'-fluorouridine-3'-phosphorothioate
  modified_base 3: mod_base = OTHER; note = 2'-O-methyluridine-3'-phosphate
  modified_base 4: mod_base = OTHER; note = 2'-O-methylguanosine-3'-phosphate
  modified_base 5: mod_base = OTHER; note = 2'-O-methyladenosine-3'-phosphate
  modified_base 6: mod_base = OTHER; note = 2'-deoxy-2'-fluoroadenosine-3'-phosphate
  modified_base 7: mod_base = OTHER; note = 2'-O-methylcytidine-3'-phosphate
  modified_base 8: mod_base = OTHER; note = 2'-O-methylcytidine-3'-phosphate
  modified_base 9: mod_base = OTHER; note = 2'-O-methyladenosine-3'-phosphate
  modified_base 10: mod_base = OTHER; note = 2'-O-methyladenosine-3'-phosphate
  modified_base 11: mod_base = OTHER; note = 2'-O-methylcytidine-3'-phosphate
  modified_base 12: mod_base = OTHER; note = 2'-O-methyladenosine-3'-phosphate
  modified_base 13: mod_base = OTHER; note = 2'-O-methylguanosine-3'-phosphate
  modified_base 14: mod_base = OTHER; note = 2'-deoxy-2'-fluoroadenosine-3'-phosphate
  modified_base 15: mod_base = OTHER; note = 2'-O-methylguanosine-3'-phosphate
  modified_base 16: mod_base = OTHER; note = 2'-deoxy-2'-fluoroguanosine-3'-phosphate
  modified_base 17: mod_base = OTHER; note = 2'-O-methyluridine-3'-phosphate
  modified_base 18: mod_base = OTHER; note = 2'-O-methyladenosine-3'-phosphate
  modified_base 19: mod_base = OTHER; note = 2'-O-methylguanosine-3'-phosphate
  modified_base 20: mod_base = OTHER; note = 2'-O-methyladenosine-3'-phosphate
  modified_base 21: mod_base = OTHER; note = 2'-O-methylcytidine-3'-phosphorothioate
  modified_base 22: mod_base = OTHER; note = 2'-O-methylcytidine-3'-phosphorothioate
  modified_base 23: mod_base = OTHER; note = 2'-O-methyladenosine
tttgaaccaacagaggtagacca

SEQ ID NO: 12090 - RNA, 23 nt, synthetic construct
  source 1..23: mol_type = other RNA
  modified_base 1: mod_base = OTHER; note = 2'-O-methyluridine-3'-phosphorothioate 5'-(E)-Vinylphosphonate
  modified_base 2: mod_base = OTHER; note = 2'-deoxy-2'-fluorouridine-3'-phosphorothioate
  modified_base 3: mod_base = OTHER; note = 2'-O-methyluridine-3'-phosphate
  modified_base 4: mod_base = OTHER; note = 2'-O-methyluridine-3'-phosphate
  modified_base 5: mod_base = OTHER; note = 2'-O-methylguanosine-3'-phosphate
  modified_base 6: mod_base = OTHER; note = 2'-deoxy-2'-fluoroadenosine-3'-phosphate
  modified_base 7: mod_base = OTHER; note = 2'-O-methyladenosine-3'-phosphate
  modified_base 8: mod_base = OTHER; note = 2'-O-methylcytidine-3'-phosphate
  modified_base 9: mod_base = OTHER; note = 2'-O-methylcytidine-3'-phosphate
  modified_base 10: mod_base = OTHER; note = 2'-O-methyladenosine-3'-phosphate
  modified_base 11: mod_base = OTHER; note = 2'-O-methyladenosine-3'-phosphate
  modified_base 12: mod_base = OTHER; note = 2'-O-methylcytidine-3'-phosphate
  modified_base 13: mod_base = OTHER; note = 2'-O-methyladenosine-3'-phosphate
  modified_base 14: mod_base = OTHER; note = 2'-deoxy-2'-fluoroguanosine-3'-phosphate
  modified_base 15: mod_base = OTHER; note = 2'-O-methyladenosine-3'-phosphate
  modified_base 16: mod_base = OTHER; note = 2'-deoxy-2'-fluoroguanosine-3'-phosphate
  modified_base 17: mod_base = OTHER; note = 2'-O-methylguanosine-3'-phosphate
  modified_base 18: mod_base = OTHER; note = 2'-O-methyluridine-3'-phosphate
  modified_base 19: mod_base = OTHER; note = 2'-O-methyladenosine-3'-phosphate
  modified_base 20: mod_base = OTHER; note = 2'-O-methylguanosine-3'-phosphate
  modified_base 21: mod_base = OTHER; note = 2'-O-methyladenosine-3'-phosphorothioate
  modified_base 22: mod_base = OTHER; note = 2'-O-methylcytidine-3'-phosphorothioate
  modified_base 23: mod_base = OTHER; note = 2'-O-methylcytidine
ttttgaaccaacagaggtagacc

SEQ ID NO: 12091 - RNA, 23 nt, synthetic construct
  source 1..23: mol_type = other RNA
  modified_base 1: mod_base = OTHER; note = 2'-O-methyluridine-3'-phosphorothioate 5'-(E)-Vinylphosphonate
  modified_base 2: mod_base = OTHER; note = 2'-deoxy-2'-fluorouridine-3'-phosphorothioate
  modified_base 3: mod_base = OTHER; note = 2'-O-methylcytidine-3'-phosphate
  modified_base 4: mod_base = OTHER; note = 2'-O-methylcytidine-3'-phosphate
  modified_base 5: mod_base = OTHER; note = 2'-O-methyluridine-3'-phosphate
  modified_base 6: mod_base = OTHER; note = 2'-deoxy-2'-fluorouridine-3'-phosphate
  modified_base 7: mod_base = OTHER; note = 2'-O-methyluridine-3'-phosphate
  modified_base 8: mod_base = OTHER; note = 2'-O-methylguanosine-3'-phosphate
  modified_base 9: mod_base = OTHER; note = 2'-O-methyladenosine-3'-phosphate
  modified_base 10: mod_base = OTHER; note = 2'-O-methyladenosine-3'-phosphate
  modified_base 11: mod_base = OTHER; note = 2'-O-methylcytidine-3'-phosphate
  modified_base 12: mod_base = OTHER; note = 2'-O-methylcytidine-3'-phosphate
  modified_base 13: mod_base = OTHER; note = 2'-O-methyladenosine-3'-phosphate
  modified_base 14: mod_base = OTHER; note = 2'-deoxy-2'-fluoroadenosine-3'-phosphate
  modified_base 15: mod_base = OTHER; note = 2'-O-methylcytidine-3'-phosphate
  modified_base 16: mod_base = OTHER; note = 2'-deoxy-2'-fluoroadenosine-3'-phosphate
  modified_base 17: mod_base = OTHER; note = 2'-O-methylguanosine-3'-phosphate
  modified_base 18: mod_base = OTHER; note = 2'-O-methyladenosine-3'-phosphate
  modified_base 19: mod_base = OTHER; note = 2'-O-methylguanosine-3'-phosphate
  modified_base 20: mod_base = OTHER; note = 2'-O-methylguanosine-3'-phosphate
  modified_base 21: mod_base = OTHER; note = 2'-O-methyluridine-3'-phosphorothioate
  modified_base 22: mod_base = OTHER; note = 2'-O-methyladenosine-3'-phosphorothioate
  modified_base 23: mod_base = OTHER; note = 2'-O-methylguanosine
ttcctttgaaccaacagaggtag

SEQ ID NO: 12092 - RNA, 23 nt, synthetic construct
  source 1..23: mol_type = other RNA
  modified_base 1: mod_base = OTHER; note = 2'-O-methyluridine-3'-phosphorothioate 5'-(E)-Vinylphosphonate
  modified_base 2: mod_base = OTHER; note = 2'-deoxy-2'-fluoroguanosine-3'-phosphorothioate
  modified_base 3: mod_base = OTHER; note = 2'-O-methyluridine-3'-phosphate
  modified_base 4: mod_base = OTHER; note = 2'-O-methylcytidine-3'-phosphate
  modified_base 5: mod_base = OTHER; note = 2'-O-methylcytidine-3'-phosphate
  modified_base 6: mod_base = OTHER; note = 2'-deoxy-2'-fluorouridine-3'-phosphate
  modified_base 7: mod_base = OTHER; note = 2'-O-methyluridine-3'-phosphate
  modified_base 8: mod_base = OTHER; note = 2'-O-methyluridine-3'-phosphate
  modified_base 9: mod_base = OTHER; note = 2'-O-methylguanosine-3'-phosphate
  modified_base 10: mod_base = OTHER; note = 2'-O-methyladenosine-3'-phosphate
  modified_base 11: mod_base = OTHER; note = 2'-O-methyladenosine-3'-phosphate
  modified_base 12: mod_base = OTHER; note = 2'-O-methylcytidine-3'-phosphate
  modified_base 13: mod_base = OTHER; note = 2'-O-methylcytidine-3'-phosphate
  modified_base 14: mod_base = OTHER; note = 2'-deoxy-2'-fluoroadenosine-3'-phosphate
  modified_base 15: mod_base = OTHER; note = 2'-O-methyladenosine-3'-phosphate
  modified_base 16: mod_base = OTHER; note = 2'-deoxy-2'-fluorocytidine-3'-phosphate
  modified_base 17: mod_base = OTHER; note = 2'-O-methyladenosine-3'-phosphate
  modified_base 18: mod_base = OTHER; note = 2'-O-methylguanosine-3'-phosphate
  modified_base 19: mod_base = OTHER; note = 2'-O-methyladenosine-3'-phosphate
  modified_base 20: mod_base = OTHER; note = 2'-O-methylguanosine-3'-phosphate
  modified_base 21: mod_base = OTHER; note = 2'-O-methylguanosine-3'-phosphorothioate
  modified_base 22: mod_base = OTHER; note = 2'-O-methyluridine-3'-phosphorothioate
  modified_base 23: mod_base = OTHER; note = 2'-O-methyladenosine
tgtcctttgaaccaacagaggta

SEQ ID NO: 12093 - RNA, 23 nt, synthetic construct
  source 1..23: mol_type = other RNA
  modified_base 1: mod_base = OTHER; note = 2'-O-methyluridine-3'-phosphorothioate 5'-(E)-Vinylphosphonate
  modified_base 2: mod_base = OTHER; note = 2'-deoxy-2'-fluoroadenosine-3'-phosphorothioate
  modified_base 3: mod_base = OTHER; note = 2'-O-methyluridine-3'-phosphate
  modified_base 4: mod_base = OTHER; note = 2'-O-methyluridine-3'-phosphate
  modified_base 5: mod_base = OTHER; note = 2'-O-methylguanosine-3'-phosphate
  modified_base 6: mod_base = OTHER; note = 2'-deoxy-2'-fluorouridine-3'-phosphate
  modified_base 7: mod_base = OTHER; note = 2'-O-methylcytidine-3'-phosphate
  modified_base 8: mod_base = OTHER; note = 2'-O-methylcytidine-3'-phosphate
  modified_base 9: mod_base = OTHER; note = 2'-O-methyluridine-3'-phosphate
  modified_base 10: mod_base = OTHER; note = 2'-O-methyluridine-3'-phosphate
  modified_base 11: mod_base = OTHER; note = 2'-O-methyluridine-3'-phosphate
  modified_base 12: mod_base = OTHER; note = 2'-O-methylguanosine-3'-phosphate
  modified_base 13: mod_base = OTHER; note = 2'-O-methyladenosine-3'-phosphate
  modified_base 14: mod_base = OTHER; note = 2'-deoxy-2'-fluoroadenosine-3'-phosphate
  modified_base 15: mod_base = OTHER; note = 2'-O-methylcytidine-3'-phosphate
  modified_base 16: mod_base = OTHER; note = 2'-deoxy-2'-fluorocytidine-3'-phosphate
  modified_base 17: mod_base = OTHER; note = 2'-O-methyladenosine-3'-phosphate
  modified_base 18: mod_base = OTHER; note = 2'-O-methyladenosine-3'-phosphate
  modified_base 19: mod_base = OTHER; note = 2'-O-methylcytidine-3'-phosphate
  modified_base 20: mod_base = OTHER; note = 2'-O-methyladenosine-3'-phosphate
  modified_base 21: mod_base = OTHER; note = 2'-O-methylguanosine-3'-phosphorothioate
  modified_base 22: mod_base = OTHER; note = 2'-O-methyladenosine-3'-phosphorothioate
  modified_base 23: mod_base = OTHER; note = 2'-O-methylguanosine
tattgtcctttgaaccaacagag

SEQ ID NO: 12094 - RNA, 23 nt, synthetic construct
  source 1..23: mol_type = other RNA
  modified_base 1: mod_base = OTHER; note = 2'-O-methyluridine-3'-phosphorothioate 5'-(E)-Vinylphosphonate
  modified_base 2: mod_base = OTHER; note = 2'-deoxy-2'-fluorouridine-3'-phosphorothioate
  modified_base 3: mod_base = OTHER; note = 2'-O-methyluridine-3'-phosphate
  modified_base 4: mod_base = OTHER; note = 2'-O-methylguanosine-3'-phosphate
  modified_base 5: mod_base = OTHER; note = 2'-O-methylcytidine-3'-phosphate
  modified_base 6: mod_base = OTHER; note = 2'-deoxy-2'-fluoroadenosine-3'-phosphate
  modified_base 7: mod_base = OTHER; note = 2'-O-methyladenosine-3'-phosphate
  modified_base 8: mod_base = OTHER; note = 2'-O-methyluridine-3'-phosphate
  modified_base 9: mod_base = OTHER; note = 2'-O-methyluridine-3'-phosphate
  modified_base 10: mod_base = OTHER; note = 2'-O-methylguanosine-3'-phosphate
  modified_base 11: mod_base = OTHER; note = 2'-O-methyluridine-3'-phosphate
  modified_base 12: mod_base = OTHER; note = 2'-O-methylcytidine-3'-phosphate
  modified_base 13: mod_base = OTHER; note = 2'-O-methylcytidine-3'-phosphate
  modified_base 14: mod_base = OTHER; note = 2'-deoxy-2'-fluorouridine-3'-phosphate
  modified_base 15: mod_base = OTHER; note = 2'-O-methyluridine-3'-phosphate
  modified_base 16: mod_base = OTHER; note = 2'-deoxy-2'-fluorouridine-3'-phosphate
  modified_base 17: mod_base = OTHER; note = 2'-O-methylguanosine-3'-phosphate
  modified_base 18: mod_base = OTHER; note = 2'-O-methyladenosine-3'-phosphate
  modified_base 19: mod_base = OTHER; note = 2'-O-methyladenosine-3'-phosphate
  modified_base 20: mod_base = OTHER; note = 2'-O-methylcytidine-3'-phosphate
  modified_base 21: mod_base = OTHER; note = 2'-O-methylcytidine-3'-phosphorothioate
  modified_base 22: mod_base = OTHER; note = 2'-O-methyladenosine-3'-phosphorothioate
  modified_base 23: mod_base = OTHER; note = 2'-O-methyladenosine
tttgcaattgtcctttgaaccaa

SEQ ID NO: 12095 - RNA, 23 nt, synthetic construct
  source 1..23: mol_type = other RNA
  modified_base 1: mod_base = OTHER; note = 2'-O-methyluridine-3'-phosphorothioate 5'-(E)-Vinylphosphonate
  modified_base 2: mod_base = OTHER; note = 2'-deoxy-2'-fluorouridine-3'-phosphorothioate
  modified_base 3: mod_base = OTHER; note = 2'-O-methylcytidine-3'-phosphate
  modified_base 4: mod_base = OTHER; note = 2'-O-methylcytidine-3'-phosphate
  modified_base 5: mod_base = OTHER; note = 2'-O-methyluridine-3'-phosphate
  modified_base 6: mod_base = OTHER; note = 2'-deoxy-2'-fluorouridine-3'-phosphate
  modified_base 7: mod_base = OTHER; note = 2'-O-methylguanosine-3'-phosphate
  modified_base 8: mod_base = OTHER; note = 2'-O-methylcytidine-3'-phosphate
  modified_base 9: mod_base = OTHER; note = 2'-O-methyladenosine-3'-phosphate
  modified_base 10: mod_base = OTHER; note = 2'-O-methyladenosine-3'-phosphate
  modified_base 11: mod_base = OTHER; note = 2'-O-methyluridine-3'-phosphate
  modified_base 12: mod_base = OTHER; note = 2'-O-methyluridine-3'-phosphate
  modified_base 13: mod_base = OTHER; note = 2'-O-methylguanosine-3'-phosphate
  modified_base 14: mod_base = OTHER; note = 2'-deoxy-2'-fluorouridine-3'-phosphate
  modified_base 15: mod_base = OTHER; note = 2'-O-methylcytidine-3'-phosphate
  modified_base 16: mod_base = OTHER; note = 2'-deoxy-2'-fluorocytidine-3'-phosphate
  modified_base 17: mod_base = OTHER; note = 2'-O-methyluridine-3'-phosphate
  modified_base 18: mod_base = OTHER; note = 2'-O-methyluridine-3'-phosphate
  modified_base 19: mod_base = OTHER; note = 2'-O-methyluridine-3'-phosphate
  modified_base 20: mod_base = OTHER; note = 2'-O-methylguanosine-3'-phosphate
  modified_base 21: mod_base = OTHER; note = 2'-O-methyladenosine-3'-phosphorothioate
  modified_base 22: mod_base = OTHER; note = 2'-O-methyladenosine-3'-phosphorothioate
  modified_base 23: mod_base = OTHER; note = 2'-O-methylcytidine
ttccttgcaattgtcctttgaac

SEQ ID NO: 12096 - RNA, 23 nt, synthetic construct
  source 1..23: mol_type = other RNA
  modified_base 1: mod_base = OTHER; note = 2'-O-methyluridine-3'-phosphorothioate 5'-(E)-Vinylphosphonate
  modified_base 2: mod_base = OTHER; note = 2'-deoxy-2'-fluoroadenosine-3'-phosphorothioate
  modified_base 3: mod_base = OTHER; note = 2'-O-methyladenosine-3'-phosphate
  modified_base 4: mod_base = OTHER; note = 2'-O-methyladenosine-3'-phosphate
  modified_base 5: mod_base = OTHER; note = 2'-O-methyluridine-3'-phosphate
  modified_base 6: mod_base = OTHER; note = 2'-deoxy-2'-fluorocytidine-3'-phosphate
  modified_base 7: mod_base = OTHER; note = 2'-O-methyluridine-3'-phosphate
  modified_base 8: mod_base = OTHER; note = 2'-O-methyladenosine-3'-phosphate
  modified_base 9: mod_base = OTHER; note = 2'-O-methylcytidine-3'-phosphate
  modified_base 10: mod_base = OTHER; note = 2'-O-methylcytidine-3'-phosphate
  modified_base 11: mod_base = OTHER; note = 2'-O-methyluridine-3'-phosphate
  modified_base 12: mod_base = OTHER; note = 2'-O-methyluridine-3'-phosphate
  modified_base 13: mod_base = OTHER; note = 2'-O-methyluridine-3'-phosphate
  modified_base 14: mod_base = OTHER; note = 2'-deoxy-2'-fluorouridine-3'-phosphate
  modified_base 15: mod_base = OTHER; note = 2'-O-methylcytidine-3'-phosphate
  modified_base 16: mod_base = OTHER; note = 2'-deoxy-2'-fluorocytidine-3'-phosphate
  modified_base 17: mod_base = OTHER; note = 2'-O-methyluridine-3'-phosphate
  modified_base 18: mod_base = OTHER; note = 2'-O-methyladenosine-3'-phosphate
  modified_base 19: mod_base = OTHER; note = 2'-O-methylcytidine-3'-phosphate
  modified_base 20: mod_base = OTHER; note = 2'-O-methyluridine-3'-phosphate
  modified_base 21: mod_base = OTHER; note = 2'-O-methyladenosine-3'-phosphorothioate
  modified_base 22: mod_base = OTHER; note = 2'-O-methyluridine-3'-phosphorothioate
  modified_base 23: mod_base = OTHER; note = 2'-O-methyluridine
taaatctaccttttcctactatt

SEQ ID NO: 12097 - RNA, 23 nt, synthetic construct
  source 1..23: mol_type = other RNA
  modified_base 1: mod_base = OTHER; note = 2'-O-methyluridine-3'-phosphorothioate 5'-(E)-Vinylphosphonate
  modified_base 2: mod_base = OTHER; note = 2'-deoxy-2'-fluoroadenosine-3'-phosphorothioate
  modified_base 3: mod_base = OTHER; note = 2'-O-methylcytidine-3'-phosphate
  modified_base 4: mod_base = OTHER; note = 2'-O-methylcytidine-3'-phosphate
  modified_base 5: mod_base = OTHER; note = 2'-O-methyladenosine-3'-phosphate
  modified_base 6: mod_base = OTHER; note = 2'-deoxy-2'-fluoroadenosine-3'-phosphate
  modified_base 7: mod_base = OTHER; note = 2'-O-methyladenosine-3'-phosphate
  modified_base 8: mod_base = OTHER; note = 2'-O-methyluridine-3'-phosphate
  modified_base 9: mod_base = OTHER; note = 2'-O-methylcytidine-3'-phosphate
  modified_base 10: mod_base = OTHER; note = 2'-O-methyluridine-3'-phosphate
  modified_base 11: mod_base = OTHER; note = 2'-O-methyladenosine-3'-phosphate
  modified_base 12: mod_base = OTHER; note = 2'-O-methylcytidine-3'-phosphate
  modified_base 13: mod_base = OTHER; note = 2'-O-methylcytidine-3'-phosphate
  modified_base 14: mod_base = OTHER; note = 2'-deoxy-2'-fluorouridine-3'-phosphate
  modified_base 15: mod_base = OTHER; note = 2'-O-methyluridine-3'-phosphate
  modified_base 16: mod_base = OTHER; note = 2'-deoxy-2'-fluorouridine-3'-phosphate
  modified_base 17: mod_base = OTHER; note = 2'-O-methyluridine-3'-phosphate
  modified_base 18: mod_base = OTHER; note = 2'-O-methylcytidine-3'-phosphate
  modified_base 19: mod_base = OTHER; note = 2'-O-methylcytidine-3'-phosphate
  modified_base 20: mod_base = OTHER; note = 2'-O-methyluridine-3'-phosphate
  modified_base 21: mod_base = OTHER; note = 2'-O-methyladenosine-3'-phosphorothioate
  modified_base 22: mod_base = OTHER; note = 2'-O-methylcytidine-3'-phosphorothioate
  modified_base 23: mod_base = OTHER; note = 2'-O-methyluridine
taccaaatctaccttttcctact

SEQ ID NO: 12098 - RNA, 23 nt, synthetic construct
  source 1..23: mol_type = other RNA
  modified_base 1: mod_base = OTHER; note = 2'-O-methyluridine-3'-phosphorothioate 5'-(E)-Vinylphosphonate
  modified_base 2: mod_base = OTHER; note = 2'-deoxy-2'-fluoroadenosine-3'-phosphorothioate
  modified_base 3: mod_base = OTHER; note = 2'-O-methyluridine-3'-phosphate
  modified_base 4: mod_base = OTHER; note = 2'-O-methyluridine-3'-phosphate
  modified_base 5: mod_base = OTHER; note = 2'-O-methyluridine-3'-phosphate
  modified_base 6: mod_base = OTHER; note = 2'-deoxy-2'-fluorouridine-3'-phosphate
  modified_base 7: mod_base = OTHER; note = 2'-O-methylcytidine-3'-phosphate
  modified_base 8: mod_base = OTHER; note = 2'-O-methyladenosine-3'-phosphate
  modified_base 9: mod_base = OTHER; note = 2'-O-methylcytidine-3'-phosphate
  modified_base 10: mod_base = OTHER; note = 2'-O-methyladenosine-3'-phosphate
  modified_base 11: mod_base = OTHER; note = 2'-O-methylguanosine-3'-phosphate
  modified_base 12: mod_base = OTHER; note = 2'-O-methylcytidine-3'-phosphate
  modified_base 13: mod_base = OTHER; note = 2'-O-methylcytidine-3'-phosphate
  modified_base 14: mod_base = OTHER; note = 2'-deoxy-2'-fluoroadenosine-3'-phosphate
  modified_base 15: mod_base = OTHER; note = 2'-O-methylcytidine-3'-phosphate
  modified_base 16: mod_base = OTHER; note = 2'-deoxy-2'-fluoroadenosine-3'-phosphate
  modified_base 17: mod_base = OTHER; note = 2'-O-methyluridine-3'-phosphate
  modified_base 18: mod_base = OTHER; note = 2'-O-methylcytidine-3'-phosphate
  modified_base 19: mod_base = OTHER; note = 2'-O-methyluridine-3'-phosphate
  modified_base 20: mod_base = OTHER; note = 2'-O-methyluridine-3'-phosphate
  modified_base 21: mod_base = OTHER; note = 2'-O-methylcytidine-3'-phosphorothioate
  modified_base 22: mod_base = OTHER; note = 2'-O-methylcytidine-3'-phosphorothioate
  modified_base 23: mod_base = OTHER; note = 2'-O-methylcytidine
tattttcacagccacatcttccc

SEQ ID NO: 12099 - RNA, 23 nt, synthetic construct
  source 1..23: mol_type = other RNA
  modified_base 1: mod_base = OTHER; note = 2'-O-methyluridine-3'-phosphorothioate 5'-(E)-Vinylphosphonate
  modified_base 2: mod_base = OTHER; note = 2'-deoxy-2'-fluorouridine-3'-phosphorothioate
  modified_base 3: mod_base = OTHER; note = 2'-O-methyladenosine-3'-phosphate
  modified_base 4: mod_base = OTHER; note = 2'-O-methyluridine-3'-phosphate
  modified_base 5: mod_base = OTHER; note = 2'-O-methyluridine-3'-phosphate
  modified_base 6: mod_base = OTHER; note = 2'-deoxy-2'-fluorouridine-3'-phosphate
  modified_base 7: mod_base = OTHER; note = 2'-O-methyluridine-3'-phosphate
  modified_base 8: mod_base = OTHER; note = 2'-O-methylcytidine-3'-phosphate
  modified_base 9: mod_base = OTHER; note = 2'-O-methyladenosine-3'-phosphate
  modified_base 10: mod_base = OTHER; note = 2'-O-methylcytidine-3'-phosphate
  modified_base 11: mod_base = OTHER; note = 2'-O-methyladenosine-3'-phosphate
  modified_base 12: mod_base = OTHER; note = 2'-O-methylguanosine-3'-phosphate
  modified_base 13: mod_base = OTHER; note = 2'-O-methylcytidine-3'-phosphate
  modified_base 14: mod_base = OTHER; note = 2'-deoxy-2'-fluorocytidine-3'-phosphate
  modified_base 15: mod_base = OTHER; note = 2'-O-methyladenosine-3'-phosphate
  modified_base 16: mod_base = OTHER; note = 2'-deoxy-2'-fluorocytidine-3'-phosphate
  modified_base 17: mod_base = OTHER; note = 2'-O-methyladenosine-3'-phosphate
  modified_base 18: mod_base = OTHER; note = 2'-O-methyluridine-3'-phosphate
  modified_base 19: mod_base = OTHER; note = 2'-O-methylcytidine-3'-phosphate
  modified_base 20: mod_base = OTHER; note = 2'-O-methyluridine-3'-phosphate
  modified_base 21: mod_base = OTHER; note = 2'-O-methyluridine-3'-phosphorothioate
  modified_base 22: mod_base = OTHER; note = 2'-O-methylcytidine-3'-phosphorothioate
  modified_base 23: mod_base = OTHER; note = 2'-O-methylcytidine
ttattttcacagccacatcttcc

SEQ ID NO: 12100 - RNA, 23 nt, synthetic construct
  source 1..23: mol_type = other RNA
  modified_base 1: mod_base = OTHER; note = 2'-O-methyluridine-3'-phosphorothioate 5'-(E)-Vinylphosphonate
  modified_base 2: mod_base = OTHER; note = 2'-deoxy-2'-fluoroadenosine-3'-phosphorothioate
  modified_base 3: mod_base = OTHER; note = 2'-O-methyluridine-3'-phosphate
  modified_base 4: mod_base = OTHER; note = 2'-O-methyladenosine-3'-phosphate
  modified_base 5: mod_base = OTHER; note = 2'-O-methyluridine-3'-phosphate
  modified_base 6: mod_base = OTHER; note = 2'-deoxy-2'-fluorouridine-3'-phosphate
  modified_base 7: mod_base = OTHER; note = 2'-O-methyluridine-3'-phosphate
  modified_base 8: mod_base = OTHER; note = 2'-O-methyluridine-3'-phosphate
  modified_base 9: mod_base = OTHER; note = 2'-O-methylcytidine-3'-phosphate
  modified_base 10: mod_base = OTHER; note = 2'-O-methyladenosine-3'-phosphate
  modified_base 11: mod_base = OTHER; note = 2'-O-methylcytidine-3'-phosphate
  modified_base 12: mod_base = OTHER; note = 2'-O-methyladenosine-3'-phosphate
  modified_base 13: mod_base = OTHER; note = 2'-O-methylguanosine-3'-phosphate
  modified_base 14: mod_base = OTHER; note = 2'-deoxy-2'-fluorocytidine-3'-phosphate
  modified_base 15: mod_base = OTHER; note = 2'-O-methylcytidine-3'-phosphate
  modified_base 16: mod_base = OTHER; note = 2'-deoxy-2'-fluoroadenosine-3'-phosphate
  modified_base 17: mod_base = OTHER; note = 2'-O-methylcytidine-3'-phosphate
  modified_base 18: mod_base = OTHER; note = 2'-O-methyladenosine-3'-phosphate
  modified_base 19: mod_base = OTHER; note = 2'-O-methyluridine-3'-phosphate
  modified_base 20: mod_base = OTHER; note = 2'-O-methylcytidine-3'-phosphate
  modified_base 21: mod_base = OTHER; note = 2'-O-methyluridine-3'-phosphorothioate
  modified_base 22: mod_base = OTHER; note = 2'-O-methyluridine-3'-phosphorothioate
  modified_base 23: mod_base = OTHER; note = 2'-O-methylcytidine
tatattttcacagccacatcttc

SEQ ID NO: 12101 - RNA, 23 nt, synthetic construct
  source 1..23: mol_type = other RNA
  modified_base 1: mod_base = OTHER; note = 2'-O-methyluridine-3'-phosphorothioate 5'-(E)-Vinylphosphonate
  modified_base 2: mod_base = OTHER; note = 2'-deoxy-2'-fluoroadenosine-3'-phosphorothioate
  modified_base 3: mod_base = OTHER; note = 2'-O-methylguanosine-3'-phosphate
  modified_base 4: mod_base = OTHER; note = 2'-O-methyladenosine-3'-phosphate
  modified_base 5: mod_base = OTHER; note = 2'-O-methyluridine-3'-phosphate
  modified_base 6: mod_base = OTHER; note = 2'-deoxy-2'-fluorocytidine-3'-phosphate
  modified_base 7: mod_base = OTHER; note = 2'-O-methyluridine-3'-phosphate
  modified_base 8: mod_base = OTHER; note = 2'-O-methyluridine-3'-phosphate
  modified_base 9: mod_base = OTHER; note = 2'-O-methyluridine-3'-phosphate
  modified_base 10: mod_base = OTHER; note = 2'-O-methylcytidine-3'-phosphate
  modified_base 11: mod_base = OTHER; note = 2'-O-methyladenosine-3'-phosphate
  modified_base 12: mod_base = OTHER; note = 2'-O-methyluridine-3'-phosphate
  modified_base 13: mod_base = OTHER; note = 2'-O-methylcytidine-3'-phosphate
  modified_base 14: mod_base = OTHER; note = 2'-deoxy-2'-fluorouridine-3'-phosphate
  modified_base 15: mod_base = OTHER; note = 2'-O-methylcytidine-3'-phosphate
  modified_base 16: mod_base = OTHER; note = 2'-deoxy-2'-fluorouridine-3'-phosphate
  modified_base 17: mod_base = OTHER; note = 2'-O-methylguanosine-3'-phosphate
  modified_base 18: mod_base = OTHER; note = 2'-O-methylguanosine-3'-phosphate
  modified_base 19: mod_base = OTHER; note = 2'-O-methyladenosine-3'-phosphate
  modified_base 20: mod_base = OTHER; note = 2'-O-methylguanosine-3'-phosphate
  modified_base 21: mod_base = OTHER; note = 2'-O-methylguanosine-3'-phosphorothioate
  modified_base 22: mod_base = OTHER; note = 2'-O-methyladenosine-3'-phosphorothioate
  modified_base 23: mod_base = OTHER; note = 2'-O-methylguanosine
tagatctttcatctctggaggag

SEQ ID NO: 12102 - RNA, 23 nt, synthetic construct
  source 1..23: mol_type = other RNA
  modified_base 1: mod_base = OTHER; note = 2'-O-methyluridine-3'-phosphorothioate 5'-(E)-Vinylphosphonate
  modified_base 2: mod_base = OTHER; note = 2'-deoxy-2'-fluoroadenosine-3'-phosphorothioate
  modified_base 3: mod_base = OTHER; note = 2'-O-methyluridine-3'-phosphate
  modified_base 4: mod_base = OTHER; note = 2'-O-methylcytidine-3'-phosphate
  modified_base 5: mod_base = OTHER; note = 2'-O-methyluridine-3'-phosphate
  modified_base 6: mod_base = OTHER; note = 2'-deoxy-2'-fluorouridine-3'-phosphate
  modified_base 7: mod_base = OTHER; note = 2'-O-methyluridine-3'-phosphate
  modified_base 8: mod_base = OTHER; note = 2'-O-methylcytidine-3'-phosphate
  modified_base 9: mod_base = OTHER; note = 2'-O-methyladenosine-3'-phosphate
  modified_base 10: mod_base = OTHER; note = 2'-O-methyluridine-3'-phosphate
  modified_base 11: mod_base = OTHER; note = 2'-O-methylcytidine-3'-phosphate
  modified_base 12: mod_base = OTHER; note = 2'-O-methyluridine-3'-phosphate
  modified_base 13: mod_base = OTHER; note = 2'-O-methylcytidine-3'-phosphate
  modified_base 14: mod_base = OTHER; note = 2'-deoxy-2'-fluorouridine-3'-phosphate
  modified_base 15: mod_base = OTHER; note = 2'-O-methylguanosine-3'-phosphate
  modified_base 16: mod_base = OTHER; note = 2'-deoxy-2'-fluoroguanosine-3'-phosphate
  modified_base 17: mod_base = OTHER; note = 2'-O-methyladenosine-3'-phosphate
  modified_base 18: mod_base = OTHER; note = 2'-O-methylguanosine-3'-phosphate
  modified_base 19: mod_base = OTHER; note = 2'-O-methylguanosine-3'-phosphate
  modified_base 20: mod_base = OTHER; note = 2'-O-methyladenosine-3'-phosphate
  modified_base 21: mod_base = OTHER; note = 2'-O-methylguanosine-3'-phosphorothioate
  modified_base 22: mod_base = OTHER; note = 2'-O-methyladenosine-3'-phosphorothioate
  modified_base 23: mod_base = OTHER; note = 2'-O-methyladenosine
tatctttcatctctggaggagaa

SEQ ID NO: 12103 - RNA, 23 nt, synthetic construct
  source 1..23: mol_type = other RNA
  modified_base 1: mod_base = OTHER; note = 2'-O-methyluridine-3'-phosphorothioate 5'-(E)-Vinylphosphonate
  modified_base 2: mod_base = OTHER; note = 2'-deoxy-2'-fluoroguanosine-3'-phosphorothioate
  modified_base 3: mod_base = OTHER; note = 2'-O-methyladenosine-3'-phosphate
  modified_base 4: mod_base = OTHER; note = 2'-O-methyluridine-3'-phosphate
  modified_base 5: mod_base = OTHER; note = 2'-O-methylcytidine-3'-phosphate
  modified_base 6: mod_base = OTHER; note = 2'-deoxy-2'-fluorouridine-3'-phosphate
  modified_base 7: mod_base = OTHER; note = 2'-O-methyluridine-3'-phosphate
  modified_base 8: mod_base = OTHER; note = 2'-O-methyluridine-3'-phosphate
  modified_base 9: mod_base = OTHER; note = 2'-O-methylcytidine-3'-phosphate
  modified_base 10: mod_base = OTHER; note = 2'-O-methyladenosine-3'-phosphate
  modified_base 11: mod_base = OTHER; note = 2'-O-methyluridine-3'-phosphate
  modified_base 12: mod_base = OTHER; note = 2'-O-methylcytidine-3'-phosphate
  modified_base 13: mod_base = OTHER; note = 2'-O-methyluridine-3'-phosphate
  modified_base 14: mod_base = OTHER; note = 2'-deoxy-2'-fluorocytidine-3'-phosphate
  modified_base 15: mod_base = OTHER; note = 2'-O-methyluridine-3'-phosphate
  modified_base 16: mod_base = OTHER; note = 2'-deoxy-2'-fluoroguanosine-3'-phosphate
  modified_base 17: mod_base = OTHER; note = 2'-O-methylguanosine-3'-phosphate
  modified_base 18: mod_base = OTHER; note = 2'-O-methyladenosine-3'-phosphate
  modified_base 19: mod_base = OTHER; note = 2'-O-methylguanosine-3'-phosphate
  modified_base 20: mod_base = OTHER; note = 2'-O-methylguanosine-3'-phosphate
  modified_base 21: mod_base = OTHER; note = 2'-O-methyladenosine-3'-phosphorothioate
  modified_base 22: mod_base = OTHER; note = 2'-O-methylguanosine-3'-phosphorothioate
  modified_base 23: mod_base = OTHER; note = 2'-O-methyladenosine
tgatctttcatctctggaggaga

SEQ ID NO: 12104 - RNA, 23 nt, synthetic construct
  source 1..23: mol_type = other RNA
  modified_base 1: mod_base = OTHER; note = 2'-O-methyluridine-3'-phosphorothioate 5'-(E)-Vinylphosphonate
  modified_base 2: mod_base = OTHER; note = 2'-deoxy-2'-fluoroadenosine-3'-phosphorothioate
  modified_base 3: mod_base = OTHER; note = 2'-O-methyladenosine-3'-phosphate
  modified_base 4: mod_base = OTHER; note = 2'-O-methylguanosine-3'-phosphate
  modified_base 5: mod_base = OTHER; note = 2'-O-methyladenosine-3'-phosphate
  modified_base 6: mod_base = OTHER; note = 2'-deoxy-2'-fluorouridine-3'-phosphate
  modified_base 7: mod_base = OTHER; note = 2'-O-methylcytidine-3'-phosphate
  modified_base 8: mod_base = OTHER; note = 2'-O-methyluridine-3'-phosphate
  modified_base 9: mod_base = OTHER; note = 2'-O-methyluridine-3'-phosphate
  modified_base 10: mod_base = OTHER; note = 2'-O-methyluridine-3'-phosphate
  modified_base 11: mod_base = OTHER; note = 2'-O-methylcytidine-3'-phosphate
  modified_base 12: mod_base = OTHER; note = 2'-O-methyladenosine-3'-phosphate
  modified_base 13: mod_base = OTHER; note = 2'-O-methyluridine-3'-phosphate
  modified_base 14: mod_base = OTHER; note = 2'-deoxy-2'-fluorocytidine-3'-phosphate
  modified_base 15: mod_base = OTHER; note = 2'-O-methyluridine-3'-phosphate
  modified_base 16: mod_base = OTHER; note = 2'-deoxy-2'-fluorocytidine-3'-phosphate
  modified_base 17: mod_base = OTHER; note = 2'-O-methyluridine-3'-phosphate
  modified_base 18: mod_base = OTHER; note = 2'-O-methylguanosine-3'-phosphate
  modified_base 19: mod_base = OTHER; note = 2'-O-methylguanosine-3'-phosphate
  modified_base 20: mod_base = OTHER; note = 2'-O-methyladenosine-3'-phosphate
  modified_base 21: mod_base = OTHER; note = 2'-O-methylguanosine-3'-phosphorothioate
  modified_base 22: mod_base = OTHER; note = 2'-O-methylguanosine-3'-phosphorothioate
  modified_base 23: mod_base = OTHER; note = 2'-O-methyladenosine
taagatctttcatctctggagga

SEQ ID NO: 12105 - RNA, 23 nt, synthetic construct
  source 1..23: mol_type = other RNA
  modified_base 1: mod_base = OTHER; note = 2'-O-methyluridine-3'-phosphorothioate 5'-(E)-Vinylphosphonate
  modified_base 2: mod_base = OTHER; note = 2'-deoxy-2'-fluorocytidine-3'-phosphorothioate
  modified_base 3: mod_base = OTHER; note = 2'-O-methyladenosine-3'-phosphate
  modified_base 4: mod_base = OTHER; note = 2'-O-methyladenosine-3'-phosphate
  modified_base 5: mod_base = OTHER; note = 2'-O-methylguanosine-3'-phosphate
  modified_base 6: mod_base = OTHER; note = 2'-deoxy-2'-fluoroadenosine-3'-phosphate
  modified_base 7: mod_base = OTHER; note = 2'-O-methyluridine-3'-phosphate
  modified_base 8: mod_base = OTHER; note = 2'-O-methylcytidine-3'-phosphate
  modified_base 9: mod_base = OTHER; note = 2'-O-methyluridine-3'-phosphate
  modified_base 10: mod_base = OTHER; note = 2'-O-methyluridine-3'-phosphate
  modified_base 11: mod_base = OTHER; note = 2'-O-methyluridine-3'-phosphate
  modified_base 12: mod_base = OTHER; note = 2'-O-methylcytidine-3'-phosphate
  modified_base 13: mod_base = OTHER; note = 2'-O-methyladenosine-3'-phosphate
  modified_base 14: mod_base = OTHER; note = 2'-deoxy-2'-fluorouridine-3'-phosphate
  modified_base 15: mod_base = OTHER; note = 2'-O-methylcytidine-3'-phosphate
  modified_base 16: mod_base = OTHER; note = 2'-deoxy-2'-fluorouridine-3'-phosphate
  modified_base 17: mod_base = OTHER; note = 2'-O-methylcytidine-3'-phosphate
  modified_base 18: mod_base = OTHER; note = 2'-O-methyluridine-3'-phosphate
  modified_base 19: mod_base = OTHER; note = 2'-O-methylguanosine-3'-phosphate
  modified_base 20: mod_base = OTHER; note = 2'-O-methylguanosine-3'-phosphate
  modified_base 21: mod_base = OTHER; note = 2'-O-methyladenosine-3'-phosphorothioate
  modified_base 22: mod_base = OTHER; note = 2'-O-methylguanosine-3'-phosphorothioate
  modified_base 23: mod_base = OTHER; note = 2'-O-methylguanosine
tcaagatctttcatctctggagg

SEQ ID NO: 12106 - RNA, 23 nt, synthetic construct
  source 1..23: mol_type = other RNA
  modified_base 1: mod_base = OTHER; note = 2'-O-methyluridine-3'-phosphorothioate 5'-(E)-Vinylphosphonate
  modified_base 2: mod_base = OTHER; note = 2'-deoxy-2'-fluorocytidine-3'-phosphorothioate
  modified_base 3: mod_base = OTHER; note = 2'-O-methylcytidine-3'-phosphate
  modified_base 4: mod_base = OTHER; note = 2'-O-methyladenosine-3'-phosphate
  modified_base 5: mod_base = OTHER; note = 2'-O-methyladenosine-3'-phosphate
  modified_base 6: mod_base = OTHER; note = 2'-deoxy-2'-fluoroguanosine-3'-phosphate
  modified_base 7: mod_base = OTHER; note = 2'-O-methyladenosine-3'-phosphate
  modified_base 8: mod_base = OTHER; note = 2'-O-methyluridine-3'-phosphate
  modified_base 9: mod_base = OTHER; note = 2'-O-methylcytidine-3'-phosphate
  modified_base 10: mod_base = OTHER; note = 2'-O-methyluridine-3'-phosphate
  modified_base 11: mod_base = OTHER; note = 2'-O-methyluridine-3'-phosphate
  modified_base 12: mod_base = OTHER; note = 2'-O-methyluridine-3'-phosphate
  modified_base 13: mod_base = OTHER; note = 2'-O-methylcytidine-3'-phosphate
  modified_base 14: mod_base = OTHER; note = 2'-deoxy-2'-fluoroadenosine-3'-phosphate
  modified_base 15: mod_base = OTHER; note = 2'-O-methyluridine-3'-phosphate
  modified_base 16: mod_base = OTHER; note = 2'-deoxy-2'-fluorocytidine-3'-phosphate
  modified_base 17: mod_base = OTHER; note = 2'-O-methyluridine-3'-phosphate
  modified_base 18: mod_base = OTHER; note = 2'-O-methylcytidine-3'-phosphate
  modified_base 19: mod_base = OTHER; note = 2'-O-methyluridine-3'-phosphate
  modified_base 20: mod_base = OTHER; note = 2'-O-methylguanosine-3'-phosphate
  modified_base 21: mod_base = OTHER; note = 2'-O-methylguanosine-3'-phosphorothioate
  modified_base 22: mod_base = OTHER; note = 2'-O-methyladenosine-3'-phosphorothioate
  modified_base 23: mod_base = OTHER; note = 2'-O-methylguanosine
tccaagatctttcatctctggag

SEQ ID NO: 12107 - RNA, 23 nt, synthetic construct
  source 1..23: mol_type = other RNA
  modified_base 1: mod_base = OTHER; note = 2'-O-methyluridine-3'-phosphorothioate 5'-(E)-Vinylphosphonate
  modified_base 2: mod_base = OTHER; note = 2'-deoxy-2'-fluoroadenosine-3'-phosphorothioate
  modified_base 3: mod_base = OTHER; note = 2'-O-methyladenosine-3'-phosphate
  modified_base 4: mod_base = OTHER; note = 2'-O-methylcytidine-3'-phosphate
  modified_base 5: mod_base = OTHER; note = 2'-O-methylcytidine-3'-phosphate
  modified_base 6: mod_base = OTHER; note = 2'-deoxy-2'-fluoroadenosine-3'-phosphate
  modified_base 7: mod_base = OTHER; note = 2'-O-methyladenosine-3'-phosphate
  modified_base 8: mod_base = OTHER; note = 2'-O-methylguanosine-3'-phosphate
  modified_base 9: mod_base = OTHER; note = 2'-O-methyladenosine-3'-phosphate
  modified_base 10: mod_base = OTHER; note = 2'-O-methyluridine-3'-phosphate
  modified_base 11: mod_base = OTHER; note = 2'-O-methylcytidine-3'-phosphate
  modified_base 12: mod_base = OTHER; note = 2'-O-methyluridine-3'-phosphate
  modified_base 13: mod_base = OTHER; note = 2'-O-methyluridine-3'-phosphate
  modified_base 14: mod_base = OTHER; note = 2'-deoxy-2'-fluorouridine-3'-phosphate
  modified_base 15: mod_base = OTHER; note = 2'-O-methylcytidine-3'-phosphate
  modified_base 16: mod_base = OTHER; note = 2'-deoxy-2'-fluoroadenosine-3'-phosphate
  modified_base 17: mod_base = OTHER; note = 2'-O-methyluridine-3'-phosphate
  modified_base 18: mod_base = OTHER; note = 2'-O-methylcytidine-3'-phosphate
  modified_base 19: mod_base = OTHER; note = 2'-O-methyluridine-3'-phosphate
  modified_base 20: mod_base = OTHER; note = 2'-O-methylcytidine-3'-phosphate
  modified_base 21: mod_base = OTHER; note = 2'-O-methyluridine-3'-phosphorothioate
  modified_base 22: mod_base = OTHER; note = 2'-O-methylguanosine-3'-phosphorothioate
  modified_base 23: mod_base = OTHER; note = 2'-O-methylguanosine
taaccaagatctttcatctctgg

SEQ ID NO: 12108 - RNA, 23 nt, synthetic construct
  source 1..23: mol_type = other RNA
  modified_base 1: mod_base = OTHER; note = 2'-O-methyluridine-3'-phosphorothioate 5'-(E)-Vinylphosphonate
  modified_base 2: mod_base = OTHER; note = 2'-deoxy-2'-fluoroadenosine-3'-phosphorothioate
  modified_base 3: mod_base = OTHER; note = 2'-O-methyladenosine-3'-phosphate
  modified_base 4: mod_base = OTHER; note = 2'-O-methyladenosine-3'-phosphate
  modified_base 5: mod_base = OTHER; note = 2'-O-methylcytidine-3'-phosphate
  modified_base 6: mod_base = OTHER; note = 2'-deoxy-2'-fluorocytidine-3'-phosphate
  modified_base 7: mod_base = OTHER; note = 2'-O-methyladenosine-3'-phosphate
  modified_base 8: mod_base = OTHER; note = 2'-O-methyladenosine-3'-phosphate
  modified_base 9: mod_base = OTHER; note = 2'-O-methylguanosine-3'-phosphate
  modified_base 10: mod_base = OTHER; note = 2'-O-methyladenosine-3'-phosphate
  modified_base 11: mod_base = OTHER; note = 2'-O-methyluridine-3'-phosphate
  modified_base 12: mod_base = OTHER; note = 2'-O-methylcytidine-3'-phosphate
  modified_base 13: mod_base = OTHER; note = 2'-O-methyluridine-3'-phosphate
  modified_base 14: mod_base = OTHER; note = 2'-deoxy-2'-fluorouridine-3'-phosphate
  modified_base 15: mod_base = OTHER; note = 2'-O-methyluridine-3'-phosphate
  modified_base 16: mod_base = OTHER; note = 2'-deoxy-2'-fluorocytidine-3'-phosphate
  modified_base 17: mod_base = OTHER; note = 2'-O-methyladenosine-3'-phosphate
  modified_base 18: mod_base = OTHER; note = 2'-O-methyluridine-3'-phosphate
  modified_base 19: mod_base = OTHER; note = 2'-O-methylcytidine-3'-phosphate
  modified_base 20: mod_base = OTHER; note = 2'-O-methyluridine-3'-phosphate
  modified_base 21: mod_base = OTHER; note = 2'-O-methylcytidine-3'-phosphorothioate
  modified_base 22: mod_base = OTHER; note = 2'-O-methyluridine-3'-phosphorothioate
  modified_base 23: mod_base = OTHER; note = 2'-O-methylguanosine
taaaccaagatctttcatctctg

SEQ ID NO: 12109 - RNA, 23 nt, synthetic construct
  source 1..23: mol_type = other RNA
  modified_base 1: mod_base = OTHER; note = 2'-O-methyluridine-3'-phosphorothioate 5'-(E)-Vinylphosphonate
  modified_base 2: mod_base = OTHER; note = 2'-deoxy-2'-fluoroadenosine-3'-phosphorothioate
  modified_base 3: mod_base = OTHER; note = 2'-O-methylcytidine-3'-phosphate
  modified_base 4: mod_base = OTHER; note = 2'-O-methylguanosine-3'-phosphate
  modified_base 5: mod_base = OTHER; note = 2'-O-methyladenosine-3'-phosphate
  modified_base 6: mod_base = OTHER; note = 2'-deoxy-2'-fluoroadenosine-3'-phosphate
  modified_base 7: mod_base = OTHER; note = 2'-O-methyladenosine-3'-phosphate
  modified_base 8: mod_base = OTHER; note = 2'-O-methylcytidine-3'-phosphate
  modified_base 9: mod_base = OTHER; note = 2'-O-methylcytidine-3'-phosphate
  modified_base 10: mod_base = OTHER; note = 2'-O-methyladenosine-3'-phosphate
  modified_base 11: mod_base = OTHER; note = 2'-O-methyladenosine-3'-phosphate
  modified_base 12: mod_base = OTHER; note = 2'-O-methylguanosine-3'-phosphate
  modified_base 13: mod_base = OTHER; note = 2'-O-methyladenosine-3'-phosphate
  modified_base 14: mod_base = OTHER; note = 2'-deoxy-2'-fluorouridine-3'-phosphate
  modified_base 15: mod_base = OTHER; note = 2'-O-methylcytidine-3'-phosphate
  modified_base 16: mod_base = OTHER; note = 2'-deoxy-2'-fluorouridine-3'-phosphate
  modified_base 17: mod_base = OTHER; note = 2'-O-methyluridine-3'-phosphate
  modified_base 18: mod_base = OTHER; note = 2'-O-methyluridine-3'-phosphate
  modified_base 19: mod_base = OTHER; note = 2'-O-methylcytidine-3'-phosphate
  modified_base 20: mod_base = OTHER; note = 2'-O-methyladenosine-3'-phosphate
  modified_base 21: mod_base = OTHER; note = 2'-O-methyluridine-3'-phosphorothioate
  modified_base 22: mod_base = OTHER; note = 2'-O-methylcytidine-3'-phosphorothioate
  modified_base 23: mod_base = OTHER; note = 2'-O-methyluridine
tacgaaaccaagatctttcatct

SEQ ID NO: 12110 - RNA, 23 nt, synthetic construct
  source 1..23: mol_type = other RNA
  modified_base 1: mod_base = OTHER; note = 2'-O-methyluridine-3'-phosphorothioate 5'-(E)-Vinylphosphonate
  modified_base 2: mod_base = OTHER; note = 2'-deoxy-2'-fluorouridine-3'-phosphorothioate
  modified_base 3: mod_base = OTHER; note = 2'-O-methyladenosine-3'-phosphate
  modified_base 4: mod_base = OTHER; note = 2'-O-methyladenosine-3'-phosphate
  modified_base 5: mod_base = OTHER; note = 2'-O-methyladenosine-3'-phosphate
  modified_base 6: mod_base = OTHER; note = 2'-deoxy-2'-fluorouridine-3'-phosphate
  modified_base 7: mod_base = OTHER; note = 2'-O-methyluridine-3'-phosphate
  modified_base 8: mod_base = OTHER; note = 2'-O-methyluridine-3'-phosphate
  modified_base 9: mod_base = OTHER; note = 2'-O-methylcytidine-3'-phosphate
  modified_base 10: mod_base = OTHER; note = 2'-O-methyluridine-3'-phosphate
  modified_base 11: mod_base = OTHER; note = 2'-O-methylguanosine-3'-phosphate
  modified_base 12: mod_base = OTHER; note = 2'-O-methylcytidine-3'-phosphate
  modified_base 13: mod_base = OTHER; note = 2'-O-methylcytidine-3'-phosphate
  modified_base 14: mod_base = OTHER; note = 2'-deoxy-2'-fluorouridine-3'-phosphate
  modified_base 15: mod_base = OTHER; note = 2'-O-methylcytidine-3'-phosphate
  modified_base 16: mod_base = OTHER; note = 2'-deoxy-2'-fluoroadenosine-3'-phosphate
  modified_base 17: mod_base = OTHER; note = 2'-O-methylcytidine-3'-phosphate
  modified_base 18: mod_base = OTHER; note = 2'-O-methylguanosine-3'-phosphate
  modified_base 19: mod_base = OTHER; note = 2'-O-methyladenosine-3'-phosphate
  modified_base 20: mod_base = OTHER; note = 2'-O-methyladenosine-3'-phosphate
  modified_base 21: mod_base = OTHER; note = 2'-O-methyladenosine-3'-phosphorothioate
  modified_base 22: mod_base = OTHER; note = 2'-O-methylcytidine-3'-phosphorothioate
  modified_base 23: mod_base = OTHER; note = 2'-O-methylcytidine
ttaaatttctgcctcacgaaacc

SEQ ID NO: 12111 - RNA, 23 nt, synthetic construct
  source 1..23: mol_type = other RNA
  modified_base 1: mod_base = OTHER; note = 2'-O-methyluridine-3'-phosphorothioate 5'-(E)-Vinylphosphonate
  modified_base 2: mod_base = OTHER; note = 2'-deoxy-2'-fluoroadenosine-3'-phosphorothioate
  modified_base 3: mod_base = OTHER; note = 2'-O-methyladenosine-3'-phosphate
  modified_base 4: mod_base = OTHER; note = 2'-O-methylguanosine-3'-phosphate
  modified_base 5: mod_base = OTHER; note = 2'-O-methylguanosine-3'-phosphate
  modified_base 6: mod_base = OTHER; note = 2'-deoxy-2'-fluoroadenosine-3'-phosphate
  modified_base 7: mod_base = OTHER; note = 2'-O-methyluridine-3'-phosphate
  modified_base 8: mod_base = OTHER; note = 2'-O-methylguanosine-3'-phosphate
  modified_base 9: mod_base = OTHER; note = 2'-O-methyluridine-3'-phosphate
  modified_base 10: mod_base = OTHER; note = 2'-O-methyluridine-3'-phosphate
  modified_base 11: mod_base = OTHER; note = 2'-O-methyluridine-3'-phosphate
  modified_base 12: mod_base = OTHER; note = 2'-O-methyluridine-3'-phosphate
  modified_base 13: mod_base = OTHER; note = 2'-O-methylcytidine-3'-phosphate
  modified_base 14: mod_base = OTHER; note = 2'-deoxy-2'-fluoroadenosine-3'-phosphate
  modified_base 15: mod_base = OTHER; note = 2'-O-methyluridine-3'-phosphate
  modified_base 16: mod_base = OTHER; note = 2'-deoxy-2'-fluoroguanosine-3'-phosphate
  modified_base 17: mod_base = OTHER; note = 2'-O-methyluridine-3'-phosphate
  modified_base 18: mod_base = OTHER; note = 2'-O-methylcytidine-3'-phosphate
  modified_base 19: mod_base = OTHER; note = 2'-O-methylguanosine-3'-phosphate
  modified_base 20: mod_base = OTHER; note = 2'-O-methylcytidine-3'-phosphate
  modified_base 21: mod_base = OTHER; note = 2'-O-methyladenosine-3'-phosphorothioate
  modified_base 22: mod_base = OTHER; note = 2'-O-methylguanosine-3'-phosphorothioate
  modified_base 23: mod_base = OTHER; note = 2'-O-methylcytidine
taaggatgttttcatgtcgcagc

SEQ ID NO: 12112 - RNA, 23 nt, synthetic construct
  source 1..23: mol_type = other RNA
  modified_base 1: mod_base = OTHER; note = 2'-O-methyluridine-3'-phosphorothioate 5'-(E)-Vinylphosphonate
  modified_base 2: mod_base = OTHER; note = 2'-deoxy-2'-fluoroadenosine-3'-phosphorothioate
  modified_base 3: mod_base = OTHER; note = 2'-O-methyluridine-3'-phosphate
  modified_base 4: mod_base = OTHER; note = 2'-O-methylcytidine-3'-phosphate
  modified_base 5: mod_base = OTHER; note = 2'-O-methyluridine-3'-phosphate
  modified_base 6: mod_base = OTHER; note = 2'-deoxy-2'-fluorouridine-3'-phosphate
  modified_base 7: mod_base = OTHER; note = 2'-O-methyluridine-3'-phosphate
  modified_base 8: mod_base = OTHER; note = 2'-O-methylguanosine-3'-phosphate
  modified_base 9: mod_base = OTHER; note = 2'-O-methyluridine-3'-phosphate
  modified_base 10: mod_base = OTHER; note = 2'-O-methyluridine-3'-phosphate
  modified_base 11: mod_base = OTHER; note = 2'-O-methylguanosine-3'-phosphate
  modified_base 12: mod_base = OTHER; note = 2'-O-methyluridine-3'-phosphate
  modified_base 13: mod_base = OTHER; note = 2'-O-methylcytidine-3'-phosphate
  modified_base 14: mod_base = OTHER; note = 2'-deoxy-2'-fluoroadenosine-3'-phosphate
  modified_base 15: mod_base = OTHER; note = 2'-O-methylguanosine-3'-phosphate
  modified_base 16: mod_base = OTHER; note = 2'-deoxy-2'-fluorocytidine-3'-phosphate
  modified_base 17: mod_base = OTHER; note = 2'-O-methyladenosine-3'-phosphate
  modified_base 18: mod_base = OTHER; note = 2'-O-methylguanosine-3'-phosphate
  modified_base 19: mod_base = OTHER; note = 2'-O-methylcytidine-3'-phosphate
  modified_base 20: mod_base = OTHER; note = 2'-O-methyladenosine-3'-phosphate
  modified_base 21: mod_base = OTHER; note = 2'-O-methyladenosine-3'-phosphorothioate
  modified_base 22: mod_base = OTHER; note = 2'-O-methyluridine-3'-phosphorothioate
  modified_base 23: mod_base = OTHER; note = 2'-O-methylguanosine
tatctttgttgtcagcagcaatg

SEQ ID NO: 12113 - RNA, 23 nt, synthetic construct
  source 1..23: mol_type = other RNA
  modified_base 1: mod_base = OTHER; note = 2'-O-methyluridine-3'-phosphorothioate 5'-(E)-Vinylphosphonate
  modified_base 2: mod_base = OTHER; note = 2'-deoxy-2'-fluoroadenosine-3'-phosphorothioate
  modified_base 3: mod_base = OTHER; note = 2'-O-methyluridine-3'-phosphate
  modified_base 4: mod_base = OTHER; note = 2'-O-methylguanosine-3'-phosphate
  modified_base 5: mod_base = OTHER; note = 2'-O-methyluridine-3'-phosphate
  modified_base 6: mod_base = OTHER; note = 2'-deoxy-2'-fluorouridine-3'-phosphate
  modified_base 7: mod_base = OTHER; note = 2'-O-methyluridine-3'-phosphate
  modified_base 8: mod_base = OTHER; note = 2'-O-methyluridine-3'-phosphate
  modified_base 9: mod_base = OTHER; note = 2'-O-methylcytidine-3'-phosphate
  modified_base 10: mod_base = OTHER; note = 2'-O-methyladenosine-3'-phosphate
  modified_base 11: mod_base = OTHER; note = 2'-O-methyluridine-3'-phosphate
  modified_base 12: mod_base = OTHER; note = 2'-O-methylguanosine-3'-phosphate
  modified_base 13: mod_base = OTHER; note = 2'-O-methyluridine-3'-phosphate
  modified_base 14: mod_base = OTHER; note = 2'-deoxy-2'-fluorocytidine-3'-phosphate
  modified_base 15: mod_base = OTHER; note = 2'-O-methylguanosine-3'-phosphate
  modified_base 16: mod_base = OTHER; note = 2'-deoxy-2'-fluorocytidine-3'-phosphate
  modified_base 17: mod_base = OTHER; note = 2'-O-methyladenosine-3'-phosphate
  modified_base 18: mod_base = OTHER; note = 2'-O-methylguanosine-3'-phosphate
  modified_base 19: mod_base = OTHER; note = 2'-O-methylcytidine-3'-phosphate
  modified_base 20: mod_base = OTHER; note = 2'-O-methyladenosine-3'-phosphate
  modified_base 21: mod_base = OTHER; note = 2'-O-methyluridine-3'-phosphorothioate
  modified_base 22: mod_base = OTHER; note = 2'-O-methylguanosine-3'-phosphorothioate
  modified_base 23: mod_base = OTHER; note = 2'-O-methyladenosine
tatgttttcatgtcgcagcatga

SEQ ID NO: 12114 - RNA, 23 nt, synthetic construct
  source 1..23: mol_type = other RNA
  modified_base 1: mod_base = OTHER; note = 2'-O-methyluridine-3'-phosphorothioate 5'-(E)-Vinylphosphonate
  modified_base 2: mod_base = OTHER; note = 2'-deoxy-2'-fluoroadenosine-3'-phosphorothioate
  modified_base 3: mod_base = OTHER; note = 2'-O-methylguanosine-3'-phosphate
  modified_base 4: mod_base = OTHER; note = 2'-O-methylguanosine-3'-phosphate
  modified_base 5: mod_base = OTHER; note = 2'-O-methyladenosine-3'-phosphate
  modified_base 6: mod_base = OTHER; note = 2'-deoxy-2'-fluorouridine-3'-phosphate
  modified_base 7: mod_base = OTHER; note = 2'-O-methylguanosine-3'-phosphate
  modified_base 8: mod_base = OTHER; note = 2'-O-methyluridine-3'-phosphate
  modified_base 9: mod_base = OTHER; note = 2'-O-methyluridine-3'-phosphate
  modified_base 10: mod_base = OTHER; note = 2'-O-methyluridine-3'-phosphate
  modified_base 11: mod_base = OTHER; note = 2'-O-methyluridine-3'-phosphate
  modified_base 12: mod_base = OTHER; note = 2'-O-methylcytidine-3'-phosphate
  modified_base 13: mod_base = OTHER; note = 2'-O-methyladenosine-3'-phosphate
  modified_base 14: mod_base = OTHER; note = 2'-deoxy-2'-fluorouridine-3'-phosphate
  modified_base 15: mod_base = OTHER; note = 2'-O-methylguanosine-3'-phosphate
  modified_base 16: mod_base = OTHER; note = 2'-deoxy-2'-fluorouridine-3'-phosphate
  modified_base 17: mod_base = OTHER; note = 2'-O-methylcytidine-3'-phosphate
  modified_base 18: mod_base = OTHER; note = 2'-O-methylguanosine-3'-phosphate
  modified_base 19: mod_base = OTHER; note = 2'-O-methylcytidine-3'-phosphate
  modified_base 20: mod_base = OTHER; note = 2'-O-methyladenosine-3'-phosphate
  modified_base 21: mod_base = OTHER; note = 2'-O-methylguanosine-3'-phosphorothioate
  modified_base 22: mod_base = OTHER; note = 2'-O-methylcytidine-3'-phosphorothioate
  modified_base 23: mod_base = OTHER; note = 2'-O-methyladenosine
taggatgttttcatgtcgcagca

SEQ ID NO: 12115 - RNA, 23 nt, synthetic construct
  source 1..23: mol_type = other RNA
  modified_base 1: mod_base = OTHER; note = 2'-O-methyluridine-3'-phosphorothioate 5'-(E)-Vinylphosphonate
  modified_base 2: mod_base = OTHER; note = 2'-deoxy-2'-fluorocytidine-3'-phosphorothioate
  modified_base 3: mod_base = OTHER; note = 2'-O-methyladenosine-3'-phosphate
  modified_base 4: mod_base = OTHER; note = 2'-O-methyladenosine-3'-phosphate
  modified_base 5: mod_base = OTHER; note = 2'-O-methylguanosine-3'-phosphate
  modified_base 6: mod_base = OTHER; note = 2'-deoxy-2'-fluoroguanosine-3'-phosphate
  modified_base 7: mod_base = OTHER; note = 2'-O-methyladenosine-3'-phosphate
  modified_base 8: mod_base = OTHER; note = 2'-O-methyluridine-3'-phosphate
  modified_base 9: mod_base = OTHER; note = 2'-O-methylguanosine-3'-phosphate
  modified_base 10: mod_base = OTHER; note = 2'-O-methyluridine-3'-phosphate
  modified_base 11: mod_base = OTHER; note = 2'-O-methyluridine-3'-phosphate
  modified_base 12: mod_base = OTHER; note = 2'-O-methyluridine-3'-phosphate
  modified_base 13: mod_base = OTHER; note = 2'-O-methyluridine-3'-phosphate
  modified_base 14: mod_base = OTHER; note = 2'-deoxy-2'-fluorocytidine-3'-phosphate
  modified_base 15: mod_base = OTHER; note = 2'-O-methyladenosine-3'-phosphate
  modified_base 16: mod_base = OTHER; note = 2'-deoxy-2'-fluorouridine-3'-phosphate
  modified_base 17: mod_base = OTHER; note = 2'-O-methylguanosine-3'-phosphate
  modified_base 18: mod_base = OTHER; note = 2'-O-methyluridine-3'-phosphate
  modified_base 19: mod_base = OTHER; note = 2'-O-methylcytidine-3'-phosphate
  modified_base 20: mod_base = OTHER; note = 2'-O-methylguanosine-3'-phosphate
  modified_base 21: mod_base = OTHER; note = 2'-O-methylcytidine-3'-phosphorothioate
  modified_base 22: mod_base = OTHER; note = 2'-O-methyladenosine-3'-phosphorothioate
  modified_base 23: mod_base = OTHER; note = 2'-O-methylguanosine
tcaaggatgttttcatgtcgcag

SEQ ID NO: 12116 - RNA, 23 nt, synthetic construct
  source 1..23: mol_type = other RNA
  modified_base 1: mod_base = OTHER; note = 2'-O-methyluridine-3'-phosphorothioate 5'-(E)-Vinylphosphonate
  modified_base 2: mod_base = OTHER; note = 2'-deoxy-2'-fluoroadenosine-3'-phosphorothioate
  modified_base 3: mod_base = OTHER; note = 2'-O-methylcytidine-3'-phosphate
  modified_base 4: mod_base = OTHER; note = 2'-O-methylcytidine-3'-phosphate
  modified_base 5: mod_base = OTHER; note = 2'-O-methyladenosine-3'-phosphate
  modified_base 6: mod_base = OTHER; note = 2'-deoxy-2'-fluoroadenosine-3'-phosphate
  modified_base 7: mod_base = OTHER; note = 2'-O-methylguanosine-3'-phosphate
  modified_base 8: mod_base = OTHER; note = 2'-O-methylguanosine-3'-phosphate
  modified_base 9: mod_base = OTHER; note = 2'-O-methyladenosine-3'-phosphate
  modified_base 10: mod_base = OTHER; note = 2'-O-methyluridine-3'-phosphate
  modified_base 11: mod_base = OTHER; note = 2'-O-methylguanosine-3'-phosphate
  modified_base 12: mod_base = OTHER; note = 2'-O-methyluridine-3'-phosphate
  modified_base 13: mod_base = OTHER; note = 2'-O-methyluridine-3'-phosphate
  modified_base 14: mod_base = OTHER; note = 2'-deoxy-2'-fluorouridine-3'-phosphate
  modified_base 15: mod_base = OTHER; note = 2'-O-methyluridine-3'-phosphate
  modified_base 16: mod_base = OTHER; note = 2'-deoxy-2'-fluorocytidine-3'-phosphate
  modified_base 17: mod_base = OTHER; note = 2'-O-methyladenosine-3'-phosphate
  modified_base 18: mod_base = OTHER; note = 2'-O-methyluridine-3'-phosphate
  modified_base 19: mod_base = OTHER; note = 2'-O-methylguanosine-3'-phosphate
  modified_base 20: mod_base = OTHER; note = 2'-O-methyluridine-3'-phosphate
  modified_base 21: mod_base = OTHER; note = 2'-O-methylcytidine-3'-phosphorothioate
  modified_base 22: mod_base = OTHER; note = 2'-O-methylguanosine-3'-phosphorothioate
  modified_base 23: mod_base = OTHER; note = 2'-O-methylcytidine
taccaaggatgttttcatgtcgc

SEQ ID NO: 12117 - RNA, 23 nt, synthetic construct
  source 1..23: mol_type = other RNA
  modified_base 1: mod_base = OTHER; note = 2'-O-methyluridine-3'-phosphorothioate 5'-(E)-Vinylphosphonate
  modified_base 2: mod_base = OTHER; note = 2'-deoxy-2'-fluoroadenosine-3'-phosphorothioate
  modified_base 3: mod_base = OTHER; note = 2'-O-methyladenosine-3'-phosphate
  modified_base 4: mod_base = OTHER; note = 2'-O-methylcytidine-3'-phosphate
  modified_base 5: mod_base = OTHER; note = 2'-O-methylcytidine-3'-phosphate
  modified_base 6: mod_base = OTHER; note = 2'-deoxy-2'-fluoroadenosine-3'-phosphate
  modified_base 7: mod_base = OTHER; note = 2'-O-methyladenosine-3'-phosphate
  modified_base 8: mod_base = OTHER; note = 2'-O-methylguanosine-3'-phosphate
  modified_base 9: mod_base = OTHER; note = 2'-O-methylguanosine-3'-phosphate
  modified_base 10: mod_base = OTHER; note = 2'-O-methyladenosine-3'-phosphate
  modified_base 11: mod_base = OTHER; note = 2'-O-methyluridine-3'-phosphate
  modified_base 12: mod_base = OTHER; note = 2'-O-methylguanosine-3'-phosphate
  modified_base 13: mod_base = OTHER; note = 2'-O-methyluridine-3'-phosphate
  modified_base 14: mod_base = OTHER; note = 2'-deoxy-2'-fluorouridine-3'-phosphate
  modified_base 15: mod_base = OTHER; note = 2'-O-methyluridine-3'-phosphate
  modified_base 16: mod_base = OTHER; note = 2'-deoxy-2'-fluorouridine-3'-phosphate
  modified_base 17: mod_base = OTHER; note = 2'-O-methylcytidine-3'-phosphate
  modified_base 18: mod_base = OTHER; note = 2'-O-methyladenosine-3'-phosphate
  modified_base 19: mod_base = OTHER; note = 2'-O-methyluridine-3'-phosphate
  modified_base 20: mod_base = OTHER; note = 2'-O-methylguanosine-3'-phosphate
  modified_base 21: mod_base = OTHER; note = 2'-O-methyluridine-3'-phosphorothioate
  modified_base 22: mod_base = OTHER; note = 2'-O-methylcytidine-3'-phosphorothioate
  modified_base 23: mod_base = OTHER; note = 2'-O-methylguanosine
taaccaaggatgttttcatgtcg

SEQ ID NO: 12118 - RNA, 23 nt, synthetic construct
  source 1..23: mol_type = other RNA
  modified_base 1: mod_base = OTHER; note = 2'-O-methyluridine-3'-phosphorothioate 5'-(E)-Vinylphosphonate
  modified_base 2: mod_base = OTHER; note = 2'-deoxy-2'-fluoroadenosine-3'-phosphorothioate
  modified_base 3: mod_base = OTHER; note = 2'-O-methyladenosine-3'-phosphate
  modified_base 4: mod_base = OTHER; note = 2'-O-methyladenosine-3'-phosphate
  modified_base 5: mod_base = OTHER; note = 2'-O-methylcytidine-3'-phosphate
  modified_base 6: mod_base = OTHER; note = 2'-deoxy-2'-fluorocytidine-3'-phosphate
  modified_base 7: mod_base = OTHER; note = 2'-O-methyladenosine-3'-phosphate
  modified_base 8: mod_base = OTHER; note = 2'-O-methyladenosine-3'-phosphate
  modified_base 9: mod_base = OTHER; note = 2'-O-methylguanosine-3'-phosphate
  modified_base 10: mod_base = OTHER; note = 2'-O-methylguanosine-3'-phosphate
  modified_base 11: mod_base = OTHER; note = 2'-O-methyladenosine-3'-phosphate
  modified_base 12: mod_base = OTHER; note = 2'-O-methyluridine-3'-phosphate
  modified_base 13: mod_base = OTHER; note = 2'-O-methylguanosine-3'-phosphate
  modified_base 14: mod_base = OTHER; note = 2'-deoxy-2'-fluorouridine-3'-phosphate
  modified_base 15: mod_base = OTHER; note = 2'-O-methyluridine-3'-phosphate
  modified_base 16: mod_base = OTHER; note = 2'-deoxy-2'-fluorouridine-3'-phosphate
  modified_base 17: mod_base = OTHER; note = 2'-O-methyluridine-3'-phosphate
  modified_base 18: mod_base = OTHER; note = 2'-O-methylcytidine-3'-phosphate
  modified_base 19: mod_base = OTHER; note = 2'-O-methyladenosine-3'-phosphate
  modified_base 20: mod_base = OTHER; note = 2'-O-methyluridine-3'-phosphate
  modified_base 21: mod_base = OTHER; note = 2'-O-methylguanosine-3'-phosphorothioate
  modified_base 22: mod_base = OTHER; note = 2'-O-methyluridine-3'-phosphorothioate
  modified_base 23: mod_base = OTHER; note = 2'-O-methylcytidine
taaaccaaggatgttttcatgtc

SEQ ID NO: 12119 - RNA, 23 nt, synthetic construct
  source 1..23: mol_type = other RNA
  modified_base 1: mod_base = OTHER; note = 2'-O-methyluridine-3'-phosphorothioate 5'-(E)-Vinylphosphonate
  modified_base 2: mod_base = OTHER; note = 2'-deoxy-2'-fluoroadenosine-3'-phosphorothioate
  modified_base 3: mod_base = OTHER; note = 2'-O-methyluridine-3'-phosphate
  modified_base 4: mod_base = OTHER; note = 2'-O-methylguanosine-3'-phosphate
  modified_base 5: mod_base = OTHER; note = 2'-O-methyladenosine-3'-phosphate
  modified_base 6: mod_base = OTHER; note = 2'-deoxy-2'-fluoroadenosine-3'-phosphate
  modified_base 7: mod_base = OTHER; note = 2'-O-methyladenosine-3'-phosphate
  modified_base 8: mod_base = OTHER; note = 2'-O-methylcytidine-3'-phosphate
  modified_base 9: mod_base = OTHER; note = 2'-O-methylcytidine-3'-phosphate
  modified_base 10: mod_base = OTHER; note = 2'-O-methyladenosine-3'-phosphate
  modified_base 11: mod_base = OTHER; note = 2'-O-methyladenosine-3'-phosphate
  modified_base 12: mod_base = OTHER; note = 2'-O-methylguanosine-3'-phosphate
  modified_base 13: mod_base = OTHER; note = 2'-O-methylguanosine-3'-phosphate
  modified_base 14: mod_base = OTHER; note = 2'-deoxy-2'-fluoroadenosine-3'-phosphate
  modified_base 15: mod_base = OTHER; note = 2'-O-methyluridine-3'-phosphate
  modified_base 16: mod_base = OTHER; note = 2'-deoxy-2'-fluoroguanosine-3'-phosphate
  modified_base 17: mod_base = OTHER; note = 2'-O-methyluridine-3'-phosphate
  modified_base 18: mod_base = OTHER; note = 2'-O-methyluridine-3'-phosphate
  modified_base 19: mod_base = OTHER; note = 2'-O-methyluridine-3'-phosphate
  modified_base 20: mod_base = OTHER; note = 2'-O-methyluridine-3'-phosphate
  modified_base 21: mod_base = OTHER; note = 2'-O-methylcytidine-3'-phosphorothioate
  modified_base 22: mod_base = OTHER; note = 2'-O-methyladenosine-3'-phosphorothioate
  modified_base 23: mod_base = OTHER; note = 2'-O-methyluridine
tatgaaaccaaggatgttttcat

SEQ ID NO: 12120 - RNA, 23 nt, synthetic construct
  source 1..23: mol_type = other RNA
  modified_base 1: mod_base = OTHER; note = 2'-O-methyluridine-3'-phosphorothioate 5'-(E)-Vinylphosphonate
  modified_base 2: mod_base = OTHER; note = 2'-deoxy-2'-fluorocytidine-3'-phosphorothioate
  modified_base 3: mod_base = OTHER; note = 2'-O-methyladenosine-3'-phosphate
  modified_base 4: mod_base = OTHER; note = 2'-O-methylguanosine-3'-phosphate
  modified_base 5: mod_base = OTHER; note = 2'-O-methylcytidine-3'-phosphate
  modified_base 6: mod_base = OTHER; note = 2'-deoxy-2'-fluoroadenosine-3'-phosphate
  modified_base 7: mod_base = OTHER; note = 2'-O-methyladenosine-3'-phosphate
  modified_base 8: mod_base = OTHER; note = 2'-O-methyluridine-3'-phosphate
  modified_base 9: mod_base = OTHER; note = 2'-O-methylguanosine-3'-phosphate
  modified_base 10: mod_base = OTHER; note = 2'-O-methyladenosine-3'-phosphate
  modified_base 11: mod_base = OTHER; note = 2'-O-methyladenosine-3'-phosphate
  modified_base 12: mod_base = OTHER; note = 2'-O-methyladenosine-3'-phosphate
  modified_base 13: mod_base = OTHER; note = 2'-O-methylcytidine-3'-phosphate
  modified_base 14: mod_base = OTHER; note = 2'-deoxy-2'-fluorocytidine-3'-phosphate
  modified_base 15: mod_base = OTHER; note = 2'-O-methyladenosine-3'-phosphate
  modified_base 16: mod_base = OTHER; note = 2'-deoxy-2'-fluoroadenosine-3'-phosphate
  modified_base 17: mod_base = OTHER; note = 2'-O-methylguanosine-3'-phosphate
  modified_base 18: mod_base = OTHER; note = 2'-O-methylguanosine-3'-phosphate
  modified_base 19: mod_base = OTHER; note = 2'-O-methyladenosine-3'-phosphate
  modified_base 20: mod_base = OTHER; note = 2'-O-methyluridine-3'-phosphate
  modified_base 21: mod_base = OTHER; note = 2'-O-methylguanosine-3'-phosphorothioate
  modified_base 22: mod_base = OTHER; note = 2'-O-methyluridine-3'-phosphorothioate
  modified_base 23: mod_base = OTHER; note = 2'-O-methyluridine
tcagcaatgaaaccaaggatgtt

SEQ ID NO: 12121 - RNA, 23 nt, synthetic construct
  source 1..23: mol_type = other RNA
  modified_base 1: mod_base = OTHER; note = 2'-O-methyluridine-3'-phosphorothioate 5'-(E)-Vinylphosphonate
  modified_base 2: mod_base = OTHER; note = 2'-deoxy-2'-fluorouridine-3'-phosphorothioate
  modified_base 3: mod_base = OTHER; note = 2'-O-methylcytidine-3'-phosphate
  modified_base 4: mod_base = OTHER; note = 2'-O-methyladenosine-3'-phosphate
  modified_base 5: mod_base = OTHER; note = 2'-O-methylguanosine-3'-phosphate
  modified_base 6: mod_base = OTHER; note = 2'-deoxy-2'-fluorocytidine-3'-phosphate
  modified_base 7: mod_base = OTHER; note = 2'-O-methyladenosine-3'-phosphate
  modified_base 8: mod_base = OTHER; note = 2'-O-methylguanosine-3'-phosphate
  modified_base 9: mod_base = OTHER; note = 2'-O-methylcytidine-3'-phosphate
  modified_base 10: mod_base = OTHER; note = 2'-O-methyladenosine-3'-phosphate
  modified_base 11: mod_base = OTHER; note = 2'-O-methyladenosine-3'-phosphate
  modified_base 12: mod_base = OTHER; note = 2'-O-methyluridine-3'-phosphate
  modified_base 13: mod_base = OTHER; note = 2'-O-methylguanosine-3'-phosphate
  modified_base 14: mod_base = OTHER; note = 2'-deoxy-2'-fluoroadenosine-3'-phosphate
  modified_base 15: mod_base = OTHER; note = 2'-O-methyladenosine-3'-phosphate
  modified_base 16: mod_base = OTHER; note = 2'-deoxy-2'-fluoroadenosine-3'-phosphate
  modified_base 17: mod_base = OTHER; note = 2'-O-methylcytidine-3'-phosphate
  modified_base 18: mod_base = OTHER; note = 2'-O-methylcytidine-3'-phosphate
  modified_base 19: mod_base = OTHER; note = 2'-O-methyladenosine-3'-phosphate
  modified_base 20: mod_base = OTHER; note = 2'-O-methyladenosine-3'-phosphate
  modified_base 21: mod_base = OTHER; note = 2'-O-methylguanosine-3'-phosphorothioate
  modified_base 22: mod_base = OTHER; note = 2'-O-methylguanosine-3'-phosphorothioate
  modified_base 23: mod_base = OTHER; note = 2'-O-methyladenosine
ttcagcagcaatgaaaccaagga

SEQ ID NO: 12122 - RNA, 23 nt, synthetic construct
  source 1..23: mol_type = other RNA
  modified_base 1: mod_base = OTHER; note = 2'-O-methyluridine-3'-phosphorothioate 5'-(E)-Vinylphosphonate
  modified_base 2: mod_base = OTHER; note = 2'-deoxy-2'-fluorouridine-3'-phosphorothioate
  modified_base 3: mod_base = OTHER; note = 2'-O-methyluridine-3'-phosphate
  modified_base 4: mod_base = OTHER; note = 2'-O-methylguanosine-3'-phosphate
  modified_base 5: mod_base = OTHER; note = 2'-O-methyluridine-3'-phosphate
  modified_base 6: mod_base = OTHER; note = 2'-deoxy-2'-fluorocytidine-3'-phosphate
  modified_base 7: mod_base = OTHER; note = 2'-O-methyladenosine-3'-phosphate
  modified_base 8: mod_base = OTHER; note = 2'-O-methylguanosine-3'-phosphate
  modified_base 9: mod_base = OTHER; note = 2'-O-methylcytidine-3'-phosphate
  modified_base 10: mod_base = OTHER; note = 2'-O-methyladenosine-3'-phosphate
  modified_base 11: mod_base = OTHER; note = 2'-O-methylguanosine-3'-phosphate
  modified_base 12: mod_base = OTHER; note = 2'-O-methylcytidine-3'-phosphate
  modified_base 13: mod_base = OTHER; note = 2'-O-methyladenosine-3'-phosphate
  modified_base 14: mod_base = OTHER; note = 2'-deoxy-2'-fluoroadenosine-3'-phosphate
  modified_base 15: mod_base = OTHER; note = 2'-O-methyluridine-3'-phosphate
  modified_base 16: mod_base = OTHER; note = 2'-deoxy-2'-fluoroguanosine-3'-phosphate
  modified_base 17: mod_base = OTHER; note = 2'-O-methyladenosine-3'-phosphate
  modified_base 18: mod_base = OTHER; note = 2'-O-methyladenosine-3'-phosphate
  modified_base 19: mod_base = OTHER; note = 2'-O-methyladenosine-3'-phosphate
  modified_base 20: mod_base = OTHER; note = 2'-O-methylcytidine-3'-phosphate
  modified_base 21: mod_base = OTHER; note = 2'-O-methylcytidine-3'-phosphorothioate
  modified_base 22: mod_base = OTHER; note = 2'-O-methyladenosine-3'-phosphorothioate
  modified_base 23: mod_base = OTHER; note = 2'-O-methyladenosine
tttgtcagcagcaatgaaaccaa

SEQ ID NO: 12123 - RNA, 23 nt, synthetic construct
  source 1..23: mol_type = other RNA
  modified_base 1: mod_base = OTHER; note = 2'-O-methyluridine-3'-phosphorothioate 5'-(E)-Vinylphosphonate
  modified_base 2: mod_base = OTHER; note = 2'-deoxy-2'-fluorouridine-3'-phosphorothioate
  modified_base 3: mod_base = OTHER; note = 2'-O-methyluridine-3'-phosphate
  modified_base 4: mod_base = OTHER; note = 2'-O-methylguanosine-3'-phosphate
  modified_base 5: mod_base = OTHER; note = 2'-O-methyluridine-3'-phosphate
  modified_base 6: mod_base = OTHER; note = 2'-deoxy-2'-fluorouridine-3'-phosphate
  modified_base 7: mod_base = OTHER; note = 2'-O-methylguanosine-3'-phosphate
  modified_base 8: mod_base = OTHER; note = 2'-O-methyluridine-3'-phosphate
  modified_base 9: mod_base = OTHER; note = 2'-O-methylcytidine-3'-phosphate
  modified_base 10: mod_base = OTHER; note = 2'-O-methyladenosine-3'-phosphate
  modified_base 11: mod_base = OTHER; note = 2'-O-methylguanosine-3'-phosphate
  modified_base 12: mod_base = OTHER; note = 2'-O-methylcytidine-3'-phosphate
  modified_base 13: mod_base = OTHER; note = 2'-O-methyladenosine-3'-phosphate
  modified_base 14: mod_base = OTHER; note = 2'-deoxy-2'-fluoroguanosine-3'-phosphate
  modified_base 15: mod_base = OTHER; note = 2'-O-methylcytidine-3'-phosphate
  modified_base 16: mod_base = OTHER; note = 2'-deoxy-2'-fluoroadenosine-3'-phosphate
  modified_base 17: mod_base = OTHER; note = 2'-O-methyladenosine-3'-phosphate
  modified_base 18: mod_base = OTHER; note = 2'-O-methyluridine-3'-phosphate
  modified_base 19: mod_base = OTHER; note = 2'-O-methylguanosine-3'-phosphate
  modified_base 20: mod_base = OTHER; note = 2'-O-methyladenosine-3'-phosphate
  modified_base 21: mod_base = OTHER; note = 2'-O-methyladenosine-3'-phosphorothioate
  modified_base 22: mod_base = OTHER; note = 2'-O-methyladenosine-3'-phosphorothioate
  modified_base 23: mod_base = OTHER; note = 2'-O-methylcytidine
tttgttgtcagcagcaatgaaac

SEQ ID NO: 12124 - RNA, 23 nt, synthetic construct
  source 1..23: mol_type = other RNA
  modified_base 1: mod_base = OTHER; note = 2'-O-methyluridine-3'-phosphorothioate 5'-(E)-Vinylphosphonate
  modified_base 2: mod_base = OTHER; note = 2'-deoxy-2'-fluorouridine-3'-phosphorothioate
  modified_base 3: mod_base = OTHER; note = 2'-O-methyluridine-3'-phosphate
  modified_base 4: mod_base = OTHER; note = 2'-O-methyluridine-3'-phosphate
  modified_base 5: mod_base = OTHER; note = 2'-O-methylguanosine-3'-phosphate
  modified_base 6: mod_base = OTHER; note = 2'-deoxy-2'-fluorouridine-3'-phosphate
  modified_base 7: mod_base = OTHER; note = 2'-O-methyluridine-3'-phosphate
  modified_base 8: mod_base = OTHER; note = 2'-O-methylguanosine-3'-phosphate
  modified_base 9: mod_base = OTHER; note = 2'-O-methyluridine-3'-phosphate
  modified_base 10: mod_base = OTHER; note = 2'-O-methylcytidine-3'-phosphate
  modified_base 11: mod_base = OTHER; note = 2'-O-methyladenosine-3'-phosphate
  modified_base 12: mod_base = OTHER; note = 2'-O-methylguanosine-3'-phosphate
  modified_base 13: mod_base = OTHER; note = 2'-O-methylcytidine-3'-phosphate
  modified_base 14: mod_base = OTHER; note = 2'-deoxy-2'-fluoroadenosine-3'-phosphate
  modified_base 15: mod_base = OTHER; note = 2'-O-methylguanosine-3'-phosphate
  modified_base 16: mod_base = OTHER; note = 2'-deoxy-2'-fluorocytidine-3'-phosphate
  modified_base 17: mod_base = OTHER; note = 2'-O-methyladenosine-3'-phosphate
  modified_base 18: mod_base = OTHER; note = 2'-O-methyladenosine-3'-phosphate
  modified_base 19: mod_base = OTHER; note = 2'-O-methyluridine-3'-phosphate
  modified_base 20: mod_base = OTHER; note = 2'-O-methylguanosine-3'-phosphate
  modified_base 21: mod_base = OTHER; note = 2'-O-methyladenosine-3'-phosphorothioate
  modified_base 22: mod_base = OTHER; note = 2'-O-methyladenosine-3'-phosphorothioate
  modified_base 23: mod_base = OTHER; note = 2'-O-methyladenosine
ttttgttgtcagcagcaatgaaa

SEQ ID NO: 12125 - RNA, 23 nt, synthetic construct
  source 1..23: mol_type = other RNA
  modified_base 1: mod_base = OTHER; note = 2'-O-methyluridine-3'-phosphorothioate 5'-(E)-Vinylphosphonate
  modified_base 2: mod_base = OTHER; note = 2'-deoxy-2'-fluorocytidine-3'-phosphorothioate
  modified_base 3: mod_base = OTHER; note = 2'-O-methyladenosine-3'-phosphate
  modified_base 4: mod_base = OTHER; note = 2'-O-methyluridine-3'-phosphate
  modified_base 5: mod_base = OTHER; note = 2'-O-methyluridine-3'-phosphate
  modified_base 6: mod_base = OTHER; note = 2'-deoxy-2'-fluoroadenosine-3'-phosphate
  modified_base 7: mod_base = OTHER; note = 2'-O-methyluridine-3'-phosphate
  modified_base 8: mod_base = OTHER; note = 2'-O-methylcytidine-3'-phosphate
  modified_base 9: mod_base = OTHER; note = 2'-O-methyluridine-3'-phosphate
  modified_base 10: mod_base = OTHER; note = 2'-O-methyluridine-3'-phosphate
  modified_base 11: mod_base = OTHER; note = 2'-O-methyluridine-3'-phosphate
  modified_base 12: mod_base = OTHER; note = 2'-O-methylguanosine-3'-phosphate
  modified_base 13: mod_base = OTHER; note = 2'-O-methyluridine-3'-phosphate
  modified_base 14: mod_base = OTHER; note = 2'-deoxy-2'-fluorouridine-3'-phosphate
  modified_base 15: mod_base = OTHER; note = 2'-O-methylguanosine-3'-phosphate
  modified_base 16: mod_base = OTHER; note = 2'-deoxy-2'-fluorouridine-3'-phosphate
  modified_base 17: mod_base = OTHER; note = 2'-O-methylcytidine-3'-phosphate
  modified_base 18: mod_base = OTHER; note = 2'-O-methyladenosine-3'-phosphate
  modified_base 19: mod_base = OTHER; note = 2'-O-methylguanosine-3'-phosphate
  modified_base 20: mod_base = OTHER; note = 2'-O-methylcytidine-3'-phosphate
  modified_base 21: mod_base = OTHER; note = 2'-O-methyladenosine-3'-phosphorothioate
  modified_base 22: mod_base = OTHER; note = 2'-O-methylguanosine-3'-phosphorothioate
  modified_base 23: mod_base = OTHER; note = 2'-O-methylcytidine
tcattatctttgttgtcagcagc

SEQ ID NO: 12126 - RNA, 23 nt, synthetic construct
  source 1..23: mol_type = other RNA
  modified_base 1: mod_base = OTHER; note = 2'-O-methyluridine-3'-phosphorothioate 5'-(E)-Vinylphosphonate
  modified_base 2: mod_base = OTHER; note = 2'-deoxy-2'-fluorocytidine-3'-phosphorothioate
  modified_base 3: mod_base = OTHER; note = 2'-O-methylcytidine-3'-phosphate
  modified_base 4: mod_base = OTHER; note = 2'-O-methyladenosine-3'-phosphate
  modified_base 5: mod_base = OTHER; note = 2'-O-methyluridine-3'-phosphate
  modified_base 6: mod_base = OTHER; note = 2'-deoxy-2'-fluorouridine-3'-phosphate
  modified_base 7: mod_base = OTHER; note = 2'-O-methyladenosine-3'-phosphate
  modified_base 8: mod_base = OTHER; note = 2'-O-methyluridine-3'-phosphate
  modified_base 9: mod_base = OTHER; note = 2'-O-methylcytidine-3'-phosphate
  modified_base 10: mod_base = OTHER; note = 2'-O-methyluridine-3'-phosphate
  modified_base 11: mod_base = OTHER; note = 2'-O-methyluridine-3'-phosphate
  modified_base 12: mod_base = OTHER; note = 2'-O-methyluridine-3'-phosphate
  modified_base 13: mod_base = OTHER; note = 2'-O-methylguanosine-3'-phosphate
  modified_base 14: mod_base = OTHER; note = 2'-deoxy-2'-fluorouridine-3'-phosphate
  modified_base 15: mod_base = OTHER; note = 2'-O-methyluridine-3'-phosphate
  modified_base 16: mod_base = OTHER; note = 2'-deoxy-2'-fluoroguanosine-3'-phosphate
  modified_base 17: mod_base = OTHER; note = 2'-O-methyluridine-3'-phosphate
  modified_base 18: mod_base = OTHER; note = 2'-O-methylcytidine-3'-phosphate
  modified_base 19: mod_base = OTHER; note = 2'-O-methyladenosine-3'-phosphate
  modified_base 20: mod_base = OTHER; note = 2'-O-methylguanosine-3'-phosphate
  modified_base 21: mod_base = OTHER; note = 2'-O-methylcytidine-3'-phosphorothioate
  modified_base 22: mod_base = OTHER; note = 2'-O-methyladenosine-3'-phosphorothioate
  modified_base 23: mod_base = OTHER; note = 2'-O-methylguanosine
tccattatctttgttgtcagcag

SEQ ID NO: 12127 - RNA, 23 nt, synthetic construct
  source 1..23: mol_type = other RNA
  modified_base 1: mod_base = OTHER; note = 2'-O-methyluridine-3'-phosphorothioate 5'-(E)-Vinylphosphonate
  modified_base 2: mod_base = OTHER; note = 2'-deoxy-2'-fluorouridine-3'-phosphorothioate
  modified_base 3: mod_base = OTHER; note = 2'-O-methyluridine-3'-phosphate
  modified_base 4: mod_base = OTHER; note = 2'-O-methylcytidine-3'-phosphate
  modified_base 5: mod_base = OTHER; note = 2'-O-methylcytidine-3'-phosphate
  modified_base 6: mod_base = OTHER; note = 2'-deoxy-2'-fluoroadenosine-3'-phosphate
  modified_base 7: mod_base = OTHER; note = 2'-O-methyluridine-3'-phosphate
  modified_base 8: mod_base = OTHER; note = 2'-O-methyluridine-3'-phosphate
  modified_base 9: mod_base = OTHER; note = 2'-O-methyladenosine-3'-phosphate
  modified_base 10: mod_base = OTHER; note = 2'-O-methyluridine-3'-phosphate
  modified_base 11: mod_base = OTHER; note = 2'-O-methylcytidine-3'-phosphate
  modified_base 12: mod_base = OTHER; note = 2'-O-methyluridine-3'-phosphate
  modified_base 13: mod_base = OTHER; note = 2'-O-methyluridine-3'-phosphate
  modified_base 14: mod_base = OTHER; note = 2'-deoxy-2'-fluorouridine-3'-phosphate
  modified_base 15: mod_base = OTHER; note = 2'-O-methylguanosine-3'-phosphate
  modified_base 16: mod_base = OTHER; note = 2'-deoxy-2'-fluorouridine-3'-phosphate
  modified_base 17: mod_base = OTHER; note = 2'-O-methyluridine-3'-phosphate
  modified_base 18: mod_base = OTHER; note = 2'-O-methylguanosine-3'-phosphate
  modified_base 19: mod_base = OTHER; note = 2'-O-methyluridine-3'-phosphate
  modified_base 20: mod_base = OTHER; note = 2'-O-methylcytidine-3'-phosphate
  modified_base 21: mod_base = OTHER; note = 2'-O-methyladenosine-3'-phosphorothioate
  modified_base 22: mod_base = OTHER; note = 2'-O-methylguanosine-3'-phosphorothioate
  modified_base 23: mod_base = OTHER; note = 2'-O-methylcytidine
tttccattatctttgttgtcagc

SEQ ID NO: 12128 - RNA, 23 nt, synthetic construct
  source 1..23: mol_type = other RNA
  modified_base 1: mod_base = OTHER; note = 2'-O-methyluridine-3'-phosphorothioate 5'-(E)-Vinylphosphonate
  modified_base 2: mod_base = OTHER; note = 2'-deoxy-2'-fluoroguanosine-3'-phosphorothioate
  modified_base 3: mod_base = OTHER; note = 2'-O-methyluridine-3'-phosphate
  modified_base 4: mod_base = OTHER; note = 2'-O-methyluridine-3'-phosphate
  modified_base 5: mod_base = OTHER; note = 2'-O-methylcytidine-3'-phosphate
  modified_base 6: mod_base = OTHER; note = 2'-deoxy-2'-fluorocytidine-3'-phosphate
  modified_base 7: mod_base = OTHER; note = 2'-O-methyladenosine-3'-phosphate
  modified_base 8: mod_base = OTHER; note = 2'-O-methyluridine-3'-phosphate
  modified_base 9: mod_base = OTHER; note = 2'-O-methyluridine-3'-phosphate
  modified_base 10: mod_base = OTHER; note = 2'-O-methyladenosine-3'-phosphate
  modified_base 11: mod_base = OTHER; note = 2'-O-methyluridine-3'-phosphate
  modified_base 12: mod_base = OTHER; note = 2'-O-methylcytidine-3'-phosphate
  modified_base 13: mod_base = OTHER; note = 2'-O-methyluridine-3'-phosphate
  modified_base 14: mod_base = OTHER; note = 2'-deoxy-2'-fluorouridine-3'-phosphate
  modified_base 15: mod_base = OTHER; note = 2'-O-methyluridine-3'-phosphate
  modified_base 16: mod_base = OTHER; note = 2'-deoxy-2'-fluoroguanosine-3'-phosphate
  modified_base 17: mod_base = OTHER; note = 2'-O-methyluridine-3'-phosphate
  modified_base 18: mod_base = OTHER; note = 2'-O-methyluridine-3'-phosphate
  modified_base 19: mod_base = OTHER; note = 2'-O-methylguanosine-3'-phosphate
  modified_base 20: mod_base = OTHER; note = 2'-O-methyluridine-3'-phosphate
  modified_base 21: mod_base = OTHER; note = 2'-O-methylcytidine-3'-phosphorothioate
  modified_base 22: mod_base = OTHER; note = 2'-O-methyladenosine-3'-phosphorothioate
  modified_base 23: mod_base = OTHER; note = 2'-O-methylguanosine
tgttccattatctttgttgtcag

SEQ ID NO: 12129 - RNA, 23 nt, synthetic construct
  source 1..23: mol_type = other RNA
  modified_base 1: mod_base = OTHER; note = 2'-O-methyluridine-3'-phosphorothioate 5'-(E)-Vinylphosphonate
  modified_base 2: mod_base = OTHER; note = 2'-deoxy-2'-fluorouridine-3'-phosphorothioate
  modified_base 3: mod_base = OTHER; note = 2'-O-methyluridine-3'-phosphate
  modified_base 4: mod_base = OTHER; note = 2'-O-methylcytidine-3'-phosphate
  modified_base 5: mod_base = OTHER; note = 2'-O-methyladenosine-3'-phosphate
  modified_base 6: mod_base = OTHER; note = 2'-deoxy-2'-fluorouridine-3'-phosphate
  modified_base 7: mod_base = OTHER; note = 2'-O-methylguanosine-3'-phosphate
  modified_base 8: mod_base = OTHER; note = 2'-O-methyladenosine-3'-phosphate
  modified_base 9: mod_base = OTHER; note = 2'-O-methyluridine-3'-phosphate
  modified_base 10: mod_base = OTHER; note = 2'-O-methyladenosine-3'-phosphate
  modified_base 11: mod_base = OTHER; note = 2'-O-methyluridine-3'-phosphate
  modified_base 12: mod_base = OTHER; note = 2'-O-methyluridine-3'-phosphate
  modified_base 13: mod_base = OTHER; note = 2'-O-methylcytidine-3'-phosphate
  modified_base 14: mod_base = OTHER; note = 2'-deoxy-2'-fluoroadenosine-3'-phosphate
  modified_base 15: mod_base = OTHER; note = 2'-O-methylguanosine-3'-phosphate
  modified_base 16: mod_base = OTHER; note = 2'-deoxy-2'-fluoroadenosine-3'-phosphate
  modified_base 17: mod_base = OTHER; note = 2'-O-methyluridine-3'-phosphate
  modified_base 18: mod_base = OTHER; note = 2'-O-methyladenosine-3'-phosphate
  modified_base 19: mod_base = OTHER; note = 2'-O-methylcytidine-3'-phosphate
  modified_base 20: mod_base = OTHER; note = 2'-O-methylcytidine-3'-phosphate
  modified_base 21: mod_base = OTHER; note = 2'-O-methyladenosine-3'-phosphorothioate
  modified_base 22: mod_base = OTHER; note = 2'-O-methylguanosine-3'-phosphorothioate
  modified_base 23: mod_base = OTHER; note = 2'-O-methylcytidine
tttcatgatattcagataccagc

SEQ ID NO: 12130 - RNA, 23 nt, synthetic construct
  source 1..23: mol_type = other RNA
  modified_base 1: mod_base = OTHER; note = 2'-O-methyluridine-3'-phosphorothioate 5'-(E)-Vinylphosphonate
  modified_base 2: mod_base = OTHER; note = 2'-deoxy-2'-fluorocytidine-3'-phosphorothioate
  modified_base 3: mod_base = OTHER; note = 2'-O-methyladenosine-3'-phosphate
  modified_base 4: mod_base = OTHER; note = 2'-O-methyladenosine-3'-phosphate
  modified_base 5: mod_base = OTHER; note = 2'-O-methylguanosine-3'-phosphate
  modified_base 6: mod_base = OTHER; note = 2'-deoxy-2'-fluorouridine-3'-phosphate
  modified_base 7: mod_base = OTHER; note = 2'-O-methyluridine-3'-phosphate
  modified_base 8: mod_base = OTHER; note = 2'-O-methylcytidine-3'-phosphate
  modified_base 9: mod_base = OTHER; note = 2'-O-methylcytidine-3'-phosphate
  modified_base 10: mod_base = OTHER; note = 2'-O-methyladenosine-3'-phosphate
  modified_base 11: mod_base = OTHER; note = 2'-O-methyluridine-3'-phosphate
  modified_base 12: mod_base = OTHER; note = 2'-O-methyluridine-3'-phosphate
  modified_base 13: mod_base = OTHER; note = 2'-O-methyladenosine-3'-phosphate
  modified_base 14: mod_base = OTHER; note = 2'-deoxy-2'-fluorouridine-3'-phosphate
  modified_base 15: mod_base = OTHER; note = 2'-O-methylcytidine-3'-phosphate
  modified_base 16: mod_base = OTHER; note = 2'-deoxy-2'-fluorouridine-3'-phosphate
  modified_base 17: mod_base = OTHER; note = 2'-O-methyluridine-3'-phosphate
  modified_base 18: mod_base = OTHER; note = 2'-O-methyluridine-3'-phosphate
  modified_base 19: mod_base = OTHER; note = 2'-O-methylguanosine-3'-phosphate
  modified_base 20: mod_base = OTHER; note = 2'-O-methyluridine-3'-phosphate
  modified_base 21: mod_base = OTHER; note = 2'-O-methyluridine-3'-phosphorothioate
  modified_base 22: mod_base = OTHER; note = 2'-O-methylguanosine-3'-phosphorothioate
  modified_base 23: mod_base = OTHER; note = 2'-O-methyluridine
tcaagttccattatctttgttgt

SEQ ID NO: 12131 - RNA, 23 nt, synthetic construct
  source 1..23: mol_type = other RNA
  modified_base 1: mod_base = OTHER; note = 2'-O-methyluridine-3'-phosphorothioate 5'-(E)-Vinylphosphonate
  modified_base 2: mod_base = OTHER; note = 2'-deoxy-2'-fluoroadenosine-3'-phosphorothioate
  modified_base 3: mod_base = OTHER; note = 2'-O-methyluridine-3'-phosphate
  modified_base 4: mod_base = OTHER; note = 2'-O-methyluridine-3'-phosphate
  modified_base 5: mod_base = OTHER; note = 2'-O-methylcytidine-3'-phosphate
  modified_base 6: mod_base = OTHER; note = 2'-deoxy-2'-fluoroadenosine-3'-phosphate
  modified_base 7: mod_base = OTHER; note = 2'-O-methylguanosine-3'-phosphate
  modified_base 8: mod_base = OTHER; note = 2'-O-methyladenosine-3'-phosphate
  modified_base 9: mod_base = OTHER; note = 2'-O-methyluridine-3'-phosphate
  modified_base 10: mod_base = OTHER; note = 2'-O-methyladenosine-3'-phosphate
  modified_base 11: mod_base = OTHER; note = 2'-O-methylcytidine-3'-phosphate
  modified_base 12: mod_base = OTHER; note = 2'-O-methylcytidine-3'-phosphate
  modified_base 13: mod_base = OTHER; note = 2'-O-methyladenosine-3'-phosphate
  modified_base 14: mod_base = OTHER; note = 2'-deoxy-2'-fluoroguanosine-3'-phosphate
  modified_base 15: mod_base = OTHER; note = 2'-O-methylcytidine-3'-phosphate
  modified_base 16: mod_base = OTHER; note = 2'-deoxy-2'-fluorocytidine-3'-phosphate
  modified_base 17: mod_base = OTHER; note = 2'-O-methyladenosine-3'-phosphate
  modified_base 18: mod_base = OTHER; note = 2'-O-methyladenosine-3'-phosphate
  modified_base 19: mod_base = OTHER; note = 2'-O-methyladenosine-3'-phosphate
  modified_base 20: mod_base = OTHER; note = 2'-O-methylguanosine-3'-phosphate
  modified_base 21: mod_base = OTHER; note = 2'-O-methyluridine-3'-phosphorothioate
  modified_base 22: mod_base = OTHER; note = 2'-O-methyluridine-3'-phosphorothioate
  modified_base 23: mod_base = OTHER; note = 2'-O-methylguanosine
tattcagataccagccaaagttg

SEQ ID NO: 12132 - RNA, 23 nt, synthetic construct
  source 1..23: mol_type = other RNA
  modified_base 1: mod_base = OTHER; note = 2'-O-methyluridine-3'-phosphorothioate 5'-(E)-Vinylphosphonate
  modified_base 2: mod_base = OTHER; note = 2'-deoxy-2'-fluoroadenosine-3'-phosphorothioate
  modified_base 3: mod_base = OTHER; note = 2'-O-methyluridine-3'-phosphate
  modified_base 4: mod_base = OTHER; note = 2'-O-methyladenosine-3'-phosphate
  modified_base 5: mod_base = OTHER; note = 2'-O-methyluridine-3'-phosphate
  modified_base 6: mod_base = OTHER; note = 2'-deoxy-2'-fluorouridine-3'-phosphate
  modified_base 7: mod_base = OTHER; note = 2'-O-methylcytidine-3'-phosphate
  modified_base 8: mod_base = OTHER; note = 2'-O-methyladenosine-3'-phosphate
  modified_base 9: mod_base = OTHER; note = 2'-O-methylguanosine-3'-phosphate
  modified_base 10: mod_base = OTHER; note = 2'-O-methyladenosine-3'-phosphate
  modified_base 11: mod_base = OTHER; note = 2'-O-methyluridine-3'-phosphate
  modified_base 12: mod_base = OTHER; note = 2'-O-methyladenosine-3'-phosphate
  modified_base 13: mod_base = OTHER; note = 2'-O-methylcytidine-3'-phosphate
  modified_base 14: mod_base = OTHER; note = 2'-deoxy-2'-fluorocytidine-3'-phosphate
  modified_base 15: mod_base = OTHER; note = 2'-O-methyladenosine-3'-phosphate
  modified_base 16: mod_base = OTHER; note = 2'-deoxy-2'-fluoroguanosine-3'-phosphate
  modified_base 17: mod_base = OTHER; note = 2'-O-methylcytidine-3'-phosphate
  modified_base 18: mod_base = OTHER; note = 2'-O-methylcytidine-3'-phosphate
  modified_base 19: mod_base = OTHER; note = 2'-O-methyladenosine-3'-phosphate
  modified_base 20: mod_base = OTHER; note = 2'-O-methyladenosine-3'-phosphate
  modified_base 21: mod_base = OTHER; note = 2'-O-methyladenosine-3'-phosphorothioate
  modified_base 22: mod_base = OTHER; note = 2'-O-methylguanosine-3'-phosphorothioate
  modified_base 23: mod_base = OTHER; note = 2'-O-methyluridine
tatattcagataccagccaaagt

SEQ ID NO: 12133 - RNA, 23 nt, synthetic construct
  source 1..23: mol_type = other RNA
  modified_base 1: mod_base = OTHER; note = 2'-O-methyluridine-3'-phosphorothioate 5'-(E)-Vinylphosphonate
  modified_base 2: mod_base = OTHER; note = 2'-deoxy-2'-fluoroguanosine-3'-phosphorothioate
  modified_base 3: mod_base = OTHER; note = 2'-O-methyladenosine-3'-phosphate
  modified_base 4: mod_base = OTHER; note = 2'-O-methyluridine-3'-phosphate
  modified_base 5: mod_base = OTHER; note = 2'-O-methyladenosine-3'-phosphate
  modified_base 6: mod_base = OTHER; note = 2'-deoxy-2'-fluorouridine-3'-phosphate
  modified_base 7: mod_base = OTHER; note = 2'-O-methyluridine-3'-phosphate
  modified_base 8: mod_base = OTHER; note = 2'-O-methylcytidine-3'-phosphate
  modified_base 9: mod_base = OTHER; note = 2'-O-methyladenosine-3'-phosphate
  modified_base 10: mod_base = OTHER; note = 2'-O-methylguanosine-3'-phosphate
  modified_base 11: mod_base = OTHER; note = 2'-O-methyladenosine-3'-phosphate
  modified_base 12: mod_base = OTHER; note = 2'-O-methyluridine-3'-phosphate
  modified_base 13: mod_base = OTHER; note = 2'-O-methyladenosine-3'-phosphate
  modified_base 14: mod_base = OTHER; note = 2'-deoxy-2'-fluorocytidine-3'-phosphate
  modified_base 15: mod_base = OTHER; note = 2'-O-methylcytidine-3'-phosphate
  modified_base 16: mod_base = OTHER; note = 2'-deoxy-2'-fluoroadenosine-3'-phosphate
  modified_base 17: mod_base = OTHER; note = 2'-O-methylguanosine-3'-phosphate
  modified_base 18: mod_base = OTHER; note = 2'-O-methylcytidine-3'-phosphate
  modified_base 19: mod_base = OTHER; note = 2'-O-methylcytidine-3'-phosphate
  modified_base 20: mod_base = OTHER; note = 2'-O-methyladenosine-3'-phosphate
  modified_base 21: mod_base = OTHER; note = 2'-O-methyladenosine-3'-phosphorothioate
  modified_base 22: mod_base = OTHER; note = 2'-O-methyladenosine-3'-phosphorothioate
  modified_base 23: mod_base = OTHER; note = 2'-O-methylguanosine
tgatattcagataccagccaaag

SEQ ID NO: 12134 - RNA, 23 nt, synthetic construct
  source 1..23: mol_type = other RNA
  modified_base 1: mod_base = OTHER; note = 2'-O-methyluridine-3'-phosphorothioate 5'-(E)-Vinylphosphonate
  modified_base 2: mod_base = OTHER; note = 2'-deoxy-2'-fluorouridine-3'-phosphorothioate
  modified_base 3: mod_base = OTHER; note = 2'-O-methylguanosine-3'-phosphate
  modified_base 4: mod_base = OTHER; note = 2'-O-methyladenosine-3'-phosphate
  modified_base 5: mod_base = OTHER; note = 2'-O-methyluridine-3'-phosphate
  modified_base 6: mod_base = OTHER; note = 2'-deoxy-2'-fluoroadenosine-3'-phosphate
  modified_base 7: mod_base = OTHER; note = 2'-O-methyluridine-3'-phosphate
  modified_base 8: mod_base = OTHER; note = 2'-O-methyluridine-3'-phosphate
  modified_base 9: mod_base = OTHER; note = 2'-O-methylcytidine-3'-phosphate
  modified_base 10: mod_base = OTHER; note = 2'-O-methyladenosine-3'-phosphate
  modified_base 11: mod_base = OTHER; note = 2'-O-methylguanosine-3'-phosphate
  modified_base 12: mod_base = OTHER; note = 2'-O-methyladenosine-3'-phosphate
  modified_base 13: mod_base = OTHER; note = 2'-O-methyluridine-3'-phosphate
  modified_base 14: mod_base = OTHER; note = 2'-deoxy-2'-fluoroadenosine-3'-phosphate
  modified_base 15: mod_base = OTHER; note = 2'-O-methylcytidine-3'-phosphate
  modified_base 16: mod_base = OTHER; note = 2'-deoxy-2'-fluorocytidine-3'-phosphate
  modified_base 17: mod_base = OTHER; note = 2'-O-methyladenosine-3'-phosphate
  modified_base 18: mod_base = OTHER; note = 2'-O-methylguanosine-3'-phosphate
  modified_base 19: mod_base = OTHER; note = 2'-O-methylcytidine-3'-phosphate
  modified_base 20: mod_base = OTHER; note = 2'-O-methylcytidine-3'-phosphate
  modified_base 21: mod_base = OTHER; note = 2'-O-methyladenosine-3'-phosphorothioate
  modified_base 22: mod_base = OTHER; note = 2'-O-methyladenosine-3'-phosphorothioate
  modified_base 23: mod_base = OTHER; note = 2'-O-methyladenosine
ttgatattcagataccagccaaa

SEQ ID NO: 12135 - RNA, 23 nt, synthetic construct
  source 1..23: mol_type = other RNA
  modified_base 1: mod_base = OTHER; note = 2'-O-methyluridine-3'-phosphorothioate 5'-(E)-Vinylphosphonate
  modified_base 2: mod_base = OTHER; note = 2'-deoxy-2'-fluorouridine-3'-phosphorothioate
  modified_base 3: mod_base = OTHER; note = 2'-O-methylguanosine-3'-phosphate
  modified_base 4: mod_base = OTHER; note = 2'-O-methyluridine-3'-phosphate
  modified_base 5: mod_base = OTHER; note = 2'-O-methyluridine-3'-phosphate
  modified_base 6: mod_base = OTHER; note = 2'-deoxy-2'-fluorocytidine-3'-phosphate
  modified_base 7: mod_base = OTHER; note = 2'-O-methyladenosine-3'-phosphate
  modified_base 8: mod_base = OTHER; note = 2'-O-methyluridine-3'-phosphate
  modified_base 9: mod_base = OTHER; note = 2'-O-methylguanosine-3'-phosphate
  modified_base 10: mod_base = OTHER; note = 2'-O-methyladenosine-3'-phosphate
  modified_base 11: mod_base = OTHER; note = 2'-O-methyluridine-3'-phosphate
  modified_base 12: mod_base = OTHER; note = 2'-O-methyladenosine-3'-phosphate
  modified_base 13: mod_base = OTHER; note = 2'-O-methyluridine-3'-phosphate
  modified_base 14: mod_base = OTHER; note = 2'-deoxy-2'-fluorouridine-3'-phosphate
  modified_base 15: mod_base = OTHER; note = 2'-O-methylcytidine-3'-phosphate
  modified_base 16: mod_base = OTHER; note = 2'-deoxy-2'-fluoroadenosine-3'-phosphate
  modified_base 17: mod_base = OTHER; note = 2'-O-methylguanosine-3'-phosphate
  modified_base 18: mod_base = OTHER; note = 2'-O-methyladenosine-3'-phosphate
  modified_base 19: mod_base = OTHER; note = 2'-O-methyluridine-3'-phosphate
  modified_base 20: mod_base = OTHER; note = 2'-O-methyladenosine-3'-phosphate
  modified_base 21: mod_base = OTHER; note = 2'-O-methylcytidine-3'-phosphorothioate
  modified_base 22: mod_base = OTHER; note = 2'-O-methylcytidine-3'-phosphorothioate
  modified_base 23: mod_base = OTHER; note = 2'-O-methyladenosine
ttgttcatgatattcagatacca

SEQ ID NO: 12136 - RNA, 23 nt, synthetic construct
  source 1..23: mol_type = other RNA
  modified_base 1: mod_base = OTHER; note = 2'-O-methyluridine-3'-phosphorothioate 5'-(E)-Vinylphosphonate
  modified_base 2: mod_base = OTHER; note = 2'-deoxy-2'-fluorouridine-3'-phosphorothioate
  modified_base 3: mod_base = OTHER; note = 2'-O-methyladenosine-3'-phosphate
  modified_base 4: mod_base = OTHER; note = 2'-O-methyluridine-3'-phosphate
  modified_base 5: mod_base = OTHER; note = 2'-O-methyladenosine-3'-phosphate
  modified_base 6: mod_base = OTHER; note = 2'-deoxy-2'-fluoroadenosine-3'-phosphate
  modified_base 7: mod_base = OTHER; note = 2'-O-methylguanosine-3'-phosphate
  modified_base 8: mod_base = OTHER; note = 2'-O-methylguanosine-3'-phosphate
  modified_base 9: mod_base = OTHER; note = 2'-O-methyladenosine-3'-phosphate
  modified_base 10: mod_base = OTHER; note = 2'-O-methylguanosine-3'-phosphate
  modified_base 11: mod_base = OTHER; note = 2'-O-methylcytidine-3'-phosphate
  modified_base 12: mod_base = OTHER; note = 2'-O-methylcytidine-3'-phosphate
  modified_base 13: mod_base = OTHER; note = 2'-O-methylcytidine-3'-phosphate
  modified_base 14: mod_base = OTHER; note = 2'-deoxy-2'-fluorouridine-3'-phosphate
  modified_base 15: mod_base = OTHER; note = 2'-O-methylguanosine-3'-phosphate
  modified_base 16: mod_base = OTHER; note = 2'-deoxy-2'-fluorouridine-3'-phosphate
  modified_base 17: mod_base = OTHER; note = 2'-O-methyluridine-3'-phosphate
  modified_base 18: mod_base = OTHER; note = 2'-O-methylcytidine-3'-phosphate
  modified_base 19: mod_base = OTHER; note = 2'-O-methyladenosine-3'-phosphate
  modified_base 20: mod_base = OTHER; note = 2'-O-methyluridine-3'-phosphate
  modified_base 21: mod_base = OTHER; note = 2'-O-methylguanosine-3'-phosphorothioate
  modified_base 22: mod_base = OTHER; note = 2'-O-methyladenosine-3'-phosphorothioate
  modified_base 23: mod_base = OTHER; note = 2'-O-methyluridine
ttataaggagccctgttcatgat

SEQ ID NO: 12137 - RNA, 23 nt, synthetic construct
  source 1..23: mol_type = other RNA
  modified_base 1: mod_base = OTHER; note = 2'-O-methyluridine-3'-phosphorothioate 5'-(E)-Vinylphosphonate
  modified_base 2: mod_base = OTHER; note = 2'-deoxy-2'-fluoroadenosine-3'-phosphorothioate
  modified_base 3: mod_base = OTHER; note = 2'-O-methyluridine-3'-phosphate
  modified_base 4: mod_base = OTHER; note = 2'-O-methyladenosine-3'-phosphate
  modified_base 5: mod_base = OTHER; note = 2'-O-methyluridine-3'-phosphate
  modified_base 6: mod_base = OTHER; note = 2'-deoxy-2'-fluoroadenosine-3'-phosphate
  modified_base 7: mod_base = OTHER; note = 2'-O-methyladenosine-3'-phosphate
  modified_base 8: mod_base = OTHER; note = 2'-O-methylguanosine-3'-phosphate
  modified_base 9: mod_base = OTHER; note = 2'-O-methylguanosine-3'-phosphate
  modified_base 10: mod_base = OTHER; note = 2'-O-methyladenosine-3'-phosphate
  modified_base 11: mod_base = OTHER; note = 2'-O-methylguanosine-3'-phosphate
  modified_base 12: mod_base = OTHER; note = 2'-O-methylcytidine-3'-phosphate
  modified_base 13: mod_base = OTHER; note = 2'-O-methylcytidine-3'-phosphate
  modified_base 14: mod_base = OTHER; note = 2'-deoxy-2'-fluorocytidine-3'-phosphate
  modified_base 15: mod_base = OTHER; note = 2'-O-methyluridine-3'-phosphate
  modified_base 16: mod_base = OTHER; note = 2'-deoxy-2'-fluoroguanosine-3'-phosphate
  modified_base 17: mod_base = OTHER; note = 2'-O-methyluridine-3'-phosphate
  modified_base 18: mod_base = OTHER; note = 2'-O-methyluridine-3'-phosphate
  modified_base 19: mod_base = OTHER; note = 2'-O-methylcytidine-3'-phosphate
  modified_base 20: mod_base = OTHER; note = 2'-O-methyladenosine-3'-phosphate
  modified_base 21: mod_base = OTHER; note = 2'-O-methyluridine-3'-phosphorothioate
  modified_base 22: mod_base = OTHER; note = 2'-O-methylguanosine-3'-phosphorothioate
  modified_base 23: mod_base = OTHER; note = 2'-O-methyladenosine
tatataaggagccctgttcatga

SEQ ID NO: 12138 - RNA, 23 nt, synthetic construct
  source 1..23: mol_type = other RNA
  modified_base 1: mod_base = OTHER; note = 2'-O-methyluridine-3'-phosphorothioate 5'-(E)-Vinylphosphonate
  modified_base 2: mod_base = OTHER; note = 2'-deoxy-2'-fluorouridine-3'-phosphorothioate
  modified_base 3: mod_base = OTHER; note = 2'-O-methylcytidine-3'-phosphate
  modified_base 4: mod_base = OTHER; note = 2'-O-methyladenosine-3'-phosphate
  modified_base 5: mod_base = OTHER; note = 2'-O-methyladenosine-3'-phosphate
  modified_base 6: mod_base = OTHER; note = 2'-deoxy-2'-fluoroadenosine-3'-phosphate
  modified_base 7: mod_base = OTHER; note = 2'-O-methyluridine-3'-phosphate
  modified_base 8: mod_base = OTHER; note = 2'-O-methyladenosine-3'-phosphate
  modified_base 9: mod_base = OTHER; note = 2'-O-methylguanosine-3'-phosphate
  modified_base 10: mod_base = OTHER; note = 2'-O-methyluridine-3'-phosphate
  modified_base 11: mod_base = OTHER; note = 2'-O-methylcytidine-3'-phosphate
  modified_base 12: mod_base = OTHER; note = 2'-O-methyladenosine-3'-phosphate
  modified_base 13: mod_base = OTHER; note = 2'-O-methyluridine-3'-phosphate
  modified_base 14: mod_base = OTHER; note = 2'-deoxy-2'-fluoroadenosine-3'-phosphate
  modified_base 15: mod_base = OTHER; note = 2'-O-methyluridine-3'-phosphate
  modified_base 16: mod_base = OTHER; note = 2'-deoxy-2'-fluoroadenosine-3'-phosphate
  modified_base 17: mod_base = OTHER; note = 2'-O-methyladenosine-3'-phosphate
  modified_base 18: mod_base = OTHER; note = 2'-O-methylguanosine-3'-phosphate
  modified_base 19: mod_base = OTHER; note = 2'-O-methylguanosine-3'-phosphate
  modified_base 20: mod_base = OTHER; note = 2'-O-methyladenosine-3'-phosphate
  modified_base 21: mod_base = OTHER; note = 2'-O-methylguanosine-3'-phosphorothioate
  modified_base 22: mod_base = OTHER; note = 2'-O-methylcytidine-3'-phosphorothioate
  modified_base 23: mod_base = OTHER; note = 2'-O-methylcytidine
ttcaaatagtcatataaggagcc

SEQ ID NO: 12139 - RNA, 23 nt, synthetic construct
  source 1..23: mol_type = other RNA
  modified_base 1: mod_base = OTHER; note = 2'-O-methyluridine-3'-phosphorothioate 5'-(E)-Vinylphosphonate
  modified_base 2: mod_base = OTHER; note = 2'-deoxy-2'-fluoroadenosine-3'-phosphorothioate
  modified_base 3: mod_base = OTHER; note = 2'-O-methylguanosine-3'-phosphate
  modified_base 4: mod_base = OTHER; note = 2'-O-methyluridine-3'-phosphate
  modified_base 5: mod_base = OTHER; note = 2'-O-methylcytidine-3'-phosphate
  modified_base 6: mod_base = OTHER; note = 2'-deoxy-2'-fluoroadenosine-3'-phosphate
  modified_base 7: mod_base = OTHER; note = 2'-O-methyluridine-3'-phosphate
  modified_base 8: mod_base = OTHER; note = 2'-O-methyladenosine-3'-phosphate
  modified_base 9: mod_base = OTHER; note = 2'-O-methyluridine-3'-phosphate
  modified_base 10: mod_base = OTHER; note = 2'-O-methyladenosine-3'-phosphate
  modified_base 11: mod_base = OTHER; note = 2'-O-methyladenosine-3'-phosphate
  modified_base 12: mod_base = OTHER; note = 2'-O-methylguanosine-3'-phosphate
  modified_base 13: mod_base = OTHER; note = 2'-O-methylguanosine-3'-phosphate
  modified_base 14: mod_base = OTHER; note = 2'-deoxy-2'-fluoroadenosine-3'-phosphate
  modified_base 15: mod_base = OTHER; note = 2'-O-methylguanosine-3'-phosphate
  modified_base 16: mod_base = OTHER; note = 2'-deoxy-2'-fluorocytidine-3'-phosphate
  modified_base 17: mod_base = OTHER; note = 2'-O-methylcytidine-3'-phosphate
  modified_base 18: mod_base = OTHER; note = 2'-O-methylcytidine-3'-phosphate
  modified_base 19: mod_base = OTHER; note = 2'-O-methyluridine-3'-phosphate
  modified_base 20: mod_base = OTHER; note = 2'-O-methylguanosine-3'-phosphate
  modified_base 21: mod_base = OTHER; note = 2'-O-methyluridine-3'-phosphorothioate
  modified_base 22: mod_base = OTHER; note = 2'-O-methyluridine-3'-phosphorothioate
  modified_base 23: mod_base = OTHER; note = 2'-O-methylcytidine
tagtcatataaggagccctgttc

SEQ ID NO: 12140 - RNA, 23 nt, synthetic construct
  source 1..23: mol_type = other RNA
  modified_base 1: mod_base = OTHER; note = 2'-O-methyluridine-3'-phosphorothioate 5'-(E)-Vinylphosphonate
  modified_base 2: mod_base = OTHER; note = 2'-deoxy-2'-fluorouridine-3'-phosphorothioate
  modified_base 3: mod_base = OTHER; note = 2'-O-methyladenosine-3'-phosphate
  modified_base 4: mod_base = OTHER; note = 2'-O-methylguanosine-3'-phosphate
  modified_base 5: mod_base = OTHER; note = 2'-O-methyluridine-3'-phosphate
  modified_base 6: mod_base = OTHER; note = 2'-deoxy-2'-fluorocytidine-3'-phosphate
  modified_base 7: mod_base = OTHER; note = 2'-O-methyladenosine-3'-phosphate
  modified_base 8: mod_base = OTHER; note = 2'-O-methyluridine-3'-phosphate
  modified_base 9: mod_base = OTHER; note = 2'-O-methyladenosine-3'-phosphate
  modified_base 10: mod_base = OTHER; note = 2'-O-methyluridine-3'-phosphate
  modified_base 11: mod_base = OTHER; note = 2'-O-methyladenosine-3'-phosphate
  modified_base 12: mod_base = OTHER; note = 2'-O-methyladenosine-3'-phosphate
  modified_base 13: mod_base = OTHER; note = 2'-O-methylguanosine-3'-phosphate
  modified_base 14: mod_base = OTHER; note = 2'-deoxy-2'-fluoroguanosine-3'-phosphate
  modified_base 15: mod_base = OTHER; note = 2'-O-methyladenosine-3'-phosphate
  modified_base 16: mod_base = OTHER; note = 2'-deoxy-2'-fluoroguanosine-3'-phosphate
  modified_base 17: mod_base = OTHER; note = 2'-O-methylcytidine-3'-phosphate
  modified_base 18: mod_base = OTHER; note = 2'-O-methylcytidine-3'-phosphate
  modified_base 19: mod_base = OTHER; note = 2'-O-methylcytidine-3'-phosphate
  modified_base 20: mod_base = OTHER; note = 2'-O-methyluridine-3'-phosphate
  modified_base 21: mod_base = OTHER; note = 2'-O-methylguanosine-3'-phosphorothioate
  modified_base 22: mod_base = OTHER; note = 2'-O-methyluridine-3'-phosphorothioate
  modified_base 23: mod_base = OTHER; note = 2'-O-methyluridine
ttagtcatataaggagccctgtt

SEQ ID NO: 12141 - RNA, 23 nt, synthetic construct
  source 1..23: mol_type = other RNA
  modified_base 1: mod_base = OTHER; note = 2'-O-methyluridine-3'-phosphorothioate 5'-(E)-Vinylphosphonate
  modified_base 2: mod_base = OTHER; note = 2'-deoxy-2'-fluoroadenosine-3'-phosphorothioate
  modified_base 3: mod_base = OTHER; note = 2'-O-methyluridine-3'-phosphate
  modified_base 4: mod_base = OTHER; note = 2'-O-methyladenosine-3'-phosphate
  modified_base 5: mod_base = OTHER; note = 2'-O-methylguanosine-3'-phosphate
  modified_base 6: mod_base = OTHER; note = 2'-deoxy-2'-fluorouridine-3'-phosphate
  modified_base 7: mod_base = OTHER; note = 2'-O-methylcytidine-3'-phosphate
  modified_base 8: mod_base = OTHER; note = 2'-O-methyladenosine-3'-phosphate
  modified_base 9: mod_base = OTHER; note = 2'-O-methyluridine-3'-phosphate
  modified_base 10: mod_base = OTHER; note = 2'-O-methyladenosine-3'-phosphate
  modified_base 11: mod_base = OTHER; note = 2'-O-methyluridine-3'-phosphate
  modified_base 12: mod_base = OTHER; note = 2'-O-methyladenosine-3'-phosphate
  modified_base 13: mod_base = OTHER; note = 2'-O-methyladenosine-3'-phosphate
  modified_base 14: mod_base = OTHER; note = 2'-deoxy-2'-fluoroguanosine-3'-phosphate
  modified_base 15: mod_base = OTHER; note = 2'-O-methylguanosine-3'-phosphate
  modified_base 16: mod_base = OTHER; note = 2'-deoxy-2'-fluoroadenosine-3'-phosphate
  modified_base 17: mod_base = OTHER; note = 2'-O-methylguanosine-3'-phosphate
  modified_base 18: mod_base = OTHER; note = 2'-O-methylcytidine-3'-phosphate
  modified_base 19: mod_base = OTHER; note = 2'-O-methylcytidine-3'-phosphate
  modified_base 20: mod_base = OTHER; note = 2'-O-methylcytidine-3'-phosphate
  modified_base 21: mod_base = OTHER; note = 2'-O-methyluridine-3'-phosphorothioate
  modified_base 22: mod_base = OTHER; note = 2'-O-methylguanosine-3'-phosphorothioate
  modified_base 23: mod_base = OTHER; note = 2'-O-methyluridine
tatagtcatataaggagccctgt

SEQ ID NO: 12142 - RNA, 23 nt, synthetic construct
  source 1..23: mol_type = other RNA
  modified_base 1: mod_base = OTHER; note = 2'-O-methyluridine-3'-phosphorothioate 5'-(E)-Vinylphosphonate
  modified_base 2: mod_base = OTHER; note = 2'-deoxy-2'-fluoroadenosine-3'-phosphorothioate
  modified_base 3: mod_base = OTHER; note = 2'-O-methyladenosine-3'-phosphate
  modified_base 4: mod_base = OTHER; note = 2'-O-methyluridine-3'-phosphate
  modified_base 5: mod_base = OTHER; note = 2'-O-methyladenosine-3'-phosphate
  modified_base 6: mod_base = OTHER; note = 2'-deoxy-2'-fluoroguanosine-3'-phosphate
  modified_base 7: mod_base = OTHER; note = 2'-O-methyluridine-3'-phosphate
  modified_base 8: mod_base = OTHER; note = 2'-O-methylcytidine-3'-phosphate
  modified_base 9: mod_base = OTHER; note = 2'-O-methyladenosine-3'-phosphate
  modified_base 10: mod_base = OTHER; note = 2'-O-methyluridine-3'-phosphate
  modified_base 11: mod_base = OTHER; note = 2'-O-methyladenosine-3'-phosphate
  modified_base 12: mod_base = OTHER; note = 2'-O-methyluridine-3'-phosphate
  modified_base 13: mod_base = OTHER; note = 2'-O-methyladenosine-3'-phosphate
  modified_base 14: mod_base = OTHER; note = 2'-deoxy-2'-fluoroadenosine-3'-phosphate
  modified_base 15: mod_base = OTHER; note = 2'-O-methylguanosine-3'-phosphate
  modified_base 16: mod_base = OTHER; note = 2'-deoxy-2'-fluoroguanosine-3'-phosphate
  modified_base 17: mod_base = OTHER; note = 2'-O-methyladenosine-3'-phosphate
  modified_base 18: mod_base = OTHER; note = 2'-O-methylguanosine-3'-phosphate
  modified_base 19: mod_base = OTHER; note = 2'-O-methylcytidine-3'-phosphate
  modified_base 20: mod_base = OTHER; note = 2'-O-methylcytidine-3'-phosphate
  modified_base 21: mod_base = OTHER; note = 2'-O-methylcytidine-3'-phosphorothioate
  modified_base 22: mod_base = OTHER; note = 2'-O-methyluridine-3'-phosphorothioate
  modified_base 23: mod_base = OTHER; note = 2'-O-methylguanosine
taatagtcatataaggagccctg

SEQ ID NO: 12143 - RNA, 23 nt, synthetic construct
  source 1..23: mol_type = other RNA
  modified_base 1: mod_base = OTHER; note = 2'-O-methyluridine-3'-phosphorothioate 5'-(E)-Vinylphosphonate
  modified_base 2: mod_base = OTHER; note = 2'-deoxy-2'-fluoroadenosine-3'-phosphorothioate
  modified_base 3: mod_base = OTHER; note = 2'-O-methyladenosine-3'-phosphate
  modified_base 4: mod_base = OTHER; note = 2'-O-methyladenosine-3'-phosphate
  modified_base 5: mod_base = OTHER; note = 2'-O-methyluridine-3'-phosphate
  modified_base 6: mod_base = OTHER; note = 2'-deoxy-2'-fluoroadenosine-3'-phosphate
  modified_base 7: mod_base = OTHER; note = 2'-O-methylguanosine-3'-phosphate
  modified_base 8: mod_base = OTHER; note = 2'-O-methyluridine-3'-phosphate
  modified_base 9: mod_base = OTHER; note = 2'-O-methylcytidine-3'-phosphate
  modified_base 10: mod_base = OTHER; note = 2'-O-methyladenosine-3'-phosphate
  modified_base 11: mod_base = OTHER; note = 2'-O-methyluridine-3'-phosphate
  modified_base 12: mod_base = OTHER; note = 2'-O-methyladenosine-3'-phosphate
  modified_base 13: mod_base = OTHER; note = 2'-O-methyluridine-3'-phosphate
  modified_base 14: mod_base = OTHER; note = 2'-deoxy-2'-fluoroadenosine-3'-phosphate
  modified_base 15: mod_base = OTHER; note = 2'-O-methyladenosine-3'-phosphate
  modified_base 16: mod_base = OTHER; note = 2'-deoxy-2'-fluoroguanosine-3'-phosphate
  modified_base 17: mod_base = OTHER; note = 2'-O-methylguanosine-3'-phosphate
  modified_base 18: mod_base = OTHER; note = 2'-O-methyladenosine-3'-phosphate
  modified_base 19: mod_base = OTHER; note = 2'-O-methylguanosine-3'-phosphate
  modified_base 20: mod_base = OTHER; note = 2'-O-methylcytidine-3'-phosphate
  modified_base 21: mod_base = OTHER; note = 2'-O-methylcytidine-3'-phosphorothioate
  modified_base 22: mod_base = OTHER; note = 2'-O-methylcytidine-3'-phosphorothioate
  modified_base 23: mod_base = OTHER; note = 2'-O-methyluridine
taaatagtcatataaggagccct

SEQ ID NO: 12144 - RNA, 23 nt, synthetic construct
  source 1..23: mol_type = other RNA
  modified_base 1: mod_base = OTHER; note = 2'-O-methyluridine-3'-phosphorothioate 5'-(E)-Vinylphosphonate
  modified_base 2: mod_base = OTHER; note = 2'-deoxy-2'-fluorocytidine-3'-phosphorothioate
  modified_base 3: mod_base = OTHER; note = 2'-O-methyladenosine-3'-phosphate
  modified_base 4: mod_base = OTHER; note = 2'-O-methyladenosine-3'-phosphate
  modified_base 5: mod_base = OTHER; note = 2'-O-methyladenosine-3'-phosphate
  modified_base 6: mod_base = OTHER; note = 2'-deoxy-2'-fluorouridine-3'-phosphate
  modified_base 7: mod_base = OTHER; note = 2'-O-methyladenosine-3'-phosphate
  modified_base 8: mod_base = OTHER; note = 2'-O-methylguanosine-3'-phosphate
  modified_base 9: mod_base = OTHER; note = 2'-O-methyluridine-3'-phosphate
  modified_base 10: mod_base = OTHER; note = 2'-O-methylcytidine-3'-phosphate
  modified_base 11: mod_base = OTHER; note = 2'-O-methyladenosine-3'-phosphate
  modified_base 12: mod_base = OTHER; note = 2'-O-methyluridine-3'-phosphate
  modified_base 13: mod_base = OTHER; note = 2'-O-methyladenosine-3'-phosphate
  modified_base 14: mod_base = OTHER; note = 2'-deoxy-2'-fluorouridine-3'-phosphate
  modified_base 15: mod_base = OTHER; note = 2'-O-methyladenosine-3'-phosphate
  modified_base 16: mod_base = OTHER; note = 2'-deoxy-2'-fluoroadenosine-3'-phosphate
  modified_base 17: mod_base = OTHER; note = 2'-O-methylguanosine-3'-phosphate
  modified_base 18: mod_base = OTHER; note = 2'-O-methylguanosine-3'-phosphate
  modified_base 19: mod_base = OTHER; note = 2'-O-methyladenosine-3'-phosphate
  modified_base 20: mod_base = OTHER; note = 2'-O-methylguanosine-3'-phosphate
  modified_base 21: mod_base = OTHER; note = 2'-O-methylcytidine-3'-phosphorothioate
  modified_base 22: mod_base = OTHER; note = 2'-O-methylcytidine-3'-phosphorothioate
  modified_base 23: mod_base = OTHER; note = 2'-O-methylcytidine
tcaaatagtcatataaggagccc

SEQ ID NO: 12145 - RNA, 23 nt, synthetic construct
  source 1..23: mol_type = other RNA
  modified_base 1: mod_base = OTHER; note = 2'-O-methyluridine-3'-phosphorothioate 5'-(E)-Vinylphosphonate
  modified_base 2: mod_base = OTHER; note = 2'-deoxy-2'-fluorouridine-3'-phosphorothioate
  modified_base 3: mod_base = OTHER; note = 2'-O-methyluridine-3'-phosphate
  modified_base 4: mod_base = OTHER; note = 2'-O-methylcytidine-3'-phosphate
  modified_base 5: mod_base = OTHER; note = 2'-O-methyladenosine-3'-phosphate
  modified_base 6: mod_base = OTHER; note = 2'-deoxy-2'-fluoroadenosine-3'-phosphate
  modified_base 7: mod_base = OTHER; note = 2'-O-methyladenosine-3'-phosphate
  modified_base 8: mod_base = OTHER; note = 2'-O-methyluridine-3'-phosphate
  modified_base 9: mod_base = OTHER; note = 2'-O-methyladenosine-3'-phosphate
  modified_base 10: mod_base = OTHER; note = 2'-O-methylguanosine-3'-phosphate
  modified_base 11: mod_base = OTHER; note = 2'-O-methyluridine-3'-phosphate
  modified_base 12: mod_base = OTHER; note = 2'-O-methylcytidine-3'-phosphate
  modified_base 13: mod_base = OTHER; note = 2'-O-methyladenosine-3'-phosphate
  modified_base 14: mod_base = OTHER; note = 2'-deoxy-2'-fluorouridine-3'-phosphate
  modified_base 15: mod_base = OTHER; note = 2'-O-methyladenosine-3'-phosphate
  modified_base 16: mod_base = OTHER; note = 2'-deoxy-2'-fluorouridine-3'-phosphate
  modified_base 17: mod_base = OTHER; note = 2'-O-methyladenosine-3'-phosphate
  modified_base 18: mod_base = OTHER; note = 2'-O-methyladenosine-3'-phosphate
  modified_base 19: mod_base = OTHER; note = 2'-O-methylguanosine-3'-phosphate
  modified_base 20: mod_base = OTHER; note = 2'-O-methylguanosine-3'-phosphate
  modified_base 21: mod_base = OTHER; note = 2'-O-methyladenosine-3'-phosphorothioate
  modified_base 22: mod_base = OTHER; note = 2'-O-methylguanosine-3'-phosphorothioate
  modified_base 23: mod_base = OTHER; note = 2'-O-methylcytidine
tttcaaatagtcatataaggagc

SEQ ID NO: 12146 - RNA, 23 nt, synthetic construct
  source 1..23: mol_type = other RNA
  modified_base 1: mod_base = OTHER; note = 2'-O-methyluridine-3'-phosphorothioate 5'-(E)-Vinylphosphonate
  modified_base 2: mod_base = OTHER; note = 2'-deoxy-2'-fluoroadenosine-3'-phosphorothioate
  modified_base 3: mod_base = OTHER; note = 2'-O-methyluridine-3'-phosphate
  modified_base 4: mod_base = OTHER; note = 2'-O-methyluridine-3'-phosphate
  modified_base 5: mod_base = OTHER; note = 2'-O-methylcytidine-3'-phosphate
  modified_base 6: mod_base = OTHER; note = 2'-deoxy-2'-fluoroadenosine-3'-phosphate
  modified_base 7: mod_base = OTHER; note = 2'-O-methyladenosine-3'-phosphate
  modified_base 8: mod_base = OTHER; note = 2'-O-methyladenosine-3'-phosphate
  modified_base 9: mod_base = OTHER; note = 2'-O-methyluridine-3'-phosphate
  modified_base 10: mod_base = OTHER; note = 2'-O-methyladenosine-3'-phosphate
  modified_base 11: mod_base = OTHER; note = 2'-O-methylguanosine-3'-phosphate
  modified_base 12: mod_base = OTHER; note = 2'-O-methyluridine-3'-phosphate
  modified_base 13: mod_base = OTHER; note = 2'-O-methylcytidine-3'-phosphate
  modified_base 14: mod_base = OTHER; note = 2'-deoxy-2'-fluoroadenosine-3'-phosphate
  modified_base 15: mod_base = OTHER; note = 2'-O-methyluridine-3'-phosphate
  modified_base 16: mod_base = OTHER; note = 2'-deoxy-2'-fluoroadenosine-3'-phosphate
  modified_base 17: mod_base = OTHER; note = 2'-O-methyluridine-3'-phosphate
  modified_base 18: mod_base = OTHER; note = 2'-O-methyladenosine-3'-phosphate
  modified_base 19: mod_base = OTHER; note = 2'-O-methyladenosine-3'-phosphate
  modified_base 20: mod_base = OTHER; note = 2'-O-methylguanosine-3'-phosphate
  modified_base 21: mod_base = OTHER; note = 2'-O-methylguanosine-3'-phosphorothioate
  modified_base 22: mod_base = OTHER; note = 2'-O-methyladenosine-3'-phosphorothioate
  modified_base 23: mod_base = OTHER; note = 2'-O-methylguanosine
tattcaaatagtcatataaggag

SEQ ID NO: 12147 - RNA, 23 nt, synthetic construct
  source 1..23: mol_type = other RNA
  modified_base 1: mod_base = OTHER; note = 2'-O-methyluridine-3'-phosphorothioate 5'-(E)-Vinylphosphonate
  modified_base 2: mod_base = OTHER; note = 2'-deoxy-2'-fluorocytidine-3'-phosphorothioate
  modified_base 3: mod_base = OTHER; note = 2'-O-methyluridine-3'-phosphate
  modified_base 4: mod_base = OTHER; note = 2'-O-methyladenosine-3'-phosphate
  modified_base 5: mod_base = OTHER; note = 2'-O-methyluridine-3'-phosphate
  modified_base 6: mod_base = OTHER; note = 2'-deoxy-2'-fluorouridine-3'-phosphate
  modified_base 7: mod_base = OTHER; note = 2'-O-methylcytidine-3'-phosphate
  modified_base 8: mod_base = OTHER; note = 2'-O-methyladenosine-3'-phosphate
  modified_base 9: mod_base = OTHER; note = 2'-O-methyladenosine-3'-phosphate
  modified_base 10: mod_base = OTHER; note = 2'-O-methyladenosine-3'-phosphate
  modified_base 11: mod_base = OTHER; note = 2'-O-methyluridine-3'-phosphate
  modified_base 12: mod_base = OTHER; note = 2'-O-methyladenosine-3'-phosphate
  modified_base 13: mod_base = OTHER; note = 2'-O-methylguanosine-3'-phosphate
  modified_base 14: mod_base = OTHER; note = 2'-deoxy-2'-fluorouridine-3'-phosphate
  modified_base 15: mod_base = OTHER; note = 2'-O-methylcytidine-3'-phosphate
  modified_base 16: mod_base = OTHER; note = 2'-deoxy-2'-fluoroadenosine-3'-phosphate
  modified_base 17: mod_base = OTHER; note = 2'-O-methyluridine-3'-phosphate
  modified_base 18: mod_base = OTHER; note = 2'-O-methyladenosine-3'-phosphate
  modified_base 19: mod_base = OTHER; note = 2'-O-methyluridine-3'-phosphate
  modified_base 20: mod_base = OTHER; note = 2'-O-methyladenosine-3'-phosphate
  modified_base 21: mod_base = OTHER; note = 2'-O-methyladenosine-3'-phosphorothioate
  modified_base 22: mod_base = OTHER; note = 2'-O-methylguanosine-3'-phosphorothioate
  modified_base 23: mod_base = OTHER; note = 2'-O-methylguanosine
tctattcaaatagtcatataagg

SEQ ID NO: 12148 - RNA, 23 nt, synthetic construct
  source 1..23: mol_type = other RNA
  modified_base 1: mod_base = OTHER; note = 2'-O-methyluridine-3'-phosphorothioate 5'-(E)-Vinylphosphonate
  modified_base 2: mod_base = OTHER; note = 2'-deoxy-2'-fluoroadenosine-3'-phosphorothioate
  modified_base 3: mod_base = OTHER; note = 2'-O-methyluridine-3'-phosphate
  modified_base 4: mod_base = OTHER; note = 2'-O-methylcytidine-3'-phosphate
  modified_base 5: mod_base = OTHER; note = 2'-O-methyladenosine-3'-phosphate
  modified_base 6: mod_base = OTHER; note = 2'-deoxy-2'-fluorouridine-3'-phosphate
  modified_base 7: mod_base = OTHER; note = 2'-O-methyluridine-3'-phosphate
  modified_base 8: mod_base = OTHER; note = 2'-O-methylcytidine-3'-phosphate
  modified_base 9: mod_base = OTHER; note = 2'-O-methylcytidine-3'-phosphate
  modified_base 10: mod_base = OTHER; note = 2'-O-methyladenosine-3'-phosphate
  modified_base 11: mod_base = OTHER; note = 2'-O-methylguanosine-3'-phosphate
  modified_base 12: mod_base = OTHER; note = 2'-O-methylcytidine-3'-phosphate
  modified_base 13: mod_base = OTHER; note = 2'-O-methylcytidine-3'-phosphate
  modified_base 14: mod_base = OTHER; note = 2'-deoxy-2'-fluoroadenosine-3'-phosphate
  modified_base 15: mod_base = OTHER; note = 2'-O-methylcytidine-3'-phosphate
  modified_base 16: mod_base = OTHER; note = 2'-deoxy-2'-fluoroguanosine-3'-phosphate
  modified_base 17: mod_base = OTHER; note = 2'-O-methylguanosine-3'-phosphate
  modified_base 18: mod_base = OTHER; note = 2'-O-methyluridine-3'-phosphate
  modified_base 19: mod_base = OTHER; note = 2'-O-methylcytidine-3'-phosphate
  modified_base 20: mod_base = OTHER; note = 2'-O-methyladenosine-3'-phosphate
  modified_base 21: mod_base = OTHER; note = 2'-O-methylcytidine-3'-phosphorothioate
  modified_base 22: mod_base = OTHER; note = 2'-O-methyluridine-3'-phosphorothioate
  modified_base 23: mod_base = OTHER; note = 2'-O-methyladenosine
tatcattccagccacggtcacta

SEQ ID NO: 12149 - RNA, 23 nt, synthetic construct
  source 1..23: mol_type = other RNA
  modified_base 1: mod_base = OTHER; note = 2'-O-methyluridine-3'-phosphorothioate 5'-(E)-Vinylphosphonate
  modified_base 2: mod_base = OTHER; note = 2'-deoxy-2'-fluoroguanosine-3'-phosphorothioate
  modified_base 3: mod_base = OTHER; note = 2'-O-methylcytidine-3'-phosphate
  modified_base 4: mod_base = OTHER; note = 2'-O-methyluridine-3'-phosphate
  modified_base 5: mod_base = OTHER; note = 2'-O-methyluridine-3'-phosphate
  modified_base 6: mod_base = OTHER; note = 2'-deoxy-2'-fluoroguanosine-3'-phosphate
  modified_base 7: mod_base = OTHER; note = 2'-O-methyladenosine-3'-phosphate
  modified_base 8: mod_base = OTHER; note = 2'-O-methyluridine-3'-phosphate
  modified_base 9: mod_base = OTHER; note = 2'-O-methylcytidine-3'-phosphate
  modified_base 10: mod_base = OTHER; note = 2'-O-methyladenosine-3'-phosphate
  modified_base 11: mod_base = OTHER; note = 2'-O-methyluridine-3'-phosphate
  modified_base 12: mod_base = OTHER; note = 2'-O-methyluridine-3'-phosphate
  modified_base 13: mod_base = OTHER; note = 2'-O-methylcytidine-3'-phosphate
  modified_base 14: mod_base = OTHER; note = 2'-deoxy-2'-fluorocytidine-3'-phosphate
  modified_base 15: mod_base = OTHER; note = 2'-O-methyladenosine-3'-phosphate
  modified_base 16: mod_base = OTHER; note = 2'-deoxy-2'-fluoroguanosine-3'-phosphate
  modified_base 17: mod_base = OTHER; note = 2'-O-methylcytidine-3'-phosphate
  modified_base 18: mod_base = OTHER; note = 2'-O-methylcytidine-3'-phosphate
  modified_base 19: mod_base = OTHER; note = 2'-O-methyladenosine-3'-phosphate
  modified_base 20: mod_base = OTHER; note = 2'-O-methylcytidine-3'-phosphate
  modified_base 21: mod_base = OTHER; note = 2'-O-methylguanosine-3'-phosphorothioate
  modified_base 22: mod_base = OTHER; note = 2'-O-methylguanosine-3'-phosphorothioate
  modified_base 23: mod_base = OTHER; note = 2'-O-methyluridine
tgcttgatcattccagccacggt

SEQ ID NO: 12150 - RNA, 23 nt, synthetic construct
  source 1..23: mol_type = other RNA
  modified_base 1: mod_base = OTHER; note = 2'-O-methyluridine-3'-phosphorothioate 5'-(E)-Vinylphosphonate
  modified_base 2: mod_base = OTHER; note = 2'-deoxy-2'-fluorocytidine-3'-phosphorothioate
  modified_base 3: mod_base = OTHER; note = 2'-O-methyladenosine-3'-phosphate
  modified_base 4: mod_base = OTHER; note = 2'-O-methylguanosine-3'-phosphate
  modified_base 5: mod_base = OTHER; note = 2'-O-methylcytidine-3'-phosphate
  modified_base 6: mod_base = OTHER; note = 2'-deoxy-2'-fluorouridine-3'-phosphate
  modified_base 7: mod_base = OTHER; note = 2'-O-methyluridine-3'-phosphate
  modified_base 8: mod_base = OTHER; note = 2'-O-methylguanosine-3'-phosphate
  modified_base 9: mod_base = OTHER; note = 2'-O-methyladenosine-3'-phosphate
  modified_base 10: mod_base = OTHER; note = 2'-O-methyluridine-3'-phosphate
  modified_base 11: mod_base = OTHER; note = 2'-O-methylcytidine-3'-phosphate
  modified_base 12: mod_base = OTHER; note = 2'-O-methyladenosine-3'-phosphate
  modified_base 13: mod_base = OTHER; note = 2'-O-methyluridine-3'-phosphate
  modified_base 14: mod_base = OTHER; note = 2'-deoxy-2'-fluorouridine-3'-phosphate
  modified_base 15: mod_base = OTHER; note = 2'-O-methylcytidine-3'-phosphate
  modified_base 16: mod_base = OTHER; note = 2'-deoxy-2'-fluorocytidine-3'-phosphate
  modified_base 17: mod_base = OTHER; note = 2'-O-methyladenosine-3'-phosphate
  modified_base 18: mod_base = OTHER; note = 2'-O-methylguanosine-3'-phosphate
  modified_base 19: mod_base = OTHER; note = 2'-O-methylcytidine-3'-phosphate
  modified_base 20: mod_base = OTHER; note = 2'-O-methylcytidine-3'-phosphate
  modified_base 21: mod_base = OTHER; note = 2'-O-methyladenosine-3'-phosphorothioate
  modified_base 22: mod_base = OTHER; note = 2'-O-methylcytidine-3'-phosphorothioate
  modified_base 23: mod_base = OTHER; note = 2'-O-methylguanosine
tcagcttgatcattccagccacg

SEQ ID NO: 12151 - RNA, 23 nt, synthetic construct
  source 1..23: mol_type = other RNA
  modified_base 1: mod_base = OTHER; note = 2'-O-methyluridine-3'-phosphorothioate 5'-(E)-Vinylphosphonate
  modified_base 2: mod_base = OTHER; note = 2'-deoxy-2'-fluoroadenosine-3'-phosphorothioate
  modified_base 3: mod_base = OTHER; note = 2'-O-methyladenosine-3'-phosphate
  modified_base 4: mod_base = OTHER; note = 2'-O-methyluridine-3'-phosphate
  modified_base 5: mod_base = OTHER; note = 2'-O-methylcytidine-3'-phosphate
  modified_base 6: mod_base = OTHER; note = 2'-deoxy-2'-fluorouridine-3'-phosphate
  modified_base 7: mod_base = OTHER; note = 2'-O-methylcytidine-3'-phosphate
  modified_base 8: mod_base = OTHER; note = 2'-O-methylcytidine-3'-phosphate
  modified_base 9: mod_base = OTHER; note = 2'-O-methyladenosine-3'-phosphate
  modified_base 10: mod_base = OTHER; note = 2'-O-methyluridine-3'-phosphate
  modified_base 11: mod_base = OTHER; note = 2'-O-methyladenosine-3'-phosphate
  modified_base 12: mod_base = OTHER; note = 2'-O-methyluridine-3'-phosphate
  modified_base 13: mod_base = OTHER; note = 2'-O-methylguanosine-3'-phosphate
  modified_base 14: mod_base = OTHER; note = 2'-deoxy-2'-fluoroadenosine-3'-phosphate
  modified_base 15: mod_base = OTHER; note = 2'-O-methyladenosine-3'-phosphate
  modified_base 16: mod_base = OTHER; note = 2'-deoxy-2'-fluoroguanosine-3'-phosphate
  modified_base 17: mod_base = OTHER; note = 2'-O-methylguanosine-3'-phosphate
  modified_base 18: mod_base = OTHER; note = 2'-O-methyluridine-3'-phosphate
  modified_base 19: mod_base = OTHER; note = 2'-O-methylguanosine-3'-phosphate
  modified_base 20: mod_base = OTHER; note = 2'-O-methyluridine-3'-phosphate
  modified_base 21: mod_base = OTHER; note = 2'-O-methylguanosine-3'-phosphorothioate
  modified_base 22: mod_base = OTHER; note = 2'-O-methylcytidine-3'-phosphorothioate
  modified_base 23: mod_base = OTHER; note = 2'-O-methylcytidine
taatctccatatgaaggtgtgcc

SEQ ID NO: 12152 - RNA, 23 nt, synthetic construct
  source 1..23: mol_type = other RNA
  modified_base 1: mod_base = OTHER; note = 2'-O-methyluridine-3'-phosphorothioate 5'-(E)-Vinylphosphonate
  modified_base 2: mod_base = OTHER; note = 2'-deoxy-2'-fluorocytidine-3'-phosphorothioate
  modified_base 3: mod_base = OTHER; note = 2'-O-methyladenosine-3'-phosphate
  modified_base 4: mod_base = OTHER; note = 2'-O-methylcytidine-3'-phosphate
  modified_base 5: mod_base = OTHER; note = 2'-O-methyluridine-3'-phosphate
  modified_base 6: mod_base = OTHER; note = 2'-deoxy-2'-fluoroadenosine-3'-phosphate
  modified_base 7: mod_base = OTHER; note = 2'-O-methylguanosine-3'-phosphate
  modified_base 8: mod_base = OTHER; note = 2'-O-methylcytidine-3'-phosphate
  modified_base 9: mod_base = OTHER; note = 2'-O-methyladenosine-3'-phosphate
  modified_base 10: mod_base = OTHER; note = 2'-O-methyladenosine-3'-phosphate
  modified_base 11: mod_base = OTHER; note = 2'-O-methyluridine-3'-phosphate
  modified_base 12: mod_base = OTHER; note = 2'-O-methyluridine-3'-phosphate
  modified_base 13: mod_base = OTHER; note = 2'-O-methylguanosine-3'-phosphate
  modified_base 14: mod_base = OTHER; note = 2'-deoxy-2'-fluoroadenosine-3'-phosphate
  modified_base 15: mod_base = OTHER; note = 2'-O-methylguanosine-3'-phosphate
  modified_base 16: mod_base = OTHER; note = 2'-deoxy-2'-fluoroadenosine-3'-phosphate
  modified_base 17: mod_base = OTHER; note = 2'-O-methylguanosine-3'-phosphate
  modified_base 18: mod_base = OTHER; note = 2'-O-methylcytidine-3'-phosphate
  modified_base 19: mod_base = OTHER; note = 2'-O-methylguanosine-3'-phosphate
  modified_base 20: mod_base = OTHER; note = 2'-O-methylcytidine-3'-phosphate
  modified_base 21: mod_base = OTHER; note = 2'-O-methylcytidine-3'-phosphorothioate
  modified_base 22: mod_base = OTHER; note = 2'-O-methyladenosine-3'-phosphorothioate
  modified_base 23: mod_base = OTHER; note = 2'-O-methylguanosine
tcactagcaattgagagcgccag

SEQ ID NO: 12153 - RNA, 23 nt, synthetic construct
  source 1..23: mol_type = other RNA
  modified_base 1: mod_base = OTHER; note = 2'-O-methyluridine-3'-phosphorothioate 5'-(E)-Vinylphosphonate
  modified_base 2: mod_base = OTHER; note = 2'-deoxy-2'-fluoroadenosine-3'-phosphorothioate
  modified_base 3: mod_base = OTHER; note = 2'-O-methylguanosine-3'-phosphate
  modified_base 4: mod_base = OTHER; note = 2'-O-methyladenosine-3'-phosphate
  modified_base 5: mod_base = OTHER; note = 2'-O-methylcytidine-3'-phosphate
  modified_base 6: mod_base = OTHER; note = 2'-deoxy-2'-fluorocytidine-3'-phosphate
  modified_base 7: mod_base = OTHER; note = 2'-O-methyladenosine-3'-phosphate
  modified_base 8: mod_base = OTHER; note = 2'-O-methylcytidine-3'-phosphate
  modified_base 9: mod_base = OTHER; note = 2'-O-methyluridine-3'-phosphate
  modified_base 10: mod_base = OTHER; note = 2'-O-methyladenosine-3'-phosphate
  modified_base 11: mod_base = OTHER; note = 2'-O-methylguanosine-3'-phosphate
  modified_base 12: mod_base = OTHER; note = 2'-O-methylcytidine-3'-phosphate
  modified_base 13: mod_base = OTHER; note = 2'-O-methyladenosine-3'-phosphate
  modified_base 14: mod_base = OTHER; note = 2'-deoxy-2'-fluoroadenosine-3'-phosphate
  modified_base 15: mod_base = OTHER; note = 2'-O-methyluridine-3'-phosphate
  modified_base 16: mod_base = OTHER; note = 2'-deoxy-2'-fluorouridine-3'-phosphate
  modified_base 17: mod_base = OTHER; note = 2'-O-methylguanosine-3'-phosphate
  modified_base 18: mod_base = OTHER; note = 2'-O-methyladenosine-3'-phosphate
  modified_base 19: mod_base = OTHER; note = 2'-O-methylguanosine-3'-phosphate
  modified_base 20: mod_base = OTHER; note = 2'-O-methyladenosine-3'-phosphate
  modified_base 21: mod_base = OTHER; note = 2'-O-methylguanosine-3'-phosphorothioate
  modified_base 22: mod_base = OTHER; note = 2'-O-methylcytidine-3'-phosphorothioate
  modified_base 23: mod_base = OTHER; note = 2'-O-methylguanosine
tagaccactagcaattgagagcg

SEQ ID NO: 12154 - RNA, 23 nt, synthetic construct
  source 1..23: mol_type = other RNA
  modified_base 1: mod_base = OTHER; note = 2'-O-methyluridine-3'-phosphorothioate 5'-(E)-Vinylphosphonate
  modified_base 2: mod_base = OTHER; note = 2'-deoxy-2'-fluorouridine-3'-phosphorothioate
  modified_base 3: mod_base = OTHER; note = 2'-O-methylcytidine-3'-phosphate
  modified_base 4: mod_base = OTHER; note = 2'-O-methylcytidine-3'-phosphate
  modified_base 5: mod_base = OTHER; note = 2'-O-methyladenosine-3'-phosphate
  modified_base 6: mod_base = OTHER; note = 2'-deoxy-2'-fluorouridine-3'-phosphate
  modified_base 7: mod_base = OTHER; note = 2'-O-methyladenosine-3'-phosphate
  modified_base 8: mod_base = OTHER; note = 2'-O-methyluridine-3'-phosphate
  modified_base 9: mod_base = OTHER; note = 2'-O-methylguanosine-3'-phosphate
  modified_base 10: mod_base = OTHER; note = 2'-O-methyladenosine-3'-phosphate
  modified_base 11: mod_base = OTHER; note = 2'-O-methyladenosine-3'-phosphate
  modified_base 12: mod_base = OTHER; note = 2'-O-methylguanosine-3'-phosphate
  modified_base 13: mod_base = OTHER; note = 2'-O-methylguanosine-3'-phosphate
  modified_base 14: mod_base = OTHER; note = 2'-deoxy-2'-fluorouridine-3'-phosphate
  modified_base 15: mod_base = OTHER; note = 2'-O-methylguanosine-3'-phosphate
  modified_base 16: mod_base = OTHER; note = 2'-deoxy-2'-fluorouridine-3'-phosphate
  modified_base 17: mod_base = OTHER; note = 2'-O-methylguanosine-3'-phosphate
  modified_base 18: mod_base = OTHER; note = 2'-O-methylcytidine-3'-phosphate
  modified_base 19: mod_base = OTHER; note = 2'-O-methylcytidine-3'-phosphate
  modified_base 20: mod_base = OTHER; note = 2'-O-methyladenosine-3'-phosphate
  modified_base 21: mod_base = OTHER; note = 2'-O-methylguanosine-3'-phosphorothioate
  modified_base 22: mod_base = OTHER; note = 2'-O-methyladenosine-3'-phosphorothioate
  modified_base 23: mod_base = OTHER; note = 2'-O-methylcytidine
ttccatatgaaggtgtgccagac

SEQ ID NO: 12155 - RNA, 23 nt, synthetic construct
  source 1..23: mol_type = other RNA
  modified_base 1: mod_base = OTHER; note = 2'-O-methyluridine-3'-phosphorothioate 5'-(E)-Vinylphosphonate
  modified_base 2: mod_base = OTHER; note = 2'-deoxy-2'-fluorocytidine-3'-phosphorothioate
  modified_base 3: mod_base = OTHER; note = 2'-O-methyluridine-3'-phosphate
  modified_base 4: mod_base = OTHER; note = 2'-O-methylcytidine-3'-phosphate
  modified_base 5: mod_base = OTHER; note = 2'-O-methylcytidine-3'-phosphate
  modified_base 6: mod_base = OTHER; note = 2'-deoxy-2'-fluoroadenosine-3'-phosphate
  modified_base 7: mod_base = OTHER; note = 2'-O-methyluridine-3'-phosphate
  modified_base 8: mod_base = OTHER; note = 2'-O-methyladenosine-3'-phosphate
  modified_base 9: mod_base = OTHER; note = 2'-O-methyluridine-3'-phosphate
  modified_base 10: mod_base = OTHER; note = 2'-O-methylguanosine-3'-phosphate
  modified_base 11: mod_base = OTHER; note = 2'-O-methyladenosine-3'-phosphate
  modified_base 12: mod_base = OTHER; note = 2'-O-methyladenosine-3'-phosphate
  modified_base 13: mod_base = OTHER; note = 2'-O-methylguanosine-3'-phosphate
  modified_base 14: mod_base = OTHER; note = 2'-deoxy-2'-fluoroguanosine-3'-phosphate
  modified_base 15: mod_base = OTHER; note = 2'-O-methyluridine-3'-phosphate
  modified_base 16: mod_base = OTHER; note = 2'-deoxy-2'-fluoroguanosine-3'-phosphate
  modified_base 17: mod_base = OTHER; note = 2'-O-methyluridine-3'-phosphate
  modified_base 18: mod_base = OTHER; note = 2'-O-methylguanosine-3'-phosphate
  modified_base 19: mod_base = OTHER; note = 2'-O-methylcytidine-3'-phosphate
  modified_base 20: mod_base = OTHER; note = 2'-O-methylcytidine-3'-phosphate
  modified_base 21: mod_base = OTHER; note = 2'-O-methyladenosine-3'-phosphorothioate
  modified_base 22: mod_base = OTHER; note = 2'-O-methylguanosine-3'-phosphorothioate
  modified_base 23: mod_base = OTHER; note = 2'-O-methyladenosine
tctccatatgaaggtgtgccaga

SEQ ID NO: 12156 - RNA, 23 nt, synthetic construct
  source 1..23: mol_type = other RNA
  modified_base 1: mod_base = OTHER; note = 2'-O-methyluridine-3'-phosphorothioate 5'-(E)-Vinylphosphonate
  modified_base 2: mod_base = OTHER; note = 2'-deoxy-2'-fluorouridine-3'-phosphorothioate
  modified_base 3: mod_base = OTHER; note = 2'-O-methylcytidine-3'-phosphate
  modified_base 4: mod_base = OTHER; note = 2'-O-methyluridine-3'-phosphate
  modified_base 5: mod_base = OTHER; note = 2'-O-methylcytidine-3'-phosphate
  modified_base 6: mod_base = OTHER; note = 2'-deoxy-2'-fluorocytidine-3'-phosphate
  modified_base 7: mod_base = OTHER; note = 2'-O-methyladenosine-3'-phosphate
  modified_base 8: mod_base = OTHER; note = 2'-O-methyluridine-3'-phosphate
  modified_base 9: mod_base = OTHER; note = 2'-O-methyladenosine-3'-phosphate
  modified_base 10: mod_base = OTHER; note = 2'-O-methyluridine-3'-phosphate
  modified_base 11: mod_base = OTHER; note = 2'-O-methylguanosine-3'-phosphate
  modified_base 12: mod_base = OTHER; note = 2'-O-methyladenosine-3'-phosphate
  modified_base 13: mod_base = OTHER; note = 2'-O-methyladenosine-3'-phosphate
  modified_base 14: mod_base = OTHER; note = 2'-deoxy-2'-fluoroguanosine-3'-phosphate
  modified_base 15: mod_base = OTHER; note = 2'-O-methylguanosine-3'-phosphate
  modified_base 16: mod_base = OTHER; note = 2'-deoxy-2'-fluorouridine-3'-phosphate
  modified_base 17: mod_base = OTHER; note = 2'-O-methylguanosine-3'-phosphate
  modified_base 18: mod_base = OTHER; note = 2'-O-methyluridine-3'-phosphate
  modified_base 19: mod_base = OTHER; note = 2'-O-methylguanosine-3'-phosphate
  modified_base 20: mod_base = OTHER; note = 2'-O-methylcytidine-3'-phosphate
  modified_base 21: mod_base = OTHER; note = 2'-O-methylcytidine-3'-phosphorothioate
  modified_base 22: mod_base = OTHER; note = 2'-O-methyladenosine-3'-phosphorothioate
  modified_base 23: mod_base = OTHER; note = 2'-O-methylguanosine
ttctccatatgaaggtgtgccag

SEQ ID NO: 12157 - RNA, 23 nt, synthetic construct
  source 1..23: mol_type = other RNA
  modified_base 1: mod_base = OTHER; note = 2'-O-methyluridine-3'-phosphorothioate 5'-(E)-Vinylphosphonate
  modified_base 2: mod_base = OTHER; note = 2'-deoxy-2'-fluoroadenosine-3'-phosphorothioate
  modified_base 3: mod_base = OTHER; note = 2'-O-methyluridine-3'-phosphate
  modified_base 4: mod_base = OTHER; note = 2'-O-methylcytidine-3'-phosphate
  modified_base 5: mod_base = OTHER; note = 2'-O-methyluridine-3'-phosphate
  modified_base 6: mod_base = OTHER; note = 2'-deoxy-2'-fluorocytidine-3'-phosphate
  modified_base 7: mod_base = OTHER; note = 2'-O-methylcytidine-3'-phosphate
  modified_base 8: mod_base = OTHER; note = 2'-O-methyladenosine-3'-phosphate
  modified_base 9: mod_base = OTHER; note = 2'-O-methyluridine-3'-phosphate
  modified_base 10: mod_base = OTHER; note = 2'-O-methyladenosine-3'-phosphate
  modified_base 11: mod_base = OTHER; note = 2'-O-methyluridine-3'-phosphate
  modified_base 12: mod_base = OTHER; note = 2'-O-methylguanosine-3'-phosphate
  modified_base 13: mod_base = OTHER; note = 2'-O-methyladenosine-3'-phosphate
  modified_base 14: mod_base = OTHER; note = 2'-deoxy-2'-fluoroadenosine-3'-phosphate
  modified_base 15: mod_base = OTHER; note = 2'-O-methylguanosine-3'-phosphate
  modified_base 16: mod_base = OTHER; note = 2'-deoxy-2'-fluoroguanosine-3'-phosphate
  modified_base 17: mod_base = OTHER; note = 2'-O-methyluridine-3'-phosphate
  modified_base 18: mod_base = OTHER; note = 2'-O-methylguanosine-3'-phosphate
  modified_base 19: mod_base = OTHER; note = 2'-O-methyluridine-3'-phosphate
  modified_base 20: mod_base = OTHER; note = 2'-O-methylguanosine-3'-phosphate
  modified_base 21: mod_base = OTHER; note = 2'-O-methylcytidine-3'-phosphorothioate
  modified_base 22: mod_base = OTHER; note = 2'-O-methylcytidine-3'-phosphorothioate
  modified_base 23: mod_base = OTHER; note = 2'-O-methyladenosine
tatctccatatgaaggtgtgcca

SEQ ID NO: 12158 - RNA, 23 nt, synthetic construct
  source 1..23: mol_type = other RNA
  modified_base 1: mod_base = OTHER; note = 2'-O-methyluridine-3'-phosphorothioate 5'-(E)-Vinylphosphonate
  modified_base 2: mod_base = OTHER; note = 2'-deoxy-2'-fluorocytidine-3'-phosphorothioate
  modified_base 3: mod_base = OTHER; note = 2'-O-methyladenosine-3'-phosphate
  modified_base 4: mod_base = OTHER; note = 2'-O-methyladenosine-3'-phosphate
  modified_base 5: mod_base = OTHER; note = 2'-O-methyluridine-3'-phosphate
  modified_base 6: mod_base = OTHER; note = 2'-deoxy-2'-fluorocytidine-3'-phosphate
  modified_base 7: mod_base = OTHER; note = 2'-O-methyluridine-3'-phosphate
  modified_base 8: mod_base = OTHER; note = 2'-O-methylcytidine-3'-phosphate
  modified_base 9: mod_base = OTHER; note = 2'-O-methylcytidine-3'-phosphate
  modified_base 10: mod_base = OTHER; note = 2'-O-methyladenosine-3'-phosphate
  modified_base 11: mod_base = OTHER; note = 2'-O-methyluridine-3'-phosphate
  modified_base 12: mod_base = OTHER; note = 2'-O-methyladenosine-3'-phosphate
  modified_base 13: mod_base = OTHER; note = 2'-O-methyluridine-3'-phosphate
  modified_base 14: mod_base = OTHER; note = 2'-deoxy-2'-fluoroguanosine-3'-phosphate
  modified_base 15: mod_base = OTHER; note = 2'-O-methyladenosine-3'-phosphate
  modified_base 16: mod_base = OTHER; note = 2'-deoxy-2'-fluoroadenosine-3'-phosphate
  modified_base 17: mod_base = OTHER; note = 2'-O-methylguanosine-3'-phosphate
  modified_base 18: mod_base = OTHER; note = 2'-O-methylguanosine-3'-phosphate
  modified_base 19: mod_base = OTHER; note = 2'-O-methyluridine-3'-phosphate
  modified_base 20: mod_base = OTHER; note = 2'-O-methylguanosine-3'-phosphate
  modified_base 21: mod_base = OTHER; note = 2'-O-methyluridine-3'-phosphorothioate
  modified_base 22: mod_base = OTHER; note = 2'-O-methylguanosine-3'-phosphorothioate
  modified_base 23: mod_base = OTHER; note = 2'-O-methylcytidine
tcaatctccatatgaaggtgtgc

SEQ ID NO: 12159 - RNA, 23 nt, synthetic construct
  source 1..23: mol_type = other RNA
  modified_base 1: mod_base = OTHER; note = 2'-O-methyluridine-3'-phosphorothioate 5'-(E)-Vinylphosphonate
  modified_base 2: mod_base = OTHER; note = 2'-deoxy-2'-fluoroadenosine-3'-phosphorothioate
  modified_base 3: mod_base = OTHER; note = 2'-O-methylcytidine-3'-phosphate
  modified_base 4: mod_base = OTHER; note = 2'-O-methyladenosine-3'-phosphate
  modified_base 5: mod_base = OTHER; note = 2'-O-methyladenosine-3'-phosphate
  modified_base 6: mod_base = OTHER; note = 2'-deoxy-2'-fluorouridine-3'-phosphate
  modified_base 7: mod_base = OTHER; note = 2'-O-methylcytidine-3'-phosphate
  modified_base 8: mod_base = OTHER; note = 2'-O-methyluridine-3'-phosphate
  modified_base 9: mod_base = OTHER; note = 2'-O-methylcytidine-3'-phosphate
  modified_base 10: mod_base = OTHER; note = 2'-O-methylcytidine-3'-phosphate
  modified_base 11: mod_base = OTHER; note = 2'-O-methyladenosine-3'-phosphate
  modified_base 12: mod_base = OTHER; note = 2'-O-methyluridine-3'-phosphate
  modified_base 13: mod_base = OTHER; note = 2'-O-methyladenosine-3'-phosphate
  modified_base 14: mod_base = OTHER; note = 2'-deoxy-2'-fluorouridine-3'-phosphate
  modified_base 15: mod_base = OTHER; note = 2'-O-methylguanosine-3'-phosphate
  modified_base 16: mod_base = OTHER; note = 2'-deoxy-2'-fluoroadenosine-3'-phosphate
  modified_base 17: mod_base = OTHER; note = 2'-O-methyladenosine-3'-phosphate
  modified_base 18: mod_base = OTHER; note = 2'-O-methylguanosine-3'-phosphate
  modified_base 19: mod_base = OTHER; note = 2'-O-methylguanosine-3'-phosphate
  modified_base 20: mod_base = OTHER; note = 2'-O-methyluridine-3'-phosphate
  modified_base 21: mod_base = OTHER; note = 2'-O-methylguanosine-3'-phosphorothioate
  modified_base 22: mod_base = OTHER; note = 2'-O-methyluridine-3'-phosphorothioate
  modified_base 23: mod_base = OTHER; note = 2'-O-methylguanosine
tacaatctccatatgaaggtgtg

SEQ ID NO: 12160 - RNA, 23 nt, synthetic construct
  source 1..23: mol_type = other RNA
  modified_base 1: mod_base = OTHER; note = 2'-O-methyluridine-3'-phosphorothioate 5'-(E)-Vinylphosphonate
  modified_base 2: mod_base = OTHER; note = 2'-deoxy-2'-fluoroadenosine-3'-phosphorothioate
  modified_base 3: mod_base = OTHER; note = 2'-O-methyladenosine-3'-phosphate
  modified_base 4: mod_base = OTHER; note = 2'-O-methylcytidine-3'-phosphate
  modified_base 5: mod_base = OTHER; note = 2'-O-methyladenosine-3'-phosphate
  modified_base 6: mod_base = OTHER; note = 2'-deoxy-2'-fluoroadenosine-3'-phosphate
  modified_base 7: mod_base = OTHER; note = 2'-O-methyluridine-3'-phosphate
  modified_base 8: mod_base = OTHER; note = 2'-O-methylcytidine-3'-phosphate
  modified_base 9: mod_base = OTHER; note = 2'-O-methyluridine-3'-phosphate
  modified_base 10: mod_base = OTHER; note = 2'-O-methylcytidine-3'-phosphate
  modified_base 11: mod_base = OTHER; note = 2'-O-methylcytidine-3'-phosphate
  modified_base 12: mod_base = OTHER; note = 2'-O-methyladenosine-3'-phosphate
  modified_base 13: mod_base = OTHER; note = 2'-O-methyluridine-3'-phosphate
  modified_base 14: mod_base = OTHER; note = 2'-deoxy-2'-fluoroadenosine-3'-phosphate
  modified_base 15: mod_base = OTHER; note = 2'-O-methyluridine-3'-phosphate
  modified_base 16: mod_base = OTHER; note = 2'-deoxy-2'-fluoroguanosine-3'-phosphate
  modified_base 17: mod_base = OTHER; note = 2'-O-methyladenosine-3'-phosphate
  modified_base 18: mod_base = OTHER; note = 2'-O-methyladenosine-3'-phosphate
  modified_base 19: mod_base = OTHER; note = 2'-O-methylguanosine-3'-phosphate
  modified_base 20: mod_base = OTHER; note = 2'-O-methylguanosine-3'-phosphate
  modified_base 21: mod_base = OTHER; note = 2'-O-methyluridine-3'-phosphorothioate
  modified_base 22: mod_base = OTHER; note = 2'-O-methylguanosine-3'-phosphorothioate
  modified_base 23: mod_base = OTHER; note = 2'-O-methyluridine
taacaatctccatatgaaggtgt

SEQ ID NO: 12161 - RNA, 23 nt, synthetic construct
  source 1..23: mol_type = other RNA
  modified_base 1: mod_base = OTHER; note = 2'-O-methyluridine-3'-phosphorothioate 5'-(E)-Vinylphosphonate
  modified_base 2: mod_base = OTHER; note = 2'-deoxy-2'-fluorocytidine-3'-phosphorothioate
  modified_base 3: mod_base = OTHER; note = 2'-O-methyladenosine-3'-phosphate
  modified_base 4: mod_base = OTHER; note = 2'-O-methyladenosine-3'-phosphate
  modified_base 5: mod_base = OTHER; note = 2'-O-methylcytidine-3'-phosphate
  modified_base 6: mod_base = OTHER; note = 2'-deoxy-2'-fluoroadenosine-3'-phosphate
  modified_base 7: mod_base = OTHER; note = 2'-O-methyladenosine-3'-phosphate
  modified_base 8: mod_base = OTHER; note = 2'-O-methyluridine-3'-phosphate
  modified_base 9: mod_base = OTHER; note = 2'-O-methylcytidine-3'-phosphate
  modified_base 10: mod_base = OTHER; note = 2'-O-methyluridine-3'-phosphate
  modified_base 11: mod_base = OTHER; note = 2'-O-methylcytidine-3'-phosphate
  modified_base 12: mod_base = OTHER; note = 2'-O-methylcytidine-3'-phosphate
  modified_base 13: mod_base = OTHER; note = 2'-O-methyladenosine-3'-phosphate
  modified_base 14: mod_base = OTHER; note = 2'-deoxy-2'-fluorouridine-3'-phosphate
  modified_base 15: mod_base = OTHER; note = 2'-O-methyladenosine-3'-phosphate
  modified_base 16: mod_base = OTHER; note = 2'-deoxy-2'-fluorouridine-3'-phosphate
  modified_base 17: mod_base = OTHER; note = 2'-O-methylguanosine-3'-phosphate
  modified_base 18: mod_base = OTHER; note = 2'-O-methyladenosine-3'-phosphate
  modified_base 19: mod_base = OTHER; note = 2'-O-methyladenosine-3'-phosphate
  modified_base 20: mod_base = OTHER; note = 2'-O-methylguanosine-3'-phosphate
  modified_base 21: mod_base = OTHER; note = 2'-O-methylguanosine-3'-phosphorothioate
  modified_base 22: mod_base = OTHER; note = 2'-O-methyluridine-3'-phosphorothioate
  modified_base 23: mod_base = OTHER; note = 2'-O-methylguanosine
tcaacaatctccatatgaaggtg

SEQ ID NO: 12162 - RNA, 23 nt, synthetic construct
  source 1..23: mol_type = other RNA
  modified_base 1: mod_base = OTHER; note = 2'-O-methyluridine-3'-phosphorothioate 5'-(E)-Vinylphosphonate
  modified_base 2: mod_base = OTHER; note = 2'-deoxy-2'-fluorocytidine-3'-phosphorothioate
  modified_base 3: mod_base = OTHER; note = 2'-O-methylcytidine-3'-phosphate
  modified_base 4: mod_base = OTHER; note = 2'-O-methyladenosine-3'-phosphate
  modified_base 5: mod_base = OTHER; note = 2'-O-methyladenosine-3'-phosphate
  modified_base 6: mod_base = OTHER; note = 2'-deoxy-2'-fluorocytidine-3'-phosphate
  modified_base 7: mod_base = OTHER; note = 2'-O-methyladenosine-3'-phosphate
  modified_base 8: mod_base = OTHER; note = 2'-O-methyladenosine-3'-phosphate
  modified_base 9: mod_base = OTHER; note = 2'-O-methyluridine-3'-phosphate
  modified_base 10: mod_base = OTHER; note = 2'-O-methylcytidine-3'-phosphate
  modified_base 11: mod_base = OTHER; note = 2'-O-methyluridine-3'-phosphate
  modified_base 12: mod_base = OTHER; note = 2'-O-methylcytidine-3'-phosphate
  modified_base 13: mod_base = OTHER; note = 2'-O-methylcytidine-3'-phosphate
  modified_base 14: mod_base = OTHER; note = 2'-deoxy-2'-fluoroadenosine-3'-phosphate
  modified_base 15: mod_base = OTHER; note = 2'-O-methyluridine-3'-phosphate
  modified_base 16: mod_base = OTHER; note = 2'-deoxy-2'-fluoroadenosine-3'-phosphate
  modified_base 17: mod_base = OTHER; note = 2'-O-methyluridine-3'-phosphate
  modified_base 18: mod_base = OTHER; note = 2'-O-methylguanosine-3'-phosphate
  modified_base 19: mod_base = OTHER; note = 2'-O-methyladenosine-3'-phosphate
  modified_base 20: mod_base = OTHER; note = 2'-O-methyladenosine-3'-phosphate
  modified_base 21: mod_base = OTHER; note = 2'-O-methylguanosine-3'-phosphorothioate
  modified_base 22: mod_base = OTHER; note = 2'-O-methylguanosine-3'-phosphorothioate
  modified_base 23: mod_base = OTHER; note = 2'-O-methyluridine
tccaacaatctccatatgaaggt

SEQ ID NO: 12163 - RNA, 23 nt, synthetic construct
  source 1..23: mol_type = other RNA
  modified_base 1: mod_base = OTHER; note = 2'-O-methyluridine-3'-phosphorothioate 5'-(E)-Vinylphosphonate
  modified_base 2: mod_base = OTHER; note = 2'-deoxy-2'-fluoroadenosine-3'-phosphorothioate
  modified_base 3: mod_base = OTHER; note = 2'-O-methylcytidine-3'-phosphate
  modified_base 4: mod_base = OTHER; note = 2'-O-methylcytidine-3'-phosphate
  modified_base 5: mod_base = OTHER; note = 2'-O-methyladenosine-3'-phosphate
  modified_base 6: mod_base = OTHER; note = 2'-deoxy-2'-fluoroadenosine-3'-phosphate
  modified_base 7: mod_base = OTHER; note = 2'-O-methylcytidine-3'-phosphate
  modified_base 8: mod_base = OTHER; note = 2'-O-methyladenosine-3'-phosphate
  modified_base 9: mod_base = OTHER; note = 2'-O-methyladenosine-3'-phosphate
  modified_base 10: mod_base = OTHER; note = 2'-O-methyluridine-3'-phosphate
  modified_base 11: mod_base = OTHER; note = 2'-O-methylcytidine-3'-phosphate
  modified_base 12: mod_base = OTHER; note = 2'-O-methyluridine-3'-phosphate
  modified_base 13: mod_base = OTHER; note = 2'-O-methylcytidine-3'-phosphate
  modified_base 14: mod_base = OTHER; note = 2'-deoxy-2'-fluorocytidine-3'-phosphate
  modified_base 15: mod_base = OTHER; note = 2'-O-methyladenosine-3'-phosphate
  modified_base 16: mod_base = OTHER; note = 2'-deoxy-2'-fluorouridine-3'-phosphate
  modified_base 17: mod_base = OTHER; note = 2'-O-methyladenosine-3'-phosphate
  modified_base 18: mod_base = OTHER; note = 2'-O-methyluridine-3'-phosphate
  modified_base 19: mod_base = OTHER; note = 2'-O-methylguanosine-3'-phosphate
  modified_base 20: mod_base = OTHER; note = 2'-O-methyladenosine-3'-phosphate
  modified_base 21: mod_base = OTHER; note = 2'-O-methyladenosine-3'-phosphorothioate
  modified_base 22: mod_base = OTHER; note = 2'-O-methylguanosine-3'-phosphorothioate
  modified_base 23: mod_base = OTHER; note = 2'-O-methylguanosine
taccaacaatctccatatgaagg

SEQ ID NO: 12164 - RNA, 23 nt, synthetic construct
  source 1..23: mol_type = other RNA
  modified_base 1: mod_base = OTHER; note = 2'-O-methyluridine-3'-phosphorothioate 5'-(E)-Vinylphosphonate
  modified_base 2: mod_base = OTHER; note = 2'-deoxy-2'-fluorouridine-3'-phosphorothioate
  modified_base 3: mod_base = OTHER; note = 2'-O-methyladenosine-3'-phosphate
  modified_base 4: mod_base = OTHER; note = 2'-O-methylcytidine-3'-phosphate
  modified_base 5: mod_base = OTHER; note = 2'-O-methylcytidine-3'-phosphate
  modified_base 6: mod_base = OTHER; note = 2'-deoxy-2'-fluoroadenosine-3'-phosphate
  modified_base 7: mod_base = OTHER; note = 2'-O-methyladenosine-3'-phosphate
  modified_base 8: mod_base = OTHER; note = 2'-O-methylcytidine-3'-phosphate
  modified_base 9: mod_base = OTHER; note = 2'-O-methyladenosine-3'-phosphate
  modified_base 10: mod_base = OTHER; note = 2'-O-methyladenosine-3'-phosphate
  modified_base 11: mod_base = OTHER; note = 2'-O-methyluridine-3'-phosphate
  modified_base 12: mod_base = OTHER; note = 2'-O-methylcytidine-3'-phosphate
  modified_base 13: mod_base = OTHER; note = 2'-O-methyluridine-3'-phosphate
  modified_base 14: mod_base = OTHER; note = 2'-deoxy-2'-fluorocytidine-3'-phosphate
  modified_base 15: mod_base = OTHER; note = 2'-O-methylcytidine-3'-phosphate
  modified_base 16: mod_base = OTHER; note = 2'-deoxy-2'-fluoroadenosine-3'-phosphate
  modified_base 17: mod_base = OTHER; note = 2'-O-methyluridine-3'-phosphate
  modified_base 18: mod_base = OTHER; note = 2'-O-methyladenosine-3'-phosphate
  modified_base 19: mod_base = OTHER; note = 2'-O-methyluridine-3'-phosphate
  modified_base 20: mod_base = OTHER; note = 2'-O-methylguanosine-3'-phosphate
  modified_base 21: mod_base = OTHER; note = 2'-O-methyladenosine-3'-phosphorothioate
  modified_base 22: mod_base = OTHER; note = 2'-O-methyladenosine-3'-phosphorothioate
  modified_base 23: mod_base = OTHER; note = 2'-O-methylguanosine
ttaccaacaatctccatatgaag

SEQ ID NO: 12165 - RNA, 23 nt, synthetic construct
  source 1..23: mol_type = other RNA
  modified_base 1: mod_base = OTHER; note = 2'-O-methyluridine-3'-phosphorothioate 5'-(E)-Vinylphosphonate
  modified_base 2: mod_base = OTHER; note = 2'-deoxy-2'-fluoroguanosine-3'-phosphorothioate
  modified_base 3: mod_base = OTHER; note = 2'-O-methyluridine-3'-phosphate
  modified_base 4: mod_base = OTHER; note = 2'-O-methyladenosine-3'-phosphate
  modified_base 5: mod_base = OTHER; note = 2'-O-methylcytidine-3'-phosphate
  modified_base 6: mod_base = OTHER; note = 2'-deoxy-2'-fluorocytidine-3'-phosphate
  modified_base 7: mod_base = OTHER; note = 2'-O-methyladenosine-3'-phosphate
  modified_base 8: mod_base = OTHER; note = 2'-O-methyladenosine-3'-phosphate
  modified_base 9: mod_base = OTHER; note = 2'-O-methylcytidine-3'-phosphate
  modified_base 10: mod_base = OTHER; note = 2'-O-methyladenosine-3'-phosphate
  modified_base 11: mod_base = OTHER; note = 2'-O-methyladenosine-3'-phosphate
  modified_base 12: mod_base = OTHER; note = 2'-O-methyluridine-3'-phosphate
  modified_base 13: mod_base = OTHER; note = 2'-O-methylcytidine-3'-phosphate
  modified_base 14: mod_base = OTHER; note = 2'-deoxy-2'-fluorouridine-3'-phosphate
  modified_base 15: mod_base = OTHER; note = 2'-O-methylcytidine-3'-phosphate
  modified_base 16: mod_base = OTHER; note = 2'-deoxy-2'-fluorocytidine-3'-phosphate
  modified_base 17: mod_base = OTHER; note = 2'-O-methyladenosine-3'-phosphate
  modified_base 18: mod_base = OTHER; note = 2'-O-methyluridine-3'-phosphate
  modified_base 19: mod_base = OTHER; note = 2'-O-methyladenosine-3'-phosphate
  modified_base 20: mod_base = OTHER; note = 2'-O-methyluridine-3'-phosphate
  modified_base 21: mod_base = OTHER; note = 2'-O-methylguanosine-3'-phosphorothioate
  modified_base 22: mod_base = OTHER; note = 2'-O-methyladenosine-3'-phosphorothioate
  modified_base 23: mod_base = OTHER; note = 2'-O-methyladenosine
tgtaccaacaatctccatatgaa

SEQ ID NO: 12166 - RNA, 23 nt, synthetic construct
  source 1..23: mol_type = other RNA
  modified_base 1: mod_base = OTHER; note = 2'-O-methyluridine-3'-phosphorothioate 5'-(E)-Vinylphosphonate
  modified_base 2: mod_base = OTHER; note = 2'-deoxy-2'-fluorouridine-3'-phosphorothioate
  modified_base 3: mod_base = OTHER; note = 2'-O-methylguanosine-3'-phosphate
  modified_base 4: mod_base = OTHER; note = 2'-O-methyluridine-3'-phosphate
  modified_base 5: mod_base = OTHER; note = 2'-O-methyladenosine-3'-phosphate
  modified_base 6: mod_base = OTHER; note = 2'-deoxy-2'-fluorocytidine-3'-phosphate
  modified_base 7: mod_base = OTHER; note = 2'-O-methylcytidine-3'-phosphate
  modified_base 8: mod_base = OTHER; note = 2'-O-methyladenosine-3'-phosphate
  modified_base 9: mod_base = OTHER; note = 2'-O-methyladenosine-3'-phosphate
  modified_base 10: mod_base = OTHER; note = 2'-O-methylcytidine-3'-phosphate
  modified_base 11: mod_base = OTHER; note = 2'-O-methyladenosine-3'-phosphate
  modified_base 12: mod_base = OTHER; note = 2'-O-methyladenosine-3'-phosphate
  modified_base 13: mod_base = OTHER; note = 2'-O-methyluridine-3'-phosphate
  modified_base 14: mod_base = OTHER; note = 2'-deoxy-2'-fluorocytidine-3'-phosphate
  modified_base 15: mod_base = OTHER; note = 2'-O-methyluridine-3'-phosphate
  modified_base 16: mod_base = OTHER; note = 2'-deoxy-2'-fluorocytidine-3'-phosphate
  modified_base 17: mod_base = OTHER; note = 2'-O-methylcytidine-3'-phosphate
  modified_base 18: mod_base = OTHER; note = 2'-O-methyladenosine-3'-phosphate
  modified_base 19: mod_base = OTHER; note = 2'-O-methyluridine-3'-phosphate
  modified_base 20: mod_base = OTHER; note = 2'-O-methyladenosine-3'-phosphate
  modified_base 21: mod_base = OTHER; note = 2'-O-methyluridine-3'-phosphorothioate
  modified_base 22: mod_base = OTHER; note = 2'-O-methylguanosine-3'-phosphorothioate
  modified_base 23: mod_base = OTHER; note = 2'-O-methyladenosine
ttgtaccaacaatctccatatga

SEQ ID NO: 12167 - RNA, 23 nt, synthetic construct
  source 1..23: mol_type = other RNA
  modified_base 1: mod_base = OTHER; note = 2'-O-methyluridine-3'-phosphorothioate 5'-(E)-Vinylphosphonate
  modified_base 2: mod_base = OTHER; note = 2'-deoxy-2'-fluoroguanosine-3'-phosphorothioate
  modified_base 3: mod_base = OTHER; note = 2'-O-methyluridine-3'-phosphate
  modified_base 4: mod_base = OTHER; note = 2'-O-methylguanosine-3'-phosphate
  modified_base 5: mod_base = OTHER; note = 2'-O-methyluridine-3'-phosphate
  modified_base 6: mod_base = OTHER; note = 2'-deoxy-2'-fluoroadenosine-3'-phosphate
  modified_base 7: mod_base = OTHER; note = 2'-O-methylcytidine-3'-phosphate
  modified_base 8: mod_base = OTHER; note = 2'-O-methylcytidine-3'-phosphate
  modified_base 9: mod_base = OTHER; note = 2'-O-methyladenosine-3'-phosphate
  modified_base 10: mod_base = OTHER; note = 2'-O-methyladenosine-3'-phosphate
  modified_base 11: mod_base = OTHER; note = 2'-O-methylcytidine-3'-phosphate
  modified_base 12: mod_base = OTHER; note = 2'-O-methyladenosine-3'-phosphate
  modified_base 13: mod_base = OTHER; note = 2'-O-methyladenosine-3'-phosphate
  modified_base 14: mod_base = OTHER; note = 2'-deoxy-2'-fluorouridine-3'-phosphate
  modified_base 15: mod_base = OTHER; note = 2'-O-methylcytidine-3'-phosphate
  modified_base 16: mod_base = OTHER; note = 2'-deoxy-2'-fluorouridine-3'-phosphate
  modified_base 17: mod_base = OTHER; note = 2'-O-methylcytidine-3'-phosphate
  modified_base 18: mod_base = OTHER; note = 2'-O-methylcytidine-3'-phosphate
  modified_base 19: mod_base = OTHER; note = 2'-O-methyladenosine-3'-phosphate
  modified_base 20: mod_base = OTHER; note = 2'-O-methyluridine-3'-phosphate
  modified_base 21: mod_base = OTHER; note = 2'-O-methyladenosine-3'-phosphorothioate
  modified_base 22: mod_base = OTHER; note = 2'-O-methyluridine-3'-phosphorothioate
  modified_base 23: mod_base = OTHER; note = 2'-O-methylguanosine
tgtgtaccaacaatctccatatg

SEQ ID NO: 12168 - RNA, 23 nt, synthetic construct
  source 1..23: mol_type = other RNA
  modified_base 1: mod_base = OTHER; note = 2'-O-methyluridine-3'-phosphorothioate 5'-(E)-Vinylphosphonate
  modified_base 2: mod_base = OTHER; note = 2'-deoxy-2'-fluorouridine-3'-phosphorothioate
  modified_base 3: mod_base = OTHER; note = 2'-O-methylguanosine-3'-phosphate
  modified_base 4: mod_base = OTHER; note = 2'-O-methyluridine-3'-phosphate
  modified_base 5: mod_base = OTHER; note = 2'-O-methylguanosine-3'-phosphate
  modified_base 6: mod_base = OTHER; note = 2'-deoxy-2'-fluorouridine-3'-phosphate
  modified_base 7: mod_base = OTHER; note = 2'-O-methyladenosine-3'-phosphate
  modified_base 8: mod_base = OTHER; note = 2'-O-methylcytidine-3'-phosphate
  modified_base 9: mod_base = OTHER; note = 2'-O-methylcytidine-3'-phosphate
  modified_base 10: mod_base = OTHER; note = 2'-O-methyladenosine-3'-phosphate
  modified_base 11: mod_base = OTHER; note = 2'-O-methyladenosine-3'-phosphate
  modified_base 12: mod_base = OTHER; note = 2'-O-methylcytidine-3'-phosphate
  modified_base 13: mod_base = OTHER; note = 2'-O-methyladenosine-3'-phosphate
  modified_base 14: mod_base = OTHER; note = 2'-deoxy-2'-fluoroadenosine-3'-phosphate
  modified_base 15: mod_base = OTHER; note = 2'-O-methyluridine-3'-phosphate
  modified_base 16: mod_base = OTHER; note = 2'-deoxy-2'-fluorocytidine-3'-phosphate
  modified_base 17: mod_base = OTHER; note = 2'-O-methyluridine-3'-phosphate
  modified_base 18: mod_base = OTHER; note = 2'-O-methylcytidine-3'-phosphate
  modified_base 19: mod_base = OTHER; note = 2'-O-methylcytidine-3'-phosphate
  modified_base 20: mod_base = OTHER; note = 2'-O-methyladenosine-3'-phosphate
  modified_base 21: mod_base = OTHER; note = 2'-O-methyluridine-3'-phosphorothioate
  modified_base 22: mod_base = OTHER; note = 2'-O-methyladenosine-3'-phosphorothioate
  modified_base 23: mod_base = OTHER; note = 2'-O-methyluridine
ttgtgtaccaacaatctccatat

SEQ ID NO: 12169 - RNA, 23 nt, synthetic construct
  source 1..23: mol_type = other RNA
  modified_base 1: mod_base = OTHER; note = 2'-O-methyluridine-3'-phosphorothioate 5'-(E)-Vinylphosphonate
  modified_base 2: mod_base = OTHER; note = 2'-deoxy-2'-fluorouridine-3'-phosphorothioate
  modified_base 3: mod_base = OTHER; note = 2'-O-methyluridine-3'-phosphate
  modified_base 4: mod_base = OTHER; note = 2'-O-methylguanosine-3'-phosphate
  modified_base 5: mod_base = OTHER; note = 2'-O-methyluridine-3'-phosphate
  modified_base 6: mod_base = OTHER; note = 2'-deoxy-2'-fluoroguanosine-3'-phosphate
  modified_base 7: mod_base = OTHER; note = 2'-O-methyluridine-3'-phosphate
  modified_base 8: mod_base = OTHER; note = 2'-O-methyladenosine-3'-phosphate
  modified_base 9: mod_base = OTHER; note = 2'-O-methylcytidine-3'-phosphate
  modified_base 10: mod_base = OTHER; note = 2'-O-methylcytidine-3'-phosphate
  modified_base 11: mod_base = OTHER; note = 2'-O-methyladenosine-3'-phosphate
  modified_base 12: mod_base = OTHER; note = 2'-O-methyladenosine-3'-phosphate
  modified_base 13: mod_base = OTHER; note = 2'-O-methylcytidine-3'-phosphate
  modified_base 14: mod_base = OTHER; note = 2'-deoxy-2'-fluoroadenosine-3'-phosphate
  modified_base 15: mod_base = OTHER; note = 2'-O-methyladenosine-3'-phosphate
  modified_base 16: mod_base = OTHER; note = 2'-deoxy-2'-fluorouridine-3'-phosphate
  modified_base 17: mod_base = OTHER; note = 2'-O-methylcytidine-3'-phosphate
  modified_base 18: mod_base = OTHER; note = 2'-O-methyluridine-3'-phosphate
  modified_base 19: mod_base = OTHER; note = 2'-O-methylcytidine-3'-phosphate
  modified_base 20: mod_base = OTHER; note = 2'-O-methylcytidine-3'-phosphate
  modified_base 21: mod_base = OTHER; note = 2'-O-methyladenosine-3'-phosphorothioate
  modified_base 22: mod_base = OTHER; note = 2'-O-methyluridine-3'-phosphorothioate
  modified_base 23: mod_base = OTHER; note = 2'-O-methyladenosine
tttgtgtaccaacaatctccata

SEQ ID NO: 12170 - RNA, 23 nt, synthetic construct
  source 1..23: mol_type = other RNA
  modified_base 1: mod_base = OTHER; note = 2'-O-methyluridine-3'-phosphorothioate 5'-(E)-Vinylphosphonate
  modified_base 2: mod_base = OTHER; note = 2'-deoxy-2'-fluorouridine-3'-phosphorothioate
  modified_base 3: mod_base = OTHER; note = 2'-O-methyluridine-3'-phosphate
  modified_base 4: mod_base = OTHER; note = 2'-O-methyluridine-3'-phosphate
  modified_base 5: mod_base = OTHER; note = 2'-O-methyladenosine-3'-phosphate
  modified_base 6: mod_base = OTHER; note = 2'-deoxy-2'-fluorouridine-3'-phosphate
  modified_base 7: mod_base = OTHER; note = 2'-O-methylguanosine-3'-phosphate
  modified_base 8: mod_base = OTHER; note = 2'-O-methyluridine-3'-phosphate
  modified_base 9: mod_base = OTHER; note = 2'-O-methylcytidine-3'-phosphate
  modified_base 10: mod_base = OTHER; note = 2'-O-methyluridine-3'-phosphate
  modified_base 11: mod_base = OTHER; note = 2'-O-methylcytidine-3'-phosphate
  modified_base 12: mod_base = OTHER; note = 2'-O-methylguanosine-3'-phosphate
  modified_base 13: mod_base = OTHER; note = 2'-O-methyladenosine-3'-phosphate
  modified_base 14: mod_base = OTHER; note = 2'-deoxy-2'-fluorouridine-3'-phosphate
  modified_base 15: mod_base = OTHER; note = 2'-O-methylguanosine-3'-phosphate
  modified_base 16: mod_base = OTHER; note = 2'-deoxy-2'-fluoroadenosine-3'-phosphate
  modified_base 17: mod_base = OTHER; note = 2'-O-methylguanosine-3'-phosphate
  modified_base 18: mod_base = OTHER; note = 2'-O-methylcytidine-3'-phosphate
  modified_base 19: mod_base = OTHER; note = 2'-O-methyladenosine-3'-phosphate
  modified_base 20: mod_base = OTHER; note = 2'-O-methyladenosine-3'-phosphate
  modified_base 21: mod_base = OTHER; note = 2'-O-methyluridine-3'-phosphorothioate
  modified_base 22: mod_base = OTHER; note = 2'-O-methyladenosine-3'-phosphorothioate
  modified_base 23: mod_base = OTHER; note = 2'-O-methylguanosine
ttttatgtctcgatgagcaatag

SEQ ID NO: 12171 - RNA, 23 nt, synthetic construct
  source 1..23: mol_type = other RNA
  modified_base 1: mod_base = OTHER; note = 2'-O-methyluridine-3'-phosphorothioate 5'-(E)-Vinylphosphonate
  modified_base 2: mod_base = OTHER; note = 2'-deoxy-2'-fluorocytidine-3'-phosphorothioate
  modified_base 3: mod_base = OTHER; note = 2'-O-methyluridine-3'-phosphate
  modified_base 4: mod_base = OTHER; note = 2'-O-methyluridine-3'-phosphate
  modified_base 5: mod_base = OTHER; note = 2'-O-methylguanosine-3'-phosphate
  modified_base 6: mod_base = OTHER; note = 2'-deoxy-2'-fluorouridine-3'-phosphate
  modified_base 7: mod_base = OTHER; note = 2'-O-methylguanosine-3'-phosphate
  modified_base 8: mod_base = OTHER; note = 2'-O-methyluridine-3'-phosphate
  modified_base 9: mod_base = OTHER; note = 2'-O-methyladenosine-3'-phosphate
  modified_base 10: mod_base = OTHER; note = 2'-O-methylcytidine-3'-phosphate
  modified_base 11: mod_base = OTHER; note = 2'-O-methylcytidine-3'-phosphate
  modified_base 12: mod_base = OTHER; note = 2'-O-methyladenosine-3'-phosphate
  modified_base 13: mod_base = OTHER; note = 2'-O-methyladenosine-3'-phosphate
  modified_base 14: mod_base = OTHER; note = 2'-deoxy-2'-fluorocytidine-3'-phosphate
  modified_base 15: mod_base = OTHER; note = 2'-O-methyladenosine-3'-phosphate
  modified_base 16: mod_base = OTHER; note = 2'-deoxy-2'-fluoroadenosine-3'-phosphate
  modified_base 17: mod_base = OTHER; note = 2'-O-methyluridine-3'-phosphate
  modified_base 18: mod_base = OTHER; note = 2'-O-methylcytidine-3'-phosphate
  modified_base 19: mod_base = OTHER; note = 2'-O-methyluridine-3'-phosphate
  modified_base 20: mod_base = OTHER; note = 2'-O-methylcytidine-3'-phosphate
  modified_base 21: mod_base = OTHER; note = 2'-O-methylcytidine-3'-phosphorothioate
  modified_base 22: mod_base = OTHER; note = 2'-O-methyladenosine-3'-phosphorothioate
  modified_base 23: mod_base = OTHER; note = 2'-O-methyluridine
tcttgtgtaccaacaatctccat

SEQ ID NO: 12172 - RNA, 23 nt, synthetic construct
  source 1..23: mol_type = other RNA
  modified_base 1: mod_base = OTHER; note = 2'-O-methyluridine-3'-phosphorothioate 5'-(E)-Vinylphosphonate
  modified_base 2: mod_base = OTHER; note = 2'-deoxy-2'-fluorocytidine-3'-phosphorothioate
  modified_base 3: mod_base = OTHER; note = 2'-O-methylcytidine-3'-phosphate
  modified_base 4: mod_base = OTHER; note = 2'-O-methyluridine-3'-phosphate
  modified_base 5: mod_base = OTHER; note = 2'-O-methyluridine-3'-phosphate
  modified_base 6: mod_base = OTHER; note = 2'-deoxy-2'-fluoroguanosine-3'-phosphate
  modified_base 7: mod_base = OTHER; note = 2'-O-methyluridine-3'-phosphate
  modified_base 8: mod_base = OTHER; note = 2'-O-methylguanosine-3'-phosphate
  modified_base 9: mod_base = OTHER; note = 2'-O-methyluridine-3'-phosphate
  modified_base 10: mod_base = OTHER; note = 2'-O-methyladenosine-3'-phosphate
  modified_base 11: mod_base = OTHER; note = 2'-O-methylcytidine-3'-phosphate
  modified_base 12: mod_base = OTHER; note = 2'-O-methylcytidine-3'-phosphate
  modified_base 13: mod_base = OTHER; note = 2'-O-methyladenosine-3'-phosphate
  modified_base 14: mod_base = OTHER; note = 2'-deoxy-2'-fluoroadenosine-3'-phosphate
  modified_base 15: mod_base = OTHER; note = 2'-O-methylcytidine-3'-phosphate
  modified_base 16: mod_base = OTHER; note = 2'-deoxy-2'-fluoroadenosine-3'-phosphate
  modified_base 17: mod_base = OTHER; note = 2'-O-methyladenosine-3'-phosphate
  modified_base 18: mod_base = OTHER; note = 2'-O-methyluridine-3'-phosphate
  modified_base 19: mod_base = OTHER; note = 2'-O-methylcytidine-3'-phosphate
  modified_base 20: mod_base = OTHER; note = 2'-O-methyluridine-3'-phosphate
  modified_base 21: mod_base = OTHER; note = 2'-O-methylcytidine-3'-phosphorothioate
  modified_base 22: mod_base = OTHER; note = 2'-O-methylcytidine-3'-phosphorothioate
  modified_base 23: mod_base = OTHER; note = 2'-O-methyladenosine
tccttgtgtaccaacaatctcca

SEQ ID NO: 12173 - RNA, 23 nt, synthetic construct
  source 1..23: mol_type = other RNA
  modified_base 1: mod_base = OTHER; note = 2'-O-methyluridine-3'-phosphorothioate 5'-(E)-Vinylphosphonate
  modified_base 2: mod_base = OTHER; note = 2'-deoxy-2'-fluorouridine-3'-phosphorothioate
  modified_base 3: mod_base = OTHER; note = 2'-O-methyluridine-3'-phosphate
  modified_base 4: mod_base = OTHER; note = 2'-O-methyladenosine-3'-phosphate
  modified_base 5: mod_base = OTHER; note = 2'-O-methylcytidine-3'-phosphate
  modified_base 6: mod_base = OTHER; note = 2'-deoxy-2'-fluorocytidine-3'-phosphate
  modified_base 7: mod_base = OTHER; note = 2'-O-methyluridine-3'-phosphate
  modified_base 8: mod_base = OTHER; note = 2'-O-methyluridine-3'-phosphate
  modified_base 9: mod_base = OTHER; note = 2'-O-methylguanosine-3'-phosphate
  modified_base 10: mod_base = OTHER; note = 2'-O-methyluridine-3'-phosphate
  modified_base 11: mod_base = OTHER; note = 2'-O-methylguanosine-3'-phosphate
  modified_base 12: mod_base = OTHER; note = 2'-O-methyluridine-3'-phosphate
  modified_base 13: mod_base = OTHER; note = 2'-O-methyladenosine-3'-phosphate
  modified_base 14: mod_base = OTHER; note = 2'-deoxy-2'-fluorocytidine-3'-phosphate
  modified_base 15: mod_base = OTHER; note = 2'-O-methylcytidine-3'-phosphate
  modified_base 16: mod_base = OTHER; note = 2'-deoxy-2'-fluoroadenosine-3'-phosphate
  modified_base 17: mod_base = OTHER; note = 2'-O-methyladenosine-3'-phosphate
  modified_base 18: mod_base = OTHER; note = 2'-O-methylcytidine-3'-phosphate
  modified_base 19: mod_base = OTHER; note = 2'-O-methyladenosine-3'-phosphate
  modified_base 20: mod_base = OTHER; note = 2'-O-methyladenosine-3'-phosphate
  modified_base 21: mod_base = OTHER; note = 2'-O-methyluridine-3'-phosphorothioate
  modified_base 22: mod_base = OTHER; note = 2'-O-methylcytidine-3'-phosphorothioate
  modified_base 23: mod_base = OTHER; note = 2'-O-methyluridine
tttaccttgtgtaccaacaatct

SEQ ID NO: 12174 - RNA, 23 nt, synthetic construct
  source 1..23: mol_type = other RNA
  modified_base 1: mod_base = OTHER; note = 2'-O-methyluridine-3'-phosphorothioate 5'-(E)-Vinylphosphonate
  modified_base 2: mod_base = OTHER; note = 2'-deoxy-2'-fluoroadenosine-3'-phosphorothioate
  modified_base 3: mod_base = OTHER; note = 2'-O-methylguanosine-3'-phosphate
  modified_base 4: mod_base = OTHER; note = 2'-O-methylguanosine-3'-phosphate
  modified_base 5: mod_base = OTHER; note = 2'-O-methyluridine-3'-phosphate
  modified_base 6: mod_base = OTHER; note = 2'-deoxy-2'-fluorouridine-3'-phosphate
  modified_base 7: mod_base = OTHER; note = 2'-O-methyluridine-3'-phosphate
  modified_base 8: mod_base = OTHER; note = 2'-O-methyladenosine-3'-phosphate
  modified_base 9: mod_base = OTHER; note = 2'-O-methylcytidine-3'-phosphate
  modified_base 10: mod_base = OTHER; note = 2'-O-methylcytidine-3'-phosphate
  modified_base 11: mod_base = OTHER; note = 2'-O-methyluridine-3'-phosphate
  modified_base 12: mod_base = OTHER; note = 2'-O-methyluridine-3'-phosphate
  modified_base 13: mod_base = OTHER; note = 2'-O-methylguanosine-3'-phosphate
  modified_base 14: mod_base = OTHER; note = 2'-deoxy-2'-fluorouridine-3'-phosphate
  modified_base 15: mod_base = OTHER; note = 2'-O-methylguanosine-3'-phosphate
  modified_base 16: mod_base = OTHER; note = 2'-deoxy-2'-fluorouridine-3'-phosphate
  modified_base 17: mod_base = OTHER; note = 2'-O-methyladenosine-3'-phosphate
  modified_base 18: mod_base = OTHER; note = 2'-O-methylcytidine-3'-phosphate
  modified_base 19: mod_base = OTHER; note = 2'-O-methylcytidine-3'-phosphate
  modified_base 20: mod_base = OTHER; note = 2'-O-methyladenosine-3'-phosphate
  modified_base 21: mod_base = OTHER; note = 2'-O-methyladenosine-3'-phosphorothioate
  modified_base 22: mod_base = OTHER; note = 2'-O-methylcytidine-3'-phosphorothioate
  modified_base 23: mod_base = OTHER; note = 2'-O-methyladenosine
taggtttaccttgtgtaccaaca

SEQ ID NO: 12175 - RNA, 23 nt, synthetic construct
  source 1..23: mol_type = other RNA
  modified_base 1: mod_base = OTHER; note = 2'-O-methyluridine-3'-phosphorothioate 5'-(E)-Vinylphosphonate
  modified_base 2: mod_base = OTHER; note = 2'-deoxy-2'-fluoroadenosine-3'-phosphorothioate
  modified_base 3: mod_base = OTHER; note = 2'-O-methylguanosine-3'-phosphate
  modified_base 4: mod_base = OTHER; note = 2'-O-methylcytidine-3'-phosphate
  modified_base 5: mod_base = OTHER; note = 2'-O-methyladenosine-3'-phosphate
  modified_base 6: mod_base = OTHER; note = 2'-deoxy-2'-fluoroguanosine-3'-phosphate
  modified_base 7: mod_base = OTHER; note = 2'-O-methylguanosine-3'-phosphate
  modified_base 8: mod_base = OTHER; note = 2'-O-methyluridine-3'-phosphate
  modified_base 9: mod_base = OTHER; note = 2'-O-methyluridine-3'-phosphate
  modified_base 10: mod_base = OTHER; note = 2'-O-methyluridine-3'-phosphate
  modified_base 11: mod_base = OTHER; note = 2'-O-methyladenosine-3'-phosphate
  modified_base 12: mod_base = OTHER; note = 2'-O-methylcytidine-3'-phosphate
  modified_base 13: mod_base = OTHER; note = 2'-O-methylcytidine-3'-phosphate
  modified_base 14: mod_base = OTHER; note = 2'-deoxy-2'-fluorouridine-3'-phosphate
  modified_base 15: mod_base = OTHER; note = 2'-O-methyluridine-3'-phosphate
  modified_base 16: mod_base = OTHER; note = 2'-deoxy-2'-fluoroguanosine-3'-phosphate
  modified_base 17: mod_base = OTHER; note = 2'-O-methyluridine-3'-phosphate
  modified_base 18: mod_base = OTHER; note = 2'-O-methylguanosine-3'-phosphate
  modified_base 19: mod_base = OTHER; note = 2'-O-methyluridine-3'-phosphate
  modified_base 20: mod_base = OTHER; note = 2'-O-methyladenosine-3'-phosphate
  modified_base 21: mod_base = OTHER; note = 2'-O-methylcytidine-3'-phosphorothioate
  modified_base 22: mod_base = OTHER; note = 2'-O-methylcytidine-3'-phosphorothioate
  modified_base 23: mod_base = OTHER; note = 2'-O-methyladenosine
tagcaggtttaccttgtgtacca

SEQ ID NO: 12176 - RNA, 23 nt, synthetic construct
  source 1..23: mol_type = other RNA
  modified_base 1: mod_base = OTHER; note = 2'-O-methyluridine-3'-phosphorothioate 5'-(E)-Vinylphosphonate
  modified_base 2: mod_base = OTHER; note = 2'-deoxy-2'-fluorouridine-3'-phosphorothioate
  modified_base 3: mod_base = OTHER; note = 2'-O-methyladenosine-3'-phosphate
  modified_base 4: mod_base = OTHER; note = 2'-O-methylguanosine-3'-phosphate
  modified_base 5: mod_base = OTHER; note = 2'-O-methylcytidine-3'-phosphate
  modified_base 6: mod_base = OTHER; note = 2'-deoxy-2'-fluoroadenosine-3'-phosphate
  modified_base 7: mod_base = OTHER; note = 2'-O-methylguanosine-3'-phosphate
  modified_base 8: mod_base = OTHER; note = 2'-O-methylguanosine-3'-phosphate
  modified_base 9: mod_base = OTHER; note = 2'-O-methyluridine-3'-phosphate
  modified_base 10: mod_base = OTHER; note = 2'-O-methyluridine-3'-phosphate
  modified_base 11: mod_base = OTHER; note = 2'-O-methyluridine-3'-phosphate
  modified_base 12: mod_base = OTHER; note = 2'-O-methyladenosine-3'-phosphate
  modified_base 13: mod_base = OTHER; note = 2'-O-methylcytidine-3'-phosphate
  modified_base 14: mod_base = OTHER; note = 2'-deoxy-2'-fluorocytidine-3'-phosphate
  modified_base 15: mod_base = OTHER; note = 2'-O-methyluridine-3'-phosphate
  modified_base 16: mod_base = OTHER; note = 2'-deoxy-2'-fluorouridine-3'-phosphate
  modified_base 17: mod_base = OTHER; note = 2'-O-methylguanosine-3'-phosphate
  modified_base 18: mod_base = OTHER; note = 2'-O-methyluridine-3'-phosphate
  modified_base 19: mod_base = OTHER; note = 2'-O-methylguanosine-3'-phosphate
  modified_base 20: mod_base = OTHER; note = 2'-O-methyluridine-3'-phosphate
  modified_base 21: mod_base = OTHER; note = 2'-O-methyladenosine-3'-phosphorothioate
  modified_base 22: mod_base = OTHER; note = 2'-O-methylcytidine-3'-phosphorothioate
  modified_base 23: mod_base = OTHER; note = 2'-O-methylcytidine
ttagcaggtttaccttgtgtacc

SEQ ID NO: 12177 - RNA, 23 nt, synthetic construct
  source 1..23: mol_type = other RNA
  modified_base 1: mod_base = OTHER; note = 2'-O-methyluridine-3'-phosphorothioate 5'-(E)-Vinylphosphonate
  modified_base 2: mod_base = OTHER; note = 2'-deoxy-2'-fluoroadenosine-3'-phosphorothioate
  modified_base 3: mod_base = OTHER; note = 2'-O-methyluridine-3'-phosphate
  modified_base 4: mod_base = OTHER; note = 2'-O-methyladenosine-3'-phosphate
  modified_base 5: mod_base = OTHER; note = 2'-O-methylguanosine-3'-phosphate
  modified_base 6: mod_base = OTHER; note = 2'-deoxy-2'-fluorocytidine-3'-phosphate
  modified_base 7: mod_base = OTHER; note = 2'-O-methyladenosine-3'-phosphate
  modified_base 8: mod_base = OTHER; note = 2'-O-methylguanosine-3'-phosphate
  modified_base 9: mod_base = OTHER; note = 2'-O-methylguanosine-3'-phosphate
  modified_base 10: mod_base = OTHER; note = 2'-O-methyluridine-3'-phosphate
  modified_base 11: mod_base = OTHER; note = 2'-O-methyluridine-3'-phosphate
  modified_base 12: mod_base = OTHER; note = 2'-O-methyluridine-3'-phosphate
  modified_base 13: mod_base = OTHER; note = 2'-O-methyladenosine-3'-phosphate
  modified_base 14: mod_base = OTHER; note = 2'-deoxy-2'-fluorocytidine-3'-phosphate
  modified_base 15: mod_base = OTHER; note = 2'-O-methylcytidine-3'-phosphate
  modified_base 16: mod_base = OTHER; note = 2'-deoxy-2'-fluorouridine-3'-phosphate
  modified_base 17: mod_base = OTHER; note = 2'-O-methyluridine-3'-phosphate
  modified_base 18: mod_base = OTHER; note = 2'-O-methylguanosine-3'-phosphate
  modified_base 19: mod_base = OTHER; note = 2'-O-methyluridine-3'-phosphate
  modified_base 20: mod_base = OTHER; note = 2'-O-methylguanosine-3'-phosphate
  modified_base 21: mod_base = OTHER; note = 2'-O-methyluridine-3'-phosphorothioate
  modified_base 22: mod_base = OTHER; note = 2'-O-methyladenosine-3'-phosphorothioate
  modified_base 23: mod_base = OTHER; note = 2'-O-methylcytidine
tatagcaggtttaccttgtgtac

SEQ ID NO: 12178 - RNA, 23 nt, synthetic construct
  source 1..23: mol_type = other RNA
  modified_base 1: mod_base = OTHER; note = 2'-O-methyluridine-3'-phosphorothioate 5'-(E)-Vinylphosphonate
  modified_base 2: mod_base = OTHER; note = 2'-deoxy-2'-fluoroadenosine-3'-phosphorothioate
  modified_base 3: mod_base = OTHER; note = 2'-O-methyladenosine-3'-phosphate
  modified_base 4: mod_base = OTHER; note = 2'-O-methyluridine-3'-phosphate
  modified_base 5: mod_base = OTHER; note = 2'-O-methyladenosine-3'-phosphate
  modified_base 6: mod_base = OTHER; note = 2'-deoxy-2'-fluoroguanosine-3'-phosphate
  modified_base 7: mod_base = OTHER; note = 2'-O-methylcytidine-3'-phosphate
  modified_base 8: mod_base = OTHER; note = 2'-O-methyladenosine-3'-phosphate
  modified_base 9: mod_base = OTHER; note = 2'-O-methylguanosine-3'-phosphate
  modified_base 10: mod_base = OTHER; note = 2'-O-methylguanosine-3'-phosphate
  modified_base 11: mod_base = OTHER; note = 2'-O-methyluridine-3'-phosphate
  modified_base 12: mod_base = OTHER; note = 2'-O-methyluridine-3'-phosphate
  modified_base 13: mod_base = OTHER; note = 2'-O-methyluridine-3'-phosphate
  modified_base 14: mod_base = OTHER; note = 2'-deoxy-2'-fluoroadenosine-3'-phosphate
  modified_base 15: mod_base = OTHER; note = 2'-O-methylcytidine-3'-phosphate
  modified_base 16: mod_base = OTHER; note = 2'-deoxy-2'-fluorocytidine-3'-phosphate
  modified_base 17: mod_base = OTHER; note = 2'-O-methyluridine-3'-phosphate
  modified_base 18: mod_base = OTHER; note = 2'-O-methyluridine-3'-phosphate
  modified_base 19: mod_base = OTHER; note = 2'-O-methylguanosine-3'-phosphate
  modified_base 20: mod_base = OTHER; note = 2'-O-methyluridine-3'-phosphate
  modified_base 21: mod_base = OTHER; note = 2'-O-methylguanosine-3'-phosphorothioate
  modified_base 22: mod_base = OTHER; note = 2'-O-methyluridine-3'-phosphorothioate
  modified_base 23: mod_base = OTHER; note = 2'-O-methyladenosine
taatagcaggtttaccttgtgta

SEQ ID NO: 12179 - RNA, 23 nt, synthetic construct
  source 1..23: mol_type = other RNA
  modified_base 1: mod_base = OTHER; note = 2'-O-methyluridine-3'-phosphorothioate 5'-(E)-Vinylphosphonate
  modified_base 2: mod_base = OTHER; note = 2'-deoxy-2'-fluorocytidine-3'-phosphorothioate
  modified_base 3: mod_base = OTHER; note = 2'-O-methyladenosine-3'-phosphate
  modified_base 4: mod_base = OTHER; note = 2'-O-methyladenosine-3'-phosphate
  modified_base 5: mod_base = OTHER; note = 2'-O-methyluridine-3'-phosphate
  modified_base 6: mod_base = OTHER; note = 2'-deoxy-2'-fluoroadenosine-3'-phosphate
  modified_base 7: mod_base = OTHER; note = 2'-O-methylguanosine-3'-phosphate
  modified_base 8: mod_base = OTHER; note = 2'-O-methylcytidine-3'-phosphate
  modified_base 9: mod_base = OTHER; note = 2'-O-methyladenosine-3'-phosphate
  modified_base 10: mod_base = OTHER; note = 2'-O-methylguanosine-3'-phosphate
  modified_base 11: mod_base = OTHER; note = 2'-O-methylguanosine-3'-phosphate
  modified_base 12: mod_base = OTHER; note = 2'-O-methyluridine-3'-phosphate
  modified_base 13: mod_base = OTHER; note = 2'-O-methyluridine-3'-phosphate
  modified_base 14: mod_base = OTHER; note = 2'-deoxy-2'-fluorouridine-3'-phosphate
  modified_base 15: mod_base = OTHER; note = 2'-O-methyladenosine-3'-phosphate
  modified_base 16: mod_base = OTHER; note = 2'-deoxy-2'-fluorocytidine-3'-phosphate
  modified_base 17: mod_base = OTHER; note = 2'-O-methylcytidine-3'-phosphate
  modified_base 18: mod_base = OTHER; note = 2'-O-methyluridine-3'-phosphate
  modified_base 19: mod_base = OTHER; note = 2'-O-methyluridine-3'-phosphate
  modified_base 20: mod_base = OTHER; note = 2'-O-methylguanosine-3'-phosphate
  modified_base 21: mod_base = OTHER; note = 2'-O-methyluridine-3'-phosphorothioate
  modified_base 22: mod_base = OTHER; note = 2'-O-methylguanosine-3'-phosphorothioate
  modified_base 23: mod_base = OTHER; note = 2'-O-methyluridine
tcaatagcaggtttaccttgtgt

SEQ ID NO: 12180 - RNA, 23 nt, synthetic construct
  source 1..23: mol_type = other RNA
  modified_base 1: mod_base = OTHER; note = 2'-O-methyluridine-3'-phosphorothioate 5'-(E)-Vinylphosphonate
  modified_base 2: mod_base = OTHER; note = 2'-deoxy-2'-fluoroguanosine-3'-phosphorothioate
  modified_base 3: mod_base = OTHER; note = 2'-O-methylcytidine-3'-phosphate
  modified_base 4: mod_base = OTHER; note = 2'-O-methyladenosine-3'-phosphate
  modified_base 5: mod_base = OTHER; note = 2'-O-methyladenosine-3'-phosphate
  modified_base 6: mod_base = OTHER; note = 2'-deoxy-2'-fluorouridine-3'-phosphate
  modified_base 7: mod_base = OTHER; note = 2'-O-methyladenosine-3'-phosphate
  modified_base 8: mod_base = OTHER; note = 2'-O-methylguanosine-3'-phosphate
  modified_base 9: mod_base = OTHER; note = 2'-O-methylcytidine-3'-phosphate
  modified_base 10: mod_base = OTHER; note = 2'-O-methyladenosine-3'-phosphate
  modified_base 11: mod_base = OTHER; note = 2'-O-methylguanosine-3'-phosphate
  modified_base 12: mod_base = OTHER; note = 2'-O-methylguanosine-3'-phosphate
  modified_base 13: mod_base = OTHER; note = 2'-O-methyluridine-3'-phosphate
  modified_base 14: mod_base = OTHER; note = 2'-deoxy-2'-fluorouridine-3'-phosphate
  modified_base 15: mod_base = OTHER; note = 2'-O-methyluridine-3'-phosphate
  modified_base 16: mod_base = OTHER; note = 2'-deoxy-2'-fluoroadenosine-3'-phosphate
  modified_base 17: mod_base = OTHER; note = 2'-O-methylcytidine-3'-phosphate
  modified_base 18: mod_base = OTHER; note = 2'-O-methylcytidine-3'-phosphate
  modified_base 19: mod_base = OTHER; note = 2'-O-methyluridine-3'-phosphate
  modified_base 20: mod_base = OTHER; note = 2'-O-methyluridine-3'-phosphate
  modified_base 21: mod_base = OTHER; note = 2'-O-methylguanosine-3'-phosphorothioate
  modified_base 22: mod_base = OTHER; note = 2'-O-methyluridine-3'-phosphorothioate
  modified_base 23: mod_base = OTHER; note = 2'-O-methylguanosine
tgcaatagcaggtttaccttgtg

SEQ ID NO: 12181 - RNA, 23 nt, synthetic construct
  source 1..23: mol_type = other RNA
  modified_base 1: mod_base = OTHER; note = 2'-O-methyluridine-3'-phosphorothioate 5'-(E)-Vinylphosphonate
  modified_base 2: mod_base = OTHER; note = 2'-deoxy-2'-fluoroadenosine-3'-phosphorothioate
  modified_base 3: mod_base = OTHER; note = 2'-O-methylguanosine-3'-phosphate
  modified_base 4: mod_base = OTHER; note = 2'-O-methylcytidine-3'-phosphate
  modified_base 5: mod_base = OTHER; note = 2'-O-methyladenosine-3'-phosphate
  modified_base 6: mod_base = OTHER; note = 2'-deoxy-2'-fluoroadenosine-3'-phosphate
  modified_base 7: mod_base = OTHER; note = 2'-O-methyluridine-3'-phosphate
  modified_base 8: mod_base = OTHER; note = 2'-O-methyladenosine-3'-phosphate
  modified_base 9: mod_base = OTHER; note = 2'-O-methylguanosine-3'-phosphate
  modified_base 10: mod_base = OTHER; note = 2'-O-methylcytidine-3'-phosphate
  modified_base 11: mod_base = OTHER; note = 2'-O-methyladenosine-3'-phosphate
  modified_base 12: mod_base = OTHER; note = 2'-O-methylguanosine-3'-phosphate
  modified_base 13: mod_base = OTHER; note = 2'-O-methylguanosine-3'-phosphate
  modified_base 14: mod_base = OTHER; note = 2'-deoxy-2'-fluorouridine-3'-phosphate
  modified_base 15: mod_base = OTHER; note = 2'-O-methyluridine-3'-phosphate
  modified_base 16: mod_base = OTHER; note = 2'-deoxy-2'-fluorouridine-3'-phosphate
  modified_base 17: mod_base = OTHER; note = 2'-O-methyladenosine-3'-phosphate
  modified_base 18: mod_base = OTHER; note = 2'-O-methylcytidine-3'-phosphate
  modified_base 19: mod_base = OTHER; note = 2'-O-methylcytidine-3'-phosphate
  modified_base 20: mod_base = OTHER; note = 2'-O-methyluridine-3'-phosphate
  modified_base 21: mod_base = OTHER; note = 2'-O-methyluridine-3'-phosphorothioate
  modified_base 22: mod_base = OTHER; note = 2'-O-methylguanosine-3'-phosphorothioate
  modified_base 23: mod_base = OTHER; note = 2'-O-methyluridine
tagcaatagcaggtttaccttgt

SEQ ID NO: 12182 - RNA, 23 nt, synthetic construct
  source 1..23: mol_type = other RNA
  modified_base 1: mod_base = OTHER; note = 2'-O-methyluridine-3'-phosphorothioate 5'-(E)-Vinylphosphonate
  modified_base 2: mod_base = OTHER; note = 2'-deoxy-2'-fluoroguanosine-3'-phosphorothioate
  modified_base 3: mod_base = OTHER; note = 2'-O-methyladenosine-3'-phosphate
  modified_base 4: mod_base = OTHER; note = 2'-O-methylguanosine-3'-phosphate
  modified_base 5: mod_base = OTHER; note = 2'-O-methylcytidine-3'-phosphate
  modified_base 6: mod_base = OTHER; note = 2'-deoxy-2'-fluoroadenosine-3'-phosphate
  modified_base 7: mod_base = OTHER; note = 2'-O-methyladenosine-3'-phosphate
  modified_base 8: mod_base = OTHER; note = 2'-O-methyluridine-3'-phosphate
  modified_base 9: mod_base = OTHER; note = 2'-O-methyladenosine-3'-phosphate
  modified_base 10: mod_base = OTHER; note = 2'-O-methylguanosine-3'-phosphate
  modified_base 11: mod_base = OTHER; note = 2'-O-methylcytidine-3'-phosphate
  modified_base 12: mod_base = OTHER; note = 2'-O-methyladenosine-3'-phosphate
  modified_base 13: mod_base = OTHER; note = 2'-O-methylguanosine-3'-phosphate
  modified_base 14: mod_base = OTHER; note = 2'-deoxy-2'-fluoroguanosine-3'-phosphate
  modified_base 15: mod_base = OTHER; note = 2'-O-methyluridine-3'-phosphate
  modified_base 16: mod_base = OTHER; note = 2'-deoxy-2'-fluorouridine-3'-phosphate
  modified_base 17: mod_base = OTHER; note = 2'-O-methyluridine-3'-phosphate
  modified_base 18: mod_base = OTHER; note = 2'-O-methyladenosine-3'-phosphate
  modified_base 19: mod_base = OTHER; note = 2'-O-methylcytidine-3'-phosphate
  modified_base 20: mod_base = OTHER; note = 2'-O-methylcytidine-3'-phosphate
  modified_base 21: mod_base = OTHER; note = 2'-O-methyluridine-3'-phosphorothioate
  modified_base 22: mod_base = OTHER; note = 2'-O-methyluridine-3'-phosphorothioate
  modified_base 23: mod_base = OTHER; note = 2'-O-methylguanosine
tgagcaatagcaggtttaccttg

SEQ ID NO: 12183 - RNA, 23 nt, synthetic construct
  source 1..23: mol_type = other RNA
  modified_base 1: mod_base = OTHER; note = 2'-O-methyluridine-3'-phosphorothioate 5'-(E)-Vinylphosphonate
  modified_base 2: mod_base = OTHER; note = 2'-deoxy-2'-fluorouridine-3'-phosphorothioate
  modified_base 3: mod_base = OTHER; note = 2'-O-methylguanosine-3'-phosphate
  modified_base 4: mod_base = OTHER; note = 2'-O-methyladenosine-3'-phosphate
  modified_base 5: mod_base = OTHER; note = 2'-O-methylguanosine-3'-phosphate
  modified_base 6: mod_base = OTHER; note = 2'-deoxy-2'-fluorocytidine-3'-phosphate
  modified_base 7: mod_base = OTHER; note = 2'-O-methyladenosine-3'-phosphate
  modified_base 8: mod_base = OTHER; note = 2'-O-methyladenosine-3'-phosphate
  modified_base 9: mod_base = OTHER; note = 2'-O-methyluridine-3'-phosphate
  modified_base 10: mod_base = OTHER; note = 2'-O-methyladenosine-3'-phosphate
  modified_base 11: mod_base = OTHER; note = 2'-O-methylguanosine-3'-phosphate
  modified_base 12: mod_base = OTHER; note = 2'-O-methylcytidine-3'-phosphate
  modified_base 13: mod_base = OTHER; note = 2'-O-methyladenosine-3'-phosphate
  modified_base 14: mod_base = OTHER; note = 2'-deoxy-2'-fluoroguanosine-3'-phosphate
  modified_base 15: mod_base = OTHER; note = 2'-O-methylguanosine-3'-phosphate
  modified_base 16: mod_base = OTHER; note = 2'-deoxy-2'-fluorouridine-3'-phosphate
  modified_base 17: mod_base = OTHER; note = 2'-O-methyluridine-3'-phosphate
  modified_base 18: mod_base = OTHER; note = 2'-O-methyluridine-3'-phosphate
  modified_base 19: mod_base = OTHER; note = 2'-O-methyladenosine-3'-phosphate
  modified_base 20: mod_base = OTHER; note = 2'-O-methylcytidine-3'-phosphate
  modified_base 21: mod_base = OTHER; note = 2'-O-methylcytidine-3'-phosphorothioate
  modified_base 22: mod_base = OTHER; note = 2'-O-methyluridine-3'-phosphorothioate
  modified_base 23: mod_base = OTHER; note = 2'-O-methyluridine
ttgagcaatagcaggtttacctt

SEQ ID NO: 12184 - RNA, 23 nt, synthetic construct
  source 1..23: mol_type = other RNA
  modified_base 1: mod_base = OTHER; note = 2'-O-methyluridine-3'-phosphorothioate 5'-(E)-Vinylphosphonate
  modified_base 2: mod_base = OTHER; note = 2'-deoxy-2'-fluoroadenosine-3'-phosphorothioate
  modified_base 3: mod_base = OTHER; note = 2'-O-methyluridine-3'-phosphate
  modified_base 4: mod_base = OTHER; note = 2'-O-methylguanosine-3'-phosphate
  modified_base 5: mod_base = OTHER; note = 2'-O-methyladenosine-3'-phosphate
  modified_base 6: mod_base = OTHER; note = 2'-deoxy-2'-fluoroguanosine-3'-phosphate
  modified_base 7: mod_base = OTHER; note = 2'-O-methylcytidine-3'-phosphate
  modified_base 8: mod_base = OTHER; note = 2'-O-methyladenosine-3'-phosphate
  modified_base 9: mod_base = OTHER; note = 2'-O-methyladenosine-3'-phosphate
  modified_base 10: mod_base = OTHER; note = 2'-O-methyluridine-3'-phosphate
  modified_base 11: mod_base = OTHER; note = 2'-O-methyladenosine-3'-phosphate
  modified_base 12: mod_base = OTHER; note = 2'-O-methylguanosine-3'-phosphate
  modified_base 13: mod_base = OTHER; note = 2'-O-methylcytidine-3'-phosphate
  modified_base 14: mod_base = OTHER; note = 2'-deoxy-2'-fluoroadenosine-3'-phosphate
  modified_base 15: mod_base = OTHER; note = 2'-O-methylguanosine-3'-phosphate
  modified_base 16: mod_base = OTHER; note = 2'-deoxy-2'-fluoroguanosine-3'-phosphate
  modified_base 17: mod_base = OTHER; note = 2'-O-methyluridine-3'-phosphate
  modified_base 18: mod_base = OTHER; note = 2'-O-methyluridine-3'-phosphate
  modified_base 19: mod_base = OTHER; note = 2'-O-methyluridine-3'-phosphate
  modified_base 20: mod_base = OTHER; note = 2'-O-methyladenosine-3'-phosphate
  modified_base 21: mod_base = OTHER; note = 2'-O-methylcytidine-3'-phosphorothioate
  modified_base 22: mod_base = OTHER; note = 2'-O-methylcytidine-3'-phosphorothioate
  modified_base 23: mod_base = OTHER; note = 2'-O-methyluridine
tatgagcaatagcaggtttacct

SEQ ID NO: 12185 - RNA, 23 nt, synthetic construct
  source 1..23: mol_type = other RNA
  modified_base 1: mod_base = OTHER; note = 2'-O-methyluridine-3'-phosphorothioate 5'-(E)-Vinylphosphonate
  modified_base 2: mod_base = OTHER; note = 2'-deoxy-2'-fluoroguanosine-3'-phosphorothioate
  modified_base 3: mod_base = OTHER; note = 2'-O-methyladenosine-3'-phosphate
  modified_base 4: mod_base = OTHER; note = 2'-O-methyluridine-3'-phosphate
  modified_base 5: mod_base = OTHER; note = 2'-O-methylguanosine-3'-phosphate
  modified_base 6: mod_base = OTHER; note = 2'-deoxy-2'-fluoroadenosine-3'-phosphate
  modified_base 7: mod_base = OTHER; note = 2'-O-methylguanosine-3'-phosphate
  modified_base 8: mod_base = OTHER; note = 2'-O-methylcytidine-3'-phosphate
  modified_base 9: mod_base = OTHER; note = 2'-O-methyladenosine-3'-phosphate
  modified_base 10: mod_base = OTHER; note = 2'-O-methyladenosine-3'-phosphate
  modified_base 11: mod_base = OTHER; note = 2'-O-methyluridine-3'-phosphate
  modified_base 12: mod_base = OTHER; note = 2'-O-methyladenosine-3'-phosphate
  modified_base 13: mod_base = OTHER; note = 2'-O-methylguanosine-3'-phosphate
  modified_base 14: mod_base = OTHER; note = 2'-deoxy-2'-fluorocytidine-3'-phosphate
  modified_base 15: mod_base = OTHER; note = 2'-O-methyladenosine-3'-phosphate
  modified_base 16: mod_base = OTHER; note = 2'-deoxy-2'-fluoroguanosine-3'-phosphate
  modified_base 17: mod_base = OTHER; note = 2'-O-methylguanosine-3'-phosphate
  modified_base 18: mod_base = OTHER; note = 2'-O-methyluridine-3'-phosphate
  modified_base 19: mod_base = OTHER; note = 2'-O-methyluridine-3'-phosphate
  modified_base 20: mod_base = OTHER; note = 2'-O-methyluridine-3'-phosphate
  modified_base 21: mod_base = OTHER; note = 2'-O-methyladenosine-3'-phosphorothioate
  modified_base 22: mod_base = OTHER; note = 2'-O-methylcytidine-3'-phosphorothioate
  modified_base 23: mod_base = OTHER; note = 2'-O-methylcytidine
tgatgagcaatagcaggtttacc

SEQ ID NO: 12186 - RNA, 23 nt, synthetic construct
  source 1..23: mol_type = other RNA
  modified_base 1: mod_base = OTHER; note = 2'-O-methyluridine-3'-phosphorothioate 5'-(E)-Vinylphosphonate
  modified_base 2: mod_base = OTHER; note = 2'-deoxy-2'-fluorocytidine-3'-phosphorothioate
  modified_base 3: mod_base = OTHER; note = 2'-O-methylguanosine-3'-phosphate
  modified_base 4: mod_base = OTHER; note = 2'-O-methyladenosine-3'-phosphate
  modified_base 5: mod_base = OTHER; note = 2'-O-methyluridine-3'-phosphate
  modified_base 6: mod_base = OTHER; note = 2'-deoxy-2'-fluoroguanosine-3'-phosphate
  modified_base 7: mod_base = OTHER; note = 2'-O-methyladenosine-3'-phosphate
  modified_base 8: mod_base = OTHER; note = 2'-O-methylguanosine-3'-phosphate
  modified_base 9: mod_base = OTHER; note = 2'-O-methylcytidine-3'-phosphate
  modified_base 10: mod_base = OTHER; note = 2'-O-methyladenosine-3'-phosphate
  modified_base 11: mod_base = OTHER; note = 2'-O-methyladenosine-3'-phosphate
  modified_base 12: mod_base = OTHER; note = 2'-O-methyluridine-3'-phosphate
  modified_base 13: mod_base = OTHER; note = 2'-O-methyladenosine-3'-phosphate
  modified_base 14: mod_base = OTHER; note = 2'-deoxy-2'-fluoroguanosine-3'-phosphate
  modified_base 15: mod_base = OTHER; note = 2'-O-methylcytidine-3'-phosphate
  modified_base 16: mod_base = OTHER; note = 2'-deoxy-2'-fluoroadenosine-3'-phosphate
  modified_base 17: mod_base = OTHER; note = 2'-O-methylguanosine-3'-phosphate
  modified_base 18: mod_base = OTHER; note = 2'-O-methylguanosine-3'-phosphate
  modified_base 19: mod_base = OTHER; note = 2'-O-methyluridine-3'-phosphate
  modified_base 20: mod_base = OTHER; note = 2'-O-methyluridine-3'-phosphate
  modified_base 21: mod_base = OTHER; note = 2'-O-methyluridine-3'-phosphorothioate
  modified_base 22: mod_base = OTHER; note = 2'-O-methyladenosine-3'-phosphorothioate
  modified_base 23: mod_base = OTHER; note = 2'-O-methylcytidine
tcgatgagcaatagcaggtttac

SEQ ID NO: 12187 - RNA, 23 nt, synthetic construct
  source 1..23: mol_type = other RNA
  modified_base 1: mod_base = OTHER; note = 2'-O-methyluridine-3'-phosphorothioate 5'-(E)-Vinylphosphonate
  modified_base 2: mod_base = OTHER; note = 2'-deoxy-2'-fluorouridine-3'-phosphorothioate
  modified_base 3: mod_base = OTHER; note = 2'-O-methylcytidine-3'-phosphate
  modified_base 4: mod_base = OTHER; note = 2'-O-methylguanosine-3'-phosphate
  modified_base 5: mod_base = OTHER; note = 2'-O-methyladenosine-3'-phosphate
  modified_base 6: mod_base = OTHER; note = 2'-deoxy-2'-fluorouridine-3'-phosphate
  modified_base 7: mod_base = OTHER; note = 2'-O-methylguanosine-3'-phosphate
  modified_base 8: mod_base = OTHER; note = 2'-O-methyladenosine-3'-phosphate
  modified_base 9: mod_base = OTHER; note = 2'-O-methylguanosine-3'-phosphate
  modified_base 10: mod_base = OTHER; note = 2'-O-methylcytidine-3'-phosphate
  modified_base 11: mod_base = OTHER; note = 2'-O-methyladenosine-3'-phosphate
  modified_base 12: mod_base = OTHER; note = 2'-O-methyladenosine-3'-phosphate
  modified_base 13: mod_base = OTHER; note = 2'-O-methyluridine-3'-phosphate
  modified_base 14: mod_base = OTHER; note = 2'-deoxy-2'-fluoroadenosine-3'-phosphate
  modified_base 15: mod_base = OTHER; note = 2'-O-methylguanosine-3'-phosphate
  modified_base 16: mod_base = OTHER; note = 2'-deoxy-2'-fluorocytidine-3'-phosphate
  modified_base 17: mod_base = OTHER; note = 2'-O-methyladenosine-3'-phosphate
  modified_base 18: mod_base = OTHER; note = 2'-O-methylguanosine-3'-phosphate
  modified_base 19: mod_base = OTHER; note = 2'-O-methylguanosine-3'-phosphate
  modified_base 20: mod_base = OTHER; note = 2'-O-methyluridine-3'-phosphate
  modified_base 21: mod_base = OTHER; note = 2'-O-methyluridine-3'-phosphorothioate
  modified_base 22: mod_base = OTHER; note = 2'-O-methyluridine-3'-phosphorothioate
  modified_base 23: mod_base = OTHER; note = 2'-O-methyladenosine
ttcgatgagcaatagcaggttta

SEQ ID NO: 12188 - RNA, 23 nt, synthetic construct
  source 1..23: mol_type = other RNA
  modified_base 1: mod_base = OTHER; note = 2'-O-methyluridine-3'-phosphorothioate 5'-(E)-Vinylphosphonate
  modified_base 2: mod_base = OTHER; note = 2'-deoxy-2'-fluorocytidine-3'-phosphorothioate
  modified_base 3: mod_base = OTHER; note = 2'-O-methyluridine-3'-phosphate
  modified_base 4: mod_base = OTHER; note = 2'-O-methylcytidine-3'-phosphate
  modified_base 5: mod_base = OTHER; note = 2'-O-methylguanosine-3'-phosphate
  modified_base 6: mod_base = OTHER; note = 2'-deoxy-2'-fluoroadenosine-3'-phosphate
  modified_base 7: mod_base = OTHER; note = 2'-O-methyluridine-3'-phosphate
  modified_base 8: mod_base = OTHER; note = 2'-O-methylguanosine-3'-phosphate
  modified_base 9: mod_base = OTHER; note = 2'-O-methyladenosine-3'-phosphate
  modified_base 10: mod_base = OTHER; note = 2'-O-methylguanosine-3'-phosphate
  modified_base 11: mod_base = OTHER; note = 2'-O-methylcytidine-3'-phosphate
  modified_base 12: mod_base = OTHER; note = 2'-O-methyladenosine-3'-phosphate
  modified_base 13: mod_base = OTHER; note = 2'-O-methyladenosine-3'-phosphate
  modified_base 14: mod_base = OTHER; note = 2'-deoxy-2'-fluorouridine-3'-phosphate
  modified_base 15: mod_base = OTHER; note = 2'-O-methyladenosine-3'-phosphate
  modified_base 16: mod_base = OTHER; note = 2'-deoxy-2'-fluoroguanosine-3'-phosphate
  modified_base 17: mod_base = OTHER; note = 2'-O-methylcytidine-3'-phosphate
  modified_base 18: mod_base = OTHER; note = 2'-O-methyladenosine-3'-phosphate
  modified_base 19: mod_base = OTHER; note = 2'-O-methylguanosine-3'-phosphate
  modified_base 20: mod_base = OTHER; note = 2'-O-methylguanosine-3'-phosphate
  modified_base 21: mod_base = OTHER; note = 2'-O-methyluridine-3'-phosphorothioate
  modified_base 22: mod_base = OTHER; note = 2'-O-methyluridine-3'-phosphorothioate
  modified_base 23: mod_base = OTHER; note = 2'-O-methyluridine
tctcgatgagcaatagcaggttt

SEQ ID NO: 12189 - RNA, 23 nt, synthetic construct
  source 1..23: mol_type = other RNA
  modified_base 1: mod_base = OTHER; note = 2'-O-methyluridine-3'-phosphorothioate 5'-(E)-Vinylphosphonate
  modified_base 2: mod_base = OTHER; note = 2'-deoxy-2'-fluorouridine-3'-phosphorothioate
  modified_base 3: mod_base = OTHER; note = 2'-O-methylcytidine-3'-phosphate
  modified_base 4: mod_base = OTHER; note = 2'-O-methyluridine-3'-phosphate
  modified_base 5: mod_base = OTHER; note = 2'-O-methylcytidine-3'-phosphate
  modified_base 6: mod_base = OTHER; note = 2'-deoxy-2'-fluoroguanosine-3'-phosphate
  modified_base 7: mod_base = OTHER; note = 2'-O-methyladenosine-3'-phosphate
  modified_base 8: mod_base = OTHER; note = 2'-O-methyluridine-3'-phosphate
  modified_base 9: mod_base = OTHER; note = 2'-O-methylguanosine-3'-phosphate
  modified_base 10: mod_base = OTHER; note = 2'-O-methyladenosine-3'-phosphate
  modified_base 11: mod_base = OTHER; note = 2'-O-methylguanosine-3'-phosphate
  modified_base 12: mod_base = OTHER; note = 2'-O-methylcytidine-3'-phosphate
  modified_base 13: mod_base = OTHER; note = 2'-O-methyladenosine-3'-phosphate
  modified_base 14: mod_base = OTHER; note = 2'-deoxy-2'-fluoroadenosine-3'-phosphate
  modified_base 15: mod_base = OTHER; note = 2'-O-methyluridine-3'-phosphate
  modified_base 16: mod_base = OTHER; note = 2'-deoxy-2'-fluoroadenosine-3'-phosphate
  modified_base 17: mod_base = OTHER; note = 2'-O-methylguanosine-3'-phosphate
  modified_base 18: mod_base = OTHER; note = 2'-O-methylcytidine-3'-phosphate
  modified_base 19: mod_base = OTHER; note = 2'-O-methyladenosine-3'-phosphate
  modified_base 20: mod_base = OTHER; note = 2'-O-methylguanosine-3'-phosphate
  modified_base 21: mod_base = OTHER; note = 2'-O-methylguanosine-3'-phosphorothioate
  modified_base 22: mod_base = OTHER; note = 2'-O-methyluridine-3'-phosphorothioate
  modified_base 23: mod_base = OTHER; note = 2'-O-methyluridine
ttctcgatgagcaatagcaggtt

SEQ ID NO: 12190 - RNA, 23 nt, synthetic construct
  source 1..23: mol_type = other RNA
  modified_base 1: mod_base = OTHER; note = 2'-O-methyluridine-3'-phosphorothioate 5'-(E)-Vinylphosphonate
  modified_base 2: mod_base = OTHER; note = 2'-deoxy-2'-fluoroguanosine-3'-phosphorothioate
  modified_base 3: mod_base = OTHER; note = 2'-O-methyluridine-3'-phosphate
  modified_base 4: mod_base = OTHER; note = 2'-O-methylcytidine-3'-phosphate
  modified_base 5: mod_base = OTHER; note = 2'-O-methyluridine-3'-phosphate
  modified_base 6: mod_base = OTHER; note = 2'-deoxy-2'-fluorocytidine-3'-phosphate
  modified_base 7: mod_base = OTHER; note = 2'-O-methylguanosine-3'-phosphate
  modified_base 8: mod_base = OTHER; note = 2'-O-methyladenosine-3'-phosphate
  modified_base 9: mod_base = OTHER; note = 2'-O-methyluridine-3'-phosphate
  modified_base 10: mod_base = OTHER; note = 2'-O-methylguanosine-3'-phosphate
  modified_base 11: mod_base = OTHER; note = 2'-O-methyladenosine-3'-phosphate
  modified_base 12: mod_base = OTHER; note = 2'-O-methylguanosine-3'-phosphate
  modified_base 13: mod_base = OTHER; note = 2'-O-methylcytidine-3'-phosphate
  modified_base 14: mod_base = OTHER; note = 2'-deoxy-2'-fluoroadenosine-3'-phosphate
  modified_base 15: mod_base = OTHER; note = 2'-O-methyladenosine-3'-phosphate
  modified_base 16: mod_base = OTHER; note = 2'-deoxy-2'-fluorouridine-3'-phosphate
  modified_base 17: mod_base = OTHER; note = 2'-O-methyladenosine-3'-phosphate
  modified_base 18: mod_base = OTHER; note = 2'-O-methylguanosine-3'-phosphate
  modified_base 19: mod_base = OTHER; note = 2'-O-methylcytidine-3'-phosphate
  modified_base 20: mod_base = OTHER; note = 2'-O-methyladenosine-3'-phosphate
  modified_base 21: mod_base = OTHER; note = 2'-O-methylguanosine-3'-phosphorothioate
  modified_base 22: mod_base = OTHER; note = 2'-O-methylguanosine-3'-phosphorothioate
  modified_base 23: mod_base = OTHER; note = 2'-O-methyluridine
tgtctcgatgagcaatagcaggt

SEQ ID NO: 12191 - RNA, 23 nt, synthetic construct
  source 1..23: mol_type = other RNA
  modified_base 1: mod_base = OTHER; note = 2'-O-methyluridine-3'-phosphorothioate 5'-(E)-Vinylphosphonate
  modified_base 2: mod_base = OTHER; note = 2'-deoxy-2'-fluorouridine-3'-phosphorothioate
  modified_base 3: mod_base = OTHER; note = 2'-O-methylguanosine-3'-phosphate
  modified_base 4: mod_base = OTHER; note = 2'-O-methyluridine-3'-phosphate
  modified_base 5: mod_base = OTHER; note = 2'-O-methylcytidine-3'-phosphate
  modified_base 6: mod_base = OTHER; note = 2'-deoxy-2'-fluorouridine-3'-phosphate
  modified_base 7: mod_base = OTHER; note = 2'-O-methylcytidine-3'-phosphate
  modified_base 8: mod_base = OTHER; note = 2'-O-methylguanosine-3'-phosphate
  modified_base 9: mod_base = OTHER; note = 2'-O-methyladenosine-3'-phosphate
  modified_base 10: mod_base = OTHER; note = 2'-O-methyluridine-3'-phosphate
  modified_base 11: mod_base = OTHER; note = 2'-O-methylguanosine-3'-phosphate
  modified_base 12: mod_base = OTHER; note = 2'-O-methyladenosine-3'-phosphate
  modified_base 13: mod_base = OTHER; note = 2'-O-methylguanosine-3'-phosphate
  modified_base 14: mod_base = OTHER; note = 2'-deoxy-2'-fluorocytidine-3'-phosphate
  modified_base 15: mod_base = OTHER; note = 2'-O-methyladenosine-3'-phosphate
  modified_base 16: mod_base = OTHER; note = 2'-deoxy-2'-fluoroadenosine-3'-phosphate
  modified_base 17: mod_base = OTHER; note = 2'-O-methyluridine-3'-phosphate
  modified_base 18: mod_base = OTHER; note = 2'-O-methyladenosine-3'-phosphate
  modified_base 19: mod_base = OTHER; note = 2'-O-methylguanosine-3'-phosphate
  modified_base 20: mod_base = OTHER; note = 2'-O-methylcytidine-3'-phosphate
  modified_base 21: mod_base = OTHER; note = 2'-O-methyladenosine-3'-phosphorothioate
  modified_base 22: mod_base = OTHER; note = 2'-O-methylguanosine-3'-phosphorothioate
  modified_base 23: mod_base = OTHER; note = 2'-O-methylguanosine
ttgtctcgatgagcaatagcagg

SEQ ID NO: 12192 - RNA, 23 nt, synthetic construct
  source 1..23: mol_type = other RNA
  modified_base 1: mod_base = OTHER; note = 2'-O-methyluridine-3'-phosphorothioate 5'-(E)-Vinylphosphonate
  modified_base 2: mod_base = OTHER; note = 2'-deoxy-2'-fluoroadenosine-3'-phosphorothioate
  modified_base 3: mod_base = OTHER; note = 2'-O-methyluridine-3'-phosphate
  modified_base 4: mod_base = OTHER; note = 2'-O-methylguanosine-3'-phosphate
  modified_base 5: mod_base = OTHER; note = 2'-O-methyluridine-3'-phosphate
  modified_base 6: mod_base = OTHER; note = 2'-deoxy-2'-fluorocytidine-3'-phosphate
  modified_base 7: mod_base = OTHER; note = 2'-O-methyluridine-3'-phosphate
  modified_base 8: mod_base = OTHER; note = 2'-O-methylcytidine-3'-phosphate
  modified_base 9: mod_base = OTHER; note = 2'-O-methylguanosine-3'-phosphate
  modified_base 10: mod_base = OTHER; note = 2'-O-methyladenosine-3'-phosphate
  modified_base 11: mod_base = OTHER; note = 2'-O-methyluridine-3'-phosphate
  modified_base 12: mod_base = OTHER; note = 2'-O-methylguanosine-3'-phosphate
  modified_base 13: mod_base = OTHER; note = 2'-O-methyladenosine-3'-phosphate
  modified_base 14: mod_base = OTHER; note = 2'-deoxy-2'-fluoroguanosine-3'-phosphate
  modified_base 15: mod_base = OTHER; note = 2'-O-methylcytidine-3'-phosphate
  modified_base 16: mod_base = OTHER; note = 2'-deoxy-2'-fluoroadenosine-3'-phosphate
  modified_base 17: mod_base = OTHER; note = 2'-O-methyladenosine-3'-phosphate
  modified_base 18: mod_base = OTHER; note = 2'-O-methyluridine-3'-phosphate
  modified_base 19: mod_base = OTHER; note = 2'-O-methyladenosine-3'-phosphate
  modified_base 20: mod_base = OTHER; note = 2'-O-methylguanosine-3'-phosphate
  modified_base 21: mod_base = OTHER; note = 2'-O-methylcytidine-3'-phosphorothioate
  modified_base 22: mod_base = OTHER; note = 2'-O-methyladenosine-3'-phosphorothioate
  modified_base 23: mod_base = OTHER; note = 2'-O-methylguanosine
tatgtctcgatgagcaatagcag

SEQ ID NO: 12193 - RNA, 23 nt, synthetic construct
  source 1..23: mol_type = other RNA
  modified_base 1: mod_base = OTHER; note = 2'-O-methyluridine-3'-phosphorothioate 5'-(E)-Vinylphosphonate
  modified_base 2: mod_base = OTHER; note = 2'-deoxy-2'-fluorouridine-3'-phosphorothioate
  modified_base 3: mod_base = OTHER; note = 2'-O-methyladenosine-3'-phosphate
  modified_base 4: mod_base = OTHER; note = 2'-O-methyluridine-3'-phosphate
  modified_base 5: mod_base = OTHER; note = 2'-O-methylguanosine-3'-phosphate
  modified_base 6: mod_base = OTHER; note = 2'-deoxy-2'-fluorouridine-3'-phosphate
  modified_base 7: mod_base = OTHER; note = 2'-O-methylcytidine-3'-phosphate
  modified_base 8: mod_base = OTHER; note = 2'-O-methyluridine-3'-phosphate
  modified_base 9: mod_base = OTHER; note = 2'-O-methylcytidine-3'-phosphate
  modified_base 10: mod_base = OTHER; note = 2'-O-methylguanosine-3'-phosphate
  modified_base 11: mod_base = OTHER; note = 2'-O-methyladenosine-3'-phosphate
  modified_base 12: mod_base = OTHER; note = 2'-O-methyluridine-3'-phosphate
  modified_base 13: mod_base = OTHER; note = 2'-O-methylguanosine-3'-phosphate
  modified_base 14: mod_base = OTHER; note = 2'-deoxy-2'-fluoroadenosine-3'-phosphate
  modified_base 15: mod_base = OTHER; note = 2'-O-methylguanosine-3'-phosphate
  modified_base 16: mod_base = OTHER; note = 2'-deoxy-2'-fluorocytidine-3'-phosphate
  modified_base 17: mod_base = OTHER; note = 2'-O-methyladenosine-3'-phosphate
  modified_base 18: mod_base = OTHER; note = 2'-O-methyladenosine-3'-phosphate
  modified_base 19: mod_base = OTHER; note = 2'-O-methyluridine-3'-phosphate
  modified_base 20: mod_base = OTHER; note = 2'-O-methyladenosine-3'-phosphate
  modified_base 21: mod_base = OTHER; note = 2'-O-methylguanosine-3'-phosphorothioate
  modified_base 22: mod_base = OTHER; note = 2'-O-methylcytidine-3'-phosphorothioate
  modified_base 23: mod_base = OTHER; note = 2'-O-methyladenosine
ttatgtctcgatgagcaatagca

SEQ ID NO: 12194 - RNA, 23 nt, synthetic construct
  source 1..23: mol_type = other RNA
  modified_base 1: mod_base = OTHER; note = 2'-O-methyluridine-3'-phosphorothioate 5'-(E)-Vinylphosphonate
  modified_base 2: mod_base = OTHER; note = 2'-deoxy-2'-fluorouridine-3'-phosphorothioate
  modified_base 3: mod_base = OTHER; note = 2'-O-methyluridine-3'-phosphate
  modified_base 4: mod_base = OTHER; note = 2'-O-methyladenosine-3'-phosphate
  modified_base 5: mod_base = OTHER; note = 2'-O-methyluridine-3'-phosphate
  modified_base 6: mod_base = OTHER; note = 2'-deoxy-2'-fluoroguanosine-3'-phosphate
  modified_base 7: mod_base = OTHER; note = 2'-O-methyluridine-3'-phosphate
  modified_base 8: mod_base = OTHER; note = 2'-O-methylcytidine-3'-phosphate
  modified_base 9: mod_base = OTHER; note = 2'-O-methyluridine-3'-phosphate
  modified_base 10: mod_base = OTHER; note = 2'-O-methylcytidine-3'-phosphate
  modified_base 11: mod_base = OTHER; note = 2'-O-methylguanosine-3'-phosphate
  modified_base 12: mod_base = OTHER; note = 2'-O-methyladenosine-3'-phosphate
  modified_base 13: mod_base = OTHER; note = 2'-O-methyluridine-3'-phosphate
  modified_base 14: mod_base = OTHER; note = 2'-deoxy-2'-fluoroguanosine-3'-phosphate
  modified_base 15: mod_base = OTHER; note = 2'-O-methyladenosine-3'-phosphate
  modified_base 16: mod_base = OTHER; note = 2'-deoxy-2'-fluoroguanosine-3'-phosphate
  modified_base 17: mod_base = OTHER; note = 2'-O-methylcytidine-3'-phosphate
  modified_base 18: mod_base = OTHER; note = 2'-O-methyladenosine-3'-phosphate
  modified_base 19: mod_base = OTHER; note = 2'-O-methyladenosine-3'-phosphate
  modified_base 20: mod_base = OTHER; note = 2'-O-methyluridine-3'-phosphate
  modified_base 21: mod_base = OTHER; note = 2'-O-methyladenosine-3'-phosphorothioate
  modified_base 22: mod_base = OTHER; note = 2'-O-methylguanosine-3'-phosphorothioate
  modified_base 23: mod_base = OTHER; note = 2'-O-methylcytidine
tttatgtctcgatgagcaatagc

SEQ ID NO: 12195 - RNA, 23 nt, synthetic construct
  source 1..23: mol_type = other RNA
  modified_base 1: mod_base = OTHER; note = 2'-O-methyluridine-3'-phosphorothioate 5'-(E)-Vinylphosphonate
  modified_base 2: mod_base = OTHER; note = 2'-deoxy-2'-fluorouridine-3'-phosphorothioate
  modified_base 3: mod_base = OTHER; note = 2'-O-methyluridine-3'-phosphate
  modified_base 4: mod_base = OTHER; note = 2'-O-methyluridine-3'-phosphate
  modified_base 5: mod_base = OTHER; note = 2'-O-methyluridine-3'-phosphate
  modified_base 6: mod_base = OTHER; note = 2'-deoxy-2'-fluoroadenosine-3'-phosphate
  modified_base 7: mod_base = OTHER; note = 2'-O-methyluridine-3'-phosphate
  modified_base 8: mod_base = OTHER; note = 2'-O-methylguanosine-3'-phosphate
  modified_base 9: mod_base = OTHER; note = 2'-O-methyluridine-3'-phosphate
  modified_base 10: mod_base = OTHER; note = 2'-O-methylcytidine-3'-phosphate
  modified_base 11: mod_base = OTHER; note = 2'-O-methyluridine-3'-phosphate
  modified_base 12: mod_base = OTHER; note = 2'-O-methylcytidine-3'-phosphate
  modified_base 13: mod_base = OTHER; note = 2'-O-methylguanosine-3'-phosphate
  modified_base 14: mod_base = OTHER; note = 2'-deoxy-2'-fluoroadenosine-3'-phosphate
  modified_base 15: mod_base = OTHER; note = 2'-O-methyluridine-3'-phosphate
  modified_base 16: mod_base = OTHER; note = 2'-deoxy-2'-fluoroguanosine-3'-phosphate
  modified_base 17: mod_base = OTHER; note = 2'-O-methyladenosine-3'-phosphate
  modified_base 18: mod_base = OTHER; note = 2'-O-methylguanosine-3'-phosphate
  modified_base 19: mod_base = OTHER; note = 2'-O-methylcytidine-3'-phosphate
  modified_base 20: mod_base = OTHER; note = 2'-O-methyladenosine-3'-phosphate
  modified_base 21: mod_base = OTHER; note = 2'-O-methyladenosine-3'-phosphorothioate
  modified_base 22: mod_base = OTHER; note = 2'-O-methyluridine-3'-phosphorothioate
  modified_base 23: mod_base = OTHER; note = 2'-O-methyladenosine
tttttatgtctcgatgagcaata

SEQ ID NO: 12196 - RNA, 23 nt, synthetic construct
  source 1..23: mol_type = other RNA
  modified_base 1: mod_base = OTHER; note = 2'-O-methyluridine-3'-phosphorothioate 5'-(E)-Vinylphosphonate
  modified_base 2: mod_base = OTHER; note = 2'-deoxy-2'-fluoroadenosine-3'-phosphorothioate
  modified_base 3: mod_base = OTHER; note = 2'-O-methyluridine-3'-phosphate
  modified_base 4: mod_base = OTHER; note = 2'-O-methyluridine-3'-phosphate
  modified_base 5: mod_base = OTHER; note = 2'-O-methyluridine-3'-phosphate
  modified_base 6: mod_base = OTHER; note = 2'-deoxy-2'-fluorouridine-3'-phosphate
  modified_base 7: mod_base = OTHER; note = 2'-O-methyladenosine-3'-phosphate
  modified_base 8: mod_base = OTHER; note = 2'-O-methyluridine-3'-phosphate
  modified_base 9: mod_base = OTHER; note = 2'-O-methylguanosine-3'-phosphate
  modified_base 10: mod_base = OTHER; note = 2'-O-methyluridine-3'-phosphate
  modified_base 11: mod_base = OTHER; note = 2'-O-methylcytidine-3'-phosphate
  modified_base 12: mod_base = OTHER; note = 2'-O-methyluridine-3'-phosphate
  modified_base 13: mod_base = OTHER; note = 2'-O-methylcytidine-3'-phosphate
  modified_base 14: mod_base = OTHER; note = 2'-deoxy-2'-fluoroguanosine-3'-phosphate
  modified_base 15: mod_base = OTHER; note = 2'-O-methyladenosine-3'-phosphate
  modified_base 16: mod_base = OTHER; note = 2'-deoxy-2'-fluorouridine-3'-phosphate
  modified_base 17: mod_base = OTHER; note = 2'-O-methylguanosine-3'-phosphate
  modified_base 18: mod_base = OTHER; note = 2'-O-methyladenosine-3'-phosphate
  modified_base 19: mod_base = OTHER; note = 2'-O-methylguanosine-3'-phosphate
  modified_base 20: mod_base = OTHER; note = 2'-O-methylcytidine-3'-phosphate
  modified_base 21: mod_base = OTHER; note = 2'-O-methyladenosine-3'-phosphorothioate
  modified_base 22: mod_base = OTHER; note = 2'-O-methyladenosine-3'-phosphorothioate
  modified_base 23: mod_base = OTHER; note = 2'-O-methyluridine
tattttatgtctcgatgagcaat

SEQ ID NO: 12197 - RNA, 23 nt, synthetic construct
  source 1..23: mol_type = other RNA
  modified_base 1: mod_base = OTHER; note = 2'-O-methyluridine-3'-phosphorothioate 5'-(E)-Vinylphosphonate
  modified_base 2: mod_base = OTHER; note = 2'-deoxy-2'-fluoroguanosine-3'-phosphorothioate
  modified_base 3: mod_base = OTHER; note = 2'-O-methyladenosine-3'-phosphate
  modified_base 4: mod_base = OTHER; note = 2'-O-methyluridine-3'-phosphate
  modified_base 5: mod_base = OTHER; note = 2'-O-methyluridine-3'-phosphate
  modified_base 6: mod_base = OTHER; note = 2'-deoxy-2'-fluorouridine-3'-phosphate
  modified_base 7: mod_base = OTHER; note = 2'-O-methyluridine-3'-phosphate
  modified_base 8: mod_base = OTHER; note = 2'-O-methyladenosine-3'-phosphate
  modified_base 9: mod_base = OTHER; note = 2'-O-methyluridine-3'-phosphate
  modified_base 10: mod_base = OTHER; note = 2'-O-methylguanosine-3'-phosphate
  modified_base 11: mod_base = OTHER; note = 2'-O-methyluridine-3'-phosphate
  modified_base 12: mod_base = OTHER; note = 2'-O-methylcytidine-3'-phosphate
  modified_base 13: mod_base = OTHER; note = 2'-O-methyluridine-3'-phosphate
  modified_base 14: mod_base = OTHER; note = 2'-deoxy-2'-fluorocytidine-3'-phosphate
  modified_base 15: mod_base = OTHER; note = 2'-O-methylguanosine-3'-phosphate
  modified_base 16: mod_base = OTHER; note = 2'-deoxy-2'-fluoroadenosine-3'-phosphate
  modified_base 17: mod_base = OTHER; note = 2'-O-methyluridine-3'-phosphate
  modified_base 18: mod_base = OTHER; note = 2'-O-methylguanosine-3'-phosphate
  modified_base 19: mod_base = OTHER; note = 2'-O-methyladenosine-3'-phosphate
  modified_base 20: mod_base = OTHER; note = 2'-O-methylguanosine-3'-phosphate
  modified_base 21: mod_base = OTHER; note = 2'-O-methylcytidine-3'-phosphorothioate
  modified_base 22: mod_base = OTHER; note = 2'-O-methyladenosine-3'-phosphorothioate
  modified_base 23: mod_base = OTHER; note = 2'-O-methyladenosine
tgattttatgtctcgatgagcaa

SEQ ID NO: 12198 - RNA, 23 nt, synthetic construct
  source 1..23: mol_type = other RNA
  modified_base 1: mod_base = OTHER; note = 2'-O-methyluridine-3'-phosphorothioate 5'-(E)-Vinylphosphonate
  modified_base 2: mod_base = OTHER; note = 2'-deoxy-2'-fluorouridine-3'-phosphorothioate
  modified_base 3: mod_base = OTHER; note = 2'-O-methylguanosine-3'-phosphate
  modified_base 4: mod_base = OTHER; note = 2'-O-methyladenosine-3'-phosphate
  modified_base 5: mod_base = OTHER; note = 2'-O-methyluridine-3'-phosphate
  modified_base 6: mod_base = OTHER; note = 2'-deoxy-2'-fluorouridine-3'-phosphate
  modified_base 7: mod_base = OTHER; note = 2'-O-methyluridine-3'-phosphate
  modified_base 8: mod_base = OTHER; note = 2'-O-methyluridine-3'-phosphate
  modified_base 9: mod_base = OTHER; note = 2'-O-methyladenosine-3'-phosphate
  modified_base 10: mod_base = OTHER; note = 2'-O-methyluridine-3'-phosphate
  modified_base 11: mod_base = OTHER; note = 2'-O-methylguanosine-3'-phosphate
  modified_base 12: mod_base = OTHER; note = 2'-O-methyluridine-3'-phosphate
  modified_base 13: mod_base = OTHER; note = 2'-O-methylcytidine-3'-phosphate
  modified_base 14: mod_base = OTHER; note = 2'-deoxy-2'-fluorouridine-3'-phosphate
  modified_base 15: mod_base = OTHER; note = 2'-O-methylcytidine-3'-phosphate
  modified_base 16: mod_base = OTHER; note = 2'-deoxy-2'-fluoroguanosine-3'-phosphate
  modified_base 17: mod_base = OTHER; note = 2'-O-methyladenosine-3'-phosphate
  modified_base 18: mod_base = OTHER; note = 2'-O-methyluridine-3'-phosphate
  modified_base 19: mod_base = OTHER; note = 2'-O-methylguanosine-3'-phosphate
  modified_base 20: mod_base = OTHER; note = 2'-O-methyladenosine-3'-phosphate
  modified_base 21: mod_base = OTHER; note = 2'-O-methylguanosine-3'-phosphorothioate
  modified_base 22: mod_base = OTHER; note = 2'-O-methylcytidine-3'-phosphorothioate
  modified_base 23: mod_base = OTHER; note = 2'-O-methyladenosine
ttgattttatgtctcgatgagca

SEQ ID NO: 12199 - RNA, 23 nt, synthetic construct
  source 1..23: mol_type = other RNA
  modified_base 1: mod_base = OTHER; note = 2'-O-methyluridine-3'-phosphorothioate 5'-(E)-Vinylphosphonate
  modified_base 2: mod_base = OTHER; note = 2'-deoxy-2'-fluorouridine-3'-phosphorothioate
  modified_base 3: mod_base = OTHER; note = 2'-O-methyluridine-3'-phosphate
  modified_base 4: mod_base = OTHER; note = 2'-O-methylguanosine-3'-phosphate
  modified_base 5: mod_base = OTHER; note = 2'-O-methyladenosine-3'-phosphate
  modified_base 6: mod_base = OTHER; note = 2'-deoxy-2'-fluorouridine-3'-phosphate
  modified_base 7: mod_base = OTHER; note = 2'-O-methyluridine-3'-phosphate
  modified_base 8: mod_base = OTHER; note = 2'-O-methyluridine-3'-phosphate
  modified_base 9: mod_base = OTHER; note = 2'-O-methyluridine-3'-phosphate
  modified_base 10: mod_base = OTHER; note = 2'-O-methyladenosine-3'-phosphate
  modified_base 11: mod_base = OTHER; note = 2'-O-methyluridine-3'-phosphate
  modified_base 12: mod_base = OTHER; note = 2'-O-methylguanosine-3'-phosphate
  modified_base 13: mod_base = OTHER; note = 2'-O-methyluridine-3'-phosphate
  modified_base 14: mod_base = OTHER; note = 2'-deoxy-2'-fluorocytidine-3'-phosphate
  modified_base 15: mod_base = OTHER; note = 2'-O-methyluridine-3'-phosphate
  modified_base 16: mod_base = OTHER; note = 2'-deoxy-2'-fluorocytidine-3'-phosphate
  modified_base 17: mod_base = OTHER; note = 2'-O-methylguanosine-3'-phosphate
  modified_base 18: mod_base = OTHER; note = 2'-O-methyladenosine-3'-phosphate
  modified_base 19: mod_base = OTHER; note = 2'-O-methyluridine-3'-phosphate
  modified_base 20: mod_base = OTHER; note = 2'-O-methylguanosine-3'-phosphate
  modified_base 21: mod_base = OTHER; note = 2'-O-methyladenosine-3'-phosphorothioate
  modified_base 22: mod_base = OTHER; note = 2'-O-methylguanosine-3'-phosphorothioate
  modified_base 23: mod_base = OTHER; note = 2'-O-methylcytidine
tttgattttatgtctcgatgagc

SEQ ID NO: 12200 - RNA, 23 nt, synthetic construct
  source 1..23: mol_type = other RNA
  modified_base 1: mod_base = OTHER; note = 2'-O-methyluridine-3'-phosphorothioate 5'-(E)-Vinylphosphonate
  modified_base 2: mod_base = OTHER; note = 2'-deoxy-2'-fluorouridine-3'-phosphorothioate
  modified_base 3: mod_base = OTHER; note = 2'-O-methyluridine-3'-phosphate
  modified_base 4: mod_base = OTHER; note = 2'-O-methyluridine-3'-phosphate
  modified_base 5: mod_base = OTHER; note = 2'-O-methylguanosine-3'-phosphate
  modified_base 6: mod_base = OTHER; note = 2'-deoxy-2'-fluoroadenosine-3'-phosphate
  modified_base 7: mod_base = OTHER; note = 2'-O-methyluridine-3'-phosphate
  modified_base 8: mod_base = OTHER; note = 2'-O-methyluridine-3'-phosphate
  modified_base 9: mod_base = OTHER; note = 2'-O-methyluridine-3'-phosphate
  modified_base 10: mod_base = OTHER; note = 2'-O-methyluridine-3'-phosphate
  modified_base 11: mod_base = OTHER; note = 2'-O-methyladenosine-3'-phosphate
  modified_base 12: mod_base = OTHER; note = 2'-O-methyluridine-3'-phosphate
  modified_base 13: mod_base = OTHER; note = 2'-O-methylguanosine-3'-phosphate
  modified_base 14: mod_base = OTHER; note = 2'-deoxy-2'-fluorouridine-3'-phosphate
  modified_base 15: mod_base = OTHER; note = 2'-O-methylcytidine-3'-phosphate
  modified_base 16: mod_base = OTHER; note = 2'-deoxy-2'-fluorouridine-3'-phosphate
  modified_base 17: mod_base = OTHER; note = 2'-O-methylcytidine-3'-phosphate
  modified_base 18: mod_base = OTHER; note = 2'-O-methylguanosine-3'-phosphate
  modified_base 19: mod_base = OTHER; note = 2'-O-methyladenosine-3'-phosphate
  modified_base 20: mod_base = OTHER; note = 2'-O-methyluridine-3'-phosphate
  modified_base 21: mod_base = OTHER; note = 2'-O-methylguanosine-3'-phosphorothioate
  modified_base 22: mod_base = OTHER; note = 2'-O-methyladenosine-3'-phosphorothioate
  modified_base 23: mod_base = OTHER; note = 2'-O-methylguanosine
ttttgattttatgtctcgatgag

SEQ ID NO: 12201 - RNA, 23 nt, synthetic construct
  source 1..23: mol_type = other RNA
  modified_base 1: mod_base = OTHER; note = 2'-O-methyluridine-3'-phosphorothioate 5'-(E)-Vinylphosphonate
  modified_base 2: mod_base = OTHER; note = 2'-deoxy-2'-fluorocytidine-3'-phosphorothioate
  modified_base 3: mod_base = OTHER; note = 2'-O-methyluridine-3'-phosphate
  modified_base 4: mod_base = OTHER; note = 2'-O-methyluridine-3'-phosphate
  modified_base 5: mod_base = OTHER; note = 2'-O-methyluridine-3'-phosphate
  modified_base 6: mod_base = OTHER; note = 2'-deoxy-2'-fluoroguanosine-3'-phosphate
  modified_base 7: mod_base = OTHER; note = 2'-O-methyladenosine-3'-phosphate
  modified_base 8: mod_base = OTHER; note = 2'-O-methyluridine-3'-phosphate
  modified_base 9: mod_base = OTHER; note = 2'-O-methyluridine-3'-phosphate
  modified_base 10: mod_base = OTHER; note = 2'-O-methyluridine-3'-phosphate
  modified_base 11: mod_base = OTHER; note = 2'-O-methyluridine-3'-phosphate
  modified_base 12: mod_base = OTHER; note = 2'-O-methyladenosine-3'-phosphate
  modified_base 13: mod_base = OTHER; note = 2'-O-methyluridine-3'-phosphate
  modified_base 14: mod_base = OTHER; note = 2'-deoxy-2'-fluoroguanosine-3'-phosphate
  modified_base 15: mod_base = OTHER; note = 2'-O-methyluridine-3'-phosphate
  modified_base 16: mod_base = OTHER; note = 2'-deoxy-2'-fluorocytidine-3'-phosphate
  modified_base 17: mod_base = OTHER; note = 2'-O-methyluridine-3'-phosphate
  modified_base 18: mod_base = OTHER; note = 2'-O-methylcytidine-3'-phosphate
  modified_base 19: mod_base = OTHER; note = 2'-O-methylguanosine-3'-phosphate
  modified_base 20: mod_base = OTHER; note = 2'-O-methyladenosine-3'-phosphate
  modified_base 21: mod_base = OTHER; note = 2'-O-methyluridine-3'-phosphorothioate
  modified_base 22: mod_base = OTHER; note = 2'-O-methylguanosine-3'-phosphorothioate
  modified_base 23: mod_base = OTHER; note = 2'-O-methyladenosine
tctttgattttatgtctcgatga

SEQ ID NO: 12202 - RNA, 23 nt, synthetic construct
  source 1..23: mol_type = other RNA
  modified_base 1: mod_base = OTHER; note = 2'-O-methyluridine-3'-phosphorothioate 5'-(E)-Vinylphosphonate
  modified_base 2: mod_base = OTHER; note = 2'-deoxy-2'-fluorouridine-3'-phosphorothioate
  modified_base 3: mod_base = OTHER; note = 2'-O-methylcytidine-3'-phosphate
  modified_base 4: mod_base = OTHER; note = 2'-O-methyluridine-3'-phosphate
  modified_base 5: mod_base = OTHER; note = 2'-O-methyluridine-3'-phosphate
  modified_base 6: mod_base = OTHER; note = 2'-deoxy-2'-fluorouridine-3'-phosphate
  modified_base 7: mod_base = OTHER; note = 2'-O-methylguanosine-3'-phosphate
  modified_base 8: mod_base = OTHER; note = 2'-O-methyladenosine-3'-phosphate
  modified_base 9: mod_base = OTHER; note = 2'-O-methyluridine-3'-phosphate
  modified_base 10: mod_base = OTHER; note = 2'-O-methyluridine-3'-phosphate
  modified_base 11: mod_base = OTHER; note = 2'-O-methyluridine-3'-phosphate
  modified_base 12: mod_base = OTHER; note = 2'-O-methyluridine-3'-phosphate
  modified_base 13: mod_base = OTHER; note = 2'-O-methyladenosine-3'-phosphate
  modified_base 14: mod_base = OTHER; note = 2'-deoxy-2'-fluorouridine-3'-phosphate
  modified_base 15: mod_base = OTHER; note = 2'-O-methylguanosine-3'-phosphate
  modified_base 16: mod_base = OTHER; note = 2'-deoxy-2'-fluorouridine-3'-phosphate
  modified_base 17: mod_base = OTHER; note = 2'-O-methylcytidine-3'-phosphate
  modified_base 18: mod_base = OTHER; note = 2'-O-methyluridine-3'-phosphate
  modified_base 19: mod_base = OTHER; note = 2'-O-methylcytidine-3'-phosphate
  modified_base 20: mod_base = OTHER; note = 2'-O-methylguanosine-3'-phosphate
  modified_base 21: mod_base = OTHER; note = 2'-O-methyladenosine-3'-phosphorothioate
  modified_base 22: mod_base = OTHER; note = 2'-O-methyluridine-3'-phosphorothioate
  modified_base 23: mod_base = OTHER; note = 2'-O-methylguanosine
ttctttgattttatgtctcgatg

SEQ ID NO: 12203 - RNA, 23 nt, synthetic construct
  source 1..23: mol_type = other RNA
  modified_base 1: mod_base = OTHER; note = 2'-O-methyluridine-3'-phosphorothioate 5'-(E)-Vinylphosphonate
  modified_base 2: mod_base = OTHER; note = 2'-deoxy-2'-fluorouridine-3'-phosphorothioate
  modified_base 3: mod_base = OTHER; note = 2'-O-methyluridine-3'-phosphate
  modified_base 4: mod_base = OTHER; note = 2'-O-methylcytidine-3'-phosphate
  modified_base 5: mod_base = OTHER; note = 2'-O-methyluridine-3'-phosphate
  modified_base 6: mod_base = OTHER; note = 2'-deoxy-2'-fluorouridine-3'-phosphate
  modified_base 7: mod_base = OTHER; note = 2'-O-methyluridine-3'-phosphate
  modified_base 8: mod_base = OTHER; note = 2'-O-methylguanosine-3'-phosphate
  modified_base 9: mod_base = OTHER; note = 2'-O-methyladenosine-3'-phosphate
  modified_base 10: mod_base = OTHER; note = 2'-O-methyluridine-3'-phosphate
  modified_base 11: mod_base = OTHER; note = 2'-O-methyluridine-3'-phosphate
  modified_base 12: mod_base = OTHER; note = 2'-O-methyluridine-3'-phosphate
  modified_base 13: mod_base = OTHER; note = 2'-O-methyluridine-3'-phosphate
  modified_base 14: mod_base = OTHER; note = 2'-deoxy-2'-fluoroadenosine-3'-phosphate
  modified_base 15: mod_base = OTHER; note = 2'-O-methyluridine-3'-phosphate
  modified_base 16: mod_base = OTHER; note = 2'-deoxy-2'-fluoroguanosine-3'-phosphate
  modified_base 17: mod_base = OTHER; note = 2'-O-methyluridine-3'-phosphate
  modified_base 18: mod_base = OTHER; note = 2'-O-methylcytidine-3'-phosphate
  modified_base 19: mod_base = OTHER; note = 2'-O-methyluridine-3'-phosphate
  modified_base 20: mod_base = OTHER; note = 2'-O-methylcytidine-3'-phosphate
  modified_base 21: mod_base = OTHER; note = 2'-O-methylguanosine-3'-phosphorothioate
  modified_base 22: mod_base = OTHER; note = 2'-O-methyladenosine-3'-phosphorothioate
  modified_base 23: mod_base = OTHER; note = 2'-O-methyluridine
tttctttgattttatgtctcgat

SEQ ID NO: 12204 - RNA, 23 nt, synthetic construct
  source 1..23: mol_type = other RNA
  modified_base 1: mod_base = OTHER; note = 2'-O-methyluridine-3'-phosphorothioate 5'-(E)-Vinylphosphonate
  modified_base 2: mod_base = OTHER; note = 2'-deoxy-2'-fluoroadenosine-3'-phosphorothioate
  modified_base 3: mod_base = OTHER; note = 2'-O-methyluridine-3'-phosphate
  modified_base 4: mod_base = OTHER; note = 2'-O-methyluridine-3'-phosphate
  modified_base 5: mod_base = OTHER; note = 2'-O-methylcytidine-3'-phosphate
  modified_base 6: mod_base = OTHER; note = 2'-deoxy-2'-fluorouridine-3'-phosphate
  modified_base 7: mod_base = OTHER; note = 2'-O-methyluridine-3'-phosphate
  modified_base 8: mod_base = OTHER; note = 2'-O-methyluridine-3'-phosphate
  modified_base 9: mod_base = OTHER; note = 2'-O-methylguanosine-3'-phosphate
  modified_base 10: mod_base = OTHER; note = 2'-O-methyladenosine-3'-phosphate
  modified_base 11: mod_base = OTHER; note = 2'-O-methyluridine-3'-phosphate
  modified_base 12: mod_base = OTHER; note = 2'-O-methyluridine-3'-phosphate
  modified_base 13: mod_base = OTHER; note = 2'-O-methyluridine-3'-phosphate
  modified_base 14: mod_base = OTHER; note = 2'-deoxy-2'-fluorouridine-3'-phosphate
  modified_base 15: mod_base = OTHER; note = 2'-O-methyladenosine-3'-phosphate
  modified_base 16: mod_base = OTHER; note = 2'-deoxy-2'-fluorouridine-3'-phosphate
  modified_base 17: mod_base = OTHER; note = 2'-O-methylguanosine-3'-phosphate
  modified_base 18: mod_base = OTHER; note = 2'-O-methyluridine-3'-phosphate
  modified_base 19: mod_base = OTHER; note = 2'-O-methylcytidine-3'-phosphate
  modified_base 20: mod_base = OTHER; note = 2'-O-methyluridine-3'-phosphate
  modified_base 21: mod_base = OTHER; note = 2'-O-methylcytidine-3'-phosphorothioate
  modified_base 22: mod_base = OTHER; note = 2'-O-methylguanosine-3'-phosphorothioate
  modified_base 23: mod_base = OTHER; note = 2'-O-methyladenosine
tattctttgattttatgtctcga

SEQ ID NO: 12205 - RNA, 23 nt, synthetic construct
  source 1..23: mol_type = other RNA
  modified_base 1: mod_base = OTHER; note = 2'-O-methyluridine-3'-phosphorothioate 5'-(E)-Vinylphosphonate
  modified_base 2: mod_base = OTHER; note = 2'-deoxy-2'-fluorouridine-3'-phosphorothioate
  modified_base 3: mod_base = OTHER; note = 2'-O-methyladenosine-3'-phosphate
  modified_base 4: mod_base = OTHER; note = 2'-O-methyluridine-3'-phosphate
  modified_base 5: mod_base = OTHER; note = 2'-O-methyluridine-3'-phosphate
  modified_base 6: mod_base = OTHER; note = 2'-deoxy-2'-fluorocytidine-3'-phosphate
  modified_base 7: mod_base = OTHER; note = 2'-O-methyluridine-3'-phosphate
  modified_base 8: mod_base = OTHER; note = 2'-O-methyluridine-3'-phosphate
  modified_base 9: mod_base = OTHER; note = 2'-O-methyluridine-3'-phosphate
  modified_base 10: mod_base = OTHER; note = 2'-O-methylguanosine-3'-phosphate
  modified_base 11: mod_base = OTHER; note = 2'-O-methyladenosine-3'-phosphate
  modified_base 12: mod_base = OTHER; note = 2'-O-methyluridine-3'-phosphate
  modified_base 13: mod_base = OTHER; note = 2'-O-methyluridine-3'-phosphate
  modified_base 14: mod_base = OTHER; note = 2'-deoxy-2'-fluorouridine-3'-phosphate
  modified_base 15: mod_base = OTHER; note = 2'-O-methyluridine-3'-phosphate
  modified_base 16: mod_base = OTHER; note = 2'-deoxy-2'-fluoroadenosine-3'-phosphate
  modified_base 17: mod_base = OTHER; note = 2'-O-methyluridine-3'-phosphate
  modified_base 18: mod_base = OTHER; note = 2'-O-methylguanosine-3'-phosphate
  modified_base 19: mod_base = OTHER; note = 2'-O-methyluridine-3'-phosphate
  modified_base 20: mod_base = OTHER; note = 2'-O-methylcytidine-3'-phosphate
  modified_base 21: mod_base = OTHER; note = 2'-O-methyluridine-3'-phosphorothioate
  modified_base 22: mod_base = OTHER; note = 2'-O-methylcytidine-3'-phosphorothioate
  modified_base 23: mod_base = OTHER; note = 2'-O-methylguanosine
ttattctttgattttatgtctcg

SEQ ID NO: 12206 - RNA, 23 nt, synthetic construct
  source 1..23: mol_type = other RNA
  modified_base 1: mod_base = OTHER; note = 2'-O-methyluridine-3'-phosphorothioate 5'-(E)-Vinylphosphonate
  modified_base 2: mod_base = OTHER; note = 2'-deoxy-2'-fluorouridine-3'-phosphorothioate
  modified_base 3: mod_base = OTHER; note = 2'-O-methyladenosine-3'-phosphate
  modified_base 4: mod_base = OTHER; note = 2'-O-methyluridine-3'-phosphate
  modified_base 5: mod_base = OTHER; note = 2'-O-methylguanosine-3'-phosphate
  modified_base 6: mod_base = OTHER; note = 2'-deoxy-2'-fluoroguanosine-3'-phosphate
  modified_base 7: mod_base = OTHER; note = 2'-O-methylcytidine-3'-phosphate
  modified_base 8: mod_base = OTHER; note = 2'-O-methyladenosine-3'-phosphate
  modified_base 9: mod_base = OTHER; note = 2'-O-methylcytidine-3'-phosphate
  modified_base 10: mod_base = OTHER; note = 2'-O-methyladenosine-3'-phosphate
  modified_base 11: mod_base = OTHER; note = 2'-O-methyladenosine-3'-phosphate
  modified_base 12: mod_base = OTHER; note = 2'-O-methylguanosine-3'-phosphate
  modified_base 13: mod_base = OTHER; note = 2'-O-methyluridine-3'-phosphate
  modified_base 14: mod_base = OTHER; note = 2'-deoxy-2'-fluorouridine-3'-phosphate
  modified_base 15: mod_base = OTHER; note = 2'-O-methyluridine-3'-phosphate
  modified_base 16: mod_base = OTHER; note = 2'-deoxy-2'-fluorocytidine-3'-phosphate
  modified_base 17: mod_base = OTHER; note = 2'-O-methyladenosine-3'-phosphate
  modified_base 18: mod_base = OTHER; note = 2'-O-methylcytidine-3'-phosphate
  modified_base 19: mod_base = OTHER; note = 2'-O-methyladenosine-3'-phosphate
  modified_base 20: mod_base = OTHER; note = 2'-O-methylcytidine-3'-phosphate
  modified_base 21: mod_base = OTHER; note = 2'-O-methyluridine-3'-phosphorothioate
  modified_base 22: mod_base = OTHER; note = 2'-O-methyluridine-3'-phosphorothioate
  modified_base 23: mod_base = OTHER; note = 2'-O-methyluridine
ttatggcacaagtttcacacttt

SEQ ID NO: 12207 - RNA, 23 nt, synthetic construct
  source 1..23: mol_type = other RNA
  modified_base 1: mod_base = OTHER; note = 2'-O-methyluridine-3'-phosphorothioate 5'-(E)-Vinylphosphonate
  modified_base 2: mod_base = OTHER; note = 2'-deoxy-2'-fluorocytidine-3'-phosphorothioate
  modified_base 3: mod_base = OTHER; note = 2'-O-methyladenosine-3'-phosphate
  modified_base 4: mod_base = OTHER; note = 2'-O-methylcytidine-3'-phosphate
  modified_base 5: mod_base = OTHER; note = 2'-O-methyluridine-3'-phosphate
  modified_base 6: mod_base = OTHER; note = 2'-deoxy-2'-fluorouridine-3'-phosphate
  modified_base 7: mod_base = OTHER; note = 2'-O-methyluridine-3'-phosphate
  modified_base 8: mod_base = OTHER; note = 2'-O-methyluridine-3'-phosphate
  modified_base 9: mod_base = OTHER; note = 2'-O-methyluridine-3'-phosphate
  modified_base 10: mod_base = OTHER; note = 2'-O-methylcytidine-3'-phosphate
  modified_base 11: mod_base = OTHER; note = 2'-O-methyladenosine-3'-phosphate
  modified_base 12: mod_base = OTHER; note = 2'-O-methylcytidine-3'-phosphate
  modified_base 13: mod_base = OTHER; note = 2'-O-methyluridine-3'-phosphate
  modified_base 14: mod_base = OTHER; note = 2'-deoxy-2'-fluoroadenosine-3'-phosphate
  modified_base 15: mod_base = OTHER; note = 2'-O-methyladenosine-3'-phosphate
  modified_base 16: mod_base = OTHER; note = 2'-deoxy-2'-fluoroguanosine-3'-phosphate
  modified_base 17: mod_base = OTHER; note = 2'-O-methyladenosine-3'-phosphate
  modified_base 18: mod_base = OTHER; note = 2'-O-methyluridine-3'-phosphate
  modified_base 19: mod_base = OTHER; note = 2'-O-methyladenosine-3'-phosphate
  modified_base 20: mod_base = OTHER; note = 2'-O-methyluridine-3'-phosphate
  modified_base 21: mod_base = OTHER; note = 2'-O-methyluridine-3'-phosphorothioate
  modified_base 22: mod_base = OTHER; note = 2'-O-methylcytidine-3'-phosphorothioate
  modified_base 23: mod_base = OTHER; note = 2'-O-methyluridine
tcactttttcactaagatattct

SEQ ID NO: 12208 - RNA, 23 nt, synthetic construct
  source 1..23: mol_type = other RNA
  modified_base 1: mod_base = OTHER; note = 2'-O-methyluridine-3'-phosphorothioate 5'-(E)-Vinylphosphonate
  modified_base 2: mod_base = OTHER; note = 2'-deoxy-2'-fluoroadenosine-3'-phosphorothioate
  modified_base 3: mod_base = OTHER; note = 2'-O-methylcytidine-3'-phosphate
  modified_base 4: mod_base = OTHER; note = 2'-O-methyladenosine-3'-phosphate
  modified_base 5: mod_base = OTHER; note = 2'-O-methylcytidine-3'-phosphate
  modified_base 6: mod_base = OTHER; note = 2'-deoxy-2'-fluorouridine-3'-phosphate
  modified_base 7: mod_base = OTHER; note = 2'-O-methyluridine-3'-phosphate
  modified_base 8: mod_base = OTHER; note = 2'-O-methyluridine-3'-phosphate
  modified_base 9: mod_base = OTHER; note = 2'-O-methyluridine-3'-phosphate
  modified_base 10: mod_base = OTHER; note = 2'-O-methyluridine-3'-phosphate
  modified_base 11: mod_base = OTHER; note = 2'-O-methylcytidine-3'-phosphate
  modified_base 12: mod_base = OTHER; note = 2'-O-methyladenosine-3'-phosphate
  modified_base 13: mod_base = OTHER; note = 2'-O-methylcytidine-3'-phosphate
  modified_base 14: mod_base = OTHER; note = 2'-deoxy-2'-fluorouridine-3'-phosphate
  modified_base 15: mod_base = OTHER; note = 2'-O-methyladenosine-3'-phosphate
  modified_base 16: mod_base = OTHER; note = 2'-deoxy-2'-fluoroadenosine-3'-phosphate
  modified_base 17: mod_base = OTHER; note = 2'-O-methylguanosine-3'-phosphate
  modified_base 18: mod_base = OTHER; note = 2'-O-methyladenosine-3'-phosphate
  modified_base 19: mod_base = OTHER; note = 2'-O-methyluridine-3'-phosphate
  modified_base 20: mod_base = OTHER; note = 2'-O-methyladenosine-3'-phosphate
  modified_base 21: mod_base = OTHER; note = 2'-O-methyluridine-3'-phosphorothioate
  modified_base 22: mod_base = OTHER; note = 2'-O-methyluridine-3'-phosphorothioate
  modified_base 23: mod_base = OTHER; note = 2'-O-methylcytidine
tacactttttcactaagatattc

SEQ ID NO: 12209 - RNA, 23 nt, synthetic construct
  source 1..23: mol_type = other RNA
  modified_base 1: mod_base = OTHER; note = 2'-O-methyluridine-3'-phosphorothioate 5'-(E)-Vinylphosphonate
  modified_base 2: mod_base = OTHER; note = 2'-deoxy-2'-fluorocytidine-3'-phosphorothioate
  modified_base 3: mod_base = OTHER; note = 2'-O-methyladenosine-3'-phosphate
  modified_base 4: mod_base = OTHER; note = 2'-O-methylcytidine-3'-phosphate
  modified_base 5: mod_base = OTHER; note = 2'-O-methyladenosine-3'-phosphate
  modified_base 6: mod_base = OTHER; note = 2'-deoxy-2'-fluorocytidine-3'-phosphate
  modified_base 7: mod_base = OTHER; note = 2'-O-methyluridine-3'-phosphate
  modified_base 8: mod_base = OTHER; note = 2'-O-methyluridine-3'-phosphate
  modified_base 9: mod_base = OTHER; note = 2'-O-methyluridine-3'-phosphate
  modified_base 10: mod_base = OTHER; note = 2'-O-methyluridine-3'-phosphate
  modified_base 11: mod_base = OTHER; note = 2'-O-methyluridine-3'-phosphate
  modified_base 12: mod_base = OTHER; note = 2'-O-methylcytidine-3'-phosphate
  modified_base 13: mod_base = OTHER; note = 2'-O-methyladenosine-3'-phosphate
  modified_base 14: mod_base = OTHER; note = 2'-deoxy-2'-fluorocytidine-3'-phosphate
  modified_base 15: mod_base = OTHER; note = 2'-O-methyluridine-3'-phosphate
  modified_base 16: mod_base = OTHER; note = 2'-deoxy-2'-fluoroadenosine-3'-phosphate
  modified_base 17: mod_base = OTHER; note = 2'-O-methyladenosine-3'-phosphate
  modified_base 18: mod_base = OTHER; note = 2'-O-methylguanosine-3'-phosphate
  modified_base 19: mod_base = OTHER; note = 2'-O-methyladenosine-3'-phosphate
  modified_base 20: mod_base = OTHER; note = 2'-O-methyluridine-3'-phosphate
  modified_base 21: mod_base = OTHER; note = 2'-O-methyladenosine-3'-phosphorothioate
  modified_base 22: mod_base = OTHER; note = 2'-O-methyluridine-3'-phosphorothioate
  modified_base 23: mod_base = OTHER; note = 2'-O-methyluridine
tcacactttttcactaagatatt

SEQ ID NO: 12210 - RNA, 23 nt, synthetic construct
  source 1..23: mol_type = other RNA
  modified_base 1: mod_base = OTHER; note = 2'-O-methyluridine-3'-phosphorothioate 5'-(E)-Vinylphosphonate
  modified_base 2: mod_base = OTHER; note = 2'-deoxy-2'-fluorouridine-3'-phosphorothioate
  modified_base 3: mod_base = OTHER; note = 2'-O-methylcytidine-3'-phosphate
  modified_base 4: mod_base = OTHER; note = 2'-O-methyladenosine-3'-phosphate
  modified_base 5: mod_base = OTHER; note = 2'-O-methylcytidine-3'-phosphate
  modified_base 6: mod_base = OTHER; note = 2'-deoxy-2'-fluoroadenosine-3'-phosphate
  modified_base 7: mod_base = OTHER; note = 2'-O-methylcytidine-3'-phosphate
  modified_base 8: mod_base = OTHER; note = 2'-O-methyluridine-3'-phosphate
  modified_base 9: mod_base = OTHER; note = 2'-O-methyluridine-3'-phosphate
  modified_base 10: mod_base = OTHER; note = 2'-O-methyluridine-3'-phosphate
  modified_base 11: mod_base = OTHER; note = 2'-O-methyluridine-3'-phosphate
  modified_base 12: mod_base = OTHER; note = 2'-O-methyluridine-3'-phosphate
  modified_base 13: mod_base = OTHER; note = 2'-O-methylcytidine-3'-phosphate
  modified_base 14: mod_base = OTHER; note = 2'-deoxy-2'-fluoroadenosine-3'-phosphate
  modified_base 15: mod_base = OTHER; note = 2'-O-methylcytidine-3'-phosphate
  modified_base 16: mod_base = OTHER; note = 2'-deoxy-2'-fluorouridine-3'-phosphate
  modified_base 17: mod_base = OTHER; note = 2'-O-methyladenosine-3'-phosphate
  modified_base 18: mod_base = OTHER; note = 2'-O-methyladenosine-3'-phosphate
  modified_base 19: mod_base = OTHER; note = 2'-O-methylguanosine-3'-phosphate
  modified_base 20: mod_base = OTHER; note = 2'-O-methyladenosine-3'-phosphate
  modified_base 21: mod_base = OTHER; note = 2'-O-methyluridine-3'-phosphorothioate
  modified_base 22: mod_base = OTHER; note = 2'-O-methyladenosine-3'-phosphorothioate
  modified_base 23: mod_base = OTHER; note = 2'-O-methyluridine
ttcacactttttcactaagatat

SEQ ID NO: 12211 - RNA, 23 nt, synthetic construct
  source 1..23: mol_type = other RNA
  modified_base 1: mod_base = OTHER; note = 2'-O-methyluridine-3'-phosphorothioate 5'-(E)-Vinylphosphonate
  modified_base 2: mod_base = OTHER; note = 2'-deoxy-2'-fluorouridine-3'-phosphorothioate
  modified_base 3: mod_base = OTHER; note = 2'-O-methyluridine-3'-phosphate
  modified_base 4: mod_base = OTHER; note = 2'-O-methylcytidine-3'-phosphate
  modified_base 5: mod_base = OTHER; note = 2'-O-methyladenosine-3'-phosphate
  modified_base 6: mod_base = OTHER; note = 2'-deoxy-2'-fluorocytidine-3'-phosphate
  modified_base 7: mod_base = OTHER; note = 2'-O-methyladenosine-3'-phosphate
  modified_base 8: mod_base = OTHER; note = 2'-O-methylcytidine-3'-phosphate
  modified_base 9: mod_base = OTHER; note = 2'-O-methyluridine-3'-phosphate
  modified_base 10: mod_base = OTHER; note = 2'-O-methyluridine-3'-phosphate
  modified_base 11: mod_base = OTHER; note = 2'-O-methyluridine-3'-phosphate
  modified_base 12: mod_base = OTHER; note = 2'-O-methyluridine-3'-phosphate
  modified_base 13: mod_base = OTHER; note = 2'-O-methyluridine-3'-phosphate
  modified_base 14: mod_base = OTHER; note = 2'-deoxy-2'-fluorocytidine-3'-phosphate
  modified_base 15: mod_base = OTHER; note = 2'-O-methyladenosine-3'-phosphate
  modified_base 16: mod_base = OTHER; note = 2'-deoxy-2'-fluorocytidine-3'-phosphate
  modified_base 17: mod_base = OTHER; note = 2'-O-methyluridine-3'-phosphate
  modified_base 18: mod_base = OTHER; note = 2'-O-methyladenosine-3'-phosphate
  modified_base 19: mod_base = OTHER; note = 2'-O-methyladenosine-3'-phosphate
  modified_base 20: mod_base = OTHER; note = 2'-O-methylguanosine-3'-phosphate
  modified_base 21: mod_base = OTHER; note = 2'-O-methyladenosine-3'-phosphorothioate
  modified_base 22: mod_base = OTHER; note = 2'-O-methyluridine-3'-phosphorothioate
  modified_base 23: mod_base = OTHER; note = 2'-O-methyladenosine
tttcacactttttcactaagata

SEQ ID NO: 12212 - RNA, 23 nt, synthetic construct
  source 1..23: mol_type = other RNA
  modified_base 1: mod_base = OTHER; note = 2'-O-methyluridine-3'-phosphorothioate 5'-(E)-Vinylphosphonate
  modified_base 2: mod_base = OTHER; note = 2'-deoxy-2'-fluorouridine-3'-phosphorothioate
  modified_base 3: mod_base = OTHER; note = 2'-O-methyluridine-3'-phosphate
  modified_base 4: mod_base = OTHER; note = 2'-O-methyluridine-3'-phosphate
  modified_base 5: mod_base = OTHER; note = 2'-O-methylcytidine-3'-phosphate
  modified_base 6: mod_base = OTHER; note = 2'-deoxy-2'-fluoroadenosine-3'-phosphate
  modified_base 7: mod_base = OTHER; note = 2'-O-methylcytidine-3'-phosphate
  modified_base 8: mod_base = OTHER; note = 2'-O-methyladenosine-3'-phosphate
  modified_base 9: mod_base = OTHER; note = 2'-O-methylcytidine-3'-phosphate
  modified_base 10: mod_base = OTHER; note = 2'-O-methyluridine-3'-phosphate
  modified_base 11: mod_base = OTHER; note = 2'-O-methyluridine-3'-phosphate
  modified_base 12: mod_base = OTHER; note = 2'-O-methyluridine-3'-phosphate
  modified_base 13: mod_base = OTHER; note = 2'-O-methyluridine-3'-phosphate
  modified_base 14: mod_base = OTHER; note = 2'-deoxy-2'-fluorouridine-3'-phosphate
  modified_base 15: mod_base = OTHER; note = 2'-O-methylcytidine-3'-phosphate
  modified_base 16: mod_base = OTHER; note = 2'-deoxy-2'-fluoroadenosine-3'-phosphate
  modified_base 17: mod_base = OTHER; note = 2'-O-methylcytidine-3'-phosphate
  modified_base 18: mod_base = OTHER; note = 2'-O-methyluridine-3'-phosphate
  modified_base 19: mod_base = OTHER; note = 2'-O-methyladenosine-3'-phosphate
  modified_base 20: mod_base = OTHER; note = 2'-O-methyladenosine-3'-phosphate
  modified_base 21: mod_base = OTHER; note = 2'-O-methylguanosine-3'-phosphorothioate
  modified_base 22: mod_base = OTHER; note = 2'-O-methyladenosine-3'-phosphorothioate
  modified_base 23: mod_base = OTHER; note = 2'-O-methyluridine
ttttcacactttttcactaagat

SEQ ID NO: 12213 - RNA, 23 nt, synthetic construct
  source 1..23: mol_type = other RNA
  modified_base 1: mod_base = OTHER; note = 2'-O-methyluridine-3'-phosphorothioate 5'-(E)-Vinylphosphonate
  modified_base 2: mod_base = OTHER; note = 2'-deoxy-2'-fluoroguanosine-3'-phosphorothioate
  modified_base 3: mod_base = OTHER; note = 2'-O-methyluridine-3'-phosphate
  modified_base 4: mod_base = OTHER; note = 2'-O-methyluridine-3'-phosphate
  modified_base 5: mod_base = OTHER; note = 2'-O-methyluridine-3'-phosphate
  modified_base 6: mod_base = OTHER; note = 2'-deoxy-2'-fluorocytidine-3'-phosphate
  modified_base 7: mod_base = OTHER; note = 2'-O-methyladenosine-3'-phosphate
  modified_base 8: mod_base = OTHER; note = 2'-O-methylcytidine-3'-phosphate
  modified_base 9: mod_base = OTHER; note = 2'-O-methyladenosine-3'-phosphate
  modified_base 10: mod_base = OTHER; note = 2'-O-methylcytidine-3'-phosphate
  modified_base 11: mod_base = OTHER; note = 2'-O-methyluridine-3'-phosphate
  modified_base 12: mod_base = OTHER; note = 2'-O-methyluridine-3'-phosphate
  modified_base 13: mod_base = OTHER; note = 2'-O-methyluridine-3'-phosphate
  modified_base 14: mod_base = OTHER; note = 2'-deoxy-2'-fluorouridine-3'-phosphate
  modified_base 15: mod_base = OTHER; note = 2'-O-methyluridine-3'-phosphate
  modified_base 16: mod_base = OTHER; note = 2'-deoxy-2'-fluorocytidine-3'-phosphate
  modified_base 17: mod_base = OTHER; note = 2'-O-methyladenosine-3'-phosphate
  modified_base 18: mod_base = OTHER; note = 2'-O-methylcytidine-3'-phosphate
  modified_base 19: mod_base = OTHER; note = 2'-O-methyluridine-3'-phosphate
  modified_base 20: mod_base = OTHER; note = 2'-O-methyladenosine-3'-phosphate
  modified_base 21: mod_base = OTHER; note = 2'-O-methyladenosine-3'-phosphorothioate
  modified_base 22: mod_base = OTHER; note = 2'-O-methylguanosine-3'-phosphorothioate
  modified_base 23: mod_base = OTHER; note = 2'-O-methyladenosine
tgtttcacactttttcactaaga

SEQ ID NO: 12214 - RNA, 23 nt, synthetic construct
  source 1..23: mol_type = other RNA
  modified_base 1: mod_base = OTHER; note = 2'-O-methyluridine-3'-phosphorothioate 5'-(E)-Vinylphosphonate
  modified_base 2: mod_base = OTHER; note = 2'-deoxy-2'-fluoroadenosine-3'-phosphorothioate
  modified_base 3: mod_base = OTHER; note = 2'-O-methylguanosine-3'-phosphate
  modified_base 4: mod_base = OTHER; note = 2'-O-methyluridine-3'-phosphate
  modified_base 5: mod_base = OTHER; note = 2'-O-methyluridine-3'-phosphate
  modified_base 6: mod_base = OTHER; note = 2'-deoxy-2'-fluorouridine-3'-phosphate
  modified_base 7: mod_base = OTHER; note = 2'-O-methylcytidine-3'-phosphate
  modified_base 8: mod_base = OTHER; note = 2'-O-methyladenosine-3'-phosphate
  modified_base 9: mod_base = OTHER; note = 2'-O-methylcytidine-3'-phosphate
  modified_base 10: mod_base = OTHER; note = 2'-O-methyladenosine-3'-phosphate
  modified_base 11: mod_base = OTHER; note = 2'-O-methylcytidine-3'-phosphate
  modified_base 12: mod_base = OTHER; note = 2'-O-methyluridine-3'-phosphate
  modified_base 13: mod_base = OTHER; note = 2'-O-methyluridine-3'-phosphate
  modified_base 14: mod_base = OTHER; note = 2'-deoxy-2'-fluorouridine-3'-phosphate
  modified_base 15: mod_base = OTHER; note = 2'-O-methyluridine-3'-phosphate
  modified_base 16: mod_base = OTHER; note = 2'-deoxy-2'-fluorouridine-3'-phosphate
  modified_base 17: mod_base = OTHER; note = 2'-O-methylcytidine-3'-phosphate
  modified_base 18: mod_base = OTHER; note = 2'-O-methyladenosine-3'-phosphate
  modified_base 19: mod_base = OTHER; note = 2'-O-methylcytidine-3'-phosphate
  modified_base 20: mod_base = OTHER; note = 2'-O-methyluridine-3'-phosphate
  modified_base 21: mod_base = OTHER; note = 2'-O-methyladenosine-3'-phosphorothioate
  modified_base 22: mod_base = OTHER; note = 2'-O-methyladenosine-3'-phosphorothioate
  modified_base 23: mod_base = OTHER; note = 2'-O-methylguanosine
tagtttcacactttttcactaag

SEQ ID NO: 12215 - RNA, 23 nt, synthetic construct
  source 1..23: mol_type = other RNA
  modified_base 1: mod_base = OTHER; note = 2'-O-methyluridine-3'-phosphorothioate 5'-(E)-Vinylphosphonate
  modified_base 2: mod_base = OTHER; note = 2'-deoxy-2'-fluoroadenosine-3'-phosphorothioate
  modified_base 3: mod_base = OTHER; note = 2'-O-methyladenosine-3'-phosphate
  modified_base 4: mod_base = OTHER; note = 2'-O-methylguanosine-3'-phosphate
  modified_base 5: mod_base = OTHER; note = 2'-O-methyluridine-3'-phosphate
  modified_base 6: mod_base = OTHER; note = 2'-deoxy-2'-fluorouridine-3'-phosphate
  modified_base 7: mod_base = OTHER; note = 2'-O-methyluridine-3'-phosphate
  modified_base 8: mod_base = OTHER; note = 2'-O-methylcytidine-3'-phosphate
  modified_base 9: mod_base = OTHER; note = 2'-O-methyladenosine-3'-phosphate
  modified_base 10: mod_base = OTHER; note = 2'-O-methylcytidine-3'-phosphate
  modified_base 11: mod_base = OTHER; note = 2'-O-methyladenosine-3'-phosphate
  modified_base 12: mod_base = OTHER; note = 2'-O-methylcytidine-3'-phosphate
  modified_base 13: mod_base = OTHER; note = 2'-O-methyluridine-3'-phosphate
  modified_base 14: mod_base = OTHER; note = 2'-deoxy-2'-fluorouridine-3'-phosphate
  modified_base 15: mod_base = OTHER; note = 2'-O-methyluridine-3'-phosphate
  modified_base 16: mod_base = OTHER; note = 2'-deoxy-2'-fluorouridine-3'-phosphate
  modified_base 17: mod_base = OTHER; note = 2'-O-methyluridine-3'-phosphate
  modified_base 18: mod_base = OTHER; note = 2'-O-methylcytidine-3'-phosphate
  modified_base 19: mod_base = OTHER; note = 2'-O-methyladenosine-3'-phosphate
  modified_base 20: mod_base = OTHER; note = 2'-O-methylcytidine-3'-phosphate
  modified_base 21: mod_base = OTHER; note = 2'-O-methyluridine-3'-phosphorothioate
  modified_base 22: mod_base = OTHER; note = 2'-O-methyladenosine-3'-phosphorothioate
  modified_base 23: mod_base = OTHER; note = 2'-O-methyladenosine
taagtttcacactttttcactaa

SEQ ID NO: 12216 - RNA, 23 nt, synthetic construct
  source 1..23: mol_type = other RNA
  modified_base 1: mod_base = OTHER; note = 2'-O-methyluridine-3'-phosphorothioate 5'-(E)-Vinylphosphonate
  modified_base 2: mod_base = OTHER; note = 2'-deoxy-2'-fluorocytidine-3'-phosphorothioate
  modified_base 3: mod_base = OTHER; note = 2'-O-methyladenosine-3'-phosphate
  modified_base 4: mod_base = OTHER; note = 2'-O-methyladenosine-3'-phosphate
  modified_base 5: mod_base = OTHER; note = 2'-O-methylguanosine-3'-phosphate
  modified_base 6: mod_base = OTHER; note = 2'-deoxy-2'-fluorouridine-3'-phosphate
  modified_base 7: mod_base = OTHER; note = 2'-O-methyluridine-3'-phosphate
  modified_base 8: mod_base = OTHER; note = 2'-O-methyluridine-3'-phosphate
  modified_base 9: mod_base = OTHER; note = 2'-O-methylcytidine-3'-phosphate
  modified_base 10: mod_base = OTHER; note = 2'-O-methyladenosine-3'-phosphate
  modified_base 11: mod_base = OTHER; note = 2'-O-methylcytidine-3'-phosphate
  modified_base 12: mod_base = OTHER; note = 2'-O-methyladenosine-3'-phosphate
  modified_base 13: mod_base = OTHER; note = 2'-O-methylcytidine-3'-phosphate
  modified_base 14: mod_base = OTHER; note = 2'-deoxy-2'-fluorouridine-3'-phosphate
  modified_base 15: mod_base = OTHER; note = 2'-O-methyluridine-3'-phosphate
  modified_base 16: mod_base = OTHER; note = 2'-deoxy-2'-fluorouridine-3'-phosphate
  modified_base 17: mod_base = OTHER; note = 2'-O-methyluridine-3'-phosphate
  modified_base 18: mod_base = OTHER; note = 2'-O-methyluridine-3'-phosphate
  modified_base 19: mod_base = OTHER; note = 2'-O-methylcytidine-3'-phosphate
  modified_base 20: mod_base = OTHER; note = 2'-O-methyladenosine-3'-phosphate
  modified_base 21: mod_base = OTHER; note = 2'-O-methylcytidine-3'-phosphorothioate
  modified_base 22: mod_base = OTHER; note = 2'-O-methyluridine-3'-phosphorothioate
  modified_base 23: mod_base = OTHER; note = 2'-O-methyladenosine
tcaagtttcacactttttcacta

SEQ ID NO: 12217 - RNA, 23 nt, synthetic construct
  source 1..23: mol_type = other RNA
  modified_base 1: mod_base = OTHER; note = 2'-O-methyluridine-3'-phosphorothioate 5'-(E)-Vinylphosphonate
  modified_base 2: mod_base = OTHER; note = 2'-deoxy-2'-fluoroadenosine-3'-phosphorothioate
  modified_base 3: mod_base = OTHER; note = 2'-O-methylcytidine-3'-phosphate
  modified_base 4: mod_base = OTHER; note = 2'-O-methyladenosine-3'-phosphate
  modified_base 5: mod_base = OTHER; note = 2'-O-methyladenosine-3'-phosphate
  modified_base 6: mod_base = OTHER; note = 2'-deoxy-2'-fluoroguanosine-3'-phosphate
  modified_base 7: mod_base = OTHER; note = 2'-O-methyluridine-3'-phosphate
  modified_base 8: mod_base = OTHER; note = 2'-O-methyluridine-3'-phosphate
  modified_base 9: mod_base = OTHER; note = 2'-O-methyluridine-3'-phosphate
  modified_base 10: mod_base = OTHER; note = 2'-O-methylcytidine-3'-phosphate
  modified_base 11: mod_base = OTHER; note = 2'-O-methyladenosine-3'-phosphate
  modified_base 12: mod_base = OTHER; note = 2'-O-methylcytidine-3'-phosphate
  modified_base 13: mod_base = OTHER; note = 2'-O-methyladenosine-3'-phosphate
  modified_base 14: mod_base = OTHER; note = 2'-deoxy-2'-fluorocytidine-3'-phosphate
  modified_base 15: mod_base = OTHER; note = 2'-O-methyluridine-3'-phosphate
  modified_base 16: mod_base = OTHER; note = 2'-deoxy-2'-fluorouridine-3'-phosphate
  modified_base 17: mod_base = OTHER; note = 2'-O-methyluridine-3'-phosphate
  modified_base 18: mod_base = OTHER; note = 2'-O-methyluridine-3'-phosphate
  modified_base 19: mod_base = OTHER; note = 2'-O-methyluridine-3'-phosphate
  modified_base 20: mod_base = OTHER; note = 2'-O-methylcytidine-3'-phosphate
  modified_base 21: mod_base = OTHER; note = 2'-O-methyladenosine-3'-phosphorothioate
  modified_base 22: mod_base = OTHER; note = 2'-O-methylcytidine-3'-phosphorothioate
  modified_base 23: mod_base = OTHER; note = 2'-O-methyluridine
tacaagtttcacactttttcact

SEQ ID NO: 12218 - RNA, 23 nt, synthetic construct
  source 1..23: mol_type = other RNA
  modified_base 1: mod_base = OTHER; note = 2'-O-methyluridine-3'-phosphorothioate 5'-(E)-Vinylphosphonate
  modified_base 2: mod_base = OTHER; note = 2'-deoxy-2'-fluorocytidine-3'-phosphorothioate
  modified_base 3: mod_base = OTHER; note = 2'-O-methyladenosine-3'-phosphate
  modified_base 4: mod_base = OTHER; note = 2'-O-methylcytidine-3'-phosphate
  modified_base 5: mod_base = OTHER; note = 2'-O-methyladenosine-3'-phosphate
  modified_base 6: mod_base = OTHER; note = 2'-deoxy-2'-fluoroadenosine-3'-phosphate
  modified_base 7: mod_base = OTHER; note = 2'-O-methylguanosine-3'-phosphate
  modified_base 8: mod_base = OTHER; note = 2'-O-methyluridine-3'-phosphate
  modified_base 9: mod_base = OTHER; note = 2'-O-methyluridine-3'-phosphate
  modified_base 10: mod_base = OTHER; note = 2'-O-methyluridine-3'-phosphate
  modified_base 11: mod_base = OTHER; note = 2'-O-methylcytidine-3'-phosphate
  modified_base 12: mod_base = OTHER; note = 2'-O-methyladenosine-3'-phosphate
  modified_base 13: mod_base = OTHER; note = 2'-O-methylcytidine-3'-phosphate
  modified_base 14: mod_base = OTHER; note = 2'-deoxy-2'-fluoroadenosine-3'-phosphate
  modified_base 15: mod_base = OTHER; note = 2'-O-methylcytidine-3'-phosphate
  modified_base 16: mod_base = OTHER; note = 2'-deoxy-2'-fluorouridine-3'-phosphate
  modified_base 17: mod_base = OTHER; note = 2'-O-methyluridine-3'-phosphate
  modified_base 18: mod_base = OTHER; note = 2'-O-methyluridine-3'-phosphate
  modified_base 19: mod_base = OTHER; note = 2'-O-methyluridine-3'-phosphate
  modified_base 20: mod_base = OTHER; note = 2'-O-methyluridine-3'-phosphate
  modified_base 21: mod_base = OTHER; note = 2'-O-methylcytidine-3'-phosphorothioate
  modified_base 22: mod_base = OTHER; note = 2'-O-methyladenosine-3'-phosphorothioate
  modified_base 23: mod_base = OTHER; note = 2'-O-methylcytidine
tcacaagtttcacactttttcac

SEQ ID NO: 12219 - RNA, 23 nt, synthetic construct
  source 1..23: mol_type = other RNA
  modified_base 1: mod_base = OTHER; note = 2'-O-methyluridine-3'-phosphorothioate 5'-(E)-Vinylphosphonate
  modified_base 2: mod_base = OTHER; note = 2'-deoxy-2'-fluoroguanosine-3'-phosphorothioate
  modified_base 3: mod_base = OTHER; note = 2'-O-methylcytidine-3'-phosphate
  modified_base 4: mod_base = OTHER; note = 2'-O-methyladenosine-3'-phosphate
  modified_base 5: mod_base = OTHER; note = 2'-O-methylcytidine-3'-phosphate
  modified_base 6: mod_base = OTHER; note = 2'-deoxy-2'-fluoroadenosine-3'-phosphate
  modified_base 7: mod_base = OTHER; note = 2'-O-methyladenosine-3'-phosphate
  modified_base 8: mod_base = OTHER; note = 2'-O-methylguanosine-3'-phosphate
  modified_base 9: mod_base = OTHER; note = 2'-O-methyluridine-3'-phosphate
  modified_base 10: mod_base = OTHER; note = 2'-O-methyluridine-3'-phosphate
  modified_base 11: mod_base = OTHER; note = 2'-O-methyluridine-3'-phosphate
  modified_base 12: mod_base = OTHER; note = 2'-O-methylcytidine-3'-phosphate
  modified_base 13: mod_base = OTHER; note = 2'-O-methyladenosine-3'-phosphate
  modified_base 14: mod_base = OTHER; note = 2'-deoxy-2'-fluorocytidine-3'-phosphate
  modified_base 15: mod_base = OTHER; note = 2'-O-methyladenosine-3'-phosphate
  modified_base 16: mod_base = OTHER; note = 2'-deoxy-2'-fluorocytidine-3'-phosphate
  modified_base 17: mod_base = OTHER; note = 2'-O-methyluridine-3'-phosphate
  modified_base 18: mod_base = OTHER; note = 2'-O-methyluridine-3'-phosphate
  modified_base 19: mod_base = OTHER; note = 2'-O-methyluridine-3'-phosphate
  modified_base 20: mod_base = OTHER; note = 2'-O-methyluridine-3'-phosphate
  modified_base 21: mod_base = OTHER; note = 2'-O-methyluridine-3'-phosphorothioate
  modified_base 22: mod_base = OTHER; note = 2'-O-methylcytidine-3'-phosphorothioate
  modified_base 23: mod_base = OTHER; note = 2'-O-methyladenosine
tgcacaagtttcacactttttca

SEQ ID NO: 12220 - RNA, 23 nt, synthetic construct
  source 1..23: mol_type = other RNA
  modified_base 1: mod_base = OTHER; note = 2'-O-methyluridine-3'-phosphorothioate 5'-(E)-Vinylphosphonate
  modified_base 2: mod_base = OTHER; note = 2'-deoxy-2'-fluoroguanosine-3'-phosphorothioate
  modified_base 3: mod_base = OTHER; note = 2'-O-methylguanosine-3'-phosphate
  modified_base 4: mod_base = OTHER; note = 2'-O-methylcytidine-3'-phosphate
  modified_base 5: mod_base = OTHER; note = 2'-O-methyladenosine-3'-phosphate
  modified_base 6: mod_base = OTHER; note = 2'-deoxy-2'-fluorocytidine-3'-phosphate
  modified_base 7: mod_base = OTHER; note = 2'-O-methyladenosine-3'-phosphate
  modified_base 8: mod_base = OTHER; note = 2'-O-methyladenosine-3'-phosphate
  modified_base 9: mod_base = OTHER; note = 2'-O-methylguanosine-3'-phosphate
  modified_base 10: mod_base = OTHER; note = 2'-O-methyluridine-3'-phosphate
  modified_base 11: mod_base = OTHER; note = 2'-O-methyluridine-3'-phosphate
  modified_base 12: mod_base = OTHER; note = 2'-O-methyluridine-3'-phosphate
  modified_base 13: mod_base = OTHER; note = 2'-O-methylcytidine-3'-phosphate
  modified_base 14: mod_base = OTHER; note = 2'-deoxy-2'-fluoroadenosine-3'-phosphate
  modified_base 15: mod_base = OTHER; note = 2'-O-methylcytidine-3'-phosphate
  modified_base 16: mod_base = OTHER; note = 2'-deoxy-2'-fluoroadenosine-3'-phosphate
  modified_base 17: mod_base = OTHER; note = 2'-O-methylcytidine-3'-phosphate
  modified_base 18: mod_base = OTHER; note = 2'-O-methyluridine-3'-phosphate
  modified_base 19: mod_base = OTHER; note = 2'-O-methyluridine-3'-phosphate
  modified_base 20: mod_base = OTHER; note = 2'-O-methyluridine-3'-phosphate
  modified_base 21: mod_base = OTHER; note = 2'-O-methyluridine-3'-phosphorothioate
  modified_base 22: mod_base = OTHER; note = 2'-O-methyluridine-3'-phosphorothioate
  modified_base 23: mod_base = OTHER; note = 2'-O-methylcytidine
tggcacaagtttcacactttttc

SEQ ID NO: 12221 - RNA, 23 nt, synthetic construct
  source 1..23: mol_type = other RNA
  modified_base 1: mod_base = OTHER; note = 2'-O-methyluridine-3'-phosphorothioate 5'-(E)-Vinylphosphonate
  modified_base 2: mod_base = OTHER; note = 2'-deoxy-2'-fluoroadenosine-3'-phosphorothioate
  modified_base 3: mod_base = OTHER; note = 2'-O-methyluridine-3'-phosphate
  modified_base 4: mod_base = OTHER; note = 2'-O-methylguanosine-3'-phosphate
  modified_base 5: mod_base = OTHER; note = 2'-O-methylguanosine-3'-phosphate
  modified_base 6: mod_base = OTHER; note = 2'-deoxy-2'-fluorocytidine-3'-phosphate
  modified_base 7: mod_base = OTHER; note = 2'-O-methyladenosine-3'-phosphate
  modified_base 8: mod_base = OTHER; note = 2'-O-methylcytidine-3'-phosphate
  modified_base 9: mod_base = OTHER; note = 2'-O-methyladenosine-3'-phosphate
  modified_base 10: mod_base = OTHER; note = 2'-O-methyladenosine-3'-phosphate
  modified_base 11: mod_base = OTHER; note = 2'-O-methylguanosine-3'-phosphate
  modified_base 12: mod_base = OTHER; note = 2'-O-methyluridine-3'-phosphate
  modified_base 13: mod_base = OTHER; note = 2'-O-methyluridine-3'-phosphate
  modified_base 14: mod_base = OTHER; note = 2'-deoxy-2'-fluorouridine-3'-phosphate
  modified_base 15: mod_base = OTHER; note = 2'-O-methylcytidine-3'-phosphate
  modified_base 16: mod_base = OTHER; note = 2'-deoxy-2'-fluoroadenosine-3'-phosphate
  modified_base 17: mod_base = OTHER; note = 2'-O-methylcytidine-3'-phosphate
  modified_base 18: mod_base = OTHER; note = 2'-O-methyladenosine-3'-phosphate
  modified_base 19: mod_base = OTHER; note = 2'-O-methylcytidine-3'-phosphate
  modified_base 20: mod_base = OTHER; note = 2'-O-methyluridine-3'-phosphate
  modified_base 21: mod_base = OTHER; note = 2'-O-methyluridine-3'-phosphorothioate
  modified_base 22: mod_base = OTHER; note = 2'-O-methyluridine-3'-phosphorothioate
  modified_base 23: mod_base = OTHER; note = 2'-O-methyluridine
tatggcacaagtttcacactttt

SEQ ID NO: 12222 - RNA, 23 nt, synthetic construct
  source 1..23: mol_type = other RNA
  modified_base 1: mod_base = OTHER; note = 2'-O-methyluridine-3'-phosphorothioate 5'-(E)-Vinylphosphonate
  modified_base 2: mod_base = OTHER; note = 2'-deoxy-2'-fluoroadenosine-3'-phosphorothioate
  modified_base 3: mod_base = OTHER; note = 2'-O-methylguanosine-3'-phosphate
  modified_base 4: mod_base = OTHER; note = 2'-O-methyluridine-3'-phosphate
  modified_base 5: mod_base = OTHER; note = 2'-O-methyladenosine-3'-phosphate
  modified_base 6: mod_base = OTHER; note = 2'-deoxy-2'-fluorouridine-3'-phosphate
  modified_base 7: mod_base = OTHER; note = 2'-O-methyluridine-3'-phosphate
  modified_base 8: mod_base = OTHER; note = 2'-O-methylguanosine-3'-phosphate
  modified_base 9: mod_base = OTHER; note = 2'-O-methyladenosine-3'-phosphate
  modified_base 10: mod_base = OTHER; note = 2'-O-methyladenosine-3'-phosphate
  modified_base 11: mod_base = OTHER; note = 2'-O-methyluridine-3'-phosphate
  modified_base 12: mod_base = OTHER; note = 2'-O-methylcytidine-3'-phosphate
  modified_base 13: mod_base = OTHER; note = 2'-O-methyladenosine-3'-phosphate
  modified_base 14: mod_base = OTHER; note = 2'-deoxy-2'-fluorouridine-3'-phosphate
  modified_base 15: mod_base = OTHER; note = 2'-O-methylguanosine-3'-phosphate
  modified_base 16: mod_base = OTHER; note = 2'-deoxy-2'-fluorocytidine-3'-phosphate
  modified_base 17: mod_base = OTHER; note = 2'-O-methyluridine-3'-phosphate
  modified_base 18: mod_base = OTHER; note = 2'-O-methyluridine-3'-phosphate
  modified_base 19: mod_base = OTHER; note = 2'-O-methylcytidine-3'-phosphate
  modified_base 20: mod_base = OTHER; note = 2'-O-methyladenosine-3'-phosphate
  modified_base 21: mod_base = OTHER; note = 2'-O-methylcytidine-3'-phosphorothioate
  modified_base 22: mod_base = OTHER; note = 2'-O-methyladenosine-3'-phosphorothioate
  modified_base 23: mod_base = OTHER; note = 2'-O-methylguanosine
tagtattgaatcatgcttcacag

SEQ ID NO: 12223 - RNA, 23 nt, synthetic construct
  source 1..23: mol_type = other RNA
  modified_base 1: mod_base = OTHER; note = 2'-O-methyluridine-3'-phosphorothioate 5'-(E)-Vinylphosphonate
  modified_base 2: mod_base = OTHER; note = 2'-deoxy-2'-fluoroadenosine-3'-phosphorothioate
  modified_base 3: mod_base = OTHER; note = 2'-O-methyluridine-3'-phosphate
  modified_base 4: mod_base = OTHER; note = 2'-O-methyluridine-3'-phosphate
  modified_base 5: mod_base = OTHER; note = 2'-O-methylguanosine-3'-phosphate
  modified_base 6: mod_base = OTHER; note = 2'-deoxy-2'-fluoroadenosine-3'-phosphate
  modified_base 7: mod_base = OTHER; note = 2'-O-methyladenosine-3'-phosphate
  modified_base 8: mod_base = OTHER; note = 2'-O-methyluridine-3'-phosphate
  modified_base 9: mod_base = OTHER; note = 2'-O-methylcytidine-3'-phosphate
  modified_base 10: mod_base = OTHER; note = 2'-O-methyladenosine-3'-phosphate
  modified_base 11: mod_base = OTHER; note = 2'-O-methyluridine-3'-phosphate
  modified_base 12: mod_base = OTHER; note = 2'-O-methylguanosine-3'-phosphate
  modified_base 13: mod_base = OTHER; note = 2'-O-methylcytidine-3'-phosphate
  modified_base 14: mod_base = OTHER; note = 2'-deoxy-2'-fluorouridine-3'-phosphate
  modified_base 15: mod_base = OTHER; note = 2'-O-methyluridine-3'-phosphate
  modified_base 16: mod_base = OTHER; note = 2'-deoxy-2'-fluorocytidine-3'-phosphate
  modified_base 17: mod_base = OTHER; note = 2'-O-methyladenosine-3'-phosphate
  modified_base 18: mod_base = OTHER; note = 2'-O-methylcytidine-3'-phosphate
  modified_base 19: mod_base = OTHER; note = 2'-O-methyladenosine-3'-phosphate
  modified_base 20: mod_base = OTHER; note = 2'-O-methylguanosine-3'-phosphate
  modified_base 21: mod_base = OTHER; note = 2'-O-methylcytidine-3'-phosphorothioate
  modified_base 22: mod_base = OTHER; note = 2'-O-methylcytidine-3'-phosphorothioate
  modified_base 23: mod_base = OTHER; note = 2'-O-methyladenosine
tattgaatcatgcttcacagcca

SEQ ID NO: 12224 - RNA, 23 nt, synthetic construct
  source 1..23: mol_type = other RNA
  modified_base 1: mod_base = OTHER; note = 2'-O-methyluridine-3'-phosphorothioate 5'-(E)-Vinylphosphonate
  modified_base 2: mod_base = OTHER; note = 2'-deoxy-2'-fluorouridine-3'-phosphorothioate
  modified_base 3: mod_base = OTHER; note = 2'-O-methyladenosine-3'-phosphate
  modified_base 4: mod_base = OTHER; note = 2'-O-methyluridine-3'-phosphate
  modified_base 5: mod_base = OTHER; note = 2'-O-methyluridine-3'-phosphate
  modified_base 6: mod_base = OTHER; note = 2'-deoxy-2'-fluoroguanosine-3'-phosphate
  modified_base 7: mod_base = OTHER; note = 2'-O-methyladenosine-3'-phosphate
  modified_base 8: mod_base = OTHER; note = 2'-O-methyladenosine-3'-phosphate
  modified_base 9: mod_base = OTHER; note = 2'-O-methyluridine-3'-phosphate
  modified_base 10: mod_base = OTHER; note = 2'-O-methylcytidine-3'-phosphate
  modified_base 11: mod_base = OTHER; note = 2'-O-methyladenosine-3'-phosphate
  modified_base 12: mod_base = OTHER; note = 2'-O-methyluridine-3'-phosphate
  modified_base 13: mod_base = OTHER; note = 2'-O-methylguanosine-3'-phosphate
  modified_base 14: mod_base = OTHER; note = 2'-deoxy-2'-fluorocytidine-3'-phosphate
  modified_base 15: mod_base = OTHER; note = 2'-O-methyluridine-3'-phosphate
  modified_base 16: mod_base = OTHER; note = 2'-deoxy-2'-fluorouridine-3'-phosphate
  modified_base 17: mod_base = OTHER; note = 2'-O-methylcytidine-3'-phosphate
  modified_base 18: mod_base = OTHER; note = 2'-O-methyladenosine-3'-phosphate
  modified_base 19: mod_base = OTHER; note = 2'-O-methylcytidine-3'-phosphate
  modified_base 20: mod_base = OTHER; note = 2'-O-methyladenosine-3'-phosphate
  modified_base 21: mod_base = OTHER; note = 2'-O-methylguanosine-3'-phosphorothioate
  modified_base 22: mod_base = OTHER; note = 2'-O-methylcytidine-3'-phosphorothioate
  modified_base 23: mod_base = OTHER; note = 2'-O-methylcytidine
ttattgaatcatgcttcacagcc

SEQ ID NO: 12225 - RNA, 23 nt, synthetic construct
  source 1..23: mol_type = other RNA
  modified_base 1: mod_base = OTHER; note = 2'-O-methyluridine-3'-phosphorothioate 5'-(E)-Vinylphosphonate
  modified_base 2: mod_base = OTHER; note = 2'-deoxy-2'-fluorocytidine-3'-phosphorothioate
  modified_base 3: mod_base = OTHER; note = 2'-O-methyladenosine-3'-phosphate
  modified_base 4: mod_base = OTHER; note = 2'-O-methylguanosine-3'-phosphate
  modified_base 5: mod_base = OTHER; note = 2'-O-methyluridine-3'-phosphate
  modified_base 6: mod_base = OTHER; note = 2'-deoxy-2'-fluoroadenosine-3'-phosphate
  modified_base 7: mod_base = OTHER; note = 2'-O-methyluridine-3'-phosphate
  modified_base 8: mod_base = OTHER; note = 2'-O-methyluridine-3'-phosphate
  modified_base 9: mod_base = OTHER; note = 2'-O-methylguanosine-3'-phosphate
  modified_base 10: mod_base = OTHER; note = 2'-O-methyladenosine-3'-phosphate
  modified_base 11: mod_base = OTHER; note = 2'-O-methyladenosine-3'-phosphate
  modified_base 12: mod_base = OTHER; note = 2'-O-methyluridine-3'-phosphate
  modified_base 13: mod_base = OTHER; note = 2'-O-methylcytidine-3'-phosphate
  modified_base 14: mod_base = OTHER; note = 2'-deoxy-2'-fluoroadenosine-3'-phosphate
  modified_base 15: mod_base = OTHER; note = 2'-O-methyluridine-3'-phosphate
  modified_base 16: mod_base = OTHER; note = 2'-deoxy-2'-fluoroguanosine-3'-phosphate
  modified_base 17: mod_base = OTHER; note = 2'-O-methylcytidine-3'-phosphate
  modified_base 18: mod_base = OTHER; note = 2'-O-methyluridine-3'-phosphate
  modified_base 19: mod_base = OTHER; note = 2'-O-methyluridine-3'-phosphate
  modified_base 20: mod_base = OTHER; note = 2'-O-methylcytidine-3'-phosphate
  modified_base 21: mod_base = OTHER; note = 2'-O-methyladenosine-3'-phosphorothioate
  modified_base 22: mod_base = OTHER; note = 2'-O-methylcytidine-3'-phosphorothioate
  modified_base 23: mod_base = OTHER; note = 2'-O-methyladenosine
tcagtattgaatcatgcttcaca

SEQ ID NO: 12226 - RNA, 23 nt, synthetic construct
  source 1..23: mol_type = other RNA
  modified_base 1: mod_base = OTHER; note = 2'-O-methyluridine-3'-phosphorothioate 5'-(E)-Vinylphosphonate
  modified_base 2: mod_base = OTHER; note = 2'-deoxy-2'-fluorouridine-3'-phosphorothioate
  modified_base 3: mod_base = OTHER; note = 2'-O-methylguanosine-3'-phosphate
  modified_base 4: mod_base = OTHER; note = 2'-O-methyluridine-3'-phosphate
  modified_base 5: mod_base = OTHER; note = 2'-O-methyluridine-3'-phosphate
  modified_base 6: mod_base = OTHER; note = 2'-deoxy-2'-fluorocytidine-3'-phosphate
  modified_base 7: mod_base = OTHER; note = 2'-O-methyladenosine-3'-phosphate
  modified_base 8: mod_base = OTHER; note = 2'-O-methylguanosine-3'-phosphate
  modified_base 9: mod_base = OTHER; note = 2'-O-methyluridine-3'-phosphate
  modified_base 10: mod_base = OTHER; note = 2'-O-methyladenosine-3'-phosphate
  modified_base 11: mod_base = OTHER; note = 2'-O-methyluridine-3'-phosphate
  modified_base 12: mod_base = OTHER; note = 2'-O-methyluridine-3'-phosphate
  modified_base 13: mod_base = OTHER; note = 2'-O-methylguanosine-3'-phosphate
  modified_base 14: mod_base = OTHER; note = 2'-deoxy-2'-fluoroadenosine-3'-phosphate
  modified_base 15: mod_base = OTHER; note = 2'-O-methyladenosine-3'-phosphate
  modified_base 16: mod_base = OTHER; note = 2'-deoxy-2'-fluorouridine-3'-phosphate
  modified_base 17: mod_base = OTHER; note = 2'-O-methylcytidine-3'-phosphate
  modified_base 18: mod_base = OTHER; note = 2'-O-methyladenosine-3'-phosphate
  modified_base 19: mod_base = OTHER; note = 2'-O-methyluridine-3'-phosphate
  modified_base 20: mod_base = OTHER; note = 2'-O-methylguanosine-3'-phosphate
  modified_base 21: mod_base = OTHER; note = 2'-O-methylcytidine-3'-phosphorothioate
  modified_base 22: mod_base = OTHER; note = 2'-O-methyluridine-3'-phosphorothioate
  modified_base 23: mod_base = OTHER; note = 2'-O-methyluridine
ttgttcagtattgaatcatgctt

SEQ ID NO: 12227 - RNA, 23 nt, synthetic construct
  source 1..23: mol_type = other RNA
  modified_base 1: mod_base = OTHER; note = 2'-O-methyluridine-3'-phosphorothioate 5'-(E)-Vinylphosphonate
  modified_base 2: mod_base = OTHER; note = 2'-deoxy-2'-fluoroadenosine-3'-phosphorothioate
  modified_base 3: mod_base = OTHER; note = 2'-O-methylguanosine-3'-phosphate
  modified_base 4: mod_base = OTHER; note = 2'-O-methyluridine-3'-phosphate
  modified_base 5: mod_base = OTHER; note = 2'-O-methylguanosine-3'-phosphate
  modified_base 6: mod_base = OTHER; note = 2'-deoxy-2'-fluorouridine-3'-phosphate
  modified_base 7: mod_base = OTHER; note = 2'-O-methyluridine-3'-phosphate
  modified_base 8: mod_base = OTHER; note = 2'-O-methylcytidine-3'-phosphate
  modified_base 9: mod_base = OTHER; note = 2'-O-methyladenosine-3'-phosphate
  modified_base 10: mod_base = OTHER; note = 2'-O-methylguanosine-3'-phosphate
  modified_base 11: mod_base = OTHER; note = 2'-O-methyluridine-3'-phosphate
  modified_base 12: mod_base = OTHER; note = 2'-O-methyladenosine-3'-phosphate
  modified_base 13: mod_base = OTHER; note = 2'-O-methyluridine-3'-phosphate
  modified_base 14: mod_base = OTHER; note = 2'-deoxy-2'-fluorouridine-3'-phosphate
  modified_base 15: mod_base = OTHER; note = 2'-O-methylguanosine-3'-phosphate
  modified_base 16: mod_base = OTHER; note = 2'-deoxy-2'-fluoroadenosine-3'-phosphate
  modified_base 17: mod_base = OTHER; note = 2'-O-methyladenosine-3'-phosphate
  modified_base 18: mod_base = OTHER; note = 2'-O-methyluridine-3'-phosphate
  modified_base 19: mod_base = OTHER; note = 2'-O-methylcytidine-3'-phosphate
  modified_base 20: mod_base = OTHER; note = 2'-O-methyladenosine-3'-phosphate
  modified_base 21: mod_base = OTHER; note = 2'-O-methyluridine-3'-phosphorothioate
  modified_base 22: mod_base = OTHER; note = 2'-O-methylguanosine-3'-phosphorothioate
  modified_base 23: mod_base = OTHER; note = 2'-O-methylcytidine
tagtgttcagtattgaatcatgc

SEQ ID NO: 12228 - RNA, 23 nt, synthetic construct
  source 1..23: mol_type = other RNA
  modified_base 1: mod_base = OTHER; note = 2'-O-methyluridine-3'-phosphorothioate 5'-(E)-Vinylphosphonate
  modified_base 2: mod_base = OTHER; note = 2'-deoxy-2'-fluorouridine-3'-phosphorothioate
  modified_base 3: mod_base = OTHER; note = 2'-O-methyladenosine-3'-phosphate
  modified_base 4: mod_base = OTHER; note = 2'-O-methylguanosine-3'-phosphate
  modified_base 5: mod_base = OTHER; note = 2'-O-methyluridine-3'-phosphate
  modified_base 6: mod_base = OTHER; note = 2'-deoxy-2'-fluoroguanosine-3'-phosphate
  modified_base 7: mod_base = OTHER; note = 2'-O-methyluridine-3'-phosphate
  modified_base 8: mod_base = OTHER; note = 2'-O-methyluridine-3'-phosphate
  modified_base 9: mod_base = OTHER; note = 2'-O-methylcytidine-3'-phosphate
  modified_base 10: mod_base = OTHER; note = 2'-O-methyladenosine-3'-phosphate
  modified_base 11: mod_base = OTHER; note = 2'-O-methylguanosine-3'-phosphate
  modified_base 12: mod_base = OTHER; note = 2'-O-methyluridine-3'-phosphate
  modified_base 13: mod_base = OTHER; note = 2'-O-methyladenosine-3'-phosphate
  modified_base 14: mod_base = OTHER; note = 2'-deoxy-2'-fluorouridine-3'-phosphate
  modified_base 15: mod_base = OTHER; note = 2'-O-methyluridine-3'-phosphate
  modified_base 16: mod_base = OTHER; note = 2'-deoxy-2'-fluoroguanosine-3'-phosphate
  modified_base 17: mod_base = OTHER; note = 2'-O-methyladenosine-3'-phosphate
  modified_base 18: mod_base = OTHER; note = 2'-O-methyladenosine-3'-phosphate
  modified_base 19: mod_base = OTHER; note = 2'-O-methyluridine-3'-phosphate
  modified_base 20: mod_base = OTHER; note = 2'-O-methylcytidine-3'-phosphate
  modified_base 21: mod_base = OTHER; note = 2'-O-methyladenosine-3'-phosphorothioate
  modified_base 22: mod_base = OTHER; note = 2'-O-methyluridine-3'-phosphorothioate
  modified_base 23: mod_base = OTHER; note = 2'-O-methylguanosine
ttagtgttcagtattgaatcatg

SEQ ID NO: 12229 - RNA, 23 nt, synthetic construct
  source 1..23: mol_type = other RNA
  modified_base 1: mod_base = OTHER; note = 2'-O-methyluridine-3'-phosphorothioate 5'-(E)-Vinylphosphonate
  modified_base 2: mod_base = OTHER; note = 2'-deoxy-2'-fluoroadenosine-3'-phosphorothioate
  modified_base 3: mod_base = OTHER; note = 2'-O-methyluridine-3'-phosphate
  modified_base 4: mod_base = OTHER; note = 2'-O-methylguanosine-3'-phosphate
  modified_base 5: mod_base = OTHER; note = 2'-O-methyluridine-3'-phosphate
  modified_base 6: mod_base = OTHER; note = 2'-deoxy-2'-fluorocytidine-3'-phosphate
  modified_base 7: mod_base = OTHER; note = 2'-O-methylguanosine-3'-phosphate
  modified_base 8: mod_base = OTHER; note = 2'-O-methyladenosine-3'-phosphate
  modified_base 9: mod_base = OTHER; note = 2'-O-methyluridine-3'-phosphate
  modified_base 10: mod_base = OTHER; note = 2'-O-methyladenosine-3'-phosphate
  modified_base 11: mod_base = OTHER; note = 2'-O-methylguanosine-3'-phosphate
  modified_base 12: mod_base = OTHER; note = 2'-O-methyluridine-3'-phosphate
  modified_base 13: mod_base = OTHER; note = 2'-O-methylguanosine-3'-phosphate
  modified_base 14: mod_base = OTHER; note = 2'-deoxy-2'-fluorouridine-3'-phosphate
  modified_base 15: mod_base = OTHER; note = 2'-O-methyluridine-3'-phosphate
  modified_base 16: mod_base = OTHER; note = 2'-deoxy-2'-fluorocytidine-3'-phosphate
  modified_base 17: mod_base = OTHER; note = 2'-O-methyladenosine-3'-phosphate
  modified_base 18: mod_base = OTHER; note = 2'-O-methylguanosine-3'-phosphate
  modified_base 19: mod_base = OTHER; note = 2'-O-methyluridine-3'-phosphate
  modified_base 20: mod_base = OTHER; note = 2'-O-methyladenosine-3'-phosphate
  modified_base 21: mod_base = OTHER; note = 2'-O-methyluridine-3'-phosphorothioate
  modified_base 22: mod_base = OTHER; note = 2'-O-methyluridine-3'-phosphorothioate
  modified_base 23: mod_base = OTHER; note = 2'-O-methylguanosine
tatgtcgatagtgttcagtattg

SEQ ID NO: 12230 - RNA, 23 nt, synthetic construct
  source 1..23: mol_type = other RNA
  modified_base 1: mod_base = OTHER; note = 2'-O-methyluridine-3'-phosphorothioate 5'-(E)-Vinylphosphonate
  modified_base 2: mod_base = OTHER; note = 2'-deoxy-2'-fluoroguanosine-3'-phosphorothioate
  modified_base 3: mod_base = OTHER; note = 2'-O-methyluridine-3'-phosphate
  modified_base 4: mod_base = OTHER; note = 2'-O-methyladenosine-3'-phosphate
  modified_base 5: mod_base = OTHER; note = 2'-O-methyluridine-3'-phosphate
  modified_base 6: mod_base = OTHER; note = 2'-deoxy-2'-fluoroguanosine-3'-phosphate
  modified_base 7: mod_base = OTHER; note = 2'-O-methyluridine-3'-phosphate
  modified_base 8: mod_base = OTHER; note = 2'-O-methylcytidine-3'-phosphate
  modified_base 9: mod_base = OTHER; note = 2'-O-methylguanosine-3'-phosphate
  modified_base 10: mod_base = OTHER; note = 2'-O-methyladenosine-3'-phosphate
  modified_base 11: mod_base = OTHER; note = 2'-O-methyluridine-3'-phosphate
  modified_base 12: mod_base = OTHER; note = 2'-O-methyladenosine-3'-phosphate
  modified_base 13: mod_base = OTHER; note = 2'-O-methylguanosine-3'-phosphate
  modified_base 14: mod_base = OTHER; note = 2'-deoxy-2'-fluorouridine-3'-phosphate
  modified_base 15: mod_base = OTHER; note = 2'-O-methylguanosine-3'-phosphate
  modified_base 16: mod_base = OTHER; note = 2'-deoxy-2'-fluorouridine-3'-phosphate
  modified_base 17: mod_base = OTHER; note = 2'-O-methyluridine-3'-phosphate
  modified_base 18: mod_base = OTHER; note = 2'-O-methylcytidine-3'-phosphate
  modified_base 19: mod_base = OTHER; note = 2'-O-methyladenosine-3'-phosphate
  modified_base 20: mod_base = OTHER; note = 2'-O-methylguanosine-3'-phosphate
  modified_base 21: mod_base = OTHER; note = 2'-O-methyluridine-3'-phosphorothioate
  modified_base 22: mod_base = OTHER; note = 2'-O-methyladenosine-3'-phosphorothioate
  modified_base 23: mod_base = OTHER; note = 2'-O-methyluridine
tgtatgtcgatagtgttcagtat

SEQ ID NO: 12231 - RNA, 23 nt, synthetic construct
  source 1..23: mol_type = other RNA
  modified_base 1: mod_base = OTHER; note = 2'-O-methyluridine-3'-phosphorothioate 5'-(E)-Vinylphosphonate
  modified_base 2: mod_base = OTHER; note = 2'-deoxy-2'-fluoroadenosine-3'-phosphorothioate
  modified_base 3: mod_base = OTHER; note = 2'-O-methylcytidine-3'-phosphate
  modified_base 4: mod_base = OTHER; note = 2'-O-methyluridine-3'-phosphate
  modified_base 5: mod_base = OTHER; note = 2'-O-methyluridine-3'-phosphate
  modified_base 6: mod_base = OTHER; note = 2'-deoxy-2'-fluorouridine-3'-phosphate
  modified_base 7: mod_base = OTHER; note = 2'-O-methyladenosine-3'-phosphate
  modified_base 8: mod_base = OTHER; note = 2'-O-methylguanosine-3'-phosphate
  modified_base 9: mod_base = OTHER; note = 2'-O-methylguanosine-3'-phosphate
  modified_base 10: mod_base = OTHER; note = 2'-O-methyladenosine-3'-phosphate
  modified_base 11: mod_base = OTHER; note = 2'-O-methyluridine-3'-phosphate
  modified_base 12: mod_base = OTHER; note = 2'-O-methyluridine-3'-phosphate
  modified_base 13: mod_base = OTHER; note = 2'-O-methylcytidine-3'-phosphate
  modified_base 14: mod_base = OTHER; note = 2'-deoxy-2'-fluorouridine-3'-phosphate
  modified_base 15: mod_base = OTHER; note = 2'-O-methylguanosine-3'-phosphate
  modified_base 16: mod_base = OTHER; note = 2'-deoxy-2'-fluoroadenosine-3'-phosphate
  modified_base 17: mod_base = OTHER; note = 2'-O-methylguanosine-3'-phosphate
  modified_base 18: mod_base = OTHER; note = 2'-O-methylguanosine-3'-phosphate
  modified_base 19: mod_base = OTHER; note = 2'-O-methyluridine-3'-phosphate
  modified_base 20: mod_base = OTHER; note = 2'-O-methyladenosine-3'-phosphate
  modified_base 21: mod_base = OTHER; note = 2'-O-methyluridine-3'-phosphorothioate
  modified_base 22: mod_base = OTHER; note = 2'-O-methylguanosine-3'-phosphorothioate
  modified_base 23: mod_base = OTHER; note = 2'-O-methyluridine
tactttaggattctgaggtatgt

SEQ ID NO: 12232 - RNA, 23 nt, synthetic construct
  source 1..23: mol_type = other RNA
  modified_base 1: mod_base = OTHER; note = 2'-O-methyluridine-3'-phosphorothioate 5'-(E)-Vinylphosphonate
  modified_base 2: mod_base = OTHER; note = 2'-deoxy-2'-fluoroadenosine-3'-phosphorothioate
  modified_base 3: mod_base = OTHER; note = 2'-O-methyluridine-3'-phosphate
  modified_base 4: mod_base = OTHER; note = 2'-O-methyluridine-3'-phosphate
  modified_base 5: mod_base = OTHER; note = 2'-O-methylcytidine-3'-phosphate
  modified_base 6: mod_base = OTHER; note = 2'-deoxy-2'-fluoroadenosine-3'-phosphate
  modified_base 7: mod_base = OTHER; note = 2'-O-methyluridine-3'-phosphate
  modified_base 8: mod_base = OTHER; note = 2'-O-methyluridine-3'-phosphate
  modified_base 9: mod_base = OTHER; note = 2'-O-methylguanosine-3'-phosphate
  modified_base 10: mod_base = OTHER; note = 2'-O-methyluridine-3'-phosphate
  modified_base 11: mod_base = OTHER; note = 2'-O-methyladenosine-3'-phosphate
  modified_base 12: mod_base = OTHER; note = 2'-O-methyluridine-3'-phosphate
  modified_base 13: mod_base = OTHER; note = 2'-O-methylcytidine-3'-phosphate
  modified_base 14: mod_base = OTHER; note = 2'-deoxy-2'-fluoroadenosine-3'-phosphate
  modified_base 15: mod_base = OTHER; note = 2'-O-methyluridine-3'-phosphate
  modified_base 16: mod_base = OTHER; note = 2'-deoxy-2'-fluorocytidine-3'-phosphate
  modified_base 17: mod_base = OTHER; note = 2'-O-methyladenosine-3'-phosphate
  modified_base 18: mod_base = OTHER; note = 2'-O-methyladenosine-3'-phosphate
  modified_base 19: mod_base = OTHER; note = 2'-O-methylguanosine-3'-phosphate
  modified_base 20: mod_base = OTHER; note = 2'-O-methylcytidine-3'-phosphate
  modified_base 21: mod_base = OTHER; note = 2'-O-methyladenosine-3'-phosphorothioate
  modified_base 22: mod_base = OTHER; note = 2'-O-methyluridine-3'-phosphorothioate
  modified_base 23: mod_base = OTHER; note = 2'-O-methyluridine
tattcattgtatcatcaagcatt

SEQ ID NO: 12233 - RNA, 23 nt, synthetic construct
  source 1..23: mol_type = other RNA
  modified_base 1: mod_base = OTHER; note = 2'-O-methyluridine-3'-phosphorothioate 5'-(E)-Vinylphosphonate
  modified_base 2: mod_base = OTHER; note = 2'-deoxy-2'-fluoroadenosine-3'-phosphorothioate
  modified_base 3: mod_base = OTHER; note = 2'-O-methylguanosine-3'-phosphate
  modified_base 4: mod_base = OTHER; note = 2'-O-methylcytidine-3'-phosphate
  modified_base 5: mod_base = OTHER; note = 2'-O-methyladenosine-3'-phosphate
  modified_base 6: mod_base = OTHER; note = 2'-deoxy-2'-fluorouridine-3'-phosphate
  modified_base 7: mod_base = OTHER; note = 2'-O-methyluridine-3'-phosphate
  modified_base 8: mod_base = OTHER; note = 2'-O-methyluridine-3'-phosphate
  modified_base 9: mod_base = OTHER; note = 2'-O-methylcytidine-3'-phosphate
  modified_base 10: mod_base = OTHER; note = 2'-O-methyladenosine-3'-phosphate
  modified_base 11: mod_base = OTHER; note = 2'-O-methylguanosine-3'-phosphate
  modified_base 12: mod_base = OTHER; note = 2'-O-methylguanosine-3'-phosphate
  modified_base 13: mod_base = OTHER; note = 2'-O-methyladenosine-3'-phosphate
  modified_base 14: mod_base = OTHER; note = 2'-deoxy-2'-fluoroguanosine-3'-phosphate
  modified_base 15: mod_base = OTHER; note = 2'-O-methylcytidine-3'-phosphate
  modified_base 16: mod_base = OTHER; note = 2'-deoxy-2'-fluorocytidine-3'-phosphate
  modified_base 17: mod_base = OTHER; note = 2'-O-methyladenosine-3'-phosphate
  modified_base 18: mod_base = OTHER; note = 2'-O-methyluridine-3'-phosphate
  modified_base 19: mod_base = OTHER; note = 2'-O-methyladenosine-3'-phosphate
  modified_base 20: mod_base = OTHER; note = 2'-O-methyluridine-3'-phosphate
  modified_base 21: mod_base = OTHER; note = 2'-O-methyladenosine-3'-phosphorothioate
  modified_base 22: mod_base = OTHER; note = 2'-O-methylcytidine-3'-phosphorothioate
  modified_base 23: mod_base = OTHER; note = 2'-O-methylcytidine
tagcatttcaggagccatatacc

SEQ ID NO: 12234 - RNA, 23 nt, synthetic construct
  source 1..23: mol_type = other RNA
  modified_base 1: mod_base = OTHER; note = 2'-O-methyluridine-3'-phosphorothioate 5'-(E)-Vinylphosphonate
  modified_base 2: mod_base = OTHER; note = 2'-deoxy-2'-fluoroadenosine-3'-phosphorothioate
  modified_base 3: mod_base = OTHER; note = 2'-O-methyluridine-3'-phosphate
  modified_base 4: mod_base = OTHER; note = 2'-O-methylcytidine-3'-phosphate
  modified_base 5: mod_base = OTHER; note = 2'-O-methyladenosine-3'-phosphate
  modified_base 6: mod_base = OTHER; note = 2'-deoxy-2'-fluoroadenosine-3'-phosphate
  modified_base 7: mod_base = OTHER; note = 2'-O-methylguanosine-3'-phosphate
  modified_base 8: mod_base = OTHER; note = 2'-O-methylcytidine-3'-phosphate
  modified_base 9: mod_base = OTHER; note = 2'-O-methyladenosine-3'-phosphate
  modified_base 10: mod_base = OTHER; note = 2'-O-methyluridine-3'-phosphate
  modified_base 11: mod_base = OTHER; note = 2'-O-methyluridine-3'-phosphate
  modified_base 12: mod_base = OTHER; note = 2'-O-methyluridine-3'-phosphate
  modified_base 13: mod_base = OTHER; note = 2'-O-methylcytidine-3'-phosphate
  modified_base 14: mod_base = OTHER; note = 2'-deoxy-2'-fluoroadenosine-3'-phosphate
  modified_base 15: mod_base = OTHER; note = 2'-O-methylguanosine-3'-phosphate
  modified_base 16: mod_base = OTHER; note = 2'-deoxy-2'-fluoroguanosine-3'-phosphate
  modified_base 17: mod_base = OTHER; note = 2'-O-methyladenosine-3'-phosphate
  modified_base 18: mod_base = OTHER; note = 2'-O-methylguanosine-3'-phosphate
  modified_base 19: mod_base = OTHER; note = 2'-O-methylcytidine-3'-phosphate
  modified_base 20: mod_base = OTHER; note = 2'-O-methylcytidine-3'-phosphate
  modified_base 21: mod_base = OTHER; note = 2'-O-methyladenosine-3'-phosphorothioate
  modified_base 22: mod_base = OTHER; note = 2'-O-methyluridine-3'-phosphorothioate
  modified_base 23: mod_base = OTHER; note = 2'-O-methyladenosine
tatcaagcatttcaggagccata

SEQ ID NO: 12235 - RNA, 23 nt, synthetic construct
  source 1..23: mol_type = other RNA
  modified_base 1: mod_base = OTHER; note = 2'-O-methyluridine-3'-phosphorothioate 5'-(E)-Vinylphosphonate
  modified_base 2: mod_base = OTHER; note = 2'-deoxy-2'-fluorocytidine-3'-phosphorothioate
  modified_base 3: mod_base = OTHER; note = 2'-O-methyladenosine-3'-phosphate
  modified_base 4: mod_base = OTHER; note = 2'-O-methyluridine-3'-phosphate
  modified_base 5: mod_base = OTHER; note = 2'-O-methylcytidine-3'-phosphate
  modified_base 6: mod_base = OTHER; note = 2'-deoxy-2'-fluoroadenosine-3'-phosphate
  modified_base 7: mod_base = OTHER; note = 2'-O-methyladenosine-3'-phosphate
  modified_base 8: mod_base = OTHER; note = 2'-O-methylguanosine-3'-phosphate
  modified_base 9: mod_base = OTHER; note = 2'-O-methylcytidine-3'-phosphate
  modified_base 10: mod_base = OTHER; note = 2'-O-methyladenosine-3'-phosphate
  modified_base 11: mod_base = OTHER; note = 2'-O-methyluridine-3'-phosphate
  modified_base 12: mod_base = OTHER; note = 2'-O-methyluridine-3'-phosphate
  modified_base 13: mod_base = OTHER; note = 2'-O-methyluridine-3'-phosphate
  modified_base 14: mod_base = OTHER; note = 2'-deoxy-2'-fluorocytidine-3'-phosphate
  modified_base 15: mod_base = OTHER; note = 2'-O-methyladenosine-3'-phosphate
  modified_base 16: mod_base = OTHER; note = 2'-deoxy-2'-fluoroguanosine-3'-phosphate
  modified_base 17: mod_base = OTHER; note = 2'-O-methylguanosine-3'-phosphate
  modified_base 18: mod_base = OTHER; note = 2'-O-methyladenosine-3'-phosphate
  modified_base 19: mod_base = OTHER; note = 2'-O-methylguanosine-3'-phosphate
  modified_base 20: mod_base = OTHER; note = 2'-O-methylcytidine-3'-phosphate
  modified_base 21: mod_base = OTHER; note = 2'-O-methylcytidine-3'-phosphorothioate
  modified_base 22: mod_base = OTHER; note = 2'-O-methyladenosine-3'-phosphorothioate
  modified_base 23: mod_base = OTHER; note = 2'-O-methyluridine
tcatcaagcatttcaggagccat

SEQ ID NO: 12236 - RNA, 23 nt, synthetic construct
  source 1..23: mol_type = other RNA
  modified_base 1: mod_base = OTHER; note = 2'-O-methyluridine-3'-phosphorothioate 5'-(E)-Vinylphosphonate
  modified_base 2: mod_base = OTHER; note = 2'-deoxy-2'-fluorouridine-3'-phosphorothioate
  modified_base 3: mod_base = OTHER; note = 2'-O-methylcytidine-3'-phosphate
  modified_base 4: mod_base = OTHER; note = 2'-O-methyladenosine-3'-phosphate
  modified_base 5: mod_base = OTHER; note = 2'-O-methyluridine-3'-phosphate
  modified_base 6: mod_base = OTHER; note = 2'-deoxy-2'-fluorocytidine-3'-phosphate
  modified_base 7: mod_base = OTHER; note = 2'-O-methyladenosine-3'-phosphate
  modified_base 8: mod_base = OTHER; note = 2'-O-methyladenosine-3'-phosphate
  modified_base 9: mod_base = OTHER; note = 2'-O-methylguanosine-3'-phosphate
  modified_base 10: mod_base = OTHER; note = 2'-O-methylcytidine-3'-phosphate
  modified_base 11: mod_base = OTHER; note = 2'-O-methyladenosine-3'-phosphate
  modified_base 12: mod_base = OTHER; note = 2'-O-methyluridine-3'-phosphate
  modified_base 13: mod_base = OTHER; note = 2'-O-methyluridine-3'-phosphate
  modified_base 14: mod_base = OTHER; note = 2'-deoxy-2'-fluorouridine-3'-phosphate
  modified_base 15: mod_base = OTHER; note = 2'-O-methylcytidine-3'-phosphate
  modified_base 16: mod_base = OTHER; note = 2'-deoxy-2'-fluoroadenosine-3'-phosphate
  modified_base 17: mod_base = OTHER; note = 2'-O-methylguanosine-3'-phosphate
  modified_base 18: mod_base = OTHER; note = 2'-O-methylguanosine-3'-phosphate
  modified_base 19: mod_base = OTHER; note = 2'-O-methyladenosine-3'-phosphate
  modified_base 20: mod_base = OTHER; note = 2'-O-methylguanosine-3'-phosphate
  modified_base 21: mod_base = OTHER; note = 2'-O-methylcytidine-3'-phosphorothioate
  modified_base 22: mod_base = OTHER; note = 2'-O-methylcytidine-3'-phosphorothioate
  modified_base 23: mod_base = OTHER; note = 2'-O-methyladenosine
ttcatcaagcatttcaggagcca

SEQ ID NO: 12237 - RNA, 23 nt, synthetic construct
  source 1..23: mol_type = other RNA
  modified_base 1: mod_base = OTHER; note = 2'-O-methyluridine-3'-phosphorothioate 5'-(E)-Vinylphosphonate
  modified_base 2: mod_base = OTHER; note = 2'-deoxy-2'-fluoroadenosine-3'-phosphorothioate
  modified_base 3: mod_base = OTHER; note = 2'-O-methyluridine-3'-phosphate
  modified_base 4: mod_base = OTHER; note = 2'-O-methylcytidine-3'-phosphate
  modified_base 5: mod_base = OTHER; note = 2'-O-methyladenosine-3'-phosphate
  modified_base 6: mod_base = OTHER; note = 2'-deoxy-2'-fluorouridine-3'-phosphate
  modified_base 7: mod_base = OTHER; note = 2'-O-methylcytidine-3'-phosphate
  modified_base 8: mod_base = OTHER; note = 2'-O-methyladenosine-3'-phosphate
  modified_base 9: mod_base = OTHER; note = 2'-O-methyladenosine-3'-phosphate
  modified_base 10: mod_base = OTHER; note = 2'-O-methylguanosine-3'-phosphate
  modified_base 11: mod_base = OTHER; note = 2'-O-methylcytidine-3'-phosphate
  modified_base 12: mod_base = OTHER; note = 2'-O-methyladenosine-3'-phosphate
  modified_base 13: mod_base = OTHER; note = 2'-O-methyluridine-3'-phosphate
  modified_base 14: mod_base = OTHER; note = 2'-deoxy-2'-fluorouridine-3'-phosphate
  modified_base 15: mod_base = OTHER; note = 2'-O-methyluridine-3'-phosphate
  modified_base 16: mod_base = OTHER; note = 2'-deoxy-2'-fluorocytidine-3'-phosphate
  modified_base 17: mod_base = OTHER; note = 2'-O-methyladenosine-3'-phosphate
  modified_base 18: mod_base = OTHER; note = 2'-O-methylguanosine-3'-phosphate
  modified_base 19: mod_base = OTHER; note = 2'-O-methylguanosine-3'-phosphate
  modified_base 20: mod_base = OTHER; note = 2'-O-methyladenosine-3'-phosphate
  modified_base 21: mod_base = OTHER; note = 2'-O-methylguanosine-3'-phosphorothioate
  modified_base 22: mod_base = OTHER; note = 2'-O-methylcytidine-3'-phosphorothioate
  modified_base 23: mod_base = OTHER; note = 2'-O-methylcytidine
tatcatcaagcatttcaggagcc

SEQ ID NO: 12238 - RNA, 23 nt, synthetic construct
  source 1..23: mol_type = other RNA
  modified_base 1: mod_base = OTHER; note = 2'-O-methyluridine-3'-phosphorothioate 5'-(E)-Vinylphosphonate
  modified_base 2: mod_base = OTHER; note = 2'-deoxy-2'-fluorouridine-3'-phosphorothioate
  modified_base 3: mod_base = OTHER; note = 2'-O-methyladenosine-3'-phosphate
  modified_base 4: mod_base = OTHER; note = 2'-O-methyluridine-3'-phosphate
  modified_base 5: mod_base = OTHER; note = 2'-O-methylcytidine-3'-phosphate
  modified_base 6: mod_base = OTHER; note = 2'-deoxy-2'-fluoroadenosine-3'-phosphate
  modified_base 7: mod_base = OTHER; note = 2'-O-methyluridine-3'-phosphate
  modified_base 8: mod_base = OTHER; note = 2'-O-methylcytidine-3'-phosphate
  modified_base 9: mod_base = OTHER; note = 2'-O-methyladenosine-3'-phosphate
  modified_base 10: mod_base = OTHER; note = 2'-O-methyladenosine-3'-phosphate
  modified_base 11: mod_base = OTHER; note = 2'-O-methylguanosine-3'-phosphate
  modified_base 12: mod_base = OTHER; note = 2'-O-methylcytidine-3'-phosphate
  modified_base 13: mod_base = OTHER; note = 2'-O-methyladenosine-3'-phosphate
  modified_base 14: mod_base = OTHER; note = 2'-deoxy-2'-fluorouridine-3'-phosphate
  modified_base 15: mod_base = OTHER; note = 2'-O-methyluridine-3'-phosphate
  modified_base 16: mod_base = OTHER; note = 2'-deoxy-2'-fluorouridine-3'-phosphate
  modified_base 17: mod_base = OTHER; note = 2'-O-methylcytidine-3'-phosphate
  modified_base 18: mod_base = OTHER; note = 2'-O-methyladenosine-3'-phosphate
  modified_base 19: mod_base = OTHER; note = 2'-O-methylguanosine-3'-phosphate
  modified_base 20: mod_base = OTHER; note = 2'-O-methylguanosine-3'-phosphate
  modified_base 21: mod_base = OTHER; note = 2'-O-methyladenosine-3'-phosphorothioate
  modified_base 22: mod_base = OTHER; note = 2'-O-methylguanosine-3'-phosphorothioate
  modified_base 23: mod_base = OTHER; note = 2'-O-methylcytidine
ttatcatcaagcatttcaggagc

SEQ ID NO: 12239 - RNA, 23 nt, synthetic construct
  source 1..23: mol_type = other RNA
  modified_base 1: mod_base = OTHER; note = 2'-O-methyluridine-3'-phosphorothioate 5'-(E)-Vinylphosphonate
  modified_base 2: mod_base = OTHER; note = 2'-deoxy-2'-fluoroguanosine-3'-phosphorothioate
  modified_base 3: mod_base = OTHER; note = 2'-O-methyluridine-3'-phosphate
  modified_base 4: mod_base = OTHER; note = 2'-O-methyladenosine-3'-phosphate
  modified_base 5: mod_base = OTHER; note = 2'-O-methyluridine-3'-phosphate
  modified_base 6: mod_base = OTHER; note = 2'-deoxy-2'-fluorocytidine-3'-phosphate
  modified_base 7: mod_base = OTHER; note = 2'-O-methyladenosine-3'-phosphate
  modified_base 8: mod_base = OTHER; note = 2'-O-methyluridine-3'-phosphate
  modified_base 9: mod_base = OTHER; note = 2'-O-methylcytidine-3'-phosphate
  modified_base 10: mod_base = OTHER; note = 2'-O-methyladenosine-3'-phosphate
  modified_base 11: mod_base = OTHER; note = 2'-O-methyladenosine-3'-phosphate
  modified_base 12: mod_base = OTHER; note = 2'-O-methylguanosine-3'-phosphate
  modified_base 13: mod_base = OTHER; note = 2'-O-methylcytidine-3'-phosphate
  modified_base 14: mod_base = OTHER; note = 2'-deoxy-2'-fluoroadenosine-3'-phosphate
  modified_base 15: mod_base = OTHER; note = 2'-O-methyluridine-3'-phosphate
  modified_base 16: mod_base = OTHER; note = 2'-deoxy-2'-fluorouridine-3'-phosphate
  modified_base 17: mod_base = OTHER; note = 2'-O-methyluridine-3'-phosphate
  modified_base 18: mod_base = OTHER; note = 2'-O-methylcytidine-3'-phosphate
  modified_base 19: mod_base = OTHER; note = 2'-O-methyladenosine-3'-phosphate
  modified_base 20: mod_base = OTHER; note = 2'-O-methylguanosine-3'-phosphate
  modified_base 21: mod_base = OTHER; note = 2'-O-methylguanosine-3'-phosphorothioate
  modified_base 22: mod_base = OTHER; note = 2'-O-methyladenosine-3'-phosphorothioate
  modified_base 23: mod_base = OTHER; note = 2'-O-methylguanosine
tgtatcatcaagcatttcaggag

SEQ ID NO: 12240 - RNA, 23 nt, synthetic construct
  source 1..23: mol_type = other RNA
  modified_base 1: mod_base = OTHER; note = 2'-O-methyluridine-3'-phosphorothioate 5'-(E)-Vinylphosphonate
  modified_base 2: mod_base = OTHER; note = 2'-deoxy-2'-fluorouridine-3'-phosphorothioate
  modified_base 3: mod_base = OTHER; note = 2'-O-methylguanosine-3'-phosphate
  modified_base 4: mod_base = OTHER; note = 2'-O-methyluridine-3'-phosphate
  modified_base 5: mod_base = OTHER; note = 2'-O-methyladenosine-3'-phosphate
  modified_base 6: mod_base = OTHER; note = 2'-deoxy-2'-fluorouridine-3'-phosphate
  modified_base 7: mod_base = OTHER; note = 2'-O-methylcytidine-3'-phosphate
  modified_base 8: mod_base = OTHER; note = 2'-O-methyladenosine-3'-phosphate
  modified_base 9: mod_base = OTHER; note = 2'-O-methyluridine-3'-phosphate
  modified_base 10: mod_base = OTHER; note = 2'-O-methylcytidine-3'-phosphate
  modified_base 11: mod_base = OTHER; note = 2'-O-methyladenosine-3'-phosphate
  modified_base 12: mod_base = OTHER; note = 2'-O-methyladenosine-3'-phosphate
  modified_base 13: mod_base = OTHER; note = 2'-O-methylguanosine-3'-phosphate
  modified_base 14: mod_base = OTHER; note = 2'-deoxy-2'-fluorocytidine-3'-phosphate
  modified_base 15: mod_base = OTHER; note = 2'-O-methyladenosine-3'-phosphate
  modified_base 16: mod_base = OTHER; note = 2'-deoxy-2'-fluorouridine-3'-phosphate
  modified_base 17: mod_base = OTHER; note = 2'-O-methyluridine-3'-phosphate
  modified_base 18: mod_base = OTHER; note = 2'-O-methyluridine-3'-phosphate
  modified_base 19: mod_base = OTHER; note = 2'-O-methylcytidine-3'-phosphate
  modified_base 20: mod_base = OTHER; note = 2'-O-methyladenosine-3'-phosphate
  modified_base 21: mod_base = OTHER; note = 2'-O-methylguanosine-3'-phosphorothioate
  modified_base 22: mod_base = OTHER; note = 2'-O-methylguanosine-3'-phosphorothioate
  modified_base 23: mod_base = OTHER; note = 2'-O-methyladenosine
ttgtatcatcaagcatttcagga

SEQ ID NO: 12241 - RNA, 23 nt, synthetic construct
  source 1..23: mol_type = other RNA
  modified_base 1: mod_base = OTHER; note = 2'-O-methyluridine-3'-phosphorothioate 5'-(E)-Vinylphosphonate
  modified_base 2: mod_base = OTHER; note = 2'-deoxy-2'-fluorouridine-3'-phosphorothioate
  modified_base 3: mod_base = OTHER; note = 2'-O-methyluridine-3'-phosphate
  modified_base 4: mod_base = OTHER; note = 2'-O-methylguanosine-3'-phosphate
  modified_base 5: mod_base = OTHER; note = 2'-O-methyluridine-3'-phosphate
  modified_base 6: mod_base = OTHER; note = 2'-deoxy-2'-fluoroadenosine-3'-phosphate
  modified_base 7: mod_base = OTHER; note = 2'-O-methyluridine-3'-phosphate
  modified_base 8: mod_base = OTHER; note = 2'-O-methylcytidine-3'-phosphate
  modified_base 9: mod_base = OTHER; note = 2'-O-methyladenosine-3'-phosphate
  modified_base 10: mod_base = OTHER; note = 2'-O-methyluridine-3'-phosphate
  modified_base 11: mod_base = OTHER; note = 2'-O-methylcytidine-3'-phosphate
  modified_base 12: mod_base = OTHER; note = 2'-O-methyladenosine-3'-phosphate
  modified_base 13: mod_base = OTHER; note = 2'-O-methyladenosine-3'-phosphate
  modified_base 14: mod_base = OTHER; note = 2'-deoxy-2'-fluoroguanosine-3'-phosphate
  modified_base 15: mod_base = OTHER; note = 2'-O-methylcytidine-3'-phosphate
  modified_base 16: mod_base = OTHER; note = 2'-deoxy-2'-fluoroadenosine-3'-phosphate
  modified_base 17: mod_base = OTHER; note = 2'-O-methyluridine-3'-phosphate
  modified_base 18: mod_base = OTHER; note = 2'-O-methyluridine-3'-phosphate
  modified_base 19: mod_base = OTHER; note = 2'-O-methyluridine-3'-phosphate
  modified_base 20: mod_base = OTHER; note = 2'-O-methylcytidine-3'-phosphate
  modified_base 21: mod_base = OTHER; note = 2'-O-methyladenosine-3'-phosphorothioate
  modified_base 22: mod_base = OTHER; note = 2'-O-methylguanosine-3'-phosphorothioate
  modified_base 23: mod_base = OTHER; note = 2'-O-methylguanosine
tttgtatcatcaagcatttcagg

SEQ ID NO: 12242 - RNA, 23 nt, synthetic construct
  source 1..23: mol_type = other RNA
  modified_base 1: mod_base = OTHER; note = 2'-O-methyluridine-3'-phosphorothioate 5'-(E)-Vinylphosphonate
  modified_base 2: mod_base = OTHER; note = 2'-deoxy-2'-fluoroadenosine-3'-phosphorothioate
  modified_base 3: mod_base = OTHER; note = 2'-O-methyluridine-3'-phosphate
  modified_base 4: mod_base = OTHER; note = 2'-O-methyluridine-3'-phosphate
  modified_base 5: mod_base = OTHER; note = 2'-O-methylguanosine-3'-phosphate
  modified_base 6: mod_base = OTHER; note = 2'-deoxy-2'-fluorouridine-3'-phosphate
  modified_base 7: mod_base = OTHER; note = 2'-O-methyladenosine-3'-phosphate
  modified_base 8: mod_base = OTHER; note = 2'-O-methyluridine-3'-phosphate
  modified_base 9: mod_base = OTHER; note = 2'-O-methylcytidine-3'-phosphate
  modified_base 10: mod_base = OTHER; note = 2'-O-methyladenosine-3'-phosphate
  modified_base 11: mod_base = OTHER; note = 2'-O-methyluridine-3'-phosphate
  modified_base 12: mod_base = OTHER; note = 2'-O-methylcytidine-3'-phosphate
  modified_base 13: mod_base = OTHER; note = 2'-O-methyladenosine-3'-phosphate
  modified_base 14: mod_base = OTHER; note = 2'-deoxy-2'-fluoroadenosine-3'-phosphate
  modified_base 15: mod_base = OTHER; note = 2'-O-methylguanosine-3'-phosphate
  modified_base 16: mod_base = OTHER; note = 2'-deoxy-2'-fluorocytidine-3'-phosphate
  modified_base 17: mod_base = OTHER; note = 2'-O-methyladenosine-3'-phosphate
  modified_base 18: mod_base = OTHER; note = 2'-O-methyluridine-3'-phosphate
  modified_base 19: mod_base = OTHER; note = 2'-O-methyluridine-3'-phosphate
  modified_base 20: mod_base = OTHER; note = 2'-O-methyluridine-3'-phosphate
  modified_base 21: mod_base = OTHER; note = 2'-O-methylcytidine-3'-phosphorothioate
  modified_base 22: mod_base = OTHER; note = 2'-O-methyladenosine-3'-phosphorothioate
  modified_base 23: mod_base = OTHER; note = 2'-O-methylguanosine
tattgtatcatcaagcatttcag

SEQ ID NO: 12243 - RNA, 23 nt, synthetic construct
  source 1..23: mol_type = other RNA
  modified_base 1: mod_base = OTHER; note = 2'-O-methyluridine-3'-phosphorothioate 5'-(E)-Vinylphosphonate
  modified_base 2: mod_base = OTHER; note = 2'-deoxy-2'-fluorocytidine-3'-phosphorothioate
  modified_base 3: mod_base = OTHER; note = 2'-O-methyladenosine-3'-phosphate
  modified_base 4: mod_base = OTHER; note = 2'-O-methyluridine-3'-phosphate
  modified_base 5: mod_base = OTHER; note = 2'-O-methyluridine-3'-phosphate
  modified_base 6: mod_base = OTHER; note = 2'-deoxy-2'-fluoroguanosine-3'-phosphate
  modified_base 7: mod_base = OTHER; note = 2'-O-methyluridine-3'-phosphate
  modified_base 8: mod_base = OTHER; note = 2'-O-methyladenosine-3'-phosphate
  modified_base 9: mod_base = OTHER; note = 2'-O-methyluridine-3'-phosphate
  modified_base 10: mod_base = OTHER; note = 2'-O-methylcytidine-3'-phosphate
  modified_base 11: mod_base = OTHER; note = 2'-O-methyladenosine-3'-phosphate
  modified_base 12: mod_base = OTHER; note = 2'-O-methyluridine-3'-phosphate
  modified_base 13: mod_base = OTHER; note = 2'-O-methylcytidine-3'-phosphate
  modified_base 14: mod_base = OTHER; note = 2'-deoxy-2'-fluoroadenosine-3'-phosphate
  modified_base 15: mod_base = OTHER; note = 2'-O-methyladenosine-3'-phosphate
  modified_base 16: mod_base = OTHER; note = 2'-deoxy-2'-fluoroguanosine-3'-phosphate
  modified_base 17: mod_base = OTHER; note = 2'-O-methylcytidine-3'-phosphate
  modified_base 18: mod_base = OTHER; note = 2'-O-methyladenosine-3'-phosphate
  modified_base 19: mod_base = OTHER; note = 2'-O-methyluridine-3'-phosphate
  modified_base 20: mod_base = OTHER; note = 2'-O-methyluridine-3'-phosphate
  modified_base 21: mod_base = OTHER; note = 2'-O-methyluridine-3'-phosphorothioate
  modified_base 22: mod_base = OTHER; note = 2'-O-methylcytidine-3'-phosphorothioate
  modified_base 23: mod_base = OTHER; note = 2'-O-methyladenosine
tcattgtatcatcaagcatttca

SEQ ID NO: 12244 - RNA, 23 nt, synthetic construct
  source 1..23: mol_type = other RNA
  modified_base 1: mod_base = OTHER; note = 2'-O-methyluridine-3'-phosphorothioate 5'-(E)-Vinylphosphonate
  modified_base 2: mod_base = OTHER; note = 2'-deoxy-2'-fluorouridine-3'-phosphorothioate
  modified_base 3: mod_base = OTHER; note = 2'-O-methylcytidine-3'-phosphate
  modified_base 4: mod_base = OTHER; note = 2'-O-methyladenosine-3'-phosphate
  modified_base 5: mod_base = OTHER; note = 2'-O-methyluridine-3'-phosphate
  modified_base 6: mod_base = OTHER; note = 2'-deoxy-2'-fluorouridine-3'-phosphate
  modified_base 7: mod_base = OTHER; note = 2'-O-methylguanosine-3'-phosphate
  modified_base 8: mod_base = OTHER; note = 2'-O-methyluridine-3'-phosphate
  modified_base 9: mod_base = OTHER; note = 2'-O-methyladenosine-3'-phosphate
  modified_base 10: mod_base = OTHER; note = 2'-O-methyluridine-3'-phosphate
  modified_base 11: mod_base = OTHER; note = 2'-O-methylcytidine-3'-phosphate
  modified_base 12: mod_base = OTHER; note = 2'-O-methyladenosine-3'-phosphate
  modified_base 13: mod_base = OTHER; note = 2'-O-methyluridine-3'-phosphate
  modified_base 14: mod_base = OTHER; note = 2'-deoxy-2'-fluorocytidine-3'-phosphate
  modified_base 15: mod_base = OTHER; note = 2'-O-methyladenosine-3'-phosphate
  modified_base 16: mod_base = OTHER; note = 2'-deoxy-2'-fluoroadenosine-3'-phosphate
  modified_base 17: mod_base = OTHER; note = 2'-O-methylguanosine-3'-phosphate
  modified_base 18: mod_base = OTHER; note = 2'-O-methylcytidine-3'-phosphate
  modified_base 19: mod_base = OTHER; note = 2'-O-methyladenosine-3'-phosphate
  modified_base 20: mod_base = OTHER; note = 2'-O-methyluridine-3'-phosphate
  modified_base 21: mod_base = OTHER; note = 2'-O-methyluridine-3'-phosphorothioate
  modified_base 22: mod_base = OTHER; note = 2'-O-methyluridine-3'-phosphorothioate
  modified_base 23: mod_base = OTHER; note = 2'-O-methylcytidine
ttcattgtatcatcaagcatttc

SEQ ID NO: 12245 - RNA, 23 nt, synthetic construct
  source 1..23: mol_type = other RNA
  modified_base 1: mod_base = OTHER; note = 2'-O-methyluridine-3'-phosphorothioate 5'-(E)-Vinylphosphonate
  modified_base 2: mod_base = OTHER; note = 2'-deoxy-2'-fluorouridine-3'-phosphorothioate
  modified_base 3: mod_base = OTHER; note = 2'-O-methyluridine-3'-phosphate
  modified_base 4: mod_base = OTHER; note = 2'-O-methylcytidine-3'-phosphate
  modified_base 5: mod_base = OTHER; note = 2'-O-methyladenosine-3'-phosphate
  modified_base 6: mod_base = OTHER; note = 2'-deoxy-2'-fluorouridine-3'-phosphate
  modified_base 7: mod_base = OTHER; note = 2'-O-methyluridine-3'-phosphate
  modified_base 8: mod_base = OTHER; note = 2'-O-methylguanosine-3'-phosphate
  modified_base 9: mod_base = OTHER; note = 2'-O-methyluridine-3'-phosphate
  modified_base 10: mod_base = OTHER; note = 2'-O-methyladenosine-3'-phosphate
  modified_base 11: mod_base = OTHER; note = 2'-O-methyluridine-3'-phosphate
  modified_base 12: mod_base = OTHER; note = 2'-O-methylcytidine-3'-phosphate
  modified_base 13: mod_base = OTHER; note = 2'-O-methyladenosine-3'-phosphate
  modified_base 14: mod_base = OTHER; note = 2'-deoxy-2'-fluorouridine-3'-phosphate
  modified_base 15: mod_base = OTHER; note = 2'-O-methylcytidine-3'-phosphate
  modified_base 16: mod_base = OTHER; note = 2'-deoxy-2'-fluoroadenosine-3'-phosphate
  modified_base 17: mod_base = OTHER; note = 2'-O-methyladenosine-3'-phosphate
  modified_base 18: mod_base = OTHER; note = 2'-O-methylguanosine-3'-phosphate
  modified_base 19: mod_base = OTHER; note = 2'-O-methylcytidine-3'-phosphate
  modified_base 20: mod_base = OTHER; note = 2'-O-methyladenosine-3'-phosphate
  modified_base 21: mod_base = OTHER; note = 2'-O-methyluridine-3'-phosphorothioate
  modified_base 22: mod_base = OTHER; note = 2'-O-methyluridine-3'-phosphorothioate
  modified_base 23: mod_base = OTHER; note = 2'-O-methyluridine
tttcattgtatcatcaagcattt

SEQ ID NO: 12246 - RNA, 23 nt, synthetic construct
  source 1..23: mol_type = other RNA
  modified_base 1: mod_base = OTHER; note = 2'-O-methyluridine-3'-phosphorothioate 5'-(E)-Vinylphosphonate
  modified_base 2: mod_base = OTHER; note = 2'-deoxy-2'-fluorocytidine-3'-phosphorothioate
  modified_base 3: mod_base = OTHER; note = 2'-O-methyladenosine-3'-phosphate
  modified_base 4: mod_base = OTHER; note = 2'-O-methyluridine-3'-phosphate
  modified_base 5: mod_base = OTHER; note = 2'-O-methyluridine-3'-phosphate
  modified_base 6: mod_base = OTHER; note = 2'-deoxy-2'-fluorocytidine-3'-phosphate
  modified_base 7: mod_base = OTHER; note = 2'-O-methyladenosine-3'-phosphate
  modified_base 8: mod_base = OTHER; note = 2'-O-methyluridine-3'-phosphate
  modified_base 9: mod_base = OTHER; note = 2'-O-methyluridine-3'-phosphate
  modified_base 10: mod_base = OTHER; note = 2'-O-methylguanosine-3'-phosphate
  modified_base 11: mod_base = OTHER; note = 2'-O-methyluridine-3'-phosphate
  modified_base 12: mod_base = OTHER; note = 2'-O-methyladenosine-3'-phosphate
  modified_base 13: mod_base = OTHER; note = 2'-O-methyluridine-3'-phosphate
  modified_base 14: mod_base = OTHER; note = 2'-deoxy-2'-fluorocytidine-3'-phosphate
  modified_base 15: mod_base = OTHER; note = 2'-O-methyladenosine-3'-phosphate
  modified_base 16: mod_base = OTHER; note = 2'-deoxy-2'-fluorouridine-3'-phosphate
  modified_base 17: mod_base = OTHER; note = 2'-O-methylcytidine-3'-phosphate
  modified_base 18: mod_base = OTHER; note = 2'-O-methyladenosine-3'-phosphate
  modified_base 19: mod_base = OTHER; note = 2'-O-methyladenosine-3'-phosphate
  modified_base 20: mod_base = OTHER; note = 2'-O-methylguanosine-3'-phosphate
  modified_base 21: mod_base = OTHER; note = 2'-O-methylcytidine-3'-phosphorothioate
  modified_base 22: mod_base = OTHER; note = 2'-O-methyladenosine-3'-phosphorothioate
  modified_base 23: mod_base = OTHER; note = 2'-O-methyluridine
tcattcattgtatcatcaagcat

SEQ ID NO: 12247 - RNA, 23 nt, synthetic construct
  source 1..23: mol_type = other RNA
  modified_base 1: mod_base = OTHER; note = 2'-O-methyluridine-3'-phosphorothioate 5'-(E)-Vinylphosphonate
  modified_base 2: mod_base = OTHER; note = 2'-deoxy-2'-fluoroadenosine-3'-phosphorothioate
  modified_base 3: mod_base = OTHER; note = 2'-O-methylcytidine-3'-phosphate
  modified_base 4: mod_base = OTHER; note = 2'-O-methyladenosine-3'-phosphate
  modified_base 5: mod_base = OTHER; note = 2'-O-methyluridine-3'-phosphate
  modified_base 6: mod_base = OTHER; note = 2'-deoxy-2'-fluorouridine-3'-phosphate
  modified_base 7: mod_base = OTHER; note = 2'-O-methylcytidine-3'-phosphate
  modified_base 8: mod_base = OTHER; note = 2'-O-methyladenosine-3'-phosphate
  modified_base 9: mod_base = OTHER; note = 2'-O-methyluridine-3'-phosphate
  modified_base 10: mod_base = OTHER; note = 2'-O-methyluridine-3'-phosphate
  modified_base 11: mod_base = OTHER; note = 2'-O-methylguanosine-3'-phosphate
  modified_base 12: mod_base = OTHER; note = 2'-O-methyluridine-3'-phosphate
  modified_base 13: mod_base = OTHER; note = 2'-O-methyladenosine-3'-phosphate
  modified_base 14: mod_base = OTHER; note = 2'-deoxy-2'-fluorouridine-3'-phosphate
  modified_base 15: mod_base = OTHER; note = 2'-O-methylcytidine-3'-phosphate
  modified_base 16: mod_base = OTHER; note = 2'-deoxy-2'-fluoroadenosine-3'-phosphate
  modified_base 17: mod_base = OTHER; note = 2'-O-methyluridine-3'-phosphate
  modified_base 18: mod_base = OTHER; note = 2'-O-methylcytidine-3'-phosphate
  modified_base 19: mod_base = OTHER; note = 2'-O-methyladenosine-3'-phosphate
  modified_base 20: mod_base = OTHER; note = 2'-O-methyladenosine-3'-phosphate
  modified_base 21: mod_base = OTHER; note = 2'-O-methylguanosine-3'-phosphorothioate
  modified_base 22: mod_base = OTHER; note = 2'-O-methylcytidine-3'-phosphorothioate
  modified_base 23: mod_base = OTHER; note = 2'-O-methyladenosine
tacattcattgtatcatcaagca

SEQ ID NO: 12248 - RNA, 23 nt, synthetic construct
  source 1..23: mol_type = other RNA
  modified_base 1: mod_base = OTHER; note = 2'-O-methyluridine-3'-phosphorothioate 5'-(E)-Vinylphosphonate
  modified_base 2: mod_base = OTHER; note = 2'-deoxy-2'-fluorocytidine-3'-phosphorothioate
  modified_base 3: mod_base = OTHER; note = 2'-O-methyladenosine-3'-phosphate
  modified_base 4: mod_base = OTHER; note = 2'-O-methylcytidine-3'-phosphate
  modified_base 5: mod_base = OTHER; note = 2'-O-methyladenosine-3'-phosphate
  modified_base 6: mod_base = OTHER; note = 2'-deoxy-2'-fluorouridine-3'-phosphate
  modified_base 7: mod_base = OTHER; note = 2'-O-methyluridine-3'-phosphate
  modified_base 8: mod_base = OTHER; note = 2'-O-methylcytidine-3'-phosphate
  modified_base 9: mod_base = OTHER; note = 2'-O-methyladenosine-3'-phosphate
  modified_base 10: mod_base = OTHER; note = 2'-O-methyluridine-3'-phosphate
  modified_base 11: mod_base = OTHER; note = 2'-O-methyluridine-3'-phosphate
  modified_base 12: mod_base = OTHER; note = 2'-O-methylguanosine-3'-phosphate
  modified_base 13: mod_base = OTHER; note = 2'-O-methyluridine-3'-phosphate
  modified_base 14: mod_base = OTHER; note = 2'-deoxy-2'-fluoroadenosine-3'-phosphate
  modified_base 15: mod_base = OTHER; note = 2'-O-methyluridine-3'-phosphate
  modified_base 16: mod_base = OTHER; note = 2'-deoxy-2'-fluorocytidine-3'-phosphate
  modified_base 17: mod_base = OTHER; note = 2'-O-methyladenosine-3'-phosphate
  modified_base 18: mod_base = OTHER; note = 2'-O-methyluridine-3'-phosphate
  modified_base 19: mod_base = OTHER; note = 2'-O-methylcytidine-3'-phosphate
  modified_base 20: mod_base = OTHER; note = 2'-O-methyladenosine-3'-phosphate
  modified_base 21: mod_base = OTHER; note = 2'-O-methyladenosine-3'-phosphorothioate
  modified_base 22: mod_base = OTHER; note = 2'-O-methylguanosine-3'-phosphorothioate
  modified_base 23: mod_base = OTHER; note = 2'-O-methylcytidine
tcacattcattgtatcatcaagc

SEQ ID NO: 12249 - RNA, 23 nt, synthetic construct
  source 1..23: mol_type = other RNA
  modified_base 1: mod_base = OTHER; note = 2'-O-methyluridine-3'-phosphorothioate 5'-(E)-Vinylphosphonate
  modified_base 2: mod_base = OTHER; note = 2'-deoxy-2'-fluorouridine-3'-phosphorothioate
  modified_base 3: mod_base = OTHER; note = 2'-O-methylcytidine-3'-phosphate
  modified_base 4: mod_base = OTHER; note = 2'-O-methyladenosine-3'-phosphate
  modified_base 5: mod_base = OTHER; note = 2'-O-methylcytidine-3'-phosphate
  modified_base 6: mod_base = OTHER; note = 2'-deoxy-2'-fluoroadenosine-3'-phosphate
  modified_base 7: mod_base = OTHER; note = 2'-O-methyluridine-3'-phosphate
  modified_base 8: mod_base = OTHER; note = 2'-O-methyluridine-3'-phosphate
  modified_base 9: mod_base = OTHER; note = 2'-O-methylcytidine-3'-phosphate
  modified_base 10: mod_base = OTHER; note = 2'-O-methyladenosine-3'-phosphate
  modified_base 11: mod_base = OTHER; note = 2'-O-methyluridine-3'-phosphate
  modified_base 12: mod_base = OTHER; note = 2'-O-methyluridine-3'-phosphate
  modified_base 13: mod_base = OTHER; note = 2'-O-methylguanosine-3'-phosphate
  modified_base 14: mod_base = OTHER; note = 2'-deoxy-2'-fluorouridine-3'-phosphate
  modified_base 15: mod_base = OTHER; note = 2'-O-methyladenosine-3'-phosphate
  modified_base 16: mod_base = OTHER; note = 2'-deoxy-2'-fluorouridine-3'-phosphate
  modified_base 17: mod_base = OTHER; note = 2'-O-methylcytidine-3'-phosphate
  modified_base 18: mod_base = OTHER; note = 2'-O-methyladenosine-3'-phosphate
  modified_base 19: mod_base = OTHER; note = 2'-O-methyluridine-3'-phosphate
  modified_base 20: mod_base = OTHER; note = 2'-O-methylcytidine-3'-phosphate
  modified_base 21: mod_base = OTHER; note = 2'-O-methyladenosine-3'-phosphorothioate
  modified_base 22: mod_base = OTHER; note = 2'-O-methyladenosine-3'-phosphorothioate
  modified_base 23: mod_base = OTHER; note = 2'-O-methylguanosine
ttcacattcattgtatcatcaag

SEQ ID NO: 12250 - RNA, 23 nt, synthetic construct
  source 1..23: mol_type = other RNA
  modified_base 1: mod_base = OTHER; note = 2'-O-methyluridine-3'-phosphorothioate 5'-(E)-Vinylphosphonate
  modified_base 2: mod_base = OTHER; note = 2'-deoxy-2'-fluorouridine-3'-phosphorothioate
  modified_base 3: mod_base = OTHER; note = 2'-O-methyluridine-3'-phosphate
  modified_base 4: mod_base = OTHER; note = 2'-O-methylcytidine-3'-phosphate
  modified_base 5: mod_base = OTHER; note = 2'-O-methyladenosine-3'-phosphate
  modified_base 6: mod_base = OTHER; note = 2'-deoxy-2'-fluorocytidine-3'-phosphate
  modified_base 7: mod_base = OTHER; note = 2'-O-methyladenosine-3'-phosphate
  modified_base 8: mod_base = OTHER; note = 2'-O-methyluridine-3'-phosphate
  modified_base 9: mod_base = OTHER; note = 2'-O-methyluridine-3'-phosphate
  modified_base 10: mod_base = OTHER; note = 2'-O-methylcytidine-3'-phosphate
  modified_base 11: mod_base = OTHER; note = 2'-O-methyladenosine-3'-phosphate
  modified_base 12: mod_base = OTHER; note = 2'-O-methyluridine-3'-phosphate
  modified_base 13: mod_base = OTHER; note = 2'-O-methyluridine-3'-phosphate
  modified_base 14: mod_base = OTHER; note = 2'-deoxy-2'-fluoroguanosine-3'-phosphate
  modified_base 15: mod_base = OTHER; note = 2'-O-methyluridine-3'-phosphate
  modified_base 16: mod_base = OTHER; note = 2'-deoxy-2'-fluoroadenosine-3'-phosphate
  modified_base 17: mod_base = OTHER; note = 2'-O-methyluridine-3'-phosphate
  modified_base 18: mod_base = OTHER; note = 2'-O-methylcytidine-3'-phosphate
  modified_base 19: mod_base = OTHER; note = 2'-O-methyladenosine-3'-phosphate
  modified_base 20: mod_base = OTHER; note = 2'-O-methyluridine-3'-phosphate
  modified_base 21: mod_base = OTHER; note = 2'-O-methylcytidine-3'-phosphorothioate
  modified_base 22: mod_base = OTHER; note = 2'-O-methyladenosine-3'-phosphorothioate
  modified_base 23: mod_base = OTHER; note = 2'-O-methyladenosine
tttcacattcattgtatcatcaa

SEQ ID NO: 12251 - RNA, 23 nt, synthetic construct
  source 1..23: mol_type = other RNA
  modified_base 1: mod_base = OTHER; note = 2'-O-methyluridine-3'-phosphorothioate 5'-(E)-Vinylphosphonate
  modified_base 2: mod_base = OTHER; note = 2'-deoxy-2'-fluoroadenosine-3'-phosphorothioate
  modified_base 3: mod_base = OTHER; note = 2'-O-methyluridine-3'-phosphate
  modified_base 4: mod_base = OTHER; note = 2'-O-methyluridine-3'-phosphate
  modified_base 5: mod_base = OTHER; note = 2'-O-methylcytidine-3'-phosphate
  modified_base 6: mod_base = OTHER; note = 2'-deoxy-2'-fluoroadenosine-3'-phosphate
  modified_base 7: mod_base = OTHER; note = 2'-O-methylcytidine-3'-phosphate
  modified_base 8: mod_base = OTHER; note = 2'-O-methyladenosine-3'-phosphate
  modified_base 9: mod_base = OTHER; note = 2'-O-methyluridine-3'-phosphate
  modified_base 10: mod_base = OTHER; note = 2'-O-methyluridine-3'-phosphate
  modified_base 11: mod_base = OTHER; note = 2'-O-methylcytidine-3'-phosphate
  modified_base 12: mod_base = OTHER; note = 2'-O-methyladenosine-3'-phosphate
  modified_base 13: mod_base = OTHER; note = 2'-O-methyluridine-3'-phosphate
  modified_base 14: mod_base = OTHER; note = 2'-deoxy-2'-fluorouridine-3'-phosphate
  modified_base 15: mod_base = OTHER; note = 2'-O-methylguanosine-3'-phosphate
  modified_base 16: mod_base = OTHER; note = 2'-deoxy-2'-fluorouridine-3'-phosphate
  modified_base 17: mod_base = OTHER; note = 2'-O-methyladenosine-3'-phosphate
  modified_base 18: mod_base = OTHER; note = 2'-O-methyluridine-3'-phosphate
  modified_base 19: mod_base = OTHER; note = 2'-O-methylcytidine-3'-phosphate
  modified_base 20: mod_base = OTHER; note = 2'-O-methyladenosine-3'-phosphate
  modified_base 21: mod_base = OTHER; note = 2'-O-methyluridine-3'-phosphorothioate
  modified_base 22: mod_base = OTHER; note = 2'-O-methylcytidine-3'-phosphorothioate
  modified_base 23: mod_base = OTHER; note = 2'-O-methyladenosine
tattcacattcattgtatcatca

SEQ ID NO: 12252 - RNA, 23 nt, synthetic construct
  source 1..23: mol_type = other RNA
  modified_base 1: mod_base = OTHER; note = 2'-O-methyluridine-3'-phosphorothioate 5'-(E)-Vinylphosphonate
  modified_base 2: mod_base = OTHER; note = 2'-deoxy-2'-fluorouridine-3'-phosphorothioate
  modified_base 3: mod_base = OTHER; note = 2'-O-methyladenosine-3'-phosphate
  modified_base 4: mod_base = OTHER; note = 2'-O-methyluridine-3'-phosphate
  modified_base 5: mod_base = OTHER; note = 2'-O-methyluridine-3'-phosphate
  modified_base 6: mod_base = OTHER; note = 2'-deoxy-2'-fluorocytidine-3'-phosphate
  modified_base 7: mod_base = OTHER; note = 2'-O-methyladenosine-3'-phosphate
  modified_base 8: mod_base = OTHER; note = 2'-O-methylcytidine-3'-phosphate
  modified_base 9: mod_base = OTHER; note = 2'-O-methyladenosine-3'-phosphate
  modified_base 10: mod_base = OTHER; note = 2'-O-methyluridine-3'-phosphate
  modified_base 11: mod_base = OTHER; note = 2'-O-methyluridine-3'-phosphate
  modified_base 12: mod_base = OTHER; note = 2'-O-methylcytidine-3'-phosphate
  modified_base 13: mod_base = OTHER; note = 2'-O-methyladenosine-3'-phosphate
  modified_base 14: mod_base = OTHER; note = 2'-deoxy-2'-fluorouridine-3'-phosphate
  modified_base 15: mod_base = OTHER; note = 2'-O-methyluridine-3'-phosphate
  modified_base 16: mod_base = OTHER; note = 2'-deoxy-2'-fluoroguanosine-3'-phosphate
  modified_base 17: mod_base = OTHER; note = 2'-O-methyluridine-3'-phosphate
  modified_base 18: mod_base = OTHER; note = 2'-O-methyladenosine-3'-phosphate
  modified_base 19: mod_base = OTHER; note = 2'-O-methyluridine-3'-phosphate
  modified_base 20: mod_base = OTHER; note = 2'-O-methylcytidine-3'-phosphate
  modified_base 21: mod_base = OTHER; note = 2'-O-methyladenosine-3'-phosphorothioate
  modified_base 22: mod_base = OTHER; note = 2'-O-methyluridine-3'-phosphorothioate
  modified_base 23: mod_base = OTHER; note = 2'-O-methylcytidine
ttattcacattcattgtatcatc

SEQ ID NO: 12253 - RNA, 23 nt, synthetic construct
  source 1..23: mol_type = other RNA
  modified_base 1: mod_base = OTHER; note = 2'-O-methyluridine-3'-phosphorothioate 5'-(E)-Vinylphosphonate
  modified_base 2: mod_base = OTHER; note = 2'-deoxy-2'-fluoroguanosine-3'-phosphorothioate
  modified_base 3: mod_base = OTHER; note = 2'-O-methyladenosine-3'-phosphate
  modified_base 4: mod_base = OTHER; note = 2'-O-methyluridine-3'-phosphate
  modified_base 5: mod_base = OTHER; note = 2'-O-methyladenosine-3'-phosphate
  modified_base 6: mod_base = OTHER; note = 2'-deoxy-2'-fluorouridine-3'-phosphate
  modified_base 7: mod_base = OTHER; note = 2'-O-methyluridine-3'-phosphate
  modified_base 8: mod_base = OTHER; note = 2'-O-methylcytidine-3'-phosphate
  modified_base 9: mod_base = OTHER; note = 2'-O-methyladenosine-3'-phosphate
  modified_base 10: mod_base = OTHER; note = 2'-O-methylcytidine-3'-phosphate
  modified_base 11: mod_base = OTHER; note = 2'-O-methyladenosine-3'-phosphate
  modified_base 12: mod_base = OTHER; note = 2'-O-methyluridine-3'-phosphate
  modified_base 13: mod_base = OTHER; note = 2'-O-methyluridine-3'-phosphate
  modified_base 14: mod_base = OTHER; note = 2'-deoxy-2'-fluorocytidine-3'-phosphate
  modified_base 15: mod_base = OTHER; note = 2'-O-methyladenosine-3'-phosphate
  modified_base 16: mod_base = OTHER; note = 2'-deoxy-2'-fluorouridine-3'-phosphate
  modified_base 17: mod_base = OTHER; note = 2'-O-methyluridine-3'-phosphate
  modified_base 18: mod_base = OTHER; note = 2'-O-methylguanosine-3'-phosphate
  modified_base 19: mod_base = OTHER; note = 2'-O-methyluridine-3'-phosphate
  modified_base 20: mod_base = OTHER; note = 2'-O-methyladenosine-3'-phosphate
  modified_base 21: mod_base = OTHER; note = 2'-O-methyluridine-3'-phosphorothioate
  modified_base 22: mod_base = OTHER; note = 2'-O-methylcytidine-3'-phosphorothioate
  modified_base 23: mod_base = OTHER; note = 2'-O-methyladenosine
tgatattcacattcattgtatca

SEQ ID NO: 12254 - RNA, 23 nt, synthetic construct
  source 1..23: mol_type = other RNA
  modified_base 1: mod_base = OTHER; note = 2'-O-methyluridine-3'-phosphorothioate 5'-(E)-Vinylphosphonate
  modified_base 2: mod_base = OTHER; note = 2'-deoxy-2'-fluoroadenosine-3'-phosphorothioate
  modified_base 3: mod_base = OTHER; note = 2'-O-methylguanosine-3'-phosphate
  modified_base 4: mod_base = OTHER; note = 2'-O-methyladenosine-3'-phosphate
  modified_base 5: mod_base = OTHER; note = 2'-O-methyluridine-3'-phosphate
  modified_base 6: mod_base = OTHER; note = 2'-deoxy-2'-fluoroadenosine-3'-phosphate
  modified_base 7: mod_base = OTHER; note = 2'-O-methyluridine-3'-phosphate
  modified_base 8: mod_base = OTHER; note = 2'-O-methyluridine-3'-phosphate
  modified_base 9: mod_base = OTHER; note = 2'-O-methylcytidine-3'-phosphate
  modified_base 10: mod_base = OTHER; note = 2'-O-methyladenosine-3'-phosphate
  modified_base 11: mod_base = OTHER; note = 2'-O-methylcytidine-3'-phosphate
  modified_base 12: mod_base = OTHER; note = 2'-O-methyladenosine-3'-phosphate
  modified_base 13: mod_base = OTHER; note = 2'-O-methyluridine-3'-phosphate
  modified_base 14: mod_base = OTHER; note = 2'-deoxy-2'-fluorouridine-3'-phosphate
  modified_base 15: mod_base = OTHER; note = 2'-O-methylcytidine-3'-phosphate
  modified_base 16: mod_base = OTHER; note = 2'-deoxy-2'-fluoroadenosine-3'-phosphate
  modified_base 17: mod_base = OTHER; note = 2'-O-methyluridine-3'-phosphate
  modified_base 18: mod_base = OTHER; note = 2'-O-methyluridine-3'-phosphate
  modified_base 19: mod_base = OTHER; note = 2'-O-methylguanosine-3'-phosphate
  modified_base 20: mod_base = OTHER; note = 2'-O-methyluridine-3'-phosphate
  modified_base 21: mod_base = OTHER; note = 2'-O-methyladenosine-3'-phosphorothioate
  modified_base 22: mod_base = OTHER; note = 2'-O-methyluridine-3'-phosphorothioate
  modified_base 23: mod_base = OTHER; note = 2'-O-methylcytidine
tagatattcacattcattgtatc

SEQ ID NO: 12255 - RNA, 23 nt, synthetic construct
  source 1..23: mol_type = other RNA
  modified_base 1: mod_base = OTHER; note = 2'-O-methyluridine-3'-phosphorothioate 5'-(E)-Vinylphosphonate
  modified_base 2: mod_base = OTHER; note = 2'-deoxy-2'-fluorouridine-3'-phosphorothioate
  modified_base 3: mod_base = OTHER; note = 2'-O-methylguanosine-3'-phosphate
  modified_base 4: mod_base = OTHER; note = 2'-O-methyladenosine-3'-phosphate
  modified_base 5: mod_base = OTHER; note = 2'-O-methyladenosine-3'-phosphate
  modified_base 6: mod_base = OTHER; note = 2'-deoxy-2'-fluoroguanosine-3'-phosphate
  modified_base 7: mod_base = OTHER; note = 2'-O-methylguanosine-3'-phosphate
  modified_base 8: mod_base = OTHER; note = 2'-O-methyladenosine-3'-phosphate
  modified_base 9: mod_base = OTHER; note = 2'-O-methylcytidine-3'-phosphate
  modified_base 10: mod_base = OTHER; note = 2'-O-methyluridine-3'-phosphate
  modified_base 11: mod_base = OTHER; note = 2'-O-methylcytidine-3'-phosphate
  modified_base 12: mod_base = OTHER; note = 2'-O-methyladenosine-3'-phosphate
  modified_base 13: mod_base = OTHER; note = 2'-O-methyladenosine-3'-phosphate
  modified_base 14: mod_base = OTHER; note = 2'-deoxy-2'-fluoroadenosine-3'-phosphate
  modified_base 15: mod_base = OTHER; note = 2'-O-methylguanosine-3'-phosphate
  modified_base 16: mod_base = OTHER; note = 2'-deoxy-2'-fluoroadenosine-3'-phosphate
  modified_base 17: mod_base = OTHER; note = 2'-O-methyluridine-3'-phosphate
  modified_base 18: mod_base = OTHER; note = 2'-O-methyladenosine-3'-phosphate
  modified_base 19: mod_base = OTHER; note = 2'-O-methyluridine-3'-phosphate
  modified_base 20: mod_base = OTHER; note = 2'-O-methyluridine-3'-phosphate
  modified_base 21: mod_base = OTHER; note = 2'-O-methylcytidine-3'-phosphorothioate
  modified_base 22: mod_base = OTHER; note = 2'-O-methyladenosine-3'-phosphorothioate
  modified_base 23: mod_base = OTHER; note = 2'-O-methylcytidine
ttgaaggactcaaagatattcac

SEQ ID NO: 12256 - RNA, 23 nt, synthetic construct
  source 1..23: mol_type = other RNA
  modified_base 1: mod_base = OTHER; note = 2'-O-methyluridine-3'-phosphorothioate 5'-(E)-Vinylphosphonate
  modified_base 2: mod_base = OTHER; note = 2'-deoxy-2'-fluoroadenosine-3'-phosphorothioate
  modified_base 3: mod_base = OTHER; note = 2'-O-methylguanosine-3'-phosphate
  modified_base 4: mod_base = OTHER; note = 2'-O-methyladenosine-3'-phosphate
  modified_base 5: mod_base = OTHER; note = 2'-O-methylcytidine-3'-phosphate
  modified_base 6: mod_base = OTHER; note = 2'-deoxy-2'-fluorocytidine-3'-phosphate
  modified_base 7: mod_base = OTHER; note = 2'-O-methyladenosine-3'-phosphate
  modified_base 8: mod_base = OTHER; note = 2'-O-methyladenosine-3'-phosphate
  modified_base 9: mod_base = OTHER; note = 2'-O-methylcytidine-3'-phosphate
  modified_base 10: mod_base = OTHER; note = 2'-O-methyladenosine-3'-phosphate
  modified_base 11: mod_base = OTHER; note = 2'-O-methylguanosine-3'-phosphate
  modified_base 12: mod_base = OTHER; note = 2'-O-methyladenosine-3'-phosphate
  modified_base 13: mod_base = OTHER; note = 2'-O-methyladenosine-3'-phosphate
  modified_base 14: mod_base = OTHER; note = 2'-deoxy-2'-fluorouridine-3'-phosphate
  modified_base 15: mod_base = OTHER; note = 2'-O-methyladenosine-3'-phosphate
  modified_base 16: mod_base = OTHER; note = 2'-deoxy-2'-fluoroguanosine-3'-phosphate
  modified_base 17: mod_base = OTHER; note = 2'-O-methyladenosine-3'-phosphate
  modified_base 18: mod_base = OTHER; note = 2'-O-methyluridine-3'-phosphate
  modified_base 19: mod_base = OTHER; note = 2'-O-methylguanosine-3'-phosphate
  modified_base 20: mod_base = OTHER; note = 2'-O-methyluridine-3'-phosphate
  modified_base 21: mod_base = OTHER; note = 2'-O-methylcytidine-3'-phosphorothioate
  modified_base 22: mod_base = OTHER; note = 2'-O-methyladenosine-3'-phosphorothioate
  modified_base 23: mod_base = OTHER; note = 2'-O-methylguanosine
tagaccaacagaatagatgtcag

SEQ ID NO: 12257 - RNA, 23 nt, synthetic construct
  source 1..23: mol_type = other RNA
  modified_base 1: mod_base = OTHER; note = 2'-O-methyluridine-3'-phosphorothioate 5'-(E)-Vinylphosphonate
  modified_base 2: mod_base = OTHER; note = 2'-deoxy-2'-fluorocytidine-3'-phosphorothioate
  modified_base 3: mod_base = OTHER; note = 2'-O-methyladenosine-3'-phosphate
  modified_base 4: mod_base = OTHER; note = 2'-O-methyladenosine-3'-phosphate
  modified_base 5: mod_base = OTHER; note = 2'-O-methyladenosine-3'-phosphate
  modified_base 6: mod_base = OTHER; note = 2'-deoxy-2'-fluoroguanosine-3'-phosphate
  modified_base 7: mod_base = OTHER; note = 2'-O-methyladenosine-3'-phosphate
  modified_base 8: mod_base = OTHER; note = 2'-O-methyluridine-3'-phosphate
  modified_base 9: mod_base = OTHER; note = 2'-O-methyladenosine-3'-phosphate
  modified_base 10: mod_base = OTHER; note = 2'-O-methyluridine-3'-phosphate
  modified_base 11: mod_base = OTHER; note = 2'-O-methyluridine-3'-phosphate
  modified_base 12: mod_base = OTHER; note = 2'-O-methylcytidine-3'-phosphate
  modified_base 13: mod_base = OTHER; note = 2'-O-methyladenosine-3'-phosphate
  modified_base 14: mod_base = OTHER; note = 2'-deoxy-2'-fluorocytidine-3'-phosphate
  modified_base 15: mod_base = OTHER; note = 2'-O-methyladenosine-3'-phosphate
  modified_base 16: mod_base = OTHER; note = 2'-deoxy-2'-fluorouridine-3'-phosphate
  modified_base 17: mod_base = OTHER; note = 2'-O-methyluridine-3'-phosphate
  modified_base 18: mod_base = OTHER; note = 2'-O-methylcytidine-3'-phosphate
  modified_base 19: mod_base = OTHER; note = 2'-O-methyladenosine-3'-phosphate
  modified_base 20: mod_base = OTHER; note = 2'-O-methyluridine-3'-phosphate
  modified_base 21: mod_base = OTHER; note = 2'-O-methyluridine-3'-phosphorothioate
  modified_base 22: mod_base = OTHER; note = 2'-O-methylguanosine-3'-phosphorothioate
  modified_base 23: mod_base = OTHER; note = 2'-O-methyluridine
tcaaagatattcacattcattgt

SEQ ID NO: 12258 - RNA, 23 nt, synthetic construct
  source 1..23: mol_type = other RNA
  modified_base 1: mod_base = OTHER; note = 2'-O-methyluridine-3'-phosphorothioate 5'-(E)-Vinylphosphonate
  modified_base 2: mod_base = OTHER; note = 2'-deoxy-2'-fluorouridine-3'-phosphorothioate
  modified_base 3: mod_base = OTHER; note = 2'-O-methylcytidine-3'-phosphate
  modified_base 4: mod_base = OTHER; note = 2'-O-methyladenosine-3'-phosphate
  modified_base 5: mod_base = OTHER; note = 2'-O-methyladenosine-3'-phosphate
  modified_base 6: mod_base = OTHER; note = 2'-deoxy-2'-fluoroadenosine-3'-phosphate
  modified_base 7: mod_base = OTHER; note = 2'-O-methylguanosine-3'-phosphate
  modified_base 8: mod_base = OTHER; note = 2'-O-methyladenosine-3'-phosphate
  modified_base 9: mod_base = OTHER; note = 2'-O-methyluridine-3'-phosphate
  modified_base 10: mod_base = OTHER; note = 2'-O-methyladenosine-3'-phosphate
  modified_base 11: mod_base = OTHER; note = 2'-O-methyluridine-3'-phosphate
  modified_base 12: mod_base = OTHER; note = 2'-O-methyluridine-3'-phosphate
  modified_base 13: mod_base = OTHER; note = 2'-O-methylcytidine-3'-phosphate
  modified_base 14: mod_base = OTHER; note = 2'-deoxy-2'-fluoroadenosine-3'-phosphate
  modified_base 15: mod_base = OTHER; note = 2'-O-methylcytidine-3'-phosphate
  modified_base 16: mod_base = OTHER; note = 2'-deoxy-2'-fluoroadenosine-3'-phosphate
  modified_base 17: mod_base = OTHER; note = 2'-O-methyluridine-3'-phosphate
  modified_base 18: mod_base = OTHER; note = 2'-O-methyluridine-3'-phosphate
  modified_base 19: mod_base = OTHER; note = 2'-O-methylcytidine-3'-phosphate
  modified_base 20: mod_base = OTHER; note = 2'-O-methyladenosine-3'-phosphate
  modified_base 21: mod_base = OTHER; note = 2'-O-methyluridine-3'-phosphorothioate
  modified_base 22: mod_base = OTHER; note = 2'-O-methyluridine-3'-phosphorothioate
  modified_base 23: mod_base = OTHER; note = 2'-O-methylguanosine
ttcaaagatattcacattcattg

SEQ ID NO: 12259 - RNA, 23 nt, synthetic construct
  source 1..23: mol_type = other RNA
  modified_base 1: mod_base = OTHER; note = 2'-O-methyluridine-3'-phosphorothioate 5'-(E)-Vinylphosphonate
  modified_base 2: mod_base = OTHER; note = 2'-deoxy-2'-fluorocytidine-3'-phosphorothioate
  modified_base 3: mod_base = OTHER; note = 2'-O-methyluridine-3'-phosphate
  modified_base 4: mod_base = OTHER; note = 2'-O-methylcytidine-3'-phosphate
  modified_base 5: mod_base = OTHER; note = 2'-O-methyladenosine-3'-phosphate
  modified_base 6: mod_base = OTHER; note = 2'-deoxy-2'-fluoroadenosine-3'-phosphate
  modified_base 7: mod_base = OTHER; note = 2'-O-methyladenosine-3'-phosphate
  modified_base 8: mod_base = OTHER; note = 2'-O-methylguanosine-3'-phosphate
  modified_base 9: mod_base = OTHER; note = 2'-O-methyladenosine-3'-phosphate
  modified_base 10: mod_base = OTHER; note = 2'-O-methyluridine-3'-phosphate
  modified_base 11: mod_base = OTHER; note = 2'-O-methyladenosine-3'-phosphate
  modified_base 12: mod_base = OTHER; note = 2'-O-methyluridine-3'-phosphate
  modified_base 13: mod_base = OTHER; note = 2'-O-methyluridine-3'-phosphate
  modified_base 14: mod_base = OTHER; note = 2'-deoxy-2'-fluorocytidine-3'-phosphate
  modified_base 15: mod_base = OTHER; note = 2'-O-methyladenosine-3'-phosphate
  modified_base 16: mod_base = OTHER; note = 2'-deoxy-2'-fluorocytidine-3'-phosphate
  modified_base 17: mod_base = OTHER; note = 2'-O-methyladenosine-3'-phosphate
  modified_base 18: mod_base = OTHER; note = 2'-O-methyluridine-3'-phosphate
  modified_base 19: mod_base = OTHER; note = 2'-O-methyluridine-3'-phosphate
  modified_base 20: mod_base = OTHER; note = 2'-O-methylcytidine-3'-phosphate
  modified_base 21: mod_base = OTHER; note = 2'-O-methyladenosine-3'-phosphorothioate
  modified_base 22: mod_base = OTHER; note = 2'-O-methyluridine-3'-phosphorothioate
  modified_base 23: mod_base = OTHER; note = 2'-O-methyluridine
tctcaaagatattcacattcatt

SEQ ID NO: 12260 - RNA, 23 nt, synthetic construct
  source 1..23: mol_type = other RNA
  modified_base 1: mod_base = OTHER; note = 2'-O-methyluridine-3'-phosphorothioate 5'-(E)-Vinylphosphonate
  modified_base 2: mod_base = OTHER; note = 2'-deoxy-2'-fluoroadenosine-3'-phosphorothioate
  modified_base 3: mod_base = OTHER; note = 2'-O-methylcytidine-3'-phosphate
  modified_base 4: mod_base = OTHER; note = 2'-O-methyluridine-3'-phosphate
  modified_base 5: mod_base = OTHER; note = 2'-O-methylcytidine-3'-phosphate
  modified_base 6: mod_base = OTHER; note = 2'-deoxy-2'-fluoroadenosine-3'-phosphate
  modified_base 7: mod_base = OTHER; note = 2'-O-methyladenosine-3'-phosphate
  modified_base 8: mod_base = OTHER; note = 2'-O-methyladenosine-3'-phosphate
  modified_base 9: mod_base = OTHER; note = 2'-O-methylguanosine-3'-phosphate
  modified_base 10: mod_base = OTHER; note = 2'-O-methyladenosine-3'-phosphate
  modified_base 11: mod_base = OTHER; note = 2'-O-methyluridine-3'-phosphate
  modified_base 12: mod_base = OTHER; note = 2'-O-methyladenosine-3'-phosphate
  modified_base 13: mod_base = OTHER; note = 2'-O-methyluridine-3'-phosphate
  modified_base 14: mod_base = OTHER; note = 2'-deoxy-2'-fluorouridine-3'-phosphate
  modified_base 15: mod_base = OTHER; note = 2'-O-methylcytidine-3'-phosphate
  modified_base 16: mod_base = OTHER; note = 2'-deoxy-2'-fluoroadenosine-3'-phosphate
  modified_base 17: mod_base = OTHER; note = 2'-O-methylcytidine-3'-phosphate
  modified_base 18: mod_base = OTHER; note = 2'-O-methyladenosine-3'-phosphate
  modified_base 19: mod_base = OTHER; note = 2'-O-methyluridine-3'-phosphate
  modified_base 20: mod_base = OTHER; note = 2'-O-methyluridine-3'-phosphate
  modified_base 21: mod_base = OTHER; note = 2'-O-methylcytidine-3'-phosphorothioate
  modified_base 22: mod_base = OTHER; note = 2'-O-methyladenosine-3'-phosphorothioate
  modified_base 23: mod_base = OTHER; note = 2'-O-methyluridine
tactcaaagatattcacattcat

SEQ ID NO: 12261 - RNA, 23 nt, synthetic construct
  source 1..23: mol_type = other RNA
  modified_base 1: mod_base = OTHER; note = 2'-O-methyluridine-3'-phosphorothioate 5'-(E)-Vinylphosphonate
  modified_base 2: mod_base = OTHER; note = 2'-deoxy-2'-fluoroguanosine-3'-phosphorothioate
  modified_base 3: mod_base = OTHER; note = 2'-O-methyladenosine-3'-phosphate
  modified_base 4: mod_base = OTHER; note = 2'-O-methylcytidine-3'-phosphate
  modified_base 5: mod_base = OTHER; note = 2'-O-methyluridine-3'-phosphate
  modified_base 6: mod_base = OTHER; note = 2'-deoxy-2'-fluorocytidine-3'-phosphate
  modified_base 7: mod_base = OTHER; note = 2'-O-methyladenosine-3'-phosphate
  modified_base 8: mod_base = OTHER; note = 2'-O-methyladenosine-3'-phosphate
  modified_base 9: mod_base = OTHER; note = 2'-O-methyladenosine-3'-phosphate
  modified_base 10: mod_base = OTHER; note = 2'-O-methylguanosine-3'-phosphate
  modified_base 11: mod_base = OTHER; note = 2'-O-methyladenosine-3'-phosphate
  modified_base 12: mod_base = OTHER; note = 2'-O-methyluridine-3'-phosphate
  modified_base 13: mod_base = OTHER; note = 2'-O-methyladenosine-3'-phosphate
  modified_base 14: mod_base = OTHER; note = 2'-deoxy-2'-fluorouridine-3'-phosphate
  modified_base 15: mod_base = OTHER; note = 2'-O-methyluridine-3'-phosphate
  modified_base 16: mod_base = OTHER; note = 2'-deoxy-2'-fluorocytidine-3'-phosphate
  modified_base 17: mod_base = OTHER; note = 2'-O-methyladenosine-3'-phosphate
  modified_base 18: mod_base = OTHER; note = 2'-O-methylcytidine-3'-phosphate
  modified_base 19: mod_base = OTHER; note = 2'-O-methyladenosine-3'-phosphate
  modified_base 20: mod_base = OTHER; note = 2'-O-methyluridine-3'-phosphate
  modified_base 21: mod_base = OTHER; note = 2'-O-methyluridine-3'-phosphorothioate
  modified_base 22: mod_base = OTHER; note = 2'-O-methylcytidine-3'-phosphorothioate
  modified_base 23: mod_base = OTHER; note = 2'-O-methyladenosine
tgactcaaagatattcacattca

SEQ ID NO: 12262 - RNA, 23 nt, synthetic construct
  source 1..23: mol_type = other RNA
  modified_base 1: mod_base = OTHER; note = 2'-O-methyluridine-3'-phosphorothioate 5'-(E)-Vinylphosphonate
  modified_base 2: mod_base = OTHER; note = 2'-deoxy-2'-fluoroguanosine-3'-phosphorothioate
  modified_base 3: mod_base = OTHER; note = 2'-O-methylguanosine-3'-phosphate
  modified_base 4: mod_base = OTHER; note = 2'-O-methyladenosine-3'-phosphate
  modified_base 5: mod_base = OTHER; note = 2'-O-methylcytidine-3'-phosphate
  modified_base 6: mod_base = OTHER; note = 2'-deoxy-2'-fluorouridine-3'-phosphate
  modified_base 7: mod_base = OTHER; note = 2'-O-methylcytidine-3'-phosphate
  modified_base 8: mod_base = OTHER; note = 2'-O-methyladenosine-3'-phosphate
  modified_base 9: mod_base = OTHER; note = 2'-O-methyladenosine-3'-phosphate
  modified_base 10: mod_base = OTHER; note = 2'-O-methyladenosine-3'-phosphate
  modified_base 11: mod_base = OTHER; note = 2'-O-methylguanosine-3'-phosphate
  modified_base 12: mod_base = OTHER; note = 2'-O-methyladenosine-3'-phosphate
  modified_base 13: mod_base = OTHER; note = 2'-O-methyluridine-3'-phosphate
  modified_base 14: mod_base = OTHER; note = 2'-deoxy-2'-fluoroadenosine-3'-phosphate
  modified_base 15: mod_base = OTHER; note = 2'-O-methyluridine-3'-phosphate
  modified_base 16: mod_base = OTHER; note = 2'-deoxy-2'-fluorouridine-3'-phosphate
  modified_base 17: mod_base = OTHER; note = 2'-O-methylcytidine-3'-phosphate
  modified_base 18: mod_base = OTHER; note = 2'-O-methyladenosine-3'-phosphate
  modified_base 19: mod_base = OTHER; note = 2'-O-methylcytidine-3'-phosphate
  modified_base 20: mod_base = OTHER; note = 2'-O-methyladenosine-3'-phosphate
  modified_base 21: mod_base = OTHER; note = 2'-O-methyluridine-3'-phosphorothioate
  modified_base 22: mod_base = OTHER; note = 2'-O-methyluridine-3'-phosphorothioate
  modified_base 23: mod_base = OTHER; note = 2'-O-methylcytidine
tggactcaaagatattcacattc

SEQ ID NO: 12263 - RNA, 23 nt, synthetic construct
  source 1..23: mol_type = other RNA
  modified_base 1: mod_base = OTHER; note = 2'-O-methyluridine-3'-phosphorothioate 5'-(E)-Vinylphosphonate
  modified_base 2: mod_base = OTHER; note = 2'-deoxy-2'-fluoroadenosine-3'-phosphorothioate
  modified_base 3: mod_base = OTHER; note = 2'-O-methylguanosine-3'-phosphate
  modified_base 4: mod_base = OTHER; note = 2'-O-methylguanosine-3'-phosphate
  modified_base 5: mod_base = OTHER; note = 2'-O-methyladenosine-3'-phosphate
  modified_base 6: mod_base = OTHER; note = 2'-deoxy-2'-fluorocytidine-3'-phosphate
  modified_base 7: mod_base = OTHER; note = 2'-O-methyluridine-3'-phosphate
  modified_base 8: mod_base = OTHER; note = 2'-O-methylcytidine-3'-phosphate
  modified_base 9: mod_base = OTHER; note = 2'-O-methyladenosine-3'-phosphate
  modified_base 10: mod_base = OTHER; note = 2'-O-methyladenosine-3'-phosphate
  modified_base 11: mod_base = OTHER; note = 2'-O-methyladenosine-3'-phosphate
  modified_base 12: mod_base = OTHER; note = 2'-O-methylguanosine-3'-phosphate
  modified_base 13: mod_base = OTHER; note = 2'-O-methyladenosine-3'-phosphate
  modified_base 14: mod_base = OTHER; note = 2'-deoxy-2'-fluorouridine-3'-phosphate
  modified_base 15: mod_base = OTHER; note = 2'-O-methyladenosine-3'-phosphate
  modified_base 16: mod_base = OTHER; note = 2'-deoxy-2'-fluorouridine-3'-phosphate
  modified_base 17: mod_base = OTHER; note = 2'-O-methyluridine-3'-phosphate
  modified_base 18: mod_base = OTHER; note = 2'-O-methylcytidine-3'-phosphate
  modified_base 19: mod_base = OTHER; note = 2'-O-methyladenosine-3'-phosphate
  modified_base 20: mod_base = OTHER; note = 2'-O-methylcytidine-3'-phosphate
  modified_base 21: mod_base = OTHER; note = 2'-O-methyladenosine-3'-phosphorothioate
  modified_base 22: mod_base = OTHER; note = 2'-O-methyluridine-3'-phosphorothioate
  modified_base 23: mod_base = OTHER; note = 2'-O-methyluridine
taggactcaaagatattcacatt

SEQ ID NO: 12264 - RNA, 23 nt, synthetic construct
  source 1..23: mol_type = other RNA
  modified_base 1: mod_base = OTHER; note = 2'-O-methyluridine-3'-phosphorothioate 5'-(E)-Vinylphosphonate
  modified_base 2: mod_base = OTHER; note = 2'-deoxy-2'-fluoroadenosine-3'-phosphorothioate
  modified_base 3: mod_base = OTHER; note = 2'-O-methyladenosine-3'-phosphate
  modified_base 4: mod_base = OTHER; note = 2'-O-methylguanosine-3'-phosphate
  modified_base 5: mod_base = OTHER; note = 2'-O-methylguanosine-3'-phosphate
  modified_base 6: mod_base = OTHER; note = 2'-deoxy-2'-fluoroadenosine-3'-phosphate
  modified_base 7: mod_base = OTHER; note = 2'-O-methylcytidine-3'-phosphate
  modified_base 8: mod_base = OTHER; note = 2'-O-methyluridine-3'-phosphate
  modified_base 9: mod_base = OTHER; note = 2'-O-methylcytidine-3'-phosphate
  modified_base 10: mod_base = OTHER; note = 2'-O-methyladenosine-3'-phosphate
  modified_base 11: mod_base = OTHER; note = 2'-O-methyladenosine-3'-phosphate
  modified_base 12: mod_base = OTHER; note = 2'-O-methyladenosine-3'-phosphate
  modified_base 13: mod_base = OTHER; note = 2'-O-methylguanosine-3'-phosphate
  modified_base 14: mod_base = OTHER; note = 2'-deoxy-2'-fluoroadenosine-3'-phosphate
  modified_base 15: mod_base = OTHER; note = 2'-O-methyluridine-3'-phosphate
  modified_base 16: mod_base = OTHER; note = 2'-deoxy-2'-fluoroadenosine-3'-phosphate
  modified_base 17: mod_base = OTHER; note = 2'-O-methyluridine-3'-phosphate
  modified_base 18: mod_base = OTHER; note = 2'-O-methyluridine-3'-phosphate
  modified_base 19: mod_base = OTHER; note = 2'-O-methylcytidine-3'-phosphate
  modified_base 20: mod_base = OTHER; note = 2'-O-methyladenosine-3'-phosphate
  modified_base 21: mod_base = OTHER; note = 2'-O-methylcytidine-3'-phosphorothioate
  modified_base 22: mod_base = OTHER; note = 2'-O-methyladenosine-3'-phosphorothioate
  modified_base 23: mod_base = OTHER; note = 2'-O-methyluridine
taaggactcaaagatattcacat

SEQ ID NO: 12265 - RNA, 23 nt, synthetic construct
  source 1..23: mol_type = other RNA
  modified_base 1: mod_base = OTHER; note = 2'-O-methyluridine-3'-phosphorothioate 5'-(E)-Vinylphosphonate
  modified_base 2: mod_base = OTHER; note = 2'-deoxy-2'-fluoroguanosine-3'-phosphorothioate
  modified_base 3: mod_base = OTHER; note = 2'-O-methyladenosine-3'-phosphate
  modified_base 4: mod_base = OTHER; note = 2'-O-methyladenosine-3'-phosphate
  modified_base 5: mod_base = OTHER; note = 2'-O-methylguanosine-3'-phosphate
  modified_base 6: mod_base = OTHER; note = 2'-deoxy-2'-fluoroguanosine-3'-phosphate
  modified_base 7: mod_base = OTHER; note = 2'-O-methyladenosine-3'-phosphate
  modified_base 8: mod_base = OTHER; note = 2'-O-methylcytidine-3'-phosphate
  modified_base 9: mod_base = OTHER; note = 2'-O-methyluridine-3'-phosphate
  modified_base 10: mod_base = OTHER; note = 2'-O-methylcytidine-3'-phosphate
  modified_base 11: mod_base = OTHER; note = 2'-O-methyladenosine-3'-phosphate
  modified_base 12: mod_base = OTHER; note = 2'-O-methyladenosine-3'-phosphate
  modified_base 13: mod_base = OTHER; note = 2'-O-methyladenosine-3'-phosphate
  modified_base 14: mod_base = OTHER; note = 2'-deoxy-2'-fluoroguanosine-3'-phosphate
  modified_base 15: mod_base = OTHER; note = 2'-O-methyladenosine-3'-phosphate
  modified_base 16: mod_base = OTHER; note = 2'-deoxy-2'-fluorouridine-3'-phosphate
  modified_base 17: mod_base = OTHER; note = 2'-O-methyladenosine-3'-phosphate
  modified_base 18: mod_base = OTHER; note = 2'-O-methyluridine-3'-phosphate
  modified_base 19: mod_base = OTHER; note = 2'-O-methyluridine-3'-phosphate
  modified_base 20: mod_base = OTHER; note = 2'-O-methylcytidine-3'-phosphate
  modified_base 21: mod_base = OTHER; note = 2'-O-methyladenosine-3'-phosphorothioate
  modified_base 22: mod_base = OTHER; note = 2'-O-methylcytidine-3'-phosphorothioate
  modified_base 23: mod_base = OTHER; note = 2'-O-methyladenosine
tgaaggactcaaagatattcaca

SEQ ID NO: 12266 - RNA, 23 nt, synthetic construct
  source 1..23: mol_type = other RNA
  modified_base 1: mod_base = OTHER; note = 2'-O-methyluridine-3'-phosphorothioate 5'-(E)-Vinylphosphonate
  modified_base 2: mod_base = OTHER; note = 2'-deoxy-2'-fluorouridine-3'-phosphorothioate
  modified_base 3: mod_base = OTHER; note = 2'-O-methyluridine-3'-phosphate
  modified_base 4: mod_base = OTHER; note = 2'-O-methylguanosine-3'-phosphate
  modified_base 5: mod_base = OTHER; note = 2'-O-methyladenosine-3'-phosphate
  modified_base 6: mod_base = OTHER; note = 2'-deoxy-2'-fluoroadenosine-3'-phosphate
  modified_base 7: mod_base = OTHER; note = 2'-O-methylguanosine-3'-phosphate
  modified_base 8: mod_base = OTHER; note = 2'-O-methylguanosine-3'-phosphate
  modified_base 9: mod_base = OTHER; note = 2'-O-methyladenosine-3'-phosphate
  modified_base 10: mod_base = OTHER; note = 2'-O-methylcytidine-3'-phosphate
  modified_base 11: mod_base = OTHER; note = 2'-O-methyluridine-3'-phosphate
  modified_base 12: mod_base = OTHER; note = 2'-O-methylcytidine-3'-phosphate
  modified_base 13: mod_base = OTHER; note = 2'-O-methyladenosine-3'-phosphate
  modified_base 14: mod_base = OTHER; note = 2'-deoxy-2'-fluoroadenosine-3'-phosphate
  modified_base 15: mod_base = OTHER; note = 2'-O-methyladenosine-3'-phosphate
  modified_base 16: mod_base = OTHER; note = 2'-deoxy-2'-fluoroguanosine-3'-phosphate
  modified_base 17: mod_base = OTHER; note = 2'-O-methyladenosine-3'-phosphate
  modified_base 18: mod_base = OTHER; note = 2'-O-methyluridine-3'-phosphate
  modified_base 19: mod_base = OTHER; note = 2'-O-methyladenosine-3'-phosphate
  modified_base 20: mod_base = OTHER; note = 2'-O-methyluridine-3'-phosphate
  modified_base 21: mod_base = OTHER; note = 2'-O-methyluridine-3'-phosphorothioate
  modified_base 22: mod_base = OTHER; note = 2'-O-methylcytidine-3'-phosphorothioate
  modified_base 23: mod_base = OTHER; note = 2'-O-methyladenosine
tttgaaggactcaaagatattca

SEQ ID NO: 12267 - RNA, 23 nt, synthetic construct
  source 1..23: mol_type = other RNA
  modified_base 1: mod_base = OTHER; note = 2'-O-methyluridine-3'-phosphorothioate 5'-(E)-Vinylphosphonate
  modified_base 2: mod_base = OTHER; note = 2'-deoxy-2'-fluorouridine-3'-phosphorothioate
  modified_base 3: mod_base = OTHER; note = 2'-O-methyluridine-3'-phosphate
  modified_base 4: mod_base = OTHER; note = 2'-O-methyluridine-3'-phosphate
  modified_base 5: mod_base = OTHER; note = 2'-O-methylguanosine-3'-phosphate
  modified_base 6: mod_base = OTHER; note = 2'-deoxy-2'-fluoroadenosine-3'-phosphate
  modified_base 7: mod_base = OTHER; note = 2'-O-methyladenosine-3'-phosphate
  modified_base 8: mod_base = OTHER; note = 2'-O-methylguanosine-3'-phosphate
  modified_base 9: mod_base = OTHER; note = 2'-O-methylguanosine-3'-phosphate
  modified_base 10: mod_base = OTHER; note = 2'-O-methyladenosine-3'-phosphate
  modified_base 11: mod_base = OTHER; note = 2'-O-methylcytidine-3'-phosphate
  modified_base 12: mod_base = OTHER; note = 2'-O-methyluridine-3'-phosphate
  modified_base 13: mod_base = OTHER; note = 2'-O-methylcytidine-3'-phosphate
  modified_base 14: mod_base = OTHER; note = 2'-deoxy-2'-fluoroadenosine-3'-phosphate
  modified_base 15: mod_base = OTHER; note = 2'-O-methyladenosine-3'-phosphate
  modified_base 16: mod_base = OTHER; note = 2'-deoxy-2'-fluoroadenosine-3'-phosphate
  modified_base 17: mod_base = OTHER; note = 2'-O-methylguanosine-3'-phosphate
  modified_base 18: mod_base = OTHER; note = 2'-O-methyladenosine-3'-phosphate
  modified_base 19: mod_base = OTHER; note = 2'-O-methyluridine-3'-phosphate
  modified_base 20: mod_base = OTHER; note = 2'-O-methyladenosine-3'-phosphate
  modified_base 21: mod_base = OTHER; note = 2'-O-methyluridine-3'-phosphorothioate
  modified_base 22: mod_base = OTHER; note = 2'-O-methyluridine-3'-phosphorothioate
  modified_base 23: mod_base = OTHER; note = 2'-O-methylcytidine
ttttgaaggactcaaagatattc

SEQ ID NO: 12268 - RNA, 23 nt, synthetic construct
  source 1..23: mol_type = other RNA
  modified_base 1: mod_base = OTHER; note = 2'-O-methyluridine-3'-phosphorothioate 5'-(E)-Vinylphosphonate
  modified_base 2: mod_base = OTHER; note = 2'-deoxy-2'-fluoroguanosine-3'-phosphorothioate
  modified_base 3: mod_base = OTHER; note = 2'-O-methyluridine-3'-phosphate
  modified_base 4: mod_base = OTHER; note = 2'-O-methyluridine-3'-phosphate
  modified_base 5: mod_base = OTHER; note = 2'-O-methyluridine-3'-phosphate
  modified_base 6: mod_base = OTHER; note = 2'-deoxy-2'-fluoroguanosine-3'-phosphate
  modified_base 7: mod_base = OTHER; note = 2'-O-methyladenosine-3'-phosphate
  modified_base 8: mod_base = OTHER; note = 2'-O-methyladenosine-3'-phosphate
  modified_base 9: mod_base = OTHER; note = 2'-O-methylguanosine-3'-phosphate
  modified_base 10: mod_base = OTHER; note = 2'-O-methylguanosine-3'-phosphate
  modified_base 11: mod_base = OTHER; note = 2'-O-methyladenosine-3'-phosphate
  modified_base 12: mod_base = OTHER; note = 2'-O-methylcytidine-3'-phosphate
  modified_base 13: mod_base = OTHER; note = 2'-O-methyluridine-3'-phosphate
  modified_base 14: mod_base = OTHER; note = 2'-deoxy-2'-fluorocytidine-3'-phosphate
  modified_base 15: mod_base = OTHER; note = 2'-O-methyladenosine-3'-phosphate
  modified_base 16: mod_base = OTHER; note = 2'-deoxy-2'-fluoroadenosine-3'-phosphate
  modified_base 17: mod_base = OTHER; note = 2'-O-methyladenosine-3'-phosphate
  modified_base 18: mod_base = OTHER; note = 2'-O-methylguanosine-3'-phosphate
  modified_base 19: mod_base = OTHER; note = 2'-O-methyladenosine-3'-phosphate
  modified_base 20: mod_base = OTHER; note = 2'-O-methyluridine-3'-phosphate
  modified_base 21: mod_base = OTHER; note = 2'-O-methyladenosine-3'-phosphorothioate
  modified_base 22: mod_base = OTHER; note = 2'-O-methyluridine-3'-phosphorothioate
  modified_base 23: mod_base = OTHER; note = 2'-O-methyluridine
tgtttgaaggactcaaagatatt

SEQ ID NO: 12269 - RNA, 23 nt, synthetic construct
  source 1..23: mol_type = other RNA
  modified_base 1: mod_base = OTHER; note = 2'-O-methyluridine-3'-phosphorothioate 5'-(E)-Vinylphosphonate
  modified_base 2: mod_base = OTHER; note = 2'-deoxy-2'-fluorocytidine-3'-phosphorothioate
  modified_base 3: mod_base = OTHER; note = 2'-O-methylguanosine-3'-phosphate
  modified_base 4: mod_base = OTHER; note = 2'-O-methyluridine-3'-phosphate
  modified_base 5: mod_base = OTHER; note = 2'-O-methyluridine-3'-phosphate
  modified_base 6: mod_base = OTHER; note = 2'-deoxy-2'-fluorouridine-3'-phosphate
  modified_base 7: mod_base = OTHER; note = 2'-O-methylguanosine-3'-phosphate
  modified_base 8: mod_base = OTHER; note = 2'-O-methyladenosine-3'-phosphate
  modified_base 9: mod_base = OTHER; note = 2'-O-methyladenosine-3'-phosphate
  modified_base 10: mod_base = OTHER; note = 2'-O-methylguanosine-3'-phosphate
  modified_base 11: mod_base = OTHER; note = 2'-O-methylguanosine-3'-phosphate
  modified_base 12: mod_base = OTHER; note = 2'-O-methyladenosine-3'-phosphate
  modified_base 13: mod_base = OTHER; note = 2'-O-methylcytidine-3'-phosphate
  modified_base 14: mod_base = OTHER; note = 2'-deoxy-2'-fluorouridine-3'-phosphate
  modified_base 15: mod_base = OTHER; note = 2'-O-methylcytidine-3'-phosphate
  modified_base 16: mod_base = OTHER; note = 2'-deoxy-2'-fluoroadenosine-3'-phosphate
  modified_base 17: mod_base = OTHER; note = 2'-O-methyladenosine-3'-phosphate
  modified_base 18: mod_base = OTHER; note = 2'-O-methyladenosine-3'-phosphate
  modified_base 19: mod_base = OTHER; note = 2'-O-methylguanosine-3'-phosphate
  modified_base 20: mod_base = OTHER; note = 2'-O-methyladenosine-3'-phosphate
  modified_base 21: mod_base = OTHER; note = 2'-O-methyluridine-3'-phosphorothioate
  modified_base 22: mod_base = OTHER; note = 2'-O-methyladenosine-3'-phosphorothioate
  modified_base 23: mod_base = OTHER; note = 2'-O-methyluridine
tcgtttgaaggactcaaagatat

SEQ ID NO: 12270 - RNA, 23 nt, synthetic construct
  source 1..23: mol_type = other RNA
  modified_base 1: mod_base = OTHER; note = 2'-O-methyluridine-3'-phosphorothioate 5'-(E)-Vinylphosphonate
  modified_base 2: mod_base = OTHER; note = 2'-deoxy-2'-fluorouridine-3'-phosphorothioate
  modified_base 3: mod_base = OTHER; note = 2'-O-methylcytidine-3'-phosphate
  modified_base 4: mod_base = OTHER; note = 2'-O-methylguanosine-3'-phosphate
  modified_base 5: mod_base = OTHER; note = 2'-O-methyluridine-3'-phosphate
  modified_base 6: mod_base = OTHER; note = 2'-deoxy-2'-fluorouridine-3'-phosphate
  modified_base 7: mod_base = OTHER; note = 2'-O-methyluridine-3'-phosphate
  modified_base 8: mod_base = OTHER; note = 2'-O-methylguanosine-3'-phosphate
  modified_base 9: mod_base = OTHER; note = 2'-O-methyladenosine-3'-phosphate
  modified_base 10: mod_base = OTHER; note = 2'-O-methyladenosine-3'-phosphate
  modified_base 11: mod_base = OTHER; note = 2'-O-methylguanosine-3'-phosphate
  modified_base 12: mod_base = OTHER; note = 2'-O-methylguanosine-3'-phosphate
  modified_base 13: mod_base = OTHER; note = 2'-O-methyladenosine-3'-phosphate
  modified_base 14: mod_base = OTHER; note = 2'-deoxy-2'-fluorocytidine-3'-phosphate
  modified_base 15: mod_base = OTHER; note = 2'-O-methyluridine-3'-phosphate
  modified_base 16: mod_base = OTHER; note = 2'-deoxy-2'-fluorocytidine-3'-phosphate
  modified_base 17: mod_base = OTHER; note = 2'-O-methyladenosine-3'-phosphate
  modified_base 18: mod_base = OTHER; note = 2'-O-methyladenosine-3'-phosphate
  modified_base 19: mod_base = OTHER; note = 2'-O-methyladenosine-3'-phosphate
  modified_base 20: mod_base = OTHER; note = 2'-O-methylguanosine-3'-phosphate
  modified_base 21: mod_base = OTHER; note = 2'-O-methyladenosine-3'-phosphorothioate
  modified_base 22: mod_base = OTHER; note = 2'-O-methyluridine-3'-phosphorothioate
  modified_base 23: mod_base = OTHER; note = 2'-O-methyladenosine
ttcgtttgaaggactcaaagata

SEQ ID NO: 12271 - RNA, 23 nt, synthetic construct
  source 1..23: mol_type = other RNA
  modified_base 1: mod_base = OTHER; note = 2'-O-methyluridine-3'-phosphorothioate 5'-(E)-Vinylphosphonate
  modified_base 2: mod_base = OTHER; note = 2'-deoxy-2'-fluorocytidine-3'-phosphorothioate
  modified_base 3: mod_base = OTHER; note = 2'-O-methyluridine-3'-phosphate
  modified_base 4: mod_base = OTHER; note = 2'-O-methylcytidine-3'-phosphate
  modified_base 5: mod_base = OTHER; note = 2'-O-methylguanosine-3'-phosphate
  modified_base 6: mod_base = OTHER; note = 2'-deoxy-2'-fluorouridine-3'-phosphate
  modified_base 7: mod_base = OTHER; note = 2'-O-methyluridine-3'-phosphate
  modified_base 8: mod_base = OTHER; note = 2'-O-methyluridine-3'-phosphate
  modified_base 9: mod_base = OTHER; note = 2'-O-methylguanosine-3'-phosphate
  modified_base 10: mod_base = OTHER; note = 2'-O-methyladenosine-3'-phosphate
  modified_base 11: mod_base = OTHER; note = 2'-O-methyladenosine-3'-phosphate
  modified_base 12: mod_base = OTHER; note = 2'-O-methylguanosine-3'-phosphate
  modified_base 13: mod_base = OTHER; note = 2'-O-methylguanosine-3'-phosphate
  modified_base 14: mod_base = OTHER; note = 2'-deoxy-2'-fluoroadenosine-3'-phosphate
  modified_base 15: mod_base = OTHER; note = 2'-O-methylcytidine-3'-phosphate
  modified_base 16: mod_base = OTHER; note = 2'-deoxy-2'-fluorouridine-3'-phosphate
  modified_base 17: mod_base = OTHER; note = 2'-O-methylcytidine-3'-phosphate
  modified_base 18: mod_base = OTHER; note = 2'-O-methyladenosine-3'-phosphate
  modified_base 19: mod_base = OTHER; note = 2'-O-methyladenosine-3'-phosphate
  modified_base 20: mod_base = OTHER; note = 2'-O-methyladenosine-3'-phosphate
  modified_base 21: mod_base = OTHER; note = 2'-O-methylguanosine-3'-phosphorothioate
  modified_base 22: mod_base = OTHER; note = 2'-O-methyladenosine-3'-phosphorothioate
  modified_base 23: mod_base = OTHER; note = 2'-O-methyluridine
tctcgtttgaaggactcaaagat

SEQ ID NO: 12272 - RNA, 23 nt, synthetic construct
  source 1..23: mol_type = other RNA
  modified_base 1: mod_base = OTHER; note = 2'-O-methyluridine-3'-phosphorothioate 5'-(E)-Vinylphosphonate
  modified_base 2: mod_base = OTHER; note = 2'-deoxy-2'-fluorouridine-3'-phosphorothioate
  modified_base 3: mod_base = OTHER; note = 2'-O-methyladenosine-3'-phosphate
  modified_base 4: mod_base = OTHER; note = 2'-O-methylguanosine-3'-phosphate
  modified_base 5: mod_base = OTHER; note = 2'-O-methyladenosine-3'-phosphate
  modified_base 6: mod_base = OTHER; note = 2'-deoxy-2'-fluorouridine-3'-phosphate
  modified_base 7: mod_base = OTHER; note = 2'-O-methylguanosine-3'-phosphate
  modified_base 8: mod_base = OTHER; note = 2'-O-methyluridine-3'-phosphate
  modified_base 9: mod_base = OTHER; note = 2'-O-methylcytidine-3'-phosphate
  modified_base 10: mod_base = OTHER; note = 2'-O-methyladenosine-3'-phosphate
  modified_base 11: mod_base = OTHER; note = 2'-O-methylguanosine-3'-phosphate
  modified_base 12: mod_base = OTHER; note = 2'-O-methylcytidine-3'-phosphate
  modified_base 13: mod_base = OTHER; note = 2'-O-methyluridine-3'-phosphate
  modified_base 14: mod_base = OTHER; note = 2'-deoxy-2'-fluorocytidine-3'-phosphate
  modified_base 15: mod_base = OTHER; note = 2'-O-methylguanosine-3'-phosphate
  modified_base 16: mod_base = OTHER; note = 2'-deoxy-2'-fluorouridine-3'-phosphate
  modified_base 17: mod_base = OTHER; note = 2'-O-methyluridine-3'-phosphate
  modified_base 18: mod_base = OTHER; note = 2'-O-methyluridine-3'-phosphate
  modified_base 19: mod_base = OTHER; note = 2'-O-methylguanosine-3'-phosphate
  modified_base 20: mod_base = OTHER; note = 2'-O-methyladenosine-3'-phosphate
  modified_base 21: mod_base = OTHER; note = 2'-O-methyladenosine-3'-phosphorothioate
  modified_base 22: mod_base = OTHER; note = 2'-O-methylguanosine-3'-phosphorothioate
  modified_base 23: mod_base = OTHER; note = 2'-O-methylguanosine
ttagatgtcagctcgtttgaagg

SEQ ID NO: 12273 - RNA, 23 nt, synthetic construct
  source 1..23: mol_type = other RNA
  modified_base 1: mod_base = OTHER; note = 2'-O-methyluridine-3'-phosphorothioate 5'-(E)-Vinylphosphonate
  modified_base 2: mod_base = OTHER; note = 2'-deoxy-2'-fluoroadenosine-3'-phosphorothioate
  modified_base 3: mod_base = OTHER; note = 2'-O-methylguanosine-3'-phosphate
  modified_base 4: mod_base = OTHER; note = 2'-O-methyladenosine-3'-phosphate
  modified_base 5: mod_base = OTHER; note = 2'-O-methyladenosine-3'-phosphate
  modified_base 6: mod_base = OTHER; note = 2'-deoxy-2'-fluorouridine-3'-phosphate
  modified_base 7: mod_base = OTHER; note = 2'-O-methyladenosine-3'-phosphate
  modified_base 8: mod_base = OTHER; note = 2'-O-methylguanosine-3'-phosphate
  modified_base 9: mod_base = OTHER; note = 2'-O-methyladenosine-3'-phosphate
  modified_base 10: mod_base = OTHER; note = 2'-O-methyluridine-3'-phosphate
  modified_base 11: mod_base = OTHER; note = 2'-O-methylguanosine-3'-phosphate
  modified_base 12: mod_base = OTHER; note = 2'-O-methyluridine-3'-phosphate
  modified_base 13: mod_base = OTHER; note = 2'-O-methylcytidine-3'-phosphate
  modified_base 14: mod_base = OTHER; note = 2'-deoxy-2'-fluoroadenosine-3'-phosphate
  modified_base 15: mod_base = OTHER; note = 2'-O-methylguanosine-3'-phosphate
  modified_base 16: mod_base = OTHER; note = 2'-deoxy-2'-fluorocytidine-3'-phosphate
  modified_base 17: mod_base = OTHER; note = 2'-O-methyluridine-3'-phosphate
  modified_base 18: mod_base = OTHER; note = 2'-O-methylcytidine-3'-phosphate
  modified_base 19: mod_base = OTHER; note = 2'-O-methylguanosine-3'-phosphate
  modified_base 20: mod_base = OTHER; note = 2'-O-methyluridine-3'-phosphate
  modified_base 21: mod_base = OTHER; note = 2'-O-methyluridine-3'-phosphorothioate
  modified_base 22: mod_base = OTHER; note = 2'-O-methyluridine-3'-phosphorothioate
  modified_base 23: mod_base = OTHER; note = 2'-O-methylguanosine
tagaatagatgtcagctcgtttg

SEQ ID NO: 12274 - RNA, 23 nt, synthetic construct
  source 1..23: mol_type = other RNA
  modified_base 1: mod_base = OTHER; note = 2'-O-methyluridine-3'-phosphorothioate 5'-(E)-Vinylphosphonate
  modified_base 2: mod_base = OTHER; note = 2'-deoxy-2'-fluorocytidine-3'-phosphorothioate
  modified_base 3: mod_base = OTHER; note = 2'-O-methyladenosine-3'-phosphate
  modified_base 4: mod_base = OTHER; note = 2'-O-methylguanosine-3'-phosphate
  modified_base 5: mod_base = OTHER; note = 2'-O-methyladenosine-3'-phosphate
  modified_base 6: mod_base = OTHER; note = 2'-deoxy-2'-fluoroadenosine-3'-phosphate
  modified_base 7: mod_base = OTHER; note = 2'-O-methyluridine-3'-phosphate
  modified_base 8: mod_base = OTHER; note = 2'-O-methyladenosine-3'-phosphate
  modified_base 9: mod_base = OTHER; note = 2'-O-methylguanosine-3'-phosphate
  modified_base 10: mod_base = OTHER; note = 2'-O-methyladenosine-3'-phosphate
  modified_base 11: mod_base = OTHER; note = 2'-O-methyluridine-3'-phosphate
  modified_base 12: mod_base = OTHER; note = 2'-O-methylguanosine-3'-phosphate
  modified_base 13: mod_base = OTHER; note = 2'-O-methyluridine-3'-phosphate
  modified_base 14: mod_base = OTHER; note = 2'-deoxy-2'-fluorocytidine-3'-phosphate
  modified_base 15: mod_base = OTHER; note = 2'-O-methyladenosine-3'-phosphate
  modified_base 16: mod_base = OTHER; note = 2'-deoxy-2'-fluoroguanosine-3'-phosphate
  modified_base 17: mod_base = OTHER; note = 2'-O-methylcytidine-3'-phosphate
  modified_base 18: mod_base = OTHER; note = 2'-O-methyluridine-3'-phosphate
  modified_base 19: mod_base = OTHER; note = 2'-O-methylcytidine-3'-phosphate
  modified_base 20: mod_base = OTHER; note = 2'-O-methylguanosine-3'-phosphate
  modified_base 21: mod_base = OTHER; note = 2'-O-methyluridine-3'-phosphorothioate
  modified_base 22: mod_base = OTHER; note = 2'-O-methyluridine-3'-phosphorothioate
  modified_base 23: mod_base = OTHER; note = 2'-O-methyluridine
tcagaatagatgtcagctcgttt

SEQ ID NO: 12275 - RNA, 23 nt, synthetic construct
  source 1..23: mol_type = other RNA
  modified_base 1: mod_base = OTHER; note = 2'-O-methyluridine-3'-phosphorothioate 5'-(E)-Vinylphosphonate
  modified_base 2: mod_base = OTHER; note = 2'-deoxy-2'-fluoroadenosine-3'-phosphorothioate
  modified_base 3: mod_base = OTHER; note = 2'-O-methylcytidine-3'-phosphate
  modified_base 4: mod_base = OTHER; note = 2'-O-methyladenosine-3'-phosphate
  modified_base 5: mod_base = OTHER; note = 2'-O-methylguanosine-3'-phosphate
  modified_base 6: mod_base = OTHER; note = 2'-deoxy-2'-fluoroadenosine-3'-phosphate
  modified_base 7: mod_base = OTHER; note = 2'-O-methyladenosine-3'-phosphate
  modified_base 8: mod_base = OTHER; note = 2'-O-methyluridine-3'-phosphate
  modified_base 9: mod_base = OTHER; note = 2'-O-methyladenosine-3'-phosphate
  modified_base 10: mod_base = OTHER; note = 2'-O-methylguanosine-3'-phosphate
  modified_base 11: mod_base = OTHER; note = 2'-O-methyladenosine-3'-phosphate
  modified_base 12: mod_base = OTHER; note = 2'-O-methyluridine-3'-phosphate
  modified_base 13: mod_base = OTHER; note = 2'-O-methylguanosine-3'-phosphate
  modified_base 14: mod_base = OTHER; note = 2'-deoxy-2'-fluorouridine-3'-phosphate
  modified_base 15: mod_base = OTHER; note = 2'-O-methylcytidine-3'-phosphate
  modified_base 16: mod_base = OTHER; note = 2'-deoxy-2'-fluoroadenosine-3'-phosphate
  modified_base 17: mod_base = OTHER; note = 2'-O-methylguanosine-3'-phosphate
  modified_base 18: mod_base = OTHER; note = 2'-O-methylcytidine-3'-phosphate
  modified_base 19: mod_base = OTHER; note = 2'-O-methyluridine-3'-phosphate
  modified_base 20: mod_base = OTHER; note = 2'-O-methylcytidine-3'-phosphate
  modified_base 21: mod_base = OTHER; note = 2'-O-methylguanosine-3'-phosphorothioate
  modified_base 22: mod_base = OTHER; note = 2'-O-methyluridine-3'-phosphorothioate
  modified_base 23: mod_base = OTHER; note = 2'-O-methyluridine
tacagaatagatgtcagctcgtt

SEQ ID NO: 12276 - RNA, 23 nt, synthetic construct
  source 1..23: mol_type = other RNA
  modified_base 1: mod_base = OTHER; note = 2'-O-methyluridine-3'-phosphorothioate 5'-(E)-Vinylphosphonate
  modified_base 2: mod_base = OTHER; note = 2'-deoxy-2'-fluorocytidine-3'-phosphorothioate
  modified_base 3: mod_base = OTHER; note = 2'-O-methyladenosine-3'-phosphate
  modified_base 4: mod_base = OTHER; note = 2'-O-methyladenosine-3'-phosphate
  modified_base 5: mod_base = OTHER; note = 2'-O-methylcytidine-3'-phosphate
  modified_base 6: mod_base = OTHER; note = 2'-deoxy-2'-fluoroadenosine-3'-phosphate
  modified_base 7: mod_base = OTHER; note = 2'-O-methylguanosine-3'-phosphate
  modified_base 8: mod_base = OTHER; note = 2'-O-methyladenosine-3'-phosphate
  modified_base 9: mod_base = OTHER; note = 2'-O-methyladenosine-3'-phosphate
  modified_base 10: mod_base = OTHER; note = 2'-O-methyluridine-3'-phosphate
  modified_base 11: mod_base = OTHER; note = 2'-O-methyladenosine-3'-phosphate
  modified_base 12: mod_base = OTHER; note = 2'-O-methylguanosine-3'-phosphate
  modified_base 13: mod_base = OTHER; note = 2'-O-methyladenosine-3'-phosphate
  modified_base 14: mod_base = OTHER; note = 2'-deoxy-2'-fluorouridine-3'-phosphate
  modified_base 15: mod_base = OTHER; note = 2'-O-methylguanosine-3'-phosphate
  modified_base 16: mod_base = OTHER; note = 2'-deoxy-2'-fluorouridine-3'-phosphate
  modified_base 17: mod_base = OTHER; note = 2'-O-methylcytidine-3'-phosphate
  modified_base 18: mod_base = OTHER; note = 2'-O-methyladenosine-3'-phosphate
  modified_base 19: mod_base = OTHER; note = 2'-O-methylguanosine-3'-phosphate
  modified_base 20: mod_base = OTHER; note = 2'-O-methylcytidine-3'-phosphate
  modified_base 21: mod_base = OTHER; note = 2'-O-methyluridine-3'-phosphorothioate
  modified_base 22: mod_base = OTHER; note = 2'-O-methylcytidine-3'-phosphorothioate
  modified_base 23: mod_base = OTHER; note = 2'-O-methylguanosine
tcaacagaatagatgtcagctcg

SEQ ID NO: 12277 - RNA, 23 nt, synthetic construct
  source 1..23: mol_type = other RNA
  modified_base 1: mod_base = OTHER; note = 2'-O-methyluridine-3'-phosphorothioate 5'-(E)-Vinylphosphonate
  modified_base 2: mod_base = OTHER; note = 2'-deoxy-2'-fluorocytidine-3'-phosphorothioate
  modified_base 3: mod_base = OTHER; note = 2'-O-methylcytidine-3'-phosphate
  modified_base 4: mod_base = OTHER; note = 2'-O-methyladenosine-3'-phosphate
  modified_base 5: mod_base = OTHER; note = 2'-O-methyladenosine-3'-phosphate
  modified_base 6: mod_base = OTHER; note = 2'-deoxy-2'-fluorocytidine-3'-phosphate
  modified_base 7: mod_base = OTHER; note = 2'-O-methyladenosine-3'-phosphate
  modified_base 8: mod_base = OTHER; note = 2'-O-methylguanosine-3'-phosphate
  modified_base 9: mod_base = OTHER; note = 2'-O-methyladenosine-3'-phosphate
  modified_base 10: mod_base = OTHER; note = 2'-O-methyladenosine-3'-phosphate
  modified_base 11: mod_base = OTHER; note = 2'-O-methyluridine-3'-phosphate
  modified_base 12: mod_base = OTHER; note = 2'-O-methyladenosine-3'-phosphate
  modified_base 13: mod_base = OTHER; note = 2'-O-methylguanosine-3'-phosphate
  modified_base 14: mod_base = OTHER; note = 2'-deoxy-2'-fluoroadenosine-3'-phosphate
  modified_base 15: mod_base = OTHER; note = 2'-O-methyluridine-3'-phosphate
  modified_base 16: mod_base = OTHER; note = 2'-deoxy-2'-fluoroguanosine-3'-phosphate
  modified_base 17: mod_base = OTHER; note = 2'-O-methyluridine-3'-phosphate
  modified_base 18: mod_base = OTHER; note = 2'-O-methylcytidine-3'-phosphate
  modified_base 19: mod_base = OTHER; note = 2'-O-methyladenosine-3'-phosphate
  modified_base 20: mod_base = OTHER; note = 2'-O-methylguanosine-3'-phosphate
  modified_base 21: mod_base = OTHER; note = 2'-O-methylcytidine-3'-phosphorothioate
  modified_base 22: mod_base = OTHER; note = 2'-O-methyluridine-3'-phosphorothioate
  modified_base 23: mod_base = OTHER; note = 2'-O-methylcytidine
tccaacagaatagatgtcagctc

SEQ ID NO: 12278 - RNA, 23 nt, synthetic construct
  source 1..23: mol_type = other RNA
  modified_base 1: mod_base = OTHER; note = 2'-O-methyluridine-3'-phosphorothioate 5'-(E)-Vinylphosphonate
  modified_base 2: mod_base = OTHER; note = 2'-deoxy-2'-fluorouridine-3'-phosphorothioate
  modified_base 3: mod_base = OTHER; note = 2'-O-methyladenosine-3'-phosphate
  modified_base 4: mod_base = OTHER; note = 2'-O-methyladenosine-3'-phosphate
  modified_base 5: mod_base = OTHER; note = 2'-O-methyladenosine-3'-phosphate
  modified_base 6: mod_base = OTHER; note = 2'-deoxy-2'-fluorocytidine-3'-phosphate
  modified_base 7: mod_base = OTHER; note = 2'-O-methylcytidine-3'-phosphate
  modified_base 8: mod_base = OTHER; note = 2'-O-methyladenosine-3'-phosphate
  modified_base 9: mod_base = OTHER; note = 2'-O-methylguanosine-3'-phosphate
  modified_base 10: mod_base = OTHER; note = 2'-O-methyladenosine-3'-phosphate
  modified_base 11: mod_base = OTHER; note = 2'-O-methylcytidine-3'-phosphate
  modified_base 12: mod_base = OTHER; note = 2'-O-methylcytidine-3'-phosphate
  modified_base 13: mod_base = OTHER; note = 2'-O-methyladenosine-3'-phosphate
  modified_base 14: mod_base = OTHER; note = 2'-deoxy-2'-fluoroadenosine-3'-phosphate
  modified_base 15: mod_base = OTHER; note = 2'-O-methylcytidine-3'-phosphate
  modified_base 16: mod_base = OTHER; note = 2'-deoxy-2'-fluoroadenosine-3'-phosphate
  modified_base 17: mod_base = OTHER; note = 2'-O-methylguanosine-3'-phosphate
  modified_base 18: mod_base = OTHER; note = 2'-O-methyladenosine-3'-phosphate
  modified_base 19: mod_base = OTHER; note = 2'-O-methyladenosine-3'-phosphate
  modified_base 20: mod_base = OTHER; note = 2'-O-methyluridine-3'-phosphate
  modified_base 21: mod_base = OTHER; note = 2'-O-methyladenosine-3'-phosphorothioate
  modified_base 22: mod_base = OTHER; note = 2'-O-methylguanosine-3'-phosphorothioate
  modified_base 23: mod_base = OTHER; note = 2'-O-methyladenosine
ttaaaccagaccaacagaataga

SEQ ID NO: 12279 - RNA, 23 nt, synthetic construct
  source 1..23: mol_type = other RNA
  modified_base 1: mod_base = OTHER; note = 2'-O-methyluridine-3'-phosphorothioate 5'-(E)-Vinylphosphonate
  modified_base 2: mod_base = OTHER; note = 2'-deoxy-2'-fluorouridine-3'-phosphorothioate
  modified_base 3: mod_base = OTHER; note = 2'-O-methyladenosine-3'-phosphate
  modified_base 4: mod_base = OTHER; note = 2'-O-methyluridine-3'-phosphate
  modified_base 5: mod_base = OTHER; note = 2'-O-methyluridine-3'-phosphate
  modified_base 6: mod_base = OTHER; note = 2'-deoxy-2'-fluorouridine-3'-phosphate
  modified_base 7: mod_base = OTHER; note = 2'-O-methylcytidine-3'-phosphate
  modified_base 8: mod_base = OTHER; note = 2'-O-methylcytidine-3'-phosphate
  modified_base 9: mod_base = OTHER; note = 2'-O-methylcytidine-3'-phosphate
  modified_base 10: mod_base = OTHER; note = 2'-O-methyladenosine-3'-phosphate
  modified_base 11: mod_base = OTHER; note = 2'-O-methylguanosine-3'-phosphate
  modified_base 12: mod_base = OTHER; note = 2'-O-methyluridine-3'-phosphate
  modified_base 13: mod_base = OTHER; note = 2'-O-methyladenosine-3'-phosphate
  modified_base 14: mod_base = OTHER; note = 2'-deoxy-2'-fluoroadenosine-3'-phosphate
  modified_base 15: mod_base = OTHER; note = 2'-O-methyladenosine-3'-phosphate
  modified_base 16: mod_base = OTHER; note = 2'-deoxy-2'-fluorocytidine-3'-phosphate
  modified_base 17: mod_base = OTHER; note = 2'-O-methylcytidine-3'-phosphate
  modified_base 18: mod_base = OTHER; note = 2'-O-methyladenosine-3'-phosphate
  modified_base 19: mod_base = OTHER; note = 2'-O-methylguanosine-3'-phosphate
  modified_base 20: mod_base = OTHER; note = 2'-O-methyladenosine-3'-phosphate
  modified_base 21: mod_base = OTHER; note = 2'-O-methylcytidine-3'-phosphorothioate
  modified_base 22: mod_base = OTHER; note = 2'-O-methylcytidine-3'-phosphorothioate
  modified_base 23: mod_base = OTHER; note = 2'-O-methyladenosine
ttatttcccagtaaaccagacca

SEQ ID NO: 12280 - RNA, 23 nt, synthetic construct
  source 1..23: mol_type = other RNA
  modified_base 1: mod_base = OTHER; note = 2'-O-methyluridine-3'-phosphorothioate 5'-(E)-Vinylphosphonate
  modified_base 2: mod_base = OTHER; note = 2'-deoxy-2'-fluoroadenosine-3'-phosphorothioate
  modified_base 3: mod_base = OTHER; note = 2'-O-methyladenosine-3'-phosphate
  modified_base 4: mod_base = OTHER; note = 2'-O-methylguanosine-3'-phosphate
  modified_base 5: mod_base = OTHER; note = 2'-O-methylguanosine-3'-phosphate
  modified_base 6: mod_base = OTHER; note = 2'-deoxy-2'-fluorocytidine-3'-phosphate
  modified_base 7: mod_base = OTHER; note = 2'-O-methyladenosine-3'-phosphate
  modified_base 8: mod_base = OTHER; note = 2'-O-methyladenosine-3'-phosphate
  modified_base 9: mod_base = OTHER; note = 2'-O-methyluridine-3'-phosphate
  modified_base 10: mod_base = OTHER; note = 2'-O-methyluridine-3'-phosphate
  modified_base 11: mod_base = OTHER; note = 2'-O-methylguanosine-3'-phosphate
  modified_base 12: mod_base = OTHER; note = 2'-O-methylguanosine-3'-phosphate
  modified_base 13: mod_base = OTHER; note = 2'-O-methyluridine-3'-phosphate
  modified_base 14: mod_base = OTHER; note = 2'-deoxy-2'-fluoroadenosine-3'-phosphate
  modified_base 15: mod_base = OTHER; note = 2'-O-methylcytidine-3'-phosphate
  modified_base 16: mod_base = OTHER; note = 2'-deoxy-2'-fluorouridine-3'-phosphate
  modified_base 17: mod_base = OTHER; note = 2'-O-methylcytidine-3'-phosphate
  modified_base 18: mod_base = OTHER; note = 2'-O-methylcytidine-3'-phosphate
  modified_base 19: mod_base = OTHER; note = 2'-O-methyluridine-3'-phosphate
  modified_base 20: mod_base = OTHER; note = 2'-O-methylcytidine-3'-phosphate
  modified_base 21: mod_base = OTHER; note = 2'-O-methyladenosine-3'-phosphorothioate
  modified_base 22: mod_base = OTHER; note = 2'-O-methyladenosine-3'-phosphorothioate
  modified_base 23: mod_base = OTHER; note = 2'-O-methylcytidine
taaggcaattggtactcctcaac

SEQ ID NO: 12281 - RNA, 23 nt, synthetic construct
  source 1..23: mol_type = other RNA
  modified_base 1: mod_base = OTHER; note = 2'-O-methyluridine-3'-phosphorothioate 5'-(E)-Vinylphosphonate
  modified_base 2: mod_base = OTHER; note = 2'-deoxy-2'-fluorouridine-3'-phosphorothioate
  modified_base 3: mod_base = OTHER; note = 2'-O-methyladenosine-3'-phosphate
  modified_base 4: mod_base = OTHER; note = 2'-O-methyladenosine-3'-phosphate
  modified_base 5: mod_base = OTHER; note = 2'-O-methyluridine-3'-phosphate
  modified_base 6: mod_base = OTHER; note = 2'-deoxy-2'-fluoroadenosine-3'-phosphate
  modified_base 7: mod_base = OTHER; note = 2'-O-methyladenosine-3'-phosphate
  modified_base 8: mod_base = OTHER; note = 2'-O-methylguanosine-3'-phosphate
  modified_base 9: mod_base = OTHER; note = 2'-O-methylguanosine-3'-phosphate
  modified_base 10: mod_base = OTHER; note = 2'-O-methylcytidine-3'-phosphate
  modified_base 11: mod_base = OTHER; note = 2'-O-methyladenosine-3'-phosphate
  modified_base 12: mod_base = OTHER; note = 2'-O-methyladenosine-3'-phosphate
  modified_base 13: mod_base = OTHER; note = 2'-O-methyluridine-3'-phosphate
  modified_base 14: mod_base = OTHER; note = 2'-deoxy-2'-fluorouridine-3'-phosphate
  modified_base 15: mod_base = OTHER; note = 2'-O-methylguanosine-3'-phosphate
  modified_base 16: mod_base = OTHER; note = 2'-deoxy-2'-fluoroguanosine-3'-phosphate
  modified_base 17: mod_base = OTHER; note = 2'-O-methyluridine-3'-phosphate
  modified_base 18: mod_base = OTHER; note = 2'-O-methyladenosine-3'-phosphate
  modified_base 19: mod_base = OTHER; note = 2'-O-methylcytidine-3'-phosphate
  modified_base 20: mod_base = OTHER; note = 2'-O-methyluridine-3'-phosphate
  modified_base 21: mod_base = OTHER; note = 2'-O-methylcytidine-3'-phosphorothioate
  modified_base 22: mod_base = OTHER; note = 2'-O-methylcytidine-3'-phosphorothioate
  modified_base 23: mod_base = OTHER; note = 2'-O-methyluridine
ttaataaggcaattggtactcct

SEQ ID NO: 12282 - RNA, 23 nt, synthetic construct
  source 1..23: mol_type = other RNA
  modified_base 1: mod_base = OTHER; note = 2'-O-methyluridine-3'-phosphorothioate 5'-(E)-Vinylphosphonate
  modified_base 2: mod_base = OTHER; note = 2'-deoxy-2'-fluorouridine-3'-phosphorothioate
  modified_base 3: mod_base = OTHER; note = 2'-O-methyladenosine-3'-phosphate
  modified_base 4: mod_base = OTHER; note = 2'-O-methyladenosine-3'-phosphate
  modified_base 5: mod_base = OTHER; note = 2'-O-methylguanosine-3'-phosphate
  modified_base 6: mod_base = OTHER; note = 2'-deoxy-2'-fluoroguanosine-3'-phosphate
  modified_base 7: mod_base = OTHER; note = 2'-O-methylcytidine-3'-phosphate
  modified_base 8: mod_base = OTHER; note = 2'-O-methyladenosine-3'-phosphate
  modified_base 9: mod_base = OTHER; note = 2'-O-methyladenosine-3'-phosphate
  modified_base 10: mod_base = OTHER; note = 2'-O-methyluridine-3'-phosphate
  modified_base 11: mod_base = OTHER; note = 2'-O-methyluridine-3'-phosphate
  modified_base 12: mod_base = OTHER; note = 2'-O-methylguanosine-3'-phosphate
  modified_base 13: mod_base = OTHER; note = 2'-O-methylguanosine-3'-phosphate
  modified_base 14: mod_base = OTHER; note = 2'-deoxy-2'-fluorouridine-3'-phosphate
  modified_base 15: mod_base = OTHER; note = 2'-O-methyladenosine-3'-phosphate
  modified_base 16: mod_base = OTHER; note = 2'-deoxy-2'-fluorocytidine-3'-phosphate
  modified_base 17: mod_base = OTHER; note = 2'-O-methyluridine-3'-phosphate
  modified_base 18: mod_base = OTHER; note = 2'-O-methylcytidine-3'-phosphate
  modified_base 19: mod_base = OTHER; note = 2'-O-methylcytidine-3'-phosphate
  modified_base 20: mod_base = OTHER; note = 2'-O-methyluridine-3'-phosphate
  modified_base 21: mod_base = OTHER; note = 2'-O-methylcytidine-3'-phosphorothioate
  modified_base 22: mod_base = OTHER; note = 2'-O-methyladenosine-3'-phosphorothioate
  modified_base 23: mod_base = OTHER; note = 2'-O-methyladenosine
ttaaggcaattggtactcctcaa

SEQ ID NO: 12283 - RNA, 23 nt, synthetic construct
  source 1..23: mol_type = other RNA
  modified_base 1: mod_base = OTHER; note = 2'-O-methyluridine-3'-phosphorothioate 5'-(E)-Vinylphosphonate
  modified_base 2: mod_base = OTHER; note = 2'-deoxy-2'-fluoroadenosine-3'-phosphorothioate
  modified_base 3: mod_base = OTHER; note = 2'-O-methyluridine-3'-phosphate
  modified_base 4: mod_base = OTHER; note = 2'-O-methyladenosine-3'-phosphate
  modified_base 5: mod_base = OTHER; note = 2'-O-methyladenosine-3'-phosphate
  modified_base 6: mod_base = OTHER; note = 2'-deoxy-2'-fluoroguanosine-3'-phosphate
  modified_base 7: mod_base = OTHER; note = 2'-O-methylguanosine-3'-phosphate
  modified_base 8: mod_base = OTHER; note = 2'-O-methylcytidine-3'-phosphate
  modified_base 9: mod_base = OTHER; note = 2'-O-methyladenosine-3'-phosphate
  modified_base 10: mod_base = OTHER; note = 2'-O-methyladenosine-3'-phosphate
  modified_base 11: mod_base = OTHER; note = 2'-O-methyluridine-3'-phosphate
  modified_base 12: mod_base = OTHER; note = 2'-O-methyluridine-3'-phosphate
  modified_base 13: mod_base = OTHER; note = 2'-O-methylguanosine-3'-phosphate
  modified_base 14: mod_base = OTHER; note = 2'-deoxy-2'-fluoroguanosine-3'-phosphate
  modified_base 15: mod_base = OTHER; note = 2'-O-methyluridine-3'-phosphate
  modified_base 16: mod_base = OTHER; note = 2'-deoxy-2'-fluoroadenosine-3'-phosphate
  modified_base 17: mod_base = OTHER; note = 2'-O-methylcytidine-3'-phosphate
  modified_base 18: mod_base = OTHER; note = 2'-O-methyluridine-3'-phosphate
  modified_base 19: mod_base = OTHER; note = 2'-O-methylcytidine-3'-phosphate
  modified_base 20: mod_base = OTHER; note = 2'-O-methylcytidine-3'-phosphate
  modified_base 21: mod_base = OTHER; note = 2'-O-methyluridine-3'-phosphorothioate
  modified_base 22: mod_base = OTHER; note = 2'-O-methylcytidine-3'-phosphorothioate
  modified_base 23: mod_base = OTHER; note = 2'-O-methyladenosine
tataaggcaattggtactcctca

SEQ ID NO: 12284 - RNA, 23 nt, synthetic construct
  source 1..23: mol_type = other RNA
  modified_base 1: mod_base = OTHER; note = 2'-O-methyluridine-3'-phosphorothioate 5'-(E)-Vinylphosphonate
  modified_base 2: mod_base = OTHER; note = 2'-deoxy-2'-fluoroadenosine-3'-phosphorothioate
  modified_base 3: mod_base = OTHER; note = 2'-O-methyladenosine-3'-phosphate
  modified_base 4: mod_base = OTHER; note = 2'-O-methyluridine-3'-phosphate
  modified_base 5: mod_base = OTHER; note = 2'-O-methyladenosine-3'-phosphate
  modified_base 6: mod_base = OTHER; note = 2'-deoxy-2'-fluoroadenosine-3'-phosphate
  modified_base 7: mod_base = OTHER; note = 2'-O-methylguanosine-3'-phosphate
  modified_base 8: mod_base = OTHER; note = 2'-O-methylguanosine-3'-phosphate
  modified_base 9: mod_base = OTHER; note = 2'-O-methylcytidine-3'-phosphate
  modified_base 10: mod_base = OTHER; note = 2'-O-methyladenosine-3'-phosphate
  modified_base 11: mod_base = OTHER; note = 2'-O-methyladenosine-3'-phosphate
  modified_base 12: mod_base = OTHER; note = 2'-O-methyluridine-3'-phosphate
  modified_base 13: mod_base = OTHER; note = 2'-O-methyluridine-3'-phosphate
  modified_base 14: mod_base = OTHER; note = 2'-deoxy-2'-fluoroguanosine-3'-phosphate
  modified_base 15: mod_base = OTHER; note = 2'-O-methylguanosine-3'-phosphate
  modified_base 16: mod_base = OTHER; note = 2'-deoxy-2'-fluorouridine-3'-phosphate
  modified_base 17: mod_base = OTHER; note = 2'-O-methyladenosine-3'-phosphate
  modified_base 18: mod_base = OTHER; note = 2'-O-methylcytidine-3'-phosphate
  modified_base 19: mod_base = OTHER; note = 2'-O-methyluridine-3'-phosphate
  modified_base 20: mod_base = OTHER; note = 2'-O-methylcytidine-3'-phosphate
  modified_base 21: mod_base = OTHER; note = 2'-O-methylcytidine-3'-phosphorothioate
  modified_base 22: mod_base = OTHER; note = 2'-O-methyluridine-3'-phosphorothioate
  modified_base 23: mod_base = OTHER; note = 2'-O-methylcytidine
taataaggcaattggtactcctc

SEQ ID NO: 12285 - RNA, 23 nt, synthetic construct
  source 1..23: mol_type = other RNA
  modified_base 1: mod_base = OTHER; note = 2'-O-methyluridine-3'-phosphorothioate 5'-(E)-Vinylphosphonate
  modified_base 2: mod_base = OTHER; note = 2'-deoxy-2'-fluoroadenosine-3'-phosphorothioate
  modified_base 3: mod_base = OTHER; note = 2'-O-methyluridine-3'-phosphate
  modified_base 4: mod_base = OTHER; note = 2'-O-methyladenosine-3'-phosphate
  modified_base 5: mod_base = OTHER; note = 2'-O-methyladenosine-3'-phosphate
  modified_base 6: mod_base = OTHER; note = 2'-deoxy-2'-fluorouridine-3'-phosphate
  modified_base 7: mod_base = OTHER; note = 2'-O-methyladenosine-3'-phosphate
  modified_base 8: mod_base = OTHER; note = 2'-O-methyladenosine-3'-phosphate
  modified_base 9: mod_base = OTHER; note = 2'-O-methylguanosine-3'-phosphate
  modified_base 10: mod_base = OTHER; note = 2'-O-methylguanosine-3'-phosphate
  modified_base 11: mod_base = OTHER; note = 2'-O-methylcytidine-3'-phosphate
  modified_base 12: mod_base = OTHER; note = 2'-O-methyladenosine-3'-phosphate
  modified_base 13: mod_base = OTHER; note = 2'-O-methyladenosine-3'-phosphate
  modified_base 14: mod_base = OTHER; note = 2'-deoxy-2'-fluorouridine-3'-phosphate
  modified_base 15: mod_base = OTHER; note = 2'-O-methyluridine-3'-phosphate
  modified_base 16: mod_base = OTHER; note = 2'-deoxy-2'-fluoroguanosine-3'-phosphate
  modified_base 17: mod_base = OTHER; note = 2'-O-methylguanosine-3'-phosphate
  modified_base 18: mod_base = OTHER; note = 2'-O-methyluridine-3'-phosphate
  modified_base 19: mod_base = OTHER; note = 2'-O-methyladenosine-3'-phosphate
  modified_base 20: mod_base = OTHER; note = 2'-O-methylcytidine-3'-phosphate
  modified_base 21: mod_base = OTHER; note = 2'-O-methyluridine-3'-phosphorothioate
  modified_base 22: mod_base = OTHER; note = 2'-O-methylcytidine-3'-phosphorothioate
  modified_base 23: mod_base = OTHER; note = 2'-O-methylcytidine
tataataaggcaattggtactcc

SEQ ID NO: 12286 - RNA, 23 nt, synthetic construct
  source 1..23: mol_type = other RNA
  modified_base 1: mod_base = OTHER; note = 2'-O-methyluridine-3'-phosphorothioate 5'-(E)-Vinylphosphonate
  modified_base 2: mod_base = OTHER; note = 2'-deoxy-2'-fluorocytidine-3'-phosphorothioate
  modified_base 3: mod_base = OTHER; note = 2'-O-methyladenosine-3'-phosphate
  modified_base 4: mod_base = OTHER; note = 2'-O-methyluridine-3'-phosphate
  modified_base 5: mod_base = OTHER; note = 2'-O-methyladenosine-3'-phosphate
  modified_base 6: mod_base = OTHER; note = 2'-deoxy-2'-fluoroadenosine-3'-phosphate
  modified_base 7: mod_base = OTHER; note = 2'-O-methyluridine-3'-phosphate
  modified_base 8: mod_base = OTHER; note = 2'-O-methyladenosine-3'-phosphate
  modified_base 9: mod_base = OTHER; note = 2'-O-methyladenosine-3'-phosphate
  modified_base 10: mod_base = OTHER; note = 2'-O-methylguanosine-3'-phosphate
  modified_base 11: mod_base = OTHER; note = 2'-O-methylguanosine-3'-phosphate
  modified_base 12: mod_base = OTHER; note = 2'-O-methylcytidine-3'-phosphate
  modified_base 13: mod_base = OTHER; note = 2'-O-methyladenosine-3'-phosphate
  modified_base 14: mod_base = OTHER; note = 2'-deoxy-2'-fluoroadenosine-3'-phosphate
  modified_base 15: mod_base = OTHER; note = 2'-O-methyluridine-3'-phosphate
  modified_base 16: mod_base = OTHER; note = 2'-deoxy-2'-fluorouridine-3'-phosphate
  modified_base 17: mod_base = OTHER; note = 2'-O-methylguanosine-3'-phosphate
  modified_base 18: mod_base = OTHER; note = 2'-O-methylguanosine-3'-phosphate
  modified_base 19: mod_base = OTHER; note = 2'-O-methyluridine-3'-phosphate
  modified_base 20: mod_base = OTHER; note = 2'-O-methyladenosine-3'-phosphate
  modified_base 21: mod_base = OTHER; note = 2'-O-methylcytidine-3'-phosphorothioate
  modified_base 22: mod_base = OTHER; note = 2'-O-methyluridine-3'-phosphorothioate
  modified_base 23: mod_base = OTHER; note = 2'-O-methylcytidine
tcataataaggcaattggtactc

SEQ ID NO: 12287 - RNA, 23 nt, synthetic construct
  source 1..23: mol_type = other RNA
  modified_base 1: mod_base = OTHER; note = 2'-O-methyluridine-3'-phosphorothioate 5'-(E)-Vinylphosphonate
  modified_base 2: mod_base = OTHER; note = 2'-deoxy-2'-fluorouridine-3'-phosphorothioate
  modified_base 3: mod_base = OTHER; note = 2'-O-methylcytidine-3'-phosphate
  modified_base 4: mod_base = OTHER; note = 2'-O-methyladenosine-3'-phosphate
  modified_base 5: mod_base = OTHER; note = 2'-O-methyluridine-3'-phosphate
  modified_base 6: mod_base = OTHER; note = 2'-deoxy-2'-fluoroadenosine-3'-phosphate
  modified_base 7: mod_base = OTHER; note = 2'-O-methyladenosine-3'-phosphate
  modified_base 8: mod_base = OTHER; note = 2'-O-methyluridine-3'-phosphate
  modified_base 9: mod_base = OTHER; note = 2'-O-methyladenosine-3'-phosphate
  modified_base 10: mod_base = OTHER; note = 2'-O-methyladenosine-3'-phosphate
  modified_base 11: mod_base = OTHER; note = 2'-O-methylguanosine-3'-phosphate
  modified_base 12: mod_base = OTHER; note = 2'-O-methylguanosine-3'-phosphate
  modified_base 13: mod_base = OTHER; note = 2'-O-methylcytidine-3'-phosphate
  modified_base 14: mod_base = OTHER; note = 2'-deoxy-2'-fluoroadenosine-3'-phosphate
  modified_base 15: mod_base = OTHER; note = 2'-O-methyladenosine-3'-phosphate
  modified_base 16: mod_base = OTHER; note = 2'-deoxy-2'-fluorouridine-3'-phosphate
  modified_base 17: mod_base = OTHER; note = 2'-O-methyluridine-3'-phosphate
  modified_base 18: mod_base = OTHER; note = 2'-O-methylguanosine-3'-phosphate
  modified_base 19: mod_base = OTHER; note = 2'-O-methylguanosine-3'-phosphate
  modified_base 20: mod_base = OTHER; note = 2'-O-methyluridine-3'-phosphate
  modified_base 21: mod_base = OTHER; note = 2'-O-methyladenosine-3'-phosphorothioate
  modified_base 22: mod_base = OTHER; note = 2'-O-methylcytidine-3'-phosphorothioate
  modified_base 23: mod_base = OTHER; note = 2'-O-methyluridine
ttcataataaggcaattggtact

SEQ ID NO: 12288 - RNA, 23 nt, synthetic construct
  source 1..23: mol_type = other RNA
  modified_base 1: mod_base = OTHER; note = 2'-O-methyluridine-3'-phosphorothioate 5'-(E)-Vinylphosphonate
  modified_base 2: mod_base = OTHER; note = 2'-deoxy-2'-fluoroguanosine-3'-phosphorothioate
  modified_base 3: mod_base = OTHER; note = 2'-O-methyluridine-3'-phosphate
  modified_base 4: mod_base = OTHER; note = 2'-O-methylcytidine-3'-phosphate
  modified_base 5: mod_base = OTHER; note = 2'-O-methyladenosine-3'-phosphate
  modified_base 6: mod_base = OTHER; note = 2'-deoxy-2'-fluorouridine-3'-phosphate
  modified_base 7: mod_base = OTHER; note = 2'-O-methyladenosine-3'-phosphate
  modified_base 8: mod_base = OTHER; note = 2'-O-methyladenosine-3'-phosphate
  modified_base 9: mod_base = OTHER; note = 2'-O-methyluridine-3'-phosphate
  modified_base 10: mod_base = OTHER; note = 2'-O-methyladenosine-3'-phosphate
  modified_base 11: mod_base = OTHER; note = 2'-O-methyladenosine-3'-phosphate
  modified_base 12: mod_base = OTHER; note = 2'-O-methylguanosine-3'-phosphate
  modified_base 13: mod_base = OTHER; note = 2'-O-methylguanosine-3'-phosphate
  modified_base 14: mod_base = OTHER; note = 2'-deoxy-2'-fluorocytidine-3'-phosphate
  modified_base 15: mod_base = OTHER; note = 2'-O-methyladenosine-3'-phosphate
  modified_base 16: mod_base = OTHER; note = 2'-deoxy-2'-fluoroadenosine-3'-phosphate
  modified_base 17: mod_base = OTHER; note = 2'-O-methyluridine-3'-phosphate
  modified_base 18: mod_base = OTHER; note = 2'-O-methyluridine-3'-phosphate
  modified_base 19: mod_base = OTHER; note = 2'-O-methylguanosine-3'-phosphate
  modified_base 20: mod_base = OTHER; note = 2'-O-methylguanosine-3'-phosphate
  modified_base 21: mod_base = OTHER; note = 2'-O-methyluridine-3'-phosphorothioate
  modified_base 22: mod_base = OTHER; note = 2'-O-methyladenosine-3'-phosphorothioate
  modified_base 23: mod_base = OTHER; note = 2'-O-methylcytidine
tgtcataataaggcaattggtac

SEQ ID NO: 12289 - RNA, 23 nt, synthetic construct
  source 1..23: mol_type = other RNA
  modified_base 1: mod_base = OTHER; note = 2'-O-methyluridine-3'-phosphorothioate 5'-(E)-Vinylphosphonate
  modified_base 2: mod_base = OTHER; note = 2'-deoxy-2'-fluorouridine-3'-phosphorothioate
  modified_base 3: mod_base = OTHER; note = 2'-O-methylguanosine-3'-phosphate
  modified_base 4: mod_base = OTHER; note = 2'-O-methyluridine-3'-phosphate
  modified_base 5: mod_base = OTHER; note = 2'-O-methylcytidine-3'-phosphate
  modified_base 6: mod_base = OTHER; note = 2'-deoxy-2'-fluoroadenosine-3'-phosphate
  modified_base 7: mod_base = OTHER; note = 2'-O-methyluridine-3'-phosphate
  modified_base 8: mod_base = OTHER; note = 2'-O-methyladenosine-3'-phosphate
  modified_base 9: mod_base = OTHER; note = 2'-O-methyladenosine-3'-phosphate
  modified_base 10: mod_base = OTHER; note = 2'-O-methyluridine-3'-phosphate
  modified_base 11: mod_base = OTHER; note = 2'-O-methyladenosine-3'-phosphate
  modified_base 12: mod_base = OTHER; note = 2'-O-methyladenosine-3'-phosphate
  modified_base 13: mod_base = OTHER; note = 2'-O-methylguanosine-3'-phosphate
  modified_base 14: mod_base = OTHER; note = 2'-deoxy-2'-fluoroguanosine-3'-phosphate
  modified_base 15: mod_base = OTHER; note = 2'-O-methylcytidine-3'-phosphate
  modified_base 16: mod_base = OTHER; note = 2'-deoxy-2'-fluoroadenosine-3'-phosphate
  modified_base 17: mod_base = OTHER; note = 2'-O-methyladenosine-3'-phosphate
  modified_base 18: mod_base = OTHER; note = 2'-O-methyluridine-3'-phosphate
  modified_base 19: mod_base = OTHER; note = 2'-O-methyluridine-3'-phosphate
  modified_base 20: mod_base = OTHER; note = 2'-O-methylguanosine-3'-phosphate
  modified_base 21: mod_base = OTHER; note = 2'-O-methylguanosine-3'-phosphorothioate
  modified_base 22: mod_base = OTHER; note = 2'-O-methyluridine-3'-phosphorothioate
  modified_base 23: mod_base = OTHER; note = 2'-O-methyladenosine
ttgtcataataaggcaattggta

SEQ ID NO: 12290 - RNA, 23 nt, synthetic construct
  source 1..23: mol_type = other RNA
  modified_base 1: mod_base = OTHER; note = 2'-O-methyluridine-3'-phosphorothioate 5'-(E)-Vinylphosphonate
  modified_base 2: mod_base = OTHER; note = 2'-deoxy-2'-fluoroadenosine-3'-phosphorothioate
  modified_base 3: mod_base = OTHER; note = 2'-O-methyluridine-3'-phosphate
  modified_base 4: mod_base = OTHER; note = 2'-O-methylguanosine-3'-phosphate
  modified_base 5: mod_base = OTHER; note = 2'-O-methyluridine-3'-phosphate
  modified_base 6: mod_base = OTHER; note = 2'-deoxy-2'-fluorocytidine-3'-phosphate
  modified_base 7: mod_base = OTHER; note = 2'-O-methyladenosine-3'-phosphate
  modified_base 8: mod_base = OTHER; note = 2'-O-methyluridine-3'-phosphate
  modified_base 9: mod_base = OTHER; note = 2'-O-methyladenosine-3'-phosphate
  modified_base 10: mod_base = OTHER; note = 2'-O-methyladenosine-3'-phosphate
  modified_base 11: mod_base = OTHER; note = 2'-O-methyluridine-3'-phosphate
  modified_base 12: mod_base = OTHER; note = 2'-O-methyladenosine-3'-phosphate
  modified_base 13: mod_base = OTHER; note = 2'-O-methyladenosine-3'-phosphate
  modified_base 14: mod_base = OTHER; note = 2'-deoxy-2'-fluoroguanosine-3'-phosphate
  modified_base 15: mod_base = OTHER; note = 2'-O-methylguanosine-3'-phosphate
  modified_base 16: mod_base = OTHER; note = 2'-deoxy-2'-fluorocytidine-3'-phosphate
  modified_base 17: mod_base = OTHER; note = 2'-O-methyladenosine-3'-phosphate
  modified_base 18: mod_base = OTHER; note = 2'-O-methyladenosine-3'-phosphate
  modified_base 19: mod_base = OTHER; note = 2'-O-methyluridine-3'-phosphate
  modified_base 20: mod_base = OTHER; note = 2'-O-methyluridine-3'-phosphate
  modified_base 21: mod_base = OTHER; note = 2'-O-methylguanosine-3'-phosphorothioate
  modified_base 22: mod_base = OTHER; note = 2'-O-methylguanosine-3'-phosphorothioate
  modified_base 23: mod_base = OTHER; note = 2'-O-methyluridine
tatgtcataataaggcaattggt

SEQ ID NO: 12291 - RNA, 23 nt, synthetic construct
  source 1..23: mol_type = other RNA
  modified_base 1: mod_base = OTHER; note = 2'-O-methyluridine-3'-phosphorothioate 5'-(E)-Vinylphosphonate
  modified_base 2: mod_base = OTHER; note = 2'-deoxy-2'-fluorocytidine-3'-phosphorothioate
  modified_base 3: mod_base = OTHER; note = 2'-O-methyladenosine-3'-phosphate
  modified_base 4: mod_base = OTHER; note = 2'-O-methyluridine-3'-phosphate
  modified_base 5: mod_base = OTHER; note = 2'-O-methylguanosine-3'-phosphate
  modified_base 6: mod_base = OTHER; note = 2'-deoxy-2'-fluorouridine-3'-phosphate
  modified_base 7: mod_base = OTHER; note = 2'-O-methylcytidine-3'-phosphate
  modified_base 8: mod_base = OTHER; note = 2'-O-methyladenosine-3'-phosphate
  modified_base 9: mod_base = OTHER; note = 2'-O-methyluridine-3'-phosphate
  modified_base 10: mod_base = OTHER; note = 2'-O-methyladenosine-3'-phosphate
  modified_base 11: mod_base = OTHER; note = 2'-O-methyladenosine-3'-phosphate
  modified_base 12: mod_base = OTHER; note = 2'-O-methyluridine-3'-phosphate
  modified_base 13: mod_base = OTHER; note = 2'-O-methyladenosine-3'-phosphate
  modified_base 14: mod_base = OTHER; note = 2'-deoxy-2'-fluoroadenosine-3'-phosphate
  modified_base 15: mod_base = OTHER; note = 2'-O-methylguanosine-3'-phosphate
  modified_base 16: mod_base = OTHER; note = 2'-deoxy-2'-fluoroguanosine-3'-phosphate
  modified_base 17: mod_base = OTHER; note = 2'-O-methylcytidine-3'-phosphate
  modified_base 18: mod_base = OTHER; note = 2'-O-methyladenosine-3'-phosphate
  modified_base 19: mod_base = OTHER; note = 2'-O-methyladenosine-3'-phosphate
  modified_base 20: mod_base = OTHER; note = 2'-O-methyluridine-3'-phosphate
  modified_base 21: mod_base = OTHER; note = 2'-O-methyluridine-3'-phosphorothioate
  modified_base 22: mod_base = OTHER; note = 2'-O-methylguanosine-3'-phosphorothioate
  modified_base 23: mod_base = OTHER; note = 2'-O-methylguanosine
tcatgtcataataaggcaattgg

SEQ ID NO: 12292 - RNA, 23 nt, synthetic construct
  source 1..23: mol_type = other RNA
  modified_base 1: mod_base = OTHER; note = 2'-O-methyluridine-3'-phosphorothioate 5'-(E)-Vinylphosphonate
  modified_base 2: mod_base = OTHER; note = 2'-deoxy-2'-fluorocytidine-3'-phosphorothioate
  modified_base 3: mod_base = OTHER; note = 2'-O-methylcytidine-3'-phosphate
  modified_base 4: mod_base = OTHER; note = 2'-O-methyladenosine-3'-phosphate
  modified_base 5: mod_base = OTHER; note = 2'-O-methyluridine-3'-phosphate
  modified_base 6: mod_base = OTHER; note = 2'-deoxy-2'-fluoroguanosine-3'-phosphate
  modified_base 7: mod_base = OTHER; note = 2'-O-methyluridine-3'-phosphate
  modified_base 8: mod_base = OTHER; note = 2'-O-methylcytidine-3'-phosphate
  modified_base 9: mod_base = OTHER; note = 2'-O-methyladenosine-3'-phosphate
  modified_base 10: mod_base = OTHER; note = 2'-O-methyluridine-3'-phosphate
  modified_base 11: mod_base = OTHER; note = 2'-O-methyladenosine-3'-phosphate
  modified_base 12: mod_base = OTHER; note = 2'-O-methyladenosine-3'-phosphate
  modified_base 13: mod_base = OTHER; note = 2'-O-methyluridine-3'-phosphate
  modified_base 14: mod_base = OTHER; note = 2'-deoxy-2'-fluoroadenosine-3'-phosphate
  modified_base 15: mod_base = OTHER; note = 2'-O-methyladenosine-3'-phosphate
  modified_base 16: mod_base = OTHER; note = 2'-deoxy-2'-fluoroguanosine-3'-phosphate
  modified_base 17: mod_base = OTHER; note = 2'-O-methylguanosine-3'-phosphate
  modified_base 18: mod_base = OTHER; note = 2'-O-methylcytidine-3'-phosphate
  modified_base 19: mod_base = OTHER; note = 2'-O-methyladenosine-3'-phosphate
  modified_base 20: mod_base = OTHER; note = 2'-O-methyladenosine-3'-phosphate
  modified_base 21: mod_base = OTHER; note = 2'-O-methyluridine-3'-phosphorothioate
  modified_base 22: mod_base = OTHER; note = 2'-O-methyluridine-3'-phosphorothioate
  modified_base 23: mod_base = OTHER; note = 2'-O-methylguanosine
tccatgtcataataaggcaattg

SEQ ID NO: 12293 - RNA, 23 nt, synthetic construct
  source 1..23: mol_type = other RNA
  modified_base 1: mod_base = OTHER; note = 2'-O-methyluridine-3'-phosphorothioate 5'-(E)-Vinylphosphonate
  modified_base 2: mod_base = OTHER; note = 2'-deoxy-2'-fluoroadenosine-3'-phosphorothioate
  modified_base 3: mod_base = OTHER; note = 2'-O-methylcytidine-3'-phosphate
  modified_base 4: mod_base = OTHER; note = 2'-O-methylcytidine-3'-phosphate
  modified_base 5: mod_base = OTHER; note = 2'-O-methyladenosine-3'-phosphate
  modified_base 6: mod_base = OTHER; note = 2'-deoxy-2'-fluorouridine-3'-phosphate
  modified_base 7: mod_base = OTHER; note = 2'-O-methylguanosine-3'-phosphate
  modified_base 8: mod_base = OTHER; note = 2'-O-methyluridine-3'-phosphate
  modified_base 9: mod_base = OTHER; note = 2'-O-methylcytidine-3'-phosphate
  modified_base 10: mod_base = OTHER; note = 2'-O-methyladenosine-3'-phosphate
  modified_base 11: mod_base = OTHER; note = 2'-O-methyluridine-3'-phosphate
  modified_base 12: mod_base = OTHER; note = 2'-O-methyladenosine-3'-phosphate
  modified_base 13: mod_base = OTHER; note = 2'-O-methyladenosine-3'-phosphate
  modified_base 14: mod_base = OTHER; note = 2'-deoxy-2'-fluorouridine-3'-phosphate
  modified_base 15: mod_base = OTHER; note = 2'-O-methyladenosine-3'-phosphate
  modified_base 16: mod_base = OTHER; note = 2'-deoxy-2'-fluoroadenosine-3'-phosphate
  modified_base 17: mod_base = OTHER; note = 2'-O-methylguanosine-3'-phosphate
  modified_base 18: mod_base = OTHER; note = 2'-O-methylguanosine-3'-phosphate
  modified_base 19: mod_base = OTHER; note = 2'-O-methylcytidine-3'-phosphate
  modified_base 20: mod_base = OTHER; note = 2'-O-methyladenosine-3'-phosphate
  modified_base 21: mod_base = OTHER; note = 2'-O-methyladenosine-3'-phosphorothioate
  modified_base 22: mod_base = OTHER; note = 2'-O-methyluridine-3'-phosphorothioate
  modified_base 23: mod_base = OTHER; note = 2'-O-methyluridine
taccatgtcataataaggcaatt

SEQ ID NO: 12294 - RNA, 23 nt, synthetic construct
  source 1..23: mol_type = other RNA
  modified_base 1: mod_base = OTHER; note = 2'-O-methyluridine-3'-phosphorothioate 5'-(E)-Vinylphosphonate
  modified_base 2: mod_base = OTHER; note = 2'-deoxy-2'-fluorocytidine-3'-phosphorothioate
  modified_base 3: mod_base = OTHER; note = 2'-O-methyladenosine-3'-phosphate
  modified_base 4: mod_base = OTHER; note = 2'-O-methylcytidine-3'-phosphate
  modified_base 5: mod_base = OTHER; note = 2'-O-methylcytidine-3'-phosphate
  modified_base 6: mod_base = OTHER; note = 2'-deoxy-2'-fluoroadenosine-3'-phosphate
  modified_base 7: mod_base = OTHER; note = 2'-O-methyluridine-3'-phosphate
  modified_base 8: mod_base = OTHER; note = 2'-O-methylguanosine-3'-phosphate
  modified_base 9: mod_base = OTHER; note = 2'-O-methyluridine-3'-phosphate
  modified_base 10: mod_base = OTHER; note = 2'-O-methylcytidine-3'-phosphate
  modified_base 11: mod_base = OTHER; note = 2'-O-methyladenosine-3'-phosphate
  modified_base 12: mod_base = OTHER; note = 2'-O-methyluridine-3'-phosphate
  modified_base 13: mod_base = OTHER; note = 2'-O-methyladenosine-3'-phosphate
  modified_base 14: mod_base = OTHER; note = 2'-deoxy-2'-fluoroadenosine-3'-phosphate
  modified_base 15: mod_base = OTHER; note = 2'-O-methyluridine-3'-phosphate
  modified_base 16: mod_base = OTHER; note = 2'-deoxy-2'-fluoroadenosine-3'-phosphate
  modified_base 17: mod_base = OTHER; note = 2'-O-methyladenosine-3'-phosphate
  modified_base 18: mod_base = OTHER; note = 2'-O-methylguanosine-3'-phosphate
  modified_base 19: mod_base = OTHER; note = 2'-O-methylguanosine-3'-phosphate
  modified_base 20: mod_base = OTHER; note = 2'-O-methylcytidine-3'-phosphate
  modified_base 21: mod_base = OTHER; note = 2'-O-methyladenosine-3'-phosphorothioate
  modified_base 22: mod_base = OTHER; note = 2'-O-methyladenosine-3'-phosphorothioate
  modified_base 23: mod_base = OTHER; note = 2'-O-methyluridine
tcaccatgtcataataaggcaat

SEQ ID NO: 12295 - RNA, 23 nt, synthetic construct
  source 1..23: mol_type = other RNA
  modified_base 1: mod_base = OTHER; note = 2'-O-methyluridine-3'-phosphorothioate 5'-(E)-Vinylphosphonate
  modified_base 2: mod_base = OTHER; note = 2'-deoxy-2'-fluoroguanosine-3'-phosphorothioate
  modified_base 3: mod_base = OTHER; note = 2'-O-methylcytidine-3'-phosphate
  modified_base 4: mod_base = OTHER; note = 2'-O-methyladenosine-3'-phosphate
  modified_base 5: mod_base = OTHER; note = 2'-O-methylcytidine-3'-phosphate
  modified_base 6: mod_base = OTHER; note = 2'-deoxy-2'-fluorocytidine-3'-phosphate
  modified_base 7: mod_base = OTHER; note = 2'-O-methyladenosine-3'-phosphate
  modified_base 8: mod_base = OTHER; note = 2'-O-methyluridine-3'-phosphate
  modified_base 9: mod_base = OTHER; note = 2'-O-methylguanosine-3'-phosphate
  modified_base 10: mod_base = OTHER; note = 2'-O-methyluridine-3'-phosphate
  modified_base 11: mod_base = OTHER; note = 2'-O-methylcytidine-3'-phosphate
  modified_base 12: mod_base = OTHER; note = 2'-O-methyladenosine-3'-phosphate
  modified_base 13: mod_base = OTHER; note = 2'-O-methyluridine-3'-phosphate
  modified_base 14: mod_base = OTHER; note = 2'-deoxy-2'-fluoroadenosine-3'-phosphate
  modified_base 15: mod_base = OTHER; note = 2'-O-methyladenosine-3'-phosphate
  modified_base 16: mod_base = OTHER; note = 2'-deoxy-2'-fluorouridine-3'-phosphate
  modified_base 17: mod_base = OTHER; note = 2'-O-methyladenosine-3'-phosphate
  modified_base 18: mod_base = OTHER; note = 2'-O-methyladenosine-3'-phosphate
  modified_base 19: mod_base = OTHER; note = 2'-O-methylguanosine-3'-phosphate
  modified_base 20: mod_base = OTHER; note = 2'-O-methylguanosine-3'-phosphate
  modified_base 21: mod_base = OTHER; note = 2'-O-methylcytidine-3'-phosphorothioate
  modified_base 22: mod_base = OTHER; note = 2'-O-methyladenosine-3'-phosphorothioate
  modified_base 23: mod_base = OTHER; note = 2'-O-methyladenosine
tgcaccatgtcataataaggcaa

SEQ ID NO: 12296 - RNA, 23 nt, synthetic construct
  source 1..23: mol_type = other RNA
  modified_base 1: mod_base = OTHER; note = 2'-O-methyluridine-3'-phosphorothioate 5'-(E)-Vinylphosphonate
  modified_base 2: mod_base = OTHER; note = 2'-deoxy-2'-fluoroguanosine-3'-phosphorothioate
  modified_base 3: mod_base = OTHER; note = 2'-O-methylguanosine-3'-phosphate
  modified_base 4: mod_base = OTHER; note = 2'-O-methylcytidine-3'-phosphate
  modified_base 5: mod_base = OTHER; note = 2'-O-methyladenosine-3'-phosphate
  modified_base 6: mod_base = OTHER; note = 2'-deoxy-2'-fluorocytidine-3'-phosphate
  modified_base 7: mod_base = OTHER; note = 2'-O-methylcytidine-3'-phosphate
  modified_base 8: mod_base = OTHER; note = 2'-O-methyladenosine-3'-phosphate
  modified_base 9: mod_base = OTHER; note = 2'-O-methyluridine-3'-phosphate
  modified_base 10: mod_base = OTHER; note = 2'-O-methylguanosine-3'-phosphate
  modified_base 11: mod_base = OTHER; note = 2'-O-methyluridine-3'-phosphate
  modified_base 12: mod_base = OTHER; note = 2'-O-methylcytidine-3'-phosphate
  modified_base 13: mod_base = OTHER; note = 2'-O-methyladenosine-3'-phosphate
  modified_base 14: mod_base = OTHER; note = 2'-deoxy-2'-fluorouridine-3'-phosphate
  modified_base 15: mod_base = OTHER; note = 2'-O-methyladenosine-3'-phosphate
  modified_base 16: mod_base = OTHER; note = 2'-deoxy-2'-fluoroadenosine-3'-phosphate
  modified_base 17: mod_base = OTHER; note = 2'-O-methyluridine-3'-phosphate
  modified_base 18: mod_base = OTHER; note = 2'-O-methyladenosine-3'-phosphate
  modified_base 19: mod_base = OTHER; note = 2'-O-methyladenosine-3'-phosphate
  modified_base 20: mod_base = OTHER; note = 2'-O-methylguanosine-3'-phosphate
  modified_base 21: mod_base = OTHER; note = 2'-O-methylguanosine-3'-phosphorothioate
  modified_base 22: mod_base = OTHER; note = 2'-O-methylcytidine-3'-phosphorothioate
  modified_base 23: mod_base = OTHER; note = 2'-O-methyladenosine
tggcaccatgtcataataaggca

SEQ ID NO: 12297 - RNA, 23 nt, synthetic construct
  source 1..23: mol_type = other RNA
  modified_base 1: mod_base = OTHER; note = 2'-O-methyluridine-3'-phosphorothioate 5'-(E)-Vinylphosphonate
  modified_base 2: mod_base = OTHER; note = 2'-deoxy-2'-fluoroadenosine-3'-phosphorothioate
  modified_base 3: mod_base = OTHER; note = 2'-O-methylguanosine-3'-phosphate
  modified_base 4: mod_base = OTHER; note = 2'-O-methylguanosine-3'-phosphate
  modified_base 5: mod_base = OTHER; note = 2'-O-methylcytidine-3'-phosphate
  modified_base 6: mod_base = OTHER; note = 2'-deoxy-2'-fluoroadenosine-3'-phosphate
  modified_base 7: mod_base = OTHER; note = 2'-O-methylcytidine-3'-phosphate
  modified_base 8: mod_base = OTHER; note = 2'-O-methylcytidine-3'-phosphate
  modified_base 9: mod_base = OTHER; note = 2'-O-methyladenosine-3'-phosphate
  modified_base 10: mod_base = OTHER; note = 2'-O-methyluridine-3'-phosphate
  modified_base 11: mod_base = OTHER; note = 2'-O-methylguanosine-3'-phosphate
  modified_base 12: mod_base = OTHER; note = 2'-O-methyluridine-3'-phosphate
  modified_base 13: mod_base = OTHER; note = 2'-O-methylcytidine-3'-phosphate
  modified_base 14: mod_base = OTHER; note = 2'-deoxy-2'-fluoroadenosine-3'-phosphate
  modified_base 15: mod_base = OTHER; note = 2'-O-methyluridine-3'-phosphate
  modified_base 16: mod_base = OTHER; note = 2'-deoxy-2'-fluoroadenosine-3'-phosphate
  modified_base 17: mod_base = OTHER; note = 2'-O-methyladenosine-3'-phosphate
  modified_base 18: mod_base = OTHER; note = 2'-O-methyluridine-3'-phosphate
  modified_base 19: mod_base = OTHER; note = 2'-O-methyladenosine-3'-phosphate
  modified_base 20: mod_base = OTHER; note = 2'-O-methyladenosine-3'-phosphate
  modified_base 21: mod_base = OTHER; note = 2'-O-methylguanosine-3'-phosphorothioate
  modified_base 22: mod_base = OTHER; note = 2'-O-methylguanosine-3'-phosphorothioate
  modified_base 23: mod_base = OTHER; note = 2'-O-methylcytidine
taggcaccatgtcataataaggc

SEQ ID NO: 12298 - RNA, 23 nt, synthetic construct
  source 1..23: mol_type = other RNA
  modified_base 1: mod_base = OTHER; note = 2'-O-methyluridine-3'-phosphorothioate 5'-(E)-Vinylphosphonate
  modified_base 2: mod_base = OTHER; note = 2'-deoxy-2'-fluoroadenosine-3'-phosphorothioate
  modified_base 3: mod_base = OTHER; note = 2'-O-methyladenosine-3'-phosphate
  modified_base 4: mod_base = OTHER; note = 2'-O-methylguanosine-3'-phosphate
  modified_base 5: mod_base = OTHER; note = 2'-O-methylguanosine-3'-phosphate
  modified_base 6: mod_base = OTHER; note = 2'-deoxy-2'-fluorocytidine-3'-phosphate
  modified_base 7: mod_base = OTHER; note = 2'-O-methyladenosine-3'-phosphate
  modified_base 8: mod_base = OTHER; note = 2'-O-methylcytidine-3'-phosphate
  modified_base 9: mod_base = OTHER; note = 2'-O-methylcytidine-3'-phosphate
  modified_base 10: mod_base = OTHER; note = 2'-O-methyladenosine-3'-phosphate
  modified_base 11: mod_base = OTHER; note = 2'-O-methyluridine-3'-phosphate
  modified_base 12: mod_base = OTHER; note = 2'-O-methylguanosine-3'-phosphate
  modified_base 13: mod_base = OTHER; note = 2'-O-methyluridine-3'-phosphate
  modified_base 14: mod_base = OTHER; note = 2'-deoxy-2'-fluorocytidine-3'-phosphate
  modified_base 15: mod_base = OTHER; note = 2'-O-methyladenosine-3'-phosphate
  modified_base 16: mod_base = OTHER; note = 2'-deoxy-2'-fluorouridine-3'-phosphate
  modified_base 17: mod_base = OTHER; note = 2'-O-methyladenosine-3'-phosphate
  modified_base 18: mod_base = OTHER; note = 2'-O-methyladenosine-3'-phosphate
  modified_base 19: mod_base = OTHER; note = 2'-O-methyluridine-3'-phosphate
  modified_base 20: mod_base = OTHER; note = 2'-O-methyladenosine-3'-phosphate
  modified_base 21: mod_base = OTHER; note = 2'-O-methyladenosine-3'-phosphorothioate
  modified_base 22: mod_base = OTHER; note = 2'-O-methylguanosine-3'-phosphorothioate
  modified_base 23: mod_base = OTHER; note = 2'-O-methylguanosine
taaggcaccatgtcataataagg

SEQ ID NO: 12299 - RNA, 23 nt, synthetic construct
  source 1..23: mol_type = other RNA
  modified_base 1: mod_base = OTHER; note = 2'-O-methyluridine-3'-phosphorothioate 5'-(E)-Vinylphosphonate
  modified_base 2: mod_base = OTHER; note = 2'-deoxy-2'-fluoroguanosine-3'-phosphorothioate
  modified_base 3: mod_base = OTHER; note = 2'-O-methyladenosine-3'-phosphate
  modified_base 4: mod_base = OTHER; note = 2'-O-methyladenosine-3'-phosphate
  modified_base 5: mod_base = OTHER; note = 2'-O-methylguanosine-3'-phosphate
  modified_base 6: mod_base = OTHER; note = 2'-deoxy-2'-fluoroguanosine-3'-phosphate
  modified_base 7: mod_base = OTHER; note = 2'-O-methylcytidine-3'-phosphate
  modified_base 8: mod_base = OTHER; note = 2'-O-methyladenosine-3'-phosphate
  modified_base 9: mod_base = OTHER; note = 2'-O-methylcytidine-3'-phosphate
  modified_base 10: mod_base = OTHER; note = 2'-O-methylcytidine-3'-phosphate
  modified_base 11: mod_base = OTHER; note = 2'-O-methyladenosine-3'-phosphate
  modified_base 12: mod_base = OTHER; note = 2'-O-methyluridine-3'-phosphate
  modified_base 13: mod_base = OTHER; note = 2'-O-methylguanosine-3'-phosphate
  modified_base 14: mod_base = OTHER; note = 2'-deoxy-2'-fluorouridine-3'-phosphate
  modified_base 15: mod_base = OTHER; note = 2'-O-methylcytidine-3'-phosphate
  modified_base 16: mod_base = OTHER; note = 2'-deoxy-2'-fluoroadenosine-3'-phosphate
  modified_base 17: mod_base = OTHER; note = 2'-O-methyluridine-3'-phosphate
  modified_base 18: mod_base = OTHER; note = 2'-O-methyladenosine-3'-phosphate
  modified_base 19: mod_base = OTHER; note = 2'-O-methyladenosine-3'-phosphate
  modified_base 20: mod_base = OTHER; note = 2'-O-methyluridine-3'-phosphate
  modified_base 21: mod_base = OTHER; note = 2'-O-methyladenosine-3'-phosphorothioate
  modified_base 22: mod_base = OTHER; note = 2'-O-methyladenosine-3'-phosphorothioate
  modified_base 23: mod_base = OTHER; note = 2'-O-methylguanosine
tgaaggcaccatgtcataataag

SEQ ID NO: 12300 - RNA, 23 nt, synthetic construct
  source 1..23: mol_type = other RNA
  modified_base 1: mod_base = OTHER; note = 2'-O-methyluridine-3'-phosphorothioate 5'-(E)-Vinylphosphonate
  modified_base 2: mod_base = OTHER; note = 2'-deoxy-2'-fluorouridine-3'-phosphorothioate
  modified_base 3: mod_base = OTHER; note = 2'-O-methylguanosine-3'-phosphate
  modified_base 4: mod_base = OTHER; note = 2'-O-methyladenosine-3'-phosphate
  modified_base 5: mod_base = OTHER; note = 2'-O-methyladenosine-3'-phosphate
  modified_base 6: mod_base = OTHER; note = 2'-deoxy-2'-fluoroguanosine-3'-phosphate
  modified_base 7: mod_base = OTHER; note = 2'-O-methylguanosine-3'-phosphate
  modified_base 8: mod_base = OTHER; note = 2'-O-methylcytidine-3'-phosphate
  modified_base 9: mod_base = OTHER; note = 2'-O-methyladenosine-3'-phosphate
  modified_base 10: mod_base = OTHER; note = 2'-O-methylcytidine-3'-phosphate
  modified_base 11: mod_base = OTHER; note = 2'-O-methylcytidine-3'-phosphate
  modified_base 12: mod_base = OTHER; note = 2'-O-methyladenosine-3'-phosphate
  modified_base 13: mod_base = OTHER; note = 2'-O-methyluridine-3'-phosphate
  modified_base 14: mod_base = OTHER; note = 2'-deoxy-2'-fluoroguanosine-3'-phosphate
  modified_base 15: mod_base = OTHER; note = 2'-O-methyluridine-3'-phosphate
  modified_base 16: mod_base = OTHER; note = 2'-deoxy-2'-fluorocytidine-3'-phosphate
  modified_base 17: mod_base = OTHER; note = 2'-O-methyladenosine-3'-phosphate
  modified_base 18: mod_base = OTHER; note = 2'-O-methyluridine-3'-phosphate
  modified_base 19: mod_base = OTHER; note = 2'-O-methyladenosine-3'-phosphate
  modified_base 20: mod_base = OTHER; note = 2'-O-methyladenosine-3'-phosphate
  modified_base 21: mod_base = OTHER; note = 2'-O-methyluridine-3'-phosphorothioate
  modified_base 22: mod_base = OTHER; note = 2'-O-methyladenosine-3'-phosphorothioate
  modified_base 23: mod_base = OTHER; note = 2'-O-methyladenosine
ttgaaggcaccatgtcataataa

SEQ ID NO: 12301 - RNA, 23 nt, synthetic construct
  source 1..23: mol_type = other RNA
  modified_base 1: mod_base = OTHER; note = 2'-O-methyluridine-3'-phosphorothioate 5'-(E)-Vinylphosphonate
  modified_base 2: mod_base = OTHER; note = 2'-deoxy-2'-fluoroadenosine-3'-phosphorothioate
  modified_base 3: mod_base = OTHER; note = 2'-O-methylcytidine-3'-phosphate
  modified_base 4: mod_base = OTHER; note = 2'-O-methylcytidine-3'-phosphate
  modified_base 5: mod_base = OTHER; note = 2'-O-methyluridine-3'-phosphate
  modified_base 6: mod_base = OTHER; note = 2'-deoxy-2'-fluorouridine-3'-phosphate
  modified_base 7: mod_base = OTHER; note = 2'-O-methyluridine-3'-phosphate
  modified_base 8: mod_base = OTHER; note = 2'-O-methylcytidine-3'-phosphate
  modified_base 9: mod_base = OTHER; note = 2'-O-methyluridine-3'-phosphate
  modified_base 10: mod_base = OTHER; note = 2'-O-methylcytidine-3'-phosphate
  modified_base 11: mod_base = OTHER; note = 2'-O-methyladenosine-3'-phosphate
  modified_base 12: mod_base = OTHER; note = 2'-O-methyluridine-3'-phosphate
  modified_base 13: mod_base = OTHER; note = 2'-O-methyluridine-3'-phosphate
  modified_base 14: mod_base = OTHER; note = 2'-deoxy-2'-fluorouridine-3'-phosphate
  modified_base 15: mod_base = OTHER; note = 2'-O-methylcytidine-3'-phosphate
  modified_base 16: mod_base = OTHER; note = 2'-deoxy-2'-fluorocytidine-3'-phosphate
  modified_base 17: mod_base = OTHER; note = 2'-O-methyluridine-3'-phosphate
  modified_base 18: mod_base = OTHER; note = 2'-O-methylcytidine-3'-phosphate
  modified_base 19: mod_base = OTHER; note = 2'-O-methyluridine-3'-phosphate
  modified_base 20: mod_base = OTHER; note = 2'-O-methyladenosine-3'-phosphate
  modified_base 21: mod_base = OTHER; note = 2'-O-methyluridine-3'-phosphorothioate
  modified_base 22: mod_base = OTHER; note = 2'-O-methylcytidine-3'-phosphorothioate
  modified_base 23: mod_base = OTHER; note = 2'-O-methylguanosine
tacctttctcatttcctctatcg

SEQ ID NO: 12302 - RNA, 23 nt, synthetic construct
  source 1..23: mol_type = other RNA
  modified_base 1: mod_base = OTHER; note = 2'-O-methyluridine-3'-phosphorothioate 5'-(E)-Vinylphosphonate
  modified_base 2: mod_base = OTHER; note = 2'-deoxy-2'-fluoroadenosine-3'-phosphorothioate
  modified_base 3: mod_base = OTHER; note = 2'-O-methylcytidine-3'-phosphate
  modified_base 4: mod_base = OTHER; note = 2'-O-methyladenosine-3'-phosphate
  modified_base 5: mod_base = OTHER; note = 2'-O-methyladenosine-3'-phosphate
  modified_base 6: mod_base = OTHER; note = 2'-deoxy-2'-fluorocytidine-3'-phosphate
  modified_base 7: mod_base = OTHER; note = 2'-O-methylcytidine-3'-phosphate
  modified_base 8: mod_base = OTHER; note = 2'-O-methyluridine-3'-phosphate
  modified_base 9: mod_base = OTHER; note = 2'-O-methyluridine-3'-phosphate
  modified_base 10: mod_base = OTHER; note = 2'-O-methyluridine-3'-phosphate
  modified_base 11: mod_base = OTHER; note = 2'-O-methylcytidine-3'-phosphate
  modified_base 12: mod_base = OTHER; note = 2'-O-methyluridine-3'-phosphate
  modified_base 13: mod_base = OTHER; note = 2'-O-methylcytidine-3'-phosphate
  modified_base 14: mod_base = OTHER; note = 2'-deoxy-2'-fluoroadenosine-3'-phosphate
  modified_base 15: mod_base = OTHER; note = 2'-O-methyluridine-3'-phosphate
  modified_base 16: mod_base = OTHER; note = 2'-deoxy-2'-fluorouridine-3'-phosphate
  modified_base 17: mod_base = OTHER; note = 2'-O-methyluridine-3'-phosphate
  modified_base 18: mod_base = OTHER; note = 2'-O-methylcytidine-3'-phosphate
  modified_base 19: mod_base = OTHER; note = 2'-O-methylcytidine-3'-phosphate
  modified_base 20: mod_base = OTHER; note = 2'-O-methyluridine-3'-phosphate
  modified_base 21: mod_base = OTHER; note = 2'-O-methylcytidine-3'-phosphorothioate
  modified_base 22: mod_base = OTHER; note = 2'-O-methyluridine-3'-phosphorothioate
  modified_base 23: mod_base = OTHER; note = 2'-O-methyladenosine
tacaacctttctcatttcctcta

SEQ ID NO: 12303 - RNA, 23 nt, synthetic construct
  source 1..23: mol_type = other RNA
  modified_base 1: mod_base = OTHER; note = 2'-O-methyluridine-3'-phosphorothioate 5'-(E)-Vinylphosphonate
  modified_base 2: mod_base = OTHER; note = 2'-deoxy-2'-fluorouridine-3'-phosphorothioate
  modified_base 3: mod_base = OTHER; note = 2'-O-methyluridine-3'-phosphate
  modified_base 4: mod_base = OTHER; note = 2'-O-methylcytidine-3'-phosphate
  modified_base 5: mod_base = OTHER; note = 2'-O-methyluridine-3'-phosphate
  modified_base 6: mod_base = OTHER; note = 2'-deoxy-2'-fluoroguanosine-3'-phosphate
  modified_base 7: mod_base = OTHER; note = 2'-O-methylguanosine-3'-phosphate
  modified_base 8: mod_base = OTHER; note = 2'-O-methyluridine-3'-phosphate
  modified_base 9: mod_base = OTHER; note = 2'-O-methylcytidine-3'-phosphate
  modified_base 10: mod_base = OTHER; note = 2'-O-methyladenosine-3'-phosphate
  modified_base 11: mod_base = OTHER; note = 2'-O-methylcytidine-3'-phosphate
  modified_base 12: mod_base = OTHER; note = 2'-O-methyladenosine-3'-phosphate
  modified_base 13: mod_base = OTHER; note = 2'-O-methyladenosine-3'-phosphate
  modified_base 14: mod_base = OTHER; note = 2'-deoxy-2'-fluoroadenosine-3'-phosphate
  modified_base 15: mod_base = OTHER; note = 2'-O-methylcytidine-3'-phosphate
  modified_base 16: mod_base = OTHER; note = 2'-deoxy-2'-fluoroadenosine-3'-phosphate
  modified_base 17: mod_base = OTHER; note = 2'-O-methyladenosine-3'-phosphate
  modified_base 18: mod_base = OTHER; note = 2'-O-methylcytidine-3'-phosphate
  modified_base 19: mod_base = OTHER; note = 2'-O-methylcytidine-3'-phosphate
  modified_base 20: mod_base = OTHER; note = 2'-O-methyluridine-3'-phosphate
  modified_base 21: mod_base = OTHER; note = 2'-O-methyluridine-3'-phosphorothioate
  modified_base 22: mod_base = OTHER; note = 2'-O-methyluridine-3'-phosphorothioate
  modified_base 23: mod_base = OTHER; note = 2'-O-methylcytidine
tttctggtcacaaacaacctttc

SEQ ID NO: 12304 - RNA, 23 nt, synthetic construct
  source 1..23: mol_type = other RNA
  modified_base 1: mod_base = OTHER; note = 2'-O-methyluridine-3'-phosphorothioate 5'-(E)-Vinylphosphonate
  modified_base 2: mod_base = OTHER; note = 2'-deoxy-2'-fluoroadenosine-3'-phosphorothioate
  modified_base 3: mod_base = OTHER; note = 2'-O-methyladenosine-3'-phosphate
  modified_base 4: mod_base = OTHER; note = 2'-O-methylcytidine-3'-phosphate
  modified_base 5: mod_base = OTHER; note = 2'-O-methyladenosine-3'-phosphate
  modified_base 6: mod_base = OTHER; note = 2'-deoxy-2'-fluoroadenosine-3'-phosphate
  modified_base 7: mod_base = OTHER; note = 2'-O-methylcytidine-3'-phosphate
  modified_base 8: mod_base = OTHER; note = 2'-O-methylcytidine-3'-phosphate
  modified_base 9: mod_base = OTHER; note = 2'-O-methyluridine-3'-phosphate
  modified_base 10: mod_base = OTHER; note = 2'-O-methyluridine-3'-phosphate
  modified_base 11: mod_base = OTHER; note = 2'-O-methyluridine-3'-phosphate
  modified_base 12: mod_base = OTHER; note = 2'-O-methylcytidine-3'-phosphate
  modified_base 13: mod_base = OTHER; note = 2'-O-methyluridine-3'-phosphate
  modified_base 14: mod_base = OTHER; note = 2'-deoxy-2'-fluorocytidine-3'-phosphate
  modified_base 15: mod_base = OTHER; note = 2'-O-methyladenosine-3'-phosphate
  modified_base 16: mod_base = OTHER; note = 2'-deoxy-2'-fluorouridine-3'-phosphate
  modified_base 17: mod_base = OTHER; note = 2'-O-methyluridine-3'-phosphate
  modified_base 18: mod_base = OTHER; note = 2'-O-methyluridine-3'-phosphate
  modified_base 19: mod_base = OTHER; note = 2'-O-methylcytidine-3'-phosphate
  modified_base 20: mod_base = OTHER; note = 2'-O-methylcytidine-3'-phosphate
  modified_base 21: mod_base = OTHER; note = 2'-O-methyluridine-3'-phosphorothioate
  modified_base 22: mod_base = OTHER; note = 2'-O-methylcytidine-3'-phosphorothioate
  modified_base 23: mod_base = OTHER; note = 2'-O-methyluridine
taacaacctttctcatttcctct

SEQ ID NO: 12305 - RNA, 23 nt, synthetic construct
  source 1..23: mol_type = other RNA
  modified_base 1: mod_base = OTHER; note = 2'-O-methyluridine-3'-phosphorothioate 5'-(E)-Vinylphosphonate
  modified_base 2: mod_base = OTHER; note = 2'-deoxy-2'-fluoroadenosine-3'-phosphorothioate
  modified_base 3: mod_base = OTHER; note = 2'-O-methyladenosine-3'-phosphate
  modified_base 4: mod_base = OTHER; note = 2'-O-methyladenosine-3'-phosphate
  modified_base 5: mod_base = OTHER; note = 2'-O-methylcytidine-3'-phosphate
  modified_base 6: mod_base = OTHER; note = 2'-deoxy-2'-fluoroadenosine-3'-phosphate
  modified_base 7: mod_base = OTHER; note = 2'-O-methyladenosine-3'-phosphate
  modified_base 8: mod_base = OTHER; note = 2'-O-methylcytidine-3'-phosphate
  modified_base 9: mod_base = OTHER; note = 2'-O-methylcytidine-3'-phosphate
  modified_base 10: mod_base = OTHER; note = 2'-O-methyluridine-3'-phosphate
  modified_base 11: mod_base = OTHER; note = 2'-O-methyluridine-3'-phosphate
  modified_base 12: mod_base = OTHER; note = 2'-O-methyluridine-3'-phosphate
  modified_base 13: mod_base = OTHER; note = 2'-O-methylcytidine-3'-phosphate
  modified_base 14: mod_base = OTHER; note = 2'-deoxy-2'-fluorouridine-3'-phosphate
  modified_base 15: mod_base = OTHER; note = 2'-O-methylcytidine-3'-phosphate
  modified_base 16: mod_base = OTHER; note = 2'-deoxy-2'-fluoroadenosine-3'-phosphate
  modified_base 17: mod_base = OTHER; note = 2'-O-methyluridine-3'-phosphate
  modified_base 18: mod_base = OTHER; note = 2'-O-methyluridine-3'-phosphate
  modified_base 19: mod_base = OTHER; note = 2'-O-methyluridine-3'-phosphate
  modified_base 20: mod_base = OTHER; note = 2'-O-methylcytidine-3'-phosphate
  modified_base 21: mod_base = OTHER; note = 2'-O-methylcytidine-3'-phosphorothioate
  modified_base 22: mod_base = OTHER; note = 2'-O-methyluridine-3'-phosphorothioate
  modified_base 23: mod_base = OTHER; note = 2'-O-methylcytidine
taaacaacctttctcatttcctc

SEQ ID NO: 12306 - RNA, 23 nt, synthetic construct
  source 1..23: mol_type = other RNA
  modified_base 1: mod_base = OTHER; note = 2'-O-methyluridine-3'-phosphorothioate 5'-(E)-Vinylphosphonate
  modified_base 2: mod_base = OTHER; note = 2'-deoxy-2'-fluorocytidine-3'-phosphorothioate
  modified_base 3: mod_base = OTHER; note = 2'-O-methyladenosine-3'-phosphate
  modified_base 4: mod_base = OTHER; note = 2'-O-methyladenosine-3'-phosphate
  modified_base 5: mod_base = OTHER; note = 2'-O-methyladenosine-3'-phosphate
  modified_base 6: mod_base = OTHER; note = 2'-deoxy-2'-fluorocytidine-3'-phosphate
  modified_base 7: mod_base = OTHER; note = 2'-O-methyladenosine-3'-phosphate
  modified_base 8: mod_base = OTHER; note = 2'-O-methyladenosine-3'-phosphate
  modified_base 9: mod_base = OTHER; note = 2'-O-methylcytidine-3'-phosphate
  modified_base 10: mod_base = OTHER; note = 2'-O-methylcytidine-3'-phosphate
  modified_base 11: mod_base = OTHER; note = 2'-O-methyluridine-3'-phosphate
  modified_base 12: mod_base = OTHER; note = 2'-O-methyluridine-3'-phosphate
  modified_base 13: mod_base = OTHER; note = 2'-O-methyluridine-3'-phosphate
  modified_base 14: mod_base = OTHER; note = 2'-deoxy-2'-fluorocytidine-3'-phosphate
  modified_base 15: mod_base = OTHER; note = 2'-O-methyluridine-3'-phosphate
  modified_base 16: mod_base = OTHER; note = 2'-deoxy-2'-fluorocytidine-3'-phosphate
  modified_base 17: mod_base = OTHER; note = 2'-O-methyladenosine-3'-phosphate
  modified_base 18: mod_base = OTHER; note = 2'-O-methyluridine-3'-phosphate
  modified_base 19: mod_base = OTHER; note = 2'-O-methyluridine-3'-phosphate
  modified_base 20: mod_base = OTHER; note = 2'-O-methyluridine-3'-phosphate
  modified_base 21: mod_base = OTHER; note = 2'-O-methylcytidine-3'-phosphorothioate
  modified_base 22: mod_base = OTHER; note = 2'-O-methylcytidine-3'-phosphorothioate
  modified_base 23: mod_base = OTHER; note = 2'-O-methyluridine
tcaaacaacctttctcatttcct

SEQ ID NO: 12307 - RNA, 23 nt, synthetic construct
  source 1..23: mol_type = other RNA
  modified_base 1: mod_base = OTHER; note = 2'-O-methyluridine-3'-phosphorothioate 5'-(E)-Vinylphosphonate
  modified_base 2: mod_base = OTHER; note = 2'-deoxy-2'-fluoroadenosine-3'-phosphorothioate
  modified_base 3: mod_base = OTHER; note = 2'-O-methylcytidine-3'-phosphate
  modified_base 4: mod_base = OTHER; note = 2'-O-methyladenosine-3'-phosphate
  modified_base 5: mod_base = OTHER; note = 2'-O-methyladenosine-3'-phosphate
  modified_base 6: mod_base = OTHER; note = 2'-deoxy-2'-fluoroadenosine-3'-phosphate
  modified_base 7: mod_base = OTHER; note = 2'-O-methylcytidine-3'-phosphate
  modified_base 8: mod_base = OTHER; note = 2'-O-methyladenosine-3'-phosphate
  modified_base 9: mod_base = OTHER; note = 2'-O-methyladenosine-3'-phosphate
  modified_base 10: mod_base = OTHER; note = 2'-O-methylcytidine-3'-phosphate
  modified_base 11: mod_base = OTHER; note = 2'-O-methylcytidine-3'-phosphate
  modified_base 12: mod_base = OTHER; note = 2'-O-methyluridine-3'-phosphate
  modified_base 13: mod_base = OTHER; note = 2'-O-methyluridine-3'-phosphate
  modified_base 14: mod_base = OTHER; note = 2'-deoxy-2'-fluorouridine-3'-phosphate
  modified_base 15: mod_base = OTHER; note = 2'-O-methylcytidine-3'-phosphate
  modified_base 16: mod_base = OTHER; note = 2'-deoxy-2'-fluorouridine-3'-phosphate
  modified_base 17: mod_base = OTHER; note = 2'-O-methylcytidine-3'-phosphate
  modified_base 18: mod_base = OTHER; note = 2'-O-methyladenosine-3'-phosphate
  modified_base 19: mod_base = OTHER; note = 2'-O-methyluridine-3'-phosphate
  modified_base 20: mod_base = OTHER; note = 2'-O-methyluridine-3'-phosphate
  modified_base 21: mod_base = OTHER; note = 2'-O-methyluridine-3'-phosphorothioate
  modified_base 22: mod_base = OTHER; note = 2'-O-methylcytidine-3'-phosphorothioate
  modified_base 23: mod_base = OTHER; note = 2'-O-methylcytidine
tacaaacaacctttctcatttcc

SEQ ID NO: 12308 - RNA, 23 nt, synthetic construct
  source 1..23: mol_type = other RNA
  modified_base 1: mod_base = OTHER; note = 2'-O-methyluridine-3'-phosphorothioate 5'-(E)-Vinylphosphonate
  modified_base 2: mod_base = OTHER; note = 2'-deoxy-2'-fluorocytidine-3'-phosphorothioate
  modified_base 3: mod_base = OTHER; note = 2'-O-methyladenosine-3'-phosphate
  modified_base 4: mod_base = OTHER; note = 2'-O-methylcytidine-3'-phosphate
  modified_base 5: mod_base = OTHER; note = 2'-O-methyladenosine-3'-phosphate
  modified_base 6: mod_base = OTHER; note = 2'-deoxy-2'-fluoroadenosine-3'-phosphate
  modified_base 7: mod_base = OTHER; note = 2'-O-methyladenosine-3'-phosphate
  modified_base 8: mod_base = OTHER; note = 2'-O-methylcytidine-3'-phosphate
  modified_base 9: mod_base = OTHER; note = 2'-O-methyladenosine-3'-phosphate
  modified_base 10: mod_base = OTHER; note = 2'-O-methyladenosine-3'-phosphate
  modified_base 11: mod_base = OTHER; note = 2'-O-methylcytidine-3'-phosphate
  modified_base 12: mod_base = OTHER; note = 2'-O-methylcytidine-3'-phosphate
  modified_base 13: mod_base = OTHER; note = 2'-O-methyluridine-3'-phosphate
  modified_base 14: mod_base = OTHER; note = 2'-deoxy-2'-fluorouridine-3'-phosphate
  modified_base 15: mod_base = OTHER; note = 2'-O-methyluridine-3'-phosphate
  modified_base 16: mod_base = OTHER; note = 2'-deoxy-2'-fluorocytidine-3'-phosphate
  modified_base 17: mod_base = OTHER; note = 2'-O-methyluridine-3'-phosphate
  modified_base 18: mod_base = OTHER; note = 2'-O-methylcytidine-3'-phosphate
  modified_base 19: mod_base = OTHER; note = 2'-O-methyladenosine-3'-phosphate
  modified_base 20: mod_base = OTHER; note = 2'-O-methyluridine-3'-phosphate
  modified_base 21: mod_base = OTHER; note = 2'-O-methyluridine-3'-phosphorothioate
  modified_base 22: mod_base = OTHER; note = 2'-O-methyluridine-3'-phosphorothioate
  modified_base 23: mod_base = OTHER; note = 2'-O-methylcytidine
tcacaaacaacctttctcatttc

SEQ ID NO: 12309 - RNA, 23 nt, synthetic construct
  source 1..23: mol_type = other RNA
  modified_base 1: mod_base = OTHER; note = 2'-O-methyluridine-3'-phosphorothioate 5'-(E)-Vinylphosphonate
  modified_base 2: mod_base = OTHER; note = 2'-deoxy-2'-fluorouridine-3'-phosphorothioate
  modified_base 3: mod_base = OTHER; note = 2'-O-methylcytidine-3'-phosphate
  modified_base 4: mod_base = OTHER; note = 2'-O-methyladenosine-3'-phosphate
  modified_base 5: mod_base = OTHER; note = 2'-O-methylcytidine-3'-phosphate
  modified_base 6: mod_base = OTHER; note = 2'-deoxy-2'-fluoroadenosine-3'-phosphate
  modified_base 7: mod_base = OTHER; note = 2'-O-methyladenosine-3'-phosphate
  modified_base 8: mod_base = OTHER; note = 2'-O-methyladenosine-3'-phosphate
  modified_base 9: mod_base = OTHER; note = 2'-O-methylcytidine-3'-phosphate
  modified_base 10: mod_base = OTHER; note = 2'-O-methyladenosine-3'-phosphate
  modified_base 11: mod_base = OTHER; note = 2'-O-methyladenosine-3'-phosphate
  modified_base 12: mod_base = OTHER; note = 2'-O-methylcytidine-3'-phosphate
  modified_base 13: mod_base = OTHER; note = 2'-O-methylcytidine-3'-phosphate
  modified_base 14: mod_base = OTHER; note = 2'-deoxy-2'-fluorouridine-3'-phosphate
  modified_base 15: mod_base = OTHER; note = 2'-O-methyluridine-3'-phosphate
  modified_base 16: mod_base = OTHER; note = 2'-deoxy-2'-fluorouridine-3'-phosphate
  modified_base 17: mod_base = OTHER; note = 2'-O-methylcytidine-3'-phosphate
  modified_base 18: mod_base = OTHER; note = 2'-O-methyluridine-3'-phosphate
  modified_base 19: mod_base = OTHER; note = 2'-O-methylcytidine-3'-phosphate
  modified_base 20: mod_base = OTHER; note = 2'-O-methyladenosine-3'-phosphate
  modified_base 21: mod_base = OTHER; note = 2'-O-methyluridine-3'-phosphorothioate
  modified_base 22: mod_base = OTHER; note = 2'-O-methyluridine-3'-phosphorothioate
  modified_base 23: mod_base = OTHER; note = 2'-O-methyluridine
ttcacaaacaacctttctcattt

SEQ ID NO: 12310 - RNA, 23 nt, synthetic construct
  source 1..23: mol_type = other RNA
  modified_base 1: mod_base = OTHER; note = 2'-O-methyluridine-3'-phosphorothioate 5'-(E)-Vinylphosphonate
  modified_base 2: mod_base = OTHER; note = 2'-deoxy-2'-fluoroguanosine-3'-phosphorothioate
  modified_base 3: mod_base = OTHER; note = 2'-O-methyluridine-3'-phosphate
  modified_base 4: mod_base = OTHER; note = 2'-O-methylcytidine-3'-phosphate
  modified_base 5: mod_base = OTHER; note = 2'-O-methyladenosine-3'-phosphate
  modified_base 6: mod_base = OTHER; note = 2'-deoxy-2'-fluorocytidine-3'-phosphate
  modified_base 7: mod_base = OTHER; note = 2'-O-methyladenosine-3'-phosphate
  modified_base 8: mod_base = OTHER; note = 2'-O-methyladenosine-3'-phosphate
  modified_base 9: mod_base = OTHER; note = 2'-O-methyladenosine-3'-phosphate
  modified_base 10: mod_base = OTHER; note = 2'-O-methylcytidine-3'-phosphate
  modified_base 11: mod_base = OTHER; note = 2'-O-methyladenosine-3'-phosphate
  modified_base 12: mod_base = OTHER; note = 2'-O-methyladenosine-3'-phosphate
  modified_base 13: mod_base = OTHER; note = 2'-O-methylcytidine-3'-phosphate
  modified_base 14: mod_base = OTHER; note = 2'-deoxy-2'-fluorocytidine-3'-phosphate
  modified_base 15: mod_base = OTHER; note = 2'-O-methyluridine-3'-phosphate
  modified_base 16: mod_base = OTHER; note = 2'-deoxy-2'-fluorouridine-3'-phosphate
  modified_base 17: mod_base = OTHER; note = 2'-O-methyluridine-3'-phosphate
  modified_base 18: mod_base = OTHER; note = 2'-O-methylcytidine-3'-phosphate
  modified_base 19: mod_base = OTHER; note = 2'-O-methyluridine-3'-phosphate
  modified_base 20: mod_base = OTHER; note = 2'-O-methylcytidine-3'-phosphate
  modified_base 21: mod_base = OTHER; note = 2'-O-methyladenosine-3'-phosphorothioate
  modified_base 22: mod_base = OTHER; note = 2'-O-methyluridine-3'-phosphorothioate
  modified_base 23: mod_base = OTHER; note = 2'-O-methyluridine
tgtcacaaacaacctttctcatt

SEQ ID NO: 12311 - RNA, 23 nt, synthetic construct
  source 1..23: mol_type = other RNA
  modified_base 1: mod_base = OTHER; note = 2'-O-methyluridine-3'-phosphorothioate 5'-(E)-Vinylphosphonate
  modified_base 2: mod_base = OTHER; note = 2'-deoxy-2'-fluoroguanosine-3'-phosphorothioate
  modified_base 3: mod_base = OTHER; note = 2'-O-methylguanosine-3'-phosphate
  modified_base 4: mod_base = OTHER; note = 2'-O-methyluridine-3'-phosphate
  modified_base 5: mod_base = OTHER; note = 2'-O-methylcytidine-3'-phosphate
  modified_base 6: mod_base = OTHER; note = 2'-deoxy-2'-fluoroadenosine-3'-phosphate
  modified_base 7: mod_base = OTHER; note = 2'-O-methylcytidine-3'-phosphate
  modified_base 8: mod_base = OTHER; note = 2'-O-methyladenosine-3'-phosphate
  modified_base 9: mod_base = OTHER; note = 2'-O-methyladenosine-3'-phosphate
  modified_base 10: mod_base = OTHER; note = 2'-O-methyladenosine-3'-phosphate
  modified_base 11: mod_base = OTHER; note = 2'-O-methylcytidine-3'-phosphate
  modified_base 12: mod_base = OTHER; note = 2'-O-methyladenosine-3'-phosphate
  modified_base 13: mod_base = OTHER; note = 2'-O-methyladenosine-3'-phosphate
  modified_base 14: mod_base = OTHER; note = 2'-deoxy-2'-fluorocytidine-3'-phosphate
  modified_base 15: mod_base = OTHER; note = 2'-O-methylcytidine-3'-phosphate
  modified_base 16: mod_base = OTHER; note = 2'-deoxy-2'-fluorouridine-3'-phosphate
  modified_base 17: mod_base = OTHER; note = 2'-O-methyluridine-3'-phosphate
  modified_base 18: mod_base = OTHER; note = 2'-O-methyluridine-3'-phosphate
  modified_base 19: mod_base = OTHER; note = 2'-O-methylcytidine-3'-phosphate
  modified_base 20: mod_base = OTHER; note = 2'-O-methyluridine-3'-phosphate
  modified_base 21: mod_base = OTHER; note = 2'-O-methylcytidine-3'-phosphorothioate
  modified_base 22: mod_base = OTHER; note = 2'-O-methyladenosine-3'-phosphorothioate
  modified_base 23: mod_base = OTHER; note = 2'-O-methyluridine
tggtcacaaacaacctttctcat

SEQ ID NO: 12312 - RNA, 23 nt, synthetic construct
  source 1..23: mol_type = other RNA
  modified_base 1: mod_base = OTHER; note = 2'-O-methyluridine-3'-phosphorothioate 5'-(E)-Vinylphosphonate
  modified_base 2: mod_base = OTHER; note = 2'-deoxy-2'-fluorouridine-3'-phosphorothioate
  modified_base 3: mod_base = OTHER; note = 2'-O-methylguanosine-3'-phosphate
  modified_base 4: mod_base = OTHER; note = 2'-O-methylguanosine-3'-phosphate
  modified_base 5: mod_base = OTHER; note = 2'-O-methyluridine-3'-phosphate
  modified_base 6: mod_base = OTHER; note = 2'-deoxy-2'-fluorocytidine-3'-phosphate
  modified_base 7: mod_base = OTHER; note = 2'-O-methyladenosine-3'-phosphate
  modified_base 8: mod_base = OTHER; note = 2'-O-methylcytidine-3'-phosphate
  modified_base 9: mod_base = OTHER; note = 2'-O-methyladenosine-3'-phosphate
  modified_base 10: mod_base = OTHER; note = 2'-O-methyladenosine-3'-phosphate
  modified_base 11: mod_base = OTHER; note = 2'-O-methyladenosine-3'-phosphate
  modified_base 12: mod_base = OTHER; note = 2'-O-methylcytidine-3'-phosphate
  modified_base 13: mod_base = OTHER; note = 2'-O-methyladenosine-3'-phosphate
  modified_base 14: mod_base = OTHER; note = 2'-deoxy-2'-fluoroadenosine-3'-phosphate
  modified_base 15: mod_base = OTHER; note = 2'-O-methylcytidine-3'-phosphate
  modified_base 16: mod_base = OTHER; note = 2'-deoxy-2'-fluorocytidine-3'-phosphate
  modified_base 17: mod_base = OTHER; note = 2'-O-methyluridine-3'-phosphate
  modified_base 18: mod_base = OTHER; note = 2'-O-methyluridine-3'-phosphate
  modified_base 19: mod_base = OTHER; note = 2'-O-methyluridine-3'-phosphate
  modified_base 20: mod_base = OTHER; note = 2'-O-methylcytidine-3'-phosphate
  modified_base 21: mod_base = OTHER; note = 2'-O-methyluridine-3'-phosphorothioate
  modified_base 22: mod_base = OTHER; note = 2'-O-methylcytidine-3'-phosphorothioate
  modified_base 23: mod_base = OTHER; note = 2'-O-methyladenosine
ttggtcacaaacaacctttctca

SEQ ID NO: 12313 - RNA, 23 nt, synthetic construct
  source 1..23: mol_type = other RNA
  modified_base 1: mod_base = OTHER; note = 2'-O-methyluridine-3'-phosphorothioate 5'-(E)-Vinylphosphonate
  modified_base 2: mod_base = OTHER; note = 2'-deoxy-2'-fluorocytidine-3'-phosphorothioate
  modified_base 3: mod_base = OTHER; note = 2'-O-methyluridine-3'-phosphate
  modified_base 4: mod_base = OTHER; note = 2'-O-methylguanosine-3'-phosphate
  modified_base 5: mod_base = OTHER; note = 2'-O-methylguanosine-3'-phosphate
  modified_base 6: mod_base = OTHER; note = 2'-deoxy-2'-fluorouridine-3'-phosphate
  modified_base 7: mod_base = OTHER; note = 2'-O-methylcytidine-3'-phosphate
  modified_base 8: mod_base = OTHER; note = 2'-O-methyladenosine-3'-phosphate
  modified_base 9: mod_base = OTHER; note = 2'-O-methylcytidine-3'-phosphate
  modified_base 10: mod_base = OTHER; note = 2'-O-methyladenosine-3'-phosphate
  modified_base 11: mod_base = OTHER; note = 2'-O-methyladenosine-3'-phosphate
  modified_base 12: mod_base = OTHER; note = 2'-O-methyladenosine-3'-phosphate
  modified_base 13: mod_base = OTHER; note = 2'-O-methylcytidine-3'-phosphate
  modified_base 14: mod_base = OTHER; note = 2'-deoxy-2'-fluoroadenosine-3'-phosphate
  modified_base 15: mod_base = OTHER; note = 2'-O-methyladenosine-3'-phosphate
  modified_base 16: mod_base = OTHER; note = 2'-deoxy-2'-fluorocytidine-3'-phosphate
  modified_base 17: mod_base = OTHER; note = 2'-O-methylcytidine-3'-phosphate
  modified_base 18: mod_base = OTHER; note = 2'-O-methyluridine-3'-phosphate
  modified_base 19: mod_base = OTHER; note = 2'-O-methyluridine-3'-phosphate
  modified_base 20: mod_base = OTHER; note = 2'-O-methyluridine-3'-phosphate
  modified_base 21: mod_base = OTHER; note = 2'-O-methylcytidine-3'-phosphorothioate
  modified_base 22: mod_base = OTHER; note = 2'-O-methyluridine-3'-phosphorothioate
  modified_base 23: mod_base = OTHER; note = 2'-O-methylcytidine
tctggtcacaaacaacctttctc

SEQ ID NO: 12314 - RNA, 23 nt, synthetic construct
  source 1..23: mol_type = other RNA
  modified_base 1: mod_base = OTHER; note = 2'-O-methyluridine-3'-phosphorothioate 5'-(E)-Vinylphosphonate
  modified_base 2: mod_base = OTHER; note = 2'-deoxy-2'-fluorouridine-3'-phosphorothioate
  modified_base 3: mod_base = OTHER; note = 2'-O-methylcytidine-3'-phosphate
  modified_base 4: mod_base = OTHER; note = 2'-O-methyluridine-3'-phosphate
  modified_base 5: mod_base = OTHER; note = 2'-O-methylguanosine-3'-phosphate
  modified_base 6: mod_base = OTHER; note = 2'-deoxy-2'-fluoroguanosine-3'-phosphate
  modified_base 7: mod_base = OTHER; note = 2'-O-methyluridine-3'-phosphate
  modified_base 8: mod_base = OTHER; note = 2'-O-methylcytidine-3'-phosphate
  modified_base 9: mod_base = OTHER; note = 2'-O-methyladenosine-3'-phosphate
  modified_base 10: mod_base = OTHER; note = 2'-O-methylcytidine-3'-phosphate
  modified_base 11: mod_base = OTHER; note = 2'-O-methyladenosine-3'-phosphate
  modified_base 12: mod_base = OTHER; note = 2'-O-methyladenosine-3'-phosphate
  modified_base 13: mod_base = OTHER; note = 2'-O-methyladenosine-3'-phosphate
  modified_base 14: mod_base = OTHER; note = 2'-deoxy-2'-fluorocytidine-3'-phosphate
  modified_base 15: mod_base = OTHER; note = 2'-O-methyladenosine-3'-phosphate
  modified_base 16: mod_base = OTHER; note = 2'-deoxy-2'-fluoroadenosine-3'-phosphate
  modified_base 17: mod_base = OTHER; note = 2'-O-methylcytidine-3'-phosphate
  modified_base 18: mod_base = OTHER; note = 2'-O-methylcytidine-3'-phosphate
  modified_base 19: mod_base = OTHER; note = 2'-O-methyluridine-3'-phosphate
  modified_base 20: mod_base = OTHER; note = 2'-O-methyluridine-3'-phosphate
  modified_base 21: mod_base = OTHER; note = 2'-O-methyluridine-3'-phosphorothioate
  modified_base 22: mod_base = OTHER; note = 2'-O-methylcytidine-3'-phosphorothioate
  modified_base 23: mod_base = OTHER; note = 2'-O-methyluridine
ttctggtcacaaacaacctttct

SEQ ID NO: 12315 - RNA, 23 nt, synthetic construct
  source 1..23: mol_type = other RNA
  modified_base 1: mod_base = OTHER; note = 2'-O-methyluridine-3'-phosphorothioate 5'-(E)-Vinylphosphonate
  modified_base 2: mod_base = OTHER; note = 2'-deoxy-2'-fluorocytidine-3'-phosphorothioate
  modified_base 3: mod_base = OTHER; note = 2'-O-methyluridine-3'-phosphate
  modified_base 4: mod_base = OTHER; note = 2'-O-methyluridine-3'-phosphate
  modified_base 5: mod_base = OTHER; note = 2'-O-methylcytidine-3'-phosphate
  modified_base 6: mod_base = OTHER; note = 2'-deoxy-2'-fluorouridine-3'-phosphate
  modified_base 7: mod_base = OTHER; note = 2'-O-methylguanosine-3'-phosphate
  modified_base 8: mod_base = OTHER; note = 2'-O-methylguanosine-3'-phosphate
  modified_base 9: mod_base = OTHER; note = 2'-O-methyluridine-3'-phosphate
  modified_base 10: mod_base = OTHER; note = 2'-O-methylcytidine-3'-phosphate
  modified_base 11: mod_base = OTHER; note = 2'-O-methyladenosine-3'-phosphate
  modified_base 12: mod_base = OTHER; note = 2'-O-methylcytidine-3'-phosphate
  modified_base 13: mod_base = OTHER; note = 2'-O-methyladenosine-3'-phosphate
  modified_base 14: mod_base = OTHER; note = 2'-deoxy-2'-fluoroadenosine-3'-phosphate
  modified_base 15: mod_base = OTHER; note = 2'-O-methyladenosine-3'-phosphate
  modified_base 16: mod_base = OTHER; note = 2'-deoxy-2'-fluorocytidine-3'-phosphate
  modified_base 17: mod_base = OTHER; note = 2'-O-methyladenosine-3'-phosphate
  modified_base 18: mod_base = OTHER; note = 2'-O-methyladenosine-3'-phosphate
  modified_base 19: mod_base = OTHER; note = 2'-O-methylcytidine-3'-phosphate
  modified_base 20: mod_base = OTHER; note = 2'-O-methylcytidine-3'-phosphate
  modified_base 21: mod_base = OTHER; note = 2'-O-methyluridine-3'-phosphorothioate
  modified_base 22: mod_base = OTHER; note = 2'-O-methyluridine-3'-phosphorothioate
  modified_base 23: mod_base = OTHER; note = 2'-O-methyluridine
tcttctggtcacaaacaaccttt

SEQ ID NO: 12316 - RNA, 23 nt, synthetic construct
  source 1..23: mol_type = other RNA
  modified_base 1: mod_base = OTHER; note = 2'-O-methyluridine-3'-phosphorothioate 5'-(E)-Vinylphosphonate
  modified_base 2: mod_base = OTHER; note = 2'-deoxy-2'-fluoroadenosine-3'-phosphorothioate
  modified_base 3: mod_base = OTHER; note = 2'-O-methylcytidine-3'-phosphate
  modified_base 4: mod_base = OTHER; note = 2'-O-methyluridine-3'-phosphate
  modified_base 5: mod_base = OTHER; note = 2'-O-methyluridine-3'-phosphate
  modified_base 6: mod_base = OTHER; note = 2'-deoxy-2'-fluorocytidine-3'-phosphate
  modified_base 7: mod_base = OTHER; note = 2'-O-methyluridine-3'-phosphate
  modified_base 8: mod_base = OTHER; note = 2'-O-methylguanosine-3'-phosphate
  modified_base 9: mod_base = OTHER; note = 2'-O-methylguanosine-3'-phosphate
  modified_base 10: mod_base = OTHER; note = 2'-O-methyluridine-3'-phosphate
  modified_base 11: mod_base = OTHER; note = 2'-O-methylcytidine-3'-phosphate
  modified_base 12: mod_base = OTHER; note = 2'-O-methyladenosine-3'-phosphate
  modified_base 13: mod_base = OTHER; note = 2'-O-methylcytidine-3'-phosphate
  modified_base 14: mod_base = OTHER; note = 2'-deoxy-2'-fluoroadenosine-3'-phosphate
  modified_base 15: mod_base = OTHER; note = 2'-O-methyladenosine-3'-phosphate
  modified_base 16: mod_base = OTHER; note = 2'-deoxy-2'-fluoroadenosine-3'-phosphate
  modified_base 17: mod_base = OTHER; note = 2'-O-methylcytidine-3'-phosphate
  modified_base 18: mod_base = OTHER; note = 2'-O-methyladenosine-3'-phosphate
  modified_base 19: mod_base = OTHER; note = 2'-O-methyladenosine-3'-phosphate
  modified_base 20: mod_base = OTHER; note = 2'-O-methylcytidine-3'-phosphate
  modified_base 21: mod_base = OTHER; note = 2'-O-methylcytidine-3'-phosphorothioate
  modified_base 22: mod_base = OTHER; note = 2'-O-methyluridine-3'-phosphorothioate
  modified_base 23: mod_base = OTHER; note = 2'-O-methyluridine
tacttctggtcacaaacaacctt

SEQ ID NO: 12317 - RNA, 23 nt, synthetic construct
  source 1..23: mol_type = other RNA
  modified_base 1: mod_base = OTHER; note = 2'-O-methyluridine-3'-phosphorothioate 5'-(E)-Vinylphosphonate
  modified_base 2: mod_base = OTHER; note = 2'-deoxy-2'-fluoroadenosine-3'-phosphorothioate
  modified_base 3: mod_base = OTHER; note = 2'-O-methyladenosine-3'-phosphate
  modified_base 4: mod_base = OTHER; note = 2'-O-methylcytidine-3'-phosphate
  modified_base 5: mod_base = OTHER; note = 2'-O-methyluridine-3'-phosphate
  modified_base 6: mod_base = OTHER; note = 2'-deoxy-2'-fluorouridine-3'-phosphate
  modified_base 7: mod_base = OTHER; note = 2'-O-methylcytidine-3'-phosphate
  modified_base 8: mod_base = OTHER; note = 2'-O-methyluridine-3'-phosphate
  modified_base 9: mod_base = OTHER; note = 2'-O-methylguanosine-3'-phosphate
  modified_base 10: mod_base = OTHER; note = 2'-O-methylguanosine-3'-phosphate
  modified_base 11: mod_base = OTHER; note = 2'-O-methyluridine-3'-phosphate
  modified_base 12: mod_base = OTHER; note = 2'-O-methylcytidine-3'-phosphate
  modified_base 13: mod_base = OTHER; note = 2'-O-methyladenosine-3'-phosphate
  modified_base 14: mod_base = OTHER; note = 2'-deoxy-2'-fluorocytidine-3'-phosphate
  modified_base 15: mod_base = OTHER; note = 2'-O-methyladenosine-3'-phosphate
  modified_base 16: mod_base = OTHER; note = 2'-deoxy-2'-fluoroadenosine-3'-phosphate
  modified_base 17: mod_base = OTHER; note = 2'-O-methyladenosine-3'-phosphate
  modified_base 18: mod_base = OTHER; note = 2'-O-methylcytidine-3'-phosphate
  modified_base 19: mod_base = OTHER; note = 2'-O-methyladenosine-3'-phosphate
  modified_base 20: mod_base = OTHER; note = 2'-O-methyladenosine-3'-phosphate
  modified_base 21: mod_base = OTHER; note = 2'-O-methylcytidine-3'-phosphorothioate
  modified_base 22: mod_base = OTHER; note = 2'-O-methylcytidine-3'-phosphorothioate
  modified_base 23: mod_base = OTHER; note = 2'-O-methyluridine
taacttctggtcacaaacaacct

SEQ ID NO: 12318 - RNA, 23 nt, synthetic construct
  source 1..23: mol_type = other RNA
  modified_base 1: mod_base = OTHER; note = 2'-O-methyluridine-3'-phosphorothioate 5'-(E)-Vinylphosphonate
  modified_base 2: mod_base = OTHER; note = 2'-deoxy-2'-fluoroadenosine-3'-phosphorothioate
  modified_base 3: mod_base = OTHER; note = 2'-O-methyladenosine-3'-phosphate
  modified_base 4: mod_base = OTHER; note = 2'-O-methyladenosine-3'-phosphate
  modified_base 5: mod_base = OTHER; note = 2'-O-methylcytidine-3'-phosphate
  modified_base 6: mod_base = OTHER; note = 2'-deoxy-2'-fluorouridine-3'-phosphate
  modified_base 7: mod_base = OTHER; note = 2'-O-methyluridine-3'-phosphate
  modified_base 8: mod_base = OTHER; note = 2'-O-methylcytidine-3'-phosphate
  modified_base 9: mod_base = OTHER; note = 2'-O-methyluridine-3'-phosphate
  modified_base 10: mod_base = OTHER; note = 2'-O-methylguanosine-3'-phosphate
  modified_base 11: mod_base = OTHER; note = 2'-O-methylguanosine-3'-phosphate
  modified_base 12: mod_base = OTHER; note = 2'-O-methyluridine-3'-phosphate
  modified_base 13: mod_base = OTHER; note = 2'-O-methylcytidine-3'-phosphate
  modified_base 14: mod_base = OTHER; note = 2'-deoxy-2'-fluoroadenosine-3'-phosphate
  modified_base 15: mod_base = OTHER; note = 2'-O-methylcytidine-3'-phosphate
  modified_base 16: mod_base = OTHER; note = 2'-deoxy-2'-fluoroadenosine-3'-phosphate
  modified_base 17: mod_base = OTHER; note = 2'-O-methyladenosine-3'-phosphate
  modified_base 18: mod_base = OTHER; note = 2'-O-methyladenosine-3'-phosphate
  modified_base 19: mod_base = OTHER; note = 2'-O-methylcytidine-3'-phosphate
  modified_base 20: mod_base = OTHER; note = 2'-O-methyladenosine-3'-phosphate
  modified_base 21: mod_base = OTHER; note = 2'-O-methyladenosine-3'-phosphorothioate
  modified_base 22: mod_base = OTHER; note = 2'-O-methylcytidine-3'-phosphorothioate
  modified_base 23: mod_base = OTHER; note = 2'-O-methylcytidine
taaacttctggtcacaaacaacc

SEQ ID NO: 12319 - RNA, 23 nt, synthetic construct
  source 1..23: mol_type = other RNA
  modified_base 1: mod_base = OTHER; note = 2'-O-methyluridine-3'-phosphorothioate 5'-(E)-Vinylphosphonate
  modified_base 2: mod_base = OTHER; note = 2'-deoxy-2'-fluoroadenosine-3'-phosphorothioate
  modified_base 3: mod_base = OTHER; note = 2'-O-methyluridine-3'-phosphate
  modified_base 4: mod_base = OTHER; note = 2'-O-methyladenosine-3'-phosphate
  modified_base 5: mod_base = OTHER; note = 2'-O-methylcytidine-3'-phosphate
  modified_base 6: mod_base = OTHER; note = 2'-deoxy-2'-fluorouridine-3'-phosphate
  modified_base 7: mod_base = OTHER; note = 2'-O-methyluridine-3'-phosphate
  modified_base 8: mod_base = OTHER; note = 2'-O-methylguanosine-3'-phosphate
  modified_base 9: mod_base = OTHER; note = 2'-O-methylguanosine-3'-phosphate
  modified_base 10: mod_base = OTHER; note = 2'-O-methyluridine-3'-phosphate
  modified_base 11: mod_base = OTHER; note = 2'-O-methylcytidine-3'-phosphate
  modified_base 12: mod_base = OTHER; note = 2'-O-methylguanosine-3'-phosphate
  modified_base 13: mod_base = OTHER; note = 2'-O-methyladenosine-3'-phosphate
  modified_base 14: mod_base = OTHER; note = 2'-deoxy-2'-fluoroadenosine-3'-phosphate
  modified_base 15: mod_base = OTHER; note = 2'-O-methyladenosine-3'-phosphate
  modified_base 16: mod_base = OTHER; note = 2'-deoxy-2'-fluorocytidine-3'-phosphate
  modified_base 17: mod_base = OTHER; note = 2'-O-methyluridine-3'-phosphate
  modified_base 18: mod_base = OTHER; note = 2'-O-methyluridine-3'-phosphate
  modified_base 19: mod_base = OTHER; note = 2'-O-methylcytidine-3'-phosphate
  modified_base 20: mod_base = OTHER; note = 2'-O-methyluridine-3'-phosphate
  modified_base 21: mod_base = OTHER; note = 2'-O-methylguanosine-3'-phosphorothioate
  modified_base 22: mod_base = OTHER; note = 2'-O-methylguanosine-3'-phosphorothioate
  modified_base 23: mod_base = OTHER; note = 2'-O-methyluridine
tatacttggtcgaaacttctggt

SEQ ID NO: 12320 - RNA, 23 nt, synthetic construct
  source 1..23: mol_type = other RNA
  modified_base 1: mod_base = OTHER; note = 2'-O-methyluridine-3'-phosphorothioate 5'-(E)-Vinylphosphonate
  modified_base 2: mod_base = OTHER; note = 2'-deoxy-2'-fluorouridine-3'-phosphorothioate
  modified_base 3: mod_base = OTHER; note = 2'-O-methylguanosine-3'-phosphate
  modified_base 4: mod_base = OTHER; note = 2'-O-methylcytidine-3'-phosphate
  modified_base 5: mod_base = OTHER; note = 2'-O-methyluridine-3'-phosphate
  modified_base 6: mod_base = OTHER; note = 2'-deoxy-2'-fluorouridine-3'-phosphate
  modified_base 7: mod_base = OTHER; note = 2'-O-methylcytidine-3'-phosphate
  modified_base 8: mod_base = OTHER; note = 2'-O-methyladenosine-3'-phosphate
  modified_base 9: mod_base = OTHER; note = 2'-O-methylcytidine-3'-phosphate
  modified_base 10: mod_base = OTHER; note = 2'-O-methyladenosine-3'-phosphate
  modified_base 11: mod_base = OTHER; note = 2'-O-methyladenosine-3'-phosphate
  modified_base 12: mod_base = OTHER; note = 2'-O-methylcytidine-3'-phosphate
  modified_base 13: mod_base = OTHER; note = 2'-O-methyluridine-3'-phosphate
  modified_base 14: mod_base = OTHER; note = 2'-deoxy-2'-fluorouridine-3'-phosphate
  modified_base 15: mod_base = OTHER; note = 2'-O-methyluridine-3'-phosphate
  modified_base 16: mod_base = OTHER; note = 2'-deoxy-2'-fluoroguanosine-3'-phosphate
  modified_base 17: mod_base = OTHER; note = 2'-O-methylcytidine-3'-phosphate
  modified_base 18: mod_base = OTHER; note = 2'-O-methylcytidine-3'-phosphate
  modified_base 19: mod_base = OTHER; note = 2'-O-methyladenosine-3'-phosphate
  modified_base 20: mod_base = OTHER; note = 2'-O-methylcytidine-3'-phosphate
  modified_base 21: mod_base = OTHER; note = 2'-O-methyluridine-3'-phosphorothioate
  modified_base 22: mod_base = OTHER; note = 2'-O-methylguanosine-3'-phosphorothioate
  modified_base 23: mod_base = OTHER; note = 2'-O-methylguanosine
ttgcttcacaactttgccactgg

SEQ ID NO: 12321 - RNA, 23 nt, synthetic construct
  source 1..23: mol_type = other RNA
  modified_base 1: mod_base = OTHER; note = 2'-O-methyluridine-3'-phosphorothioate 5'-(E)-Vinylphosphonate
  modified_base 2: mod_base = OTHER; note = 2'-deoxy-2'-fluoroadenosine-3'-phosphorothioate
  modified_base 3: mod_base = OTHER; note = 2'-O-methylguanosine-3'-phosphate
  modified_base 4: mod_base = OTHER; note = 2'-O-methyluridine-3'-phosphate
  modified_base 5: mod_base = OTHER; note = 2'-O-methylguanosine-3'-phosphate
  modified_base 6: mod_base = OTHER; note = 2'-deoxy-2'-fluorocytidine-3'-phosphate
  modified_base 7: mod_base = OTHER; note = 2'-O-methyluridine-3'-phosphate
  modified_base 8: mod_base = OTHER; note = 2'-O-methyluridine-3'-phosphate
  modified_base 9: mod_base = OTHER; note = 2'-O-methylcytidine-3'-phosphate
  modified_base 10: mod_base = OTHER; note = 2'-O-methyladenosine-3'-phosphate
  modified_base 11: mod_base = OTHER; note = 2'-O-methylcytidine-3'-phosphate
  modified_base 12: mod_base = OTHER; note = 2'-O-methyladenosine-3'-phosphate
  modified_base 13: mod_base = OTHER; note = 2'-O-methyladenosine-3'-phosphate
  modified_base 14: mod_base = OTHER; note = 2'-deoxy-2'-fluorocytidine-3'-phosphate
  modified_base 15: mod_base = OTHER; note = 2'-O-methyluridine-3'-phosphate
  modified_base 16: mod_base = OTHER; note = 2'-deoxy-2'-fluorouridine-3'-phosphate
  modified_base 17: mod_base = OTHER; note = 2'-O-methyluridine-3'-phosphate
  modified_base 18: mod_base = OTHER; note = 2'-O-methylguanosine-3'-phosphate
  modified_base 19: mod_base = OTHER; note = 2'-O-methylcytidine-3'-phosphate
  modified_base 20: mod_base = OTHER; note = 2'-O-methylcytidine-3'-phosphate
  modified_base 21: mod_base = OTHER; note = 2'-O-methyladenosine-3'-phosphorothioate
  modified_base 22: mod_base = OTHER; note = 2'-O-methylcytidine-3'-phosphorothioate
  modified_base 23: mod_base = OTHER; note = 2'-O-methyluridine
tagtgcttcacaactttgccact

SEQ ID NO: 12322 - RNA, 23 nt, synthetic construct
  source 1..23: mol_type = other RNA
  modified_base 1: mod_base = OTHER; note = 2'-O-methyluridine-3'-phosphorothioate 5'-(E)-Vinylphosphonate
  modified_base 2: mod_base = OTHER; note = 2'-deoxy-2'-fluoroadenosine-3'-phosphorothioate
  modified_base 3: mod_base = OTHER; note = 2'-O-methyluridine-3'-phosphate
  modified_base 4: mod_base = OTHER; note = 2'-O-methyladenosine-3'-phosphate
  modified_base 5: mod_base = OTHER; note = 2'-O-methylcytidine-3'-phosphate
  modified_base 6: mod_base = OTHER; note = 2'-deoxy-2'-fluorocytidine-3'-phosphate
  modified_base 7: mod_base = OTHER; note = 2'-O-methyladenosine-3'-phosphate
  modified_base 8: mod_base = OTHER; note = 2'-O-methyladenosine-3'-phosphate
  modified_base 9: mod_base = OTHER; note = 2'-O-methylcytidine-3'-phosphate
  modified_base 10: mod_base = OTHER; note = 2'-O-methyladenosine-3'-phosphate
  modified_base 11: mod_base = OTHER; note = 2'-O-methylcytidine-3'-phosphate
  modified_base 12: mod_base = OTHER; note = 2'-O-methyluridine-3'-phosphate
  modified_base 13: mod_base = OTHER; note = 2'-O-methylcytidine-3'-phosphate
  modified_base 14: mod_base = OTHER; note = 2'-deoxy-2'-fluoroadenosine-3'-phosphate
  modified_base 15: mod_base = OTHER; note = 2'-O-methylcytidine-3'-phosphate
  modified_base 16: mod_base = OTHER; note = 2'-deoxy-2'-fluoroguanosine-3'-phosphate
  modified_base 17: mod_base = OTHER; note = 2'-O-methylcytidine-3'-phosphate
  modified_base 18: mod_base = OTHER; note = 2'-O-methyladenosine-3'-phosphate
  modified_base 19: mod_base = OTHER; note = 2'-O-methyluridine-3'-phosphate
  modified_base 20: mod_base = OTHER; note = 2'-O-methyluridine-3'-phosphate
  modified_base 21: mod_base = OTHER; note = 2'-O-methyladenosine-3'-phosphorothioate
  modified_base 22: mod_base = OTHER; note = 2'-O-methyluridine-3'-phosphorothioate
  modified_base 23: mod_base = OTHER; note = 2'-O-methyluridine
tataccaacactcacgcattatt

SEQ ID NO: 12323 - RNA, 23 nt, synthetic construct
  source 1..23: mol_type = other RNA
  modified_base 1: mod_base = OTHER; note = 2'-O-methyluridine-3'-phosphorothioate 5'-(E)-Vinylphosphonate
  modified_base 2: mod_base = OTHER; note = 2'-deoxy-2'-fluoroadenosine-3'-phosphorothioate
  modified_base 3: mod_base = OTHER; note = 2'-O-methyladenosine-3'-phosphate
  modified_base 4: mod_base = OTHER; note = 2'-O-methyluridine-3'-phosphate
  modified_base 5: mod_base = OTHER; note = 2'-O-methyladenosine-3'-phosphate
  modified_base 6: mod_base = OTHER; note = 2'-deoxy-2'-fluorocytidine-3'-phosphate
  modified_base 7: mod_base = OTHER; note = 2'-O-methylguanosine-3'-phosphate
  modified_base 8: mod_base = OTHER; note = 2'-O-methyladenosine-3'-phosphate
  modified_base 9: mod_base = OTHER; note = 2'-O-methyladenosine-3'-phosphate
  modified_base 10: mod_base = OTHER; note = 2'-O-methylguanosine-3'-phosphate
  modified_base 11: mod_base = OTHER; note = 2'-O-methyladenosine-3'-phosphate
  modified_base 12: mod_base = OTHER; note = 2'-O-methylguanosine-3'-phosphate
  modified_base 13: mod_base = OTHER; note = 2'-O-methylcytidine-3'-phosphate
  modified_base 14: mod_base = OTHER; note = 2'-deoxy-2'-fluoroadenosine-3'-phosphate
  modified_base 15: mod_base = OTHER; note = 2'-O-methylguanosine-3'-phosphate
  modified_base 16: mod_base = OTHER; note = 2'-deoxy-2'-fluorouridine-3'-phosphate
  modified_base 17: mod_base = OTHER; note = 2'-O-methyluridine-3'-phosphate
  modified_base 18: mod_base = OTHER; note = 2'-O-methyladenosine-3'-phosphate
  modified_base 19: mod_base = OTHER; note = 2'-O-methylguanosine-3'-phosphate
  modified_base 20: mod_base = OTHER; note = 2'-O-methylguanosine-3'-phosphate
  modified_base 21: mod_base = OTHER; note = 2'-O-methylcytidine-3'-phosphorothioate
  modified_base 22: mod_base = OTHER; note = 2'-O-methylguanosine-3'-phosphorothioate
  modified_base 23: mod_base = OTHER; note = 2'-O-methylguanosine
taatacgaagagcagttaggcgg

SEQ ID NO: 12324 - RNA, 23 nt, synthetic construct
  source 1..23: mol_type = other RNA
  modified_base 1: mod_base = OTHER; note = 2'-O-methyluridine-3'-phosphorothioate 5'-(E)-Vinylphosphonate
  modified_base 2: mod_base = OTHER; note = 2'-deoxy-2'-fluorouridine-3'-phosphorothioate
  modified_base 3: mod_base = OTHER; note = 2'-O-methyladenosine-3'-phosphate
  modified_base 4: mod_base = OTHER; note = 2'-O-methyladenosine-3'-phosphate
  modified_base 5: mod_base = OTHER; note = 2'-O-methyluridine-3'-phosphate
  modified_base 6: mod_base = OTHER; note = 2'-deoxy-2'-fluoroadenosine-3'-phosphate
  modified_base 7: mod_base = OTHER; note = 2'-O-methylcytidine-3'-phosphate
  modified_base 8: mod_base = OTHER; note = 2'-O-methylguanosine-3'-phosphate
  modified_base 9: mod_base = OTHER; note = 2'-O-methyladenosine-3'-phosphate
  modified_base 10: mod_base = OTHER; note = 2'-O-methyladenosine-3'-phosphate
  modified_base 11: mod_base = OTHER; note = 2'-O-methylguanosine-3'-phosphate
  modified_base 12: mod_base = OTHER; note = 2'-O-methyladenosine-3'-phosphate
  modified_base 13: mod_base = OTHER; note = 2'-O-methylguanosine-3'-phosphate
  modified_base 14: mod_base = OTHER; note = 2'-deoxy-2'-fluorocytidine-3'-phosphate
  modified_base 15: mod_base = OTHER; note = 2'-O-methyladenosine-3'-phosphate
  modified_base 16: mod_base = OTHER; note = 2'-deoxy-2'-fluoroguanosine-3'-phosphate
  modified_base 17: mod_base = OTHER; note = 2'-O-methyluridine-3'-phosphate
  modified_base 18: mod_base = OTHER; note = 2'-O-methyluridine-3'-phosphate
  modified_base 19: mod_base = OTHER; note = 2'-O-methyladenosine-3'-phosphate
  modified_base 20: mod_base = OTHER; note = 2'-O-methylguanosine-3'-phosphate
  modified_base 21: mod_base = OTHER; note = 2'-O-methylguanosine-3'-phosphorothioate
  modified_base 22: mod_base = OTHER; note = 2'-O-methylcytidine-3'-phosphorothioate
  modified_base 23: mod_base = OTHER; note = 2'-O-methylguanosine
ttaatacgaagagcagttaggcg

SEQ ID NO: 12325 - RNA, 23 nt, synthetic construct
  source 1..23: mol_type = other RNA
  modified_base 1: mod_base = OTHER; note = 2'-O-methyluridine-3'-phosphorothioate 5'-(E)-Vinylphosphonate
  modified_base 2: mod_base = OTHER; note = 2'-deoxy-2'-fluorouridine-3'-phosphorothioate
  modified_base 3: mod_base = OTHER; note = 2'-O-methyluridine-3'-phosphate
  modified_base 4: mod_base = OTHER; note = 2'-O-methyladenosine-3'-phosphate
  modified_base 5: mod_base = OTHER; note = 2'-O-methyladenosine-3'-phosphate
  modified_base 6: mod_base = OTHER; note = 2'-deoxy-2'-fluorouridine-3'-phosphate
  modified_base 7: mod_base = OTHER; note = 2'-O-methyladenosine-3'-phosphate
  modified_base 8: mod_base = OTHER; note = 2'-O-methylcytidine-3'-phosphate
  modified_base 9: mod_base = OTHER; note = 2'-O-methylguanosine-3'-phosphate
  modified_base 10: mod_base = OTHER; note = 2'-O-methyladenosine-3'-phosphate
  modified_base 11: mod_base = OTHER; note = 2'-O-methyladenosine-3'-phosphate
  modified_base 12: mod_base = OTHER; note = 2'-O-methylguanosine-3'-phosphate
  modified_base 13: mod_base = OTHER; note = 2'-O-methyladenosine-3'-phosphate
  modified_base 14: mod_base = OTHER; note = 2'-deoxy-2'-fluoroguanosine-3'-phosphate
  modified_base 15: mod_base = OTHER; note = 2'-O-methylcytidine-3'-phosphate
  modified_base 16: mod_base = OTHER; note = 2'-deoxy-2'-fluoroadenosine-3'-phosphate
  modified_base 17: mod_base = OTHER; note = 2'-O-methylguanosine-3'-phosphate
  modified_base 18: mod_base = OTHER; note = 2'-O-methyluridine-3'-phosphate
  modified_base 19: mod_base = OTHER; note = 2'-O-methyluridine-3'-phosphate
  modified_base 20: mod_base = OTHER; note = 2'-O-methyladenosine-3'-phosphate
  modified_base 21: mod_base = OTHER; note = 2'-O-methylguanosine-3'-phosphorothioate
  modified_base 22: mod_base = OTHER; note = 2'-O-methylguanosine-3'-phosphorothioate
  modified_base 23: mod_base = OTHER; note = 2'-O-methylcytidine
tttaatacgaagagcagttaggc

SEQ ID NO: 12326 - RNA, 23 nt, synthetic construct
  source 1..23: mol_type = other RNA
  modified_base 1: mod_base = OTHER; note = 2'-O-methyluridine-3'-phosphorothioate 5'-(E)-Vinylphosphonate
  modified_base 2: mod_base = OTHER; note = 2'-deoxy-2'-fluorouridine-3'-phosphorothioate
  modified_base 3: mod_base = OTHER; note = 2'-O-methyluridine-3'-phosphate
  modified_base 4: mod_base = OTHER; note = 2'-O-methylcytidine-3'-phosphate
  modified_base 5: mod_base = OTHER; note = 2'-O-methyluridine-3'-phosphate
  modified_base 6: mod_base = OTHER; note = 2'-deoxy-2'-fluorouridine-3'-phosphate
  modified_base 7: mod_base = OTHER; note = 2'-O-methyladenosine-3'-phosphate
  modified_base 8: mod_base = OTHER; note = 2'-O-methyladenosine-3'-phosphate
  modified_base 9: mod_base = OTHER; note = 2'-O-methyluridine-3'-phosphate
  modified_base 10: mod_base = OTHER; note = 2'-O-methyladenosine-3'-phosphate
  modified_base 11: mod_base = OTHER; note = 2'-O-methylcytidine-3'-phosphate
  modified_base 12: mod_base = OTHER; note = 2'-O-methylguanosine-3'-phosphate
  modified_base 13: mod_base = OTHER; note = 2'-O-methyladenosine-3'-phosphate
  modified_base 14: mod_base = OTHER; note = 2'-deoxy-2'-fluoroadenosine-3'-phosphate
  modified_base 15: mod_base = OTHER; note = 2'-O-methylguanosine-3'-phosphate
  modified_base 16: mod_base = OTHER; note = 2'-deoxy-2'-fluoroadenosine-3'-phosphate
  modified_base 17: mod_base = OTHER; note = 2'-O-methylguanosine-3'-phosphate
  modified_base 18: mod_base = OTHER; note = 2'-O-methylcytidine-3'-phosphate
  modified_base 19: mod_base = OTHER; note = 2'-O-methyladenosine-3'-phosphate
  modified_base 20: mod_base = OTHER; note = 2'-O-methylguanosine-3'-phosphate
  modified_base 21: mod_base = OTHER; note = 2'-O-methyluridine-3'-phosphorothioate
  modified_base 22: mod_base = OTHER; note = 2'-O-methyluridine-3'-phosphorothioate
  modified_base 23: mod_base = OTHER; note = 2'-O-methyladenosine
tttcttaatacgaagagcagtta

SEQ ID NO: 12327 - RNA, 23 nt, synthetic construct
  source 1..23: mol_type = other RNA
  modified_base 1: mod_base = OTHER; note = 2'-O-methyluridine-3'-phosphorothioate 5'-(E)-Vinylphosphonate
  modified_base 2: mod_base = OTHER; note = 2'-deoxy-2'-fluoroguanosine-3'-phosphorothioate
  modified_base 3: mod_base = OTHER; note = 2'-O-methyluridine-3'-phosphate
  modified_base 4: mod_base = OTHER; note = 2'-O-methylcytidine-3'-phosphate
  modified_base 5: mod_base = OTHER; note = 2'-O-methyluridine-3'-phosphate
  modified_base 6: mod_base = OTHER; note = 2'-deoxy-2'-fluorouridine-3'-phosphate
  modified_base 7: mod_base = OTHER; note = 2'-O-methylcytidine-3'-phosphate
  modified_base 8: mod_base = OTHER; note = 2'-O-methyluridine-3'-phosphate
  modified_base 9: mod_base = OTHER; note = 2'-O-methyluridine-3'-phosphate
  modified_base 10: mod_base = OTHER; note = 2'-O-methyladenosine-3'-phosphate
  modified_base 11: mod_base = OTHER; note = 2'-O-methyladenosine-3'-phosphate
  modified_base 12: mod_base = OTHER; note = 2'-O-methyluridine-3'-phosphate
  modified_base 13: mod_base = OTHER; note = 2'-O-methyladenosine-3'-phosphate
  modified_base 14: mod_base = OTHER; note = 2'-deoxy-2'-fluorocytidine-3'-phosphate
  modified_base 15: mod_base = OTHER; note = 2'-O-methylguanosine-3'-phosphate
  modified_base 16: mod_base = OTHER; note = 2'-deoxy-2'-fluoroadenosine-3'-phosphate
  modified_base 17: mod_base = OTHER; note = 2'-O-methyladenosine-3'-phosphate
  modified_base 18: mod_base = OTHER; note = 2'-O-methylguanosine-3'-phosphate
  modified_base 19: mod_base = OTHER; note = 2'-O-methyladenosine-3'-phosphate
  modified_base 20: mod_base = OTHER; note = 2'-O-methylguanosine-3'-phosphate
  modified_base 21: mod_base = OTHER; note = 2'-O-methylcytidine-3'-phosphorothioate
  modified_base 22: mod_base = OTHER; note = 2'-O-methyladenosine-3'-phosphorothioate
  modified_base 23: mod_base = OTHER; note = 2'-O-methylguanosine
tgtcttcttaatacgaagagcag

SEQ ID NO: 12328 - RNA, 23 nt, synthetic construct
  source 1..23: mol_type = other RNA
  modified_base 1: mod_base = OTHER; note = 2'-O-methyluridine-3'-phosphorothioate 5'-(E)-Vinylphosphonate
  modified_base 2: mod_base = OTHER; note = 2'-deoxy-2'-fluoroadenosine-3'-phosphorothioate
  modified_base 3: mod_base = OTHER; note = 2'-O-methylguanosine-3'-phosphate
  modified_base 4: mod_base = OTHER; note = 2'-O-methyluridine-3'-phosphate
  modified_base 5: mod_base = OTHER; note = 2'-O-methylcytidine-3'-phosphate
  modified_base 6: mod_base = OTHER; note = 2'-deoxy-2'-fluorouridine-3'-phosphate
  modified_base 7: mod_base = OTHER; note = 2'-O-methyluridine-3'-phosphate
  modified_base 8: mod_base = OTHER; note = 2'-O-methylcytidine-3'-phosphate
  modified_base 9: mod_base = OTHER; note = 2'-O-methyluridine-3'-phosphate
  modified_base 10: mod_base = OTHER; note = 2'-O-methyluridine-3'-phosphate
  modified_base 11: mod_base = OTHER; note = 2'-O-methyladenosine-3'-phosphate
  modified_base 12: mod_base = OTHER; note = 2'-O-methyladenosine-3'-phosphate
  modified_base 13: mod_base = OTHER; note = 2'-O-methyluridine-3'-phosphate
  modified_base 14: mod_base = OTHER; note = 2'-deoxy-2'-fluoroadenosine-3'-phosphate
  modified_base 15: mod_base = OTHER; note = 2'-O-methylcytidine-3'-phosphate
  modified_base 16: mod_base = OTHER; note = 2'-deoxy-2'-fluoroguanosine-3'-phosphate
  modified_base 17: mod_base = OTHER; note = 2'-O-methyladenosine-3'-phosphate
  modified_base 18: mod_base = OTHER; note = 2'-O-methyladenosine-3'-phosphate
  modified_base 19: mod_base = OTHER; note = 2'-O-methylguanosine-3'-phosphate
  modified_base 20: mod_base = OTHER; note = 2'-O-methyladenosine-3'-phosphate
  modified_base 21: mod_base = OTHER; note = 2'-O-methylguanosine-3'-phosphorothioate
  modified_base 22: mod_base = OTHER; note = 2'-O-methylcytidine-3'-phosphorothioate
  modified_base 23: mod_base = OTHER; note = 2'-O-methyladenosine
tagtcttcttaatacgaagagca

SEQ ID NO: 12329 - RNA, 23 nt, synthetic construct
  source 1..23: mol_type = other RNA
  modified_base 1: mod_base = OTHER; note = 2'-O-methyluridine-3'-phosphorothioate 5'-(E)-Vinylphosphonate
  modified_base 2: mod_base = OTHER; note = 2'-deoxy-2'-fluorouridine-3'-phosphorothioate
  modified_base 3: mod_base = OTHER; note = 2'-O-methylguanosine-3'-phosphate
  modified_base 4: mod_base = OTHER; note = 2'-O-methyladenosine-3'-phosphate
  modified_base 5: mod_base = OTHER; note = 2'-O-methylcytidine-3'-phosphate
  modified_base 6: mod_base = OTHER; note = 2'-deoxy-2'-fluoroadenosine-3'-phosphate
  modified_base 7: mod_base = OTHER; note = 2'-O-methylcytidine-3'-phosphate
  modified_base 8: mod_base = OTHER; note = 2'-O-methyladenosine-3'-phosphate
  modified_base 9: mod_base = OTHER; note = 2'-O-methyladenosine-3'-phosphate
  modified_base 10: mod_base = OTHER; note = 2'-O-methyladenosine-3'-phosphate
  modified_base 11: mod_base = OTHER; note = 2'-O-methylguanosine-3'-phosphate
  modified_base 12: mod_base = OTHER; note = 2'-O-methyluridine-3'-phosphate
  modified_base 13: mod_base = OTHER; note = 2'-O-methyluridine-3'-phosphate
  modified_base 14: mod_base = OTHER; note = 2'-deoxy-2'-fluoroguanosine-3'-phosphate
  modified_base 15: mod_base = OTHER; note = 2'-O-methyladenosine-3'-phosphate
  modified_base 16: mod_base = OTHER; note = 2'-deoxy-2'-fluoroguanosine-3'-phosphate
  modified_base 17: mod_base = OTHER; note = 2'-O-methyladenosine-3'-phosphate
  modified_base 18: mod_base = OTHER; note = 2'-O-methyluridine-3'-phosphate
  modified_base 19: mod_base = OTHER; note = 2'-O-methyladenosine-3'-phosphate
  modified_base 20: mod_base = OTHER; note = 2'-O-methyluridine-3'-phosphate
  modified_base 21: mod_base = OTHER; note = 2'-O-methyladenosine-3'-phosphorothioate
  modified_base 22: mod_base = OTHER; note = 2'-O-methylguanosine-3'-phosphorothioate
  modified_base 23: mod_base = OTHER; note = 2'-O-methyluridine
ttgacacaaagttgagatatagt

SEQ ID NO: 12330 - RNA, 23 nt, synthetic construct
  source 1..23: mol_type = other RNA
  modified_base 1: mod_base = OTHER; note = 2'-O-methyluridine-3'-phosphorothioate 5'-(E)-Vinylphosphonate
  modified_base 2: mod_base = OTHER; note = 2'-deoxy-2'-fluorouridine-3'-phosphorothioate
  modified_base 3: mod_base = OTHER; note = 2'-O-methyluridine-3'-phosphate
  modified_base 4: mod_base = OTHER; note = 2'-O-methylguanosine-3'-phosphate
  modified_base 5: mod_base = OTHER; note = 2'-O-methyladenosine-3'-phosphate
  modified_base 6: mod_base = OTHER; note = 2'-deoxy-2'-fluorocytidine-3'-phosphate
  modified_base 7: mod_base = OTHER; note = 2'-O-methyladenosine-3'-phosphate
  modified_base 8: mod_base = OTHER; note = 2'-O-methylcytidine-3'-phosphate
  modified_base 9: mod_base = OTHER; note = 2'-O-methyladenosine-3'-phosphate
  modified_base 10: mod_base = OTHER; note = 2'-O-methyladenosine-3'-phosphate
  modified_base 11: mod_base = OTHER; note = 2'-O-methyladenosine-3'-phosphate
  modified_base 12: mod_base = OTHER; note = 2'-O-methylguanosine-3'-phosphate
  modified_base 13: mod_base = OTHER; note = 2'-O-methyluridine-3'-phosphate
  modified_base 14: mod_base = OTHER; note = 2'-deoxy-2'-fluorouridine-3'-phosphate
  modified_base 15: mod_base = OTHER; note = 2'-O-methylguanosine-3'-phosphate
  modified_base 16: mod_base = OTHER; note = 2'-deoxy-2'-fluoroadenosine-3'-phosphate
  modified_base 17: mod_base = OTHER; note = 2'-O-methylguanosine-3'-phosphate
  modified_base 18: mod_base = OTHER; note = 2'-O-methyladenosine-3'-phosphate
  modified_base 19: mod_base = OTHER; note = 2'-O-methyluridine-3'-phosphate
  modified_base 20: mod_base = OTHER; note = 2'-O-methyladenosine-3'-phosphate
  modified_base 21: mod_base = OTHER; note = 2'-O-methyluridine-3'-phosphorothioate
  modified_base 22: mod_base = OTHER; note = 2'-O-methyladenosine-3'-phosphorothioate
  modified_base 23: mod_base = OTHER; note = 2'-O-methylguanosine
tttgacacaaagttgagatatag

SEQ ID NO: 12331 - RNA, 23 nt, synthetic construct
  source 1..23: mol_type = other RNA
  modified_base 1: mod_base = OTHER; note = 2'-O-methyluridine-3'-phosphorothioate 5'-(E)-Vinylphosphonate
  modified_base 2: mod_base = OTHER; note = 2'-deoxy-2'-fluorouridine-3'-phosphorothioate
  modified_base 3: mod_base = OTHER; note = 2'-O-methyluridine-3'-phosphate
  modified_base 4: mod_base = OTHER; note = 2'-O-methyluridine-3'-phosphate
  modified_base 5: mod_base = OTHER; note = 2'-O-methylguanosine-3'-phosphate
  modified_base 6: mod_base = OTHER; note = 2'-deoxy-2'-fluoroadenosine-3'-phosphate
  modified_base 7: mod_base = OTHER; note = 2'-O-methylcytidine-3'-phosphate
  modified_base 8: mod_base = OTHER; note = 2'-O-methyladenosine-3'-phosphate
  modified_base 9: mod_base = OTHER; note = 2'-O-methylcytidine-3'-phosphate
  modified_base 10: mod_base = OTHER; note = 2'-O-methyladenosine-3'-phosphate
  modified_base 11: mod_base = OTHER; note = 2'-O-methyladenosine-3'-phosphate
  modified_base 12: mod_base = OTHER; note = 2'-O-methyladenosine-3'-phosphate
  modified_base 13: mod_base = OTHER; note = 2'-O-methylguanosine-3'-phosphate
  modified_base 14: mod_base = OTHER; note = 2'-deoxy-2'-fluorouridine-3'-phosphate
  modified_base 15: mod_base = OTHER; note = 2'-O-methyluridine-3'-phosphate
  modified_base 16: mod_base = OTHER; note = 2'-deoxy-2'-fluoroguanosine-3'-phosphate
  modified_base 17: mod_base = OTHER; note = 2'-O-methyladenosine-3'-phosphate
  modified_base 18: mod_base = OTHER; note = 2'-O-methylguanosine-3'-phosphate
  modified_base 19: mod_base = OTHER; note = 2'-O-methyladenosine-3'-phosphate
  modified_base 20: mod_base = OTHER; note = 2'-O-methyluridine-3'-phosphate
  modified_base 21: mod_base = OTHER; note = 2'-O-methyladenosine-3'-phosphorothioate
  modified_base 22: mod_base = OTHER; note = 2'-O-methyluridine-3'-phosphorothioate
  modified_base 23: mod_base = OTHER; note = 2'-O-methyladenosine
ttttgacacaaagttgagatata

SEQ ID NO: 12332 - RNA, 23 nt, synthetic construct
  source 1..23: mol_type = other RNA
  modified_base 1: mod_base = OTHER; note = 2'-O-methyluridine-3'-phosphorothioate 5'-(E)-Vinylphosphonate
  modified_base 2: mod_base = OTHER; note = 2'-deoxy-2'-fluorouridine-3'-phosphorothioate
  modified_base 3: mod_base = OTHER; note = 2'-O-methyluridine-3'-phosphate
  modified_base 4: mod_base = OTHER; note = 2'-O-methylcytidine-3'-phosphate
  modified_base 5: mod_base = OTHER; note = 2'-O-methyluridine-3'-phosphate
  modified_base 6: mod_base = OTHER; note = 2'-deoxy-2'-fluorouridine-3'-phosphate
  modified_base 7: mod_base = OTHER; note = 2'-O-methyluridine-3'-phosphate
  modified_base 8: mod_base = OTHER; note = 2'-O-methylguanosine-3'-phosphate
  modified_base 9: mod_base = OTHER; note = 2'-O-methyladenosine-3'-phosphate
  modified_base 10: mod_base = OTHER; note = 2'-O-methylcytidine-3'-phosphate
  modified_base 11: mod_base = OTHER; note = 2'-O-methyladenosine-3'-phosphate
  modified_base 12: mod_base = OTHER; note = 2'-O-methylcytidine-3'-phosphate
  modified_base 13: mod_base = OTHER; note = 2'-O-methyladenosine-3'-phosphate
  modified_base 14: mod_base = OTHER; note = 2'-deoxy-2'-fluoroadenosine-3'-phosphate
  modified_base 15: mod_base = OTHER; note = 2'-O-methyladenosine-3'-phosphate
  modified_base 16: mod_base = OTHER; note = 2'-deoxy-2'-fluoroguanosine-3'-phosphate
  modified_base 17: mod_base = OTHER; note = 2'-O-methyluridine-3'-phosphate
  modified_base 18: mod_base = OTHER; note = 2'-O-methyluridine-3'-phosphate
  modified_base 19: mod_base = OTHER; note = 2'-O-methylguanosine-3'-phosphate
  modified_base 20: mod_base = OTHER; note = 2'-O-methyladenosine-3'-phosphate
  modified_base 21: mod_base = OTHER; note = 2'-O-methylguanosine-3'-phosphorothioate
  modified_base 22: mod_base = OTHER; note = 2'-O-methyladenosine-3'-phosphorothioate
  modified_base 23: mod_base = OTHER; note = 2'-O-methyluridine
tttctttgacacaaagttgagat

SEQ ID NO: 12333 - RNA, 23 nt, synthetic construct
  source 1..23: mol_type = other RNA
  modified_base 1: mod_base = OTHER; note = 2'-O-methyluridine-3'-phosphorothioate 5'-(E)-Vinylphosphonate
  modified_base 2: mod_base = OTHER; note = 2'-deoxy-2'-fluorouridine-3'-phosphorothioate
  modified_base 3: mod_base = OTHER; note = 2'-O-methyladenosine-3'-phosphate
  modified_base 4: mod_base = OTHER; note = 2'-O-methyladenosine-3'-phosphate
  modified_base 5: mod_base = OTHER; note = 2'-O-methyluridine-3'-phosphate
  modified_base 6: mod_base = OTHER; note = 2'-deoxy-2'-fluorouridine-3'-phosphate
  modified_base 7: mod_base = OTHER; note = 2'-O-methyladenosine-3'-phosphate
  modified_base 8: mod_base = OTHER; note = 2'-O-methyluridine-3'-phosphate
  modified_base 9: mod_base = OTHER; note = 2'-O-methylcytidine-3'-phosphate
  modified_base 10: mod_base = OTHER; note = 2'-O-methyladenosine-3'-phosphate
  modified_base 11: mod_base = OTHER; note = 2'-O-methyluridine-3'-phosphate
  modified_base 12: mod_base = OTHER; note = 2'-O-methylcytidine-3'-phosphate
  modified_base 13: mod_base = OTHER; note = 2'-O-methyladenosine-3'-phosphate
  modified_base 14: mod_base = OTHER; note = 2'-deoxy-2'-fluorouridine-3'-phosphate
  modified_base 15: mod_base = OTHER; note = 2'-O-methyluridine-3'-phosphate
  modified_base 16: mod_base = OTHER; note = 2'-deoxy-2'-fluoroadenosine-3'-phosphate
  modified_base 17: mod_base = OTHER; note = 2'-O-methylguanosine-3'-phosphate
  modified_base 18: mod_base = OTHER; note = 2'-O-methylguanosine-3'-phosphate
  modified_base 19: mod_base = OTHER; note = 2'-O-methylcytidine-3'-phosphate
  modified_base 20: mod_base = OTHER; note = 2'-O-methyluridine-3'-phosphate
  modified_base 21: mod_base = OTHER; note = 2'-O-methyluridine-3'-phosphorothioate
  modified_base 22: mod_base = OTHER; note = 2'-O-methyluridine-3'-phosphorothioate
  modified_base 23: mod_base = OTHER; note = 2'-O-methylguanosine
ttaattatcatcattaggctttg

SEQ ID NO: 12334 - RNA, 23 nt, synthetic construct
  source 1..23: mol_type = other RNA
  modified_base 1: mod_base = OTHER; note = 2'-O-methyluridine-3'-phosphorothioate 5'-(E)-Vinylphosphonate
  modified_base 2: mod_base = OTHER; note = 2'-deoxy-2'-fluoroadenosine-3'-phosphorothioate
  modified_base 3: mod_base = OTHER; note = 2'-O-methyladenosine-3'-phosphate
  modified_base 4: mod_base = OTHER; note = 2'-O-methylguanosine-3'-phosphate
  modified_base 5: mod_base = OTHER; note = 2'-O-methyladenosine-3'-phosphate
  modified_base 6: mod_base = OTHER; note = 2'-deoxy-2'-fluoroadenosine-3'-phosphate
  modified_base 7: mod_base = OTHER; note = 2'-O-methyladenosine-3'-phosphate
  modified_base 8: mod_base = OTHER; note = 2'-O-methylguanosine-3'-phosphate
  modified_base 9: mod_base = OTHER; note = 2'-O-methylcytidine-3'-phosphate
  modified_base 10: mod_base = OTHER; note = 2'-O-methyluridine-3'-phosphate
  modified_base 11: mod_base = OTHER; note = 2'-O-methyladenosine-3'-phosphate
  modified_base 12: mod_base = OTHER; note = 2'-O-methyluridine-3'-phosphate
  modified_base 13: mod_base = OTHER; note = 2'-O-methylguanosine-3'-phosphate
  modified_base 14: mod_base = OTHER; note = 2'-deoxy-2'-fluoroadenosine-3'-phosphate
  modified_base 15: mod_base = OTHER; note = 2'-O-methylguanosine-3'-phosphate
  modified_base 16: mod_base = OTHER; note = 2'-deoxy-2'-fluoroadenosine-3'-phosphate
  modified_base 17: mod_base = OTHER; note = 2'-O-methylguanosine-3'-phosphate
  modified_base 18: mod_base = OTHER; note = 2'-O-methyladenosine-3'-phosphate
  modified_base 19: mod_base = OTHER; note = 2'-O-methyluridine-3'-phosphate
  modified_base 20: mod_base = OTHER; note = 2'-O-methyluridine-3'-phosphate
  modified_base 21: mod_base = OTHER; note = 2'-O-methyluridine-3'-phosphorothioate
  modified_base 22: mod_base = OTHER; note = 2'-O-methylcytidine-3'-phosphorothioate
  modified_base 23: mod_base = OTHER; note = 2'-O-methyluridine
taagaaagctatgagagatttct

SEQ ID NO: 12335 - RNA, 23 nt, synthetic construct
  source 1..23: mol_type = other RNA
  modified_base 1: mod_base = OTHER; note = 2'-O-methyluridine-3'-phosphorothioate 5'-(E)-Vinylphosphonate
  modified_base 2: mod_base = OTHER; note = 2'-deoxy-2'-fluorouridine-3'-phosphorothioate
  modified_base 3: mod_base = OTHER; note = 2'-O-methylcytidine-3'-phosphate
  modified_base 4: mod_base = OTHER; note = 2'-O-methyladenosine-3'-phosphate
  modified_base 5: mod_base = OTHER; note = 2'-O-methyluridine-3'-phosphate
  modified_base 6: mod_base = OTHER; note = 2'-deoxy-2'-fluorocytidine-3'-phosphate
  modified_base 7: mod_base = OTHER; note = 2'-O-methyladenosine-3'-phosphate
  modified_base 8: mod_base = OTHER; note = 2'-O-methyluridine-3'-phosphate
  modified_base 9: mod_base = OTHER; note = 2'-O-methyluridine-3'-phosphate
  modified_base 10: mod_base = OTHER; note = 2'-O-methyladenosine-3'-phosphate
  modified_base 11: mod_base = OTHER; note = 2'-O-methylguanosine-3'-phosphate
  modified_base 12: mod_base = OTHER; note = 2'-O-methylguanosine-3'-phosphate
  modified_base 13: mod_base = OTHER; note = 2'-O-methylcytidine-3'-phosphate
  modified_base 14: mod_base = OTHER; note = 2'-deoxy-2'-fluorouridine-3'-phosphate
  modified_base 15: mod_base = OTHER; note = 2'-O-methyluridine-3'-phosphate
  modified_base 16: mod_base = OTHER; note = 2'-deoxy-2'-fluorouridine-3'-phosphate
  modified_base 17: mod_base = OTHER; note = 2'-O-methylguanosine-3'-phosphate
  modified_base 18: mod_base = OTHER; note = 2'-O-methylcytidine-3'-phosphate
  modified_base 19: mod_base = OTHER; note = 2'-O-methyladenosine-3'-phosphate
  modified_base 20: mod_base = OTHER; note = 2'-O-methylguanosine-3'-phosphate
  modified_base 21: mod_base = OTHER; note = 2'-O-methyluridine-3'-phosphorothioate
  modified_base 22: mod_base = OTHER; note = 2'-O-methylcytidine-3'-phosphorothioate
  modified_base 23: mod_base = OTHER; note = 2'-O-methyluridine
ttcatcattaggctttgcagtct

SEQ ID NO: 12336 - RNA, 23 nt, synthetic construct
  source 1..23: mol_type = other RNA
  modified_base 1: mod_base = OTHER; note = 2'-O-methyluridine-3'-phosphorothioate 5'-(E)-Vinylphosphonate
  modified_base 2: mod_base = OTHER; note = 2'-deoxy-2'-fluoroadenosine-3'-phosphorothioate
  modified_base 3: mod_base = OTHER; note = 2'-O-methyluridine-3'-phosphate
  modified_base 4: mod_base = OTHER; note = 2'-O-methylcytidine-3'-phosphate
  modified_base 5: mod_base = OTHER; note = 2'-O-methyladenosine-3'-phosphate
  modified_base 6: mod_base = OTHER; note = 2'-deoxy-2'-fluorouridine-3'-phosphate
  modified_base 7: mod_base = OTHER; note = 2'-O-methylcytidine-3'-phosphate
  modified_base 8: mod_base = OTHER; note = 2'-O-methyladenosine-3'-phosphate
  modified_base 9: mod_base = OTHER; note = 2'-O-methyluridine-3'-phosphate
  modified_base 10: mod_base = OTHER; note = 2'-O-methyluridine-3'-phosphate
  modified_base 11: mod_base = OTHER; note = 2'-O-methyladenosine-3'-phosphate
  modified_base 12: mod_base = OTHER; note = 2'-O-methylguanosine-3'-phosphate
  modified_base 13: mod_base = OTHER; note = 2'-O-methylguanosine-3'-phosphate
  modified_base 14: mod_base = OTHER; note = 2'-deoxy-2'-fluorocytidine-3'-phosphate
  modified_base 15: mod_base = OTHER; note = 2'-O-methyluridine-3'-phosphate
  modified_base 16: mod_base = OTHER; note = 2'-deoxy-2'-fluorouridine-3'-phosphate
  modified_base 17: mod_base = OTHER; note = 2'-O-methyluridine-3'-phosphate
  modified_base 18: mod_base = OTHER; note = 2'-O-methylguanosine-3'-phosphate
  modified_base 19: mod_base = OTHER; note = 2'-O-methylcytidine-3'-phosphate
  modified_base 20: mod_base = OTHER; note = 2'-O-methyladenosine-3'-phosphate
  modified_base 21: mod_base = OTHER; note = 2'-O-methylguanosine-3'-phosphorothioate
  modified_base 22: mod_base = OTHER; note = 2'-O-methyluridine-3'-phosphorothioate
  modified_base 23: mod_base = OTHER; note = 2'-O-methylcytidine
tatcatcattaggctttgcagtc

SEQ ID NO: 12337 - RNA, 23 nt, synthetic construct
  source 1..23: mol_type = other RNA
  modified_base 1: mod_base = OTHER; note = 2'-O-methyluridine-3'-phosphorothioate 5'-(E)-Vinylphosphonate
  modified_base 2: mod_base = OTHER; note = 2'-deoxy-2'-fluorouridine-3'-phosphorothioate
  modified_base 3: mod_base = OTHER; note = 2'-O-methyladenosine-3'-phosphate
  modified_base 4: mod_base = OTHER; note = 2'-O-methyluridine-3'-phosphate
  modified_base 5: mod_base = OTHER; note = 2'-O-methylcytidine-3'-phosphate
  modified_base 6: mod_base = OTHER; note = 2'-deoxy-2'-fluoroadenosine-3'-phosphate
  modified_base 7: mod_base = OTHER; note = 2'-O-methyluridine-3'-phosphate
  modified_base 8: mod_base = OTHER; note = 2'-O-methylcytidine-3'-phosphate
  modified_base 9: mod_base = OTHER; note = 2'-O-methyladenosine-3'-phosphate
  modified_base 10: mod_base = OTHER; note = 2'-O-methyluridine-3'-phosphate
  modified_base 11: mod_base = OTHER; note = 2'-O-methyluridine-3'-phosphate
  modified_base 12: mod_base = OTHER; note = 2'-O-methyladenosine-3'-phosphate
  modified_base 13: mod_base = OTHER; note = 2'-O-methylguanosine-3'-phosphate
  modified_base 14: mod_base = OTHER; note = 2'-deoxy-2'-fluoroguanosine-3'-phosphate
  modified_base 15: mod_base = OTHER; note = 2'-O-methylcytidine-3'-phosphate
  modified_base 16: mod_base = OTHER; note = 2'-deoxy-2'-fluorouridine-3'-phosphate
  modified_base 17: mod_base = OTHER; note = 2'-O-methyluridine-3'-phosphate
  modified_base 18: mod_base = OTHER; note = 2'-O-methyluridine-3'-phosphate
  modified_base 19: mod_base = OTHER; note = 2'-O-methylguanosine-3'-phosphate
  modified_base 20: mod_base = OTHER; note = 2'-O-methylcytidine-3'-phosphate
  modified_base 21: mod_base = OTHER; note = 2'-O-methyladenosine-3'-phosphorothioate
  modified_base 22: mod_base = OTHER; note = 2'-O-methylguanosine-3'-phosphorothioate
  modified_base 23: mod_base = OTHER; note = 2'-O-methyluridine
ttatcatcattaggctttgcagt

SEQ ID NO: 12338 - RNA, 23 nt, synthetic construct
  source 1..23: mol_type = other RNA
  modified_base 1: mod_base = OTHER; note = 2'-O-methyluridine-3'-phosphorothioate 5'-(E)-Vinylphosphonate
  modified_base 2: mod_base = OTHER; note = 2'-deoxy-2'-fluorouridine-3'-phosphorothioate
  modified_base 3: mod_base = OTHER; note = 2'-O-methyluridine-3'-phosphate
  modified_base 4: mod_base = OTHER; note = 2'-O-methyladenosine-3'-phosphate
  modified_base 5: mod_base = OTHER; note = 2'-O-methyluridine-3'-phosphate
  modified_base 6: mod_base = OTHER; note = 2'-deoxy-2'-fluorocytidine-3'-phosphate
  modified_base 7: mod_base = OTHER; note = 2'-O-methyladenosine-3'-phosphate
  modified_base 8: mod_base = OTHER; note = 2'-O-methyluridine-3'-phosphate
  modified_base 9: mod_base = OTHER; note = 2'-O-methylcytidine-3'-phosphate
  modified_base 10: mod_base = OTHER; note = 2'-O-methyladenosine-3'-phosphate
  modified_base 11: mod_base = OTHER; note = 2'-O-methyluridine-3'-phosphate
  modified_base 12: mod_base = OTHER; note = 2'-O-methyluridine-3'-phosphate
  modified_base 13: mod_base = OTHER; note = 2'-O-methyladenosine-3'-phosphate
  modified_base 14: mod_base = OTHER; note = 2'-deoxy-2'-fluoroguanosine-3'-phosphate
  modified_base 15: mod_base = OTHER; note = 2'-O-methylguanosine-3'-phosphate
  modified_base 16: mod_base = OTHER; note = 2'-deoxy-2'-fluorocytidine-3'-phosphate
  modified_base 17: mod_base = OTHER; note = 2'-O-methyluridine-3'-phosphate
  modified_base 18: mod_base = OTHER; note = 2'-O-methyluridine-3'-phosphate
  modified_base 19: mod_base = OTHER; note = 2'-O-methyluridine-3'-phosphate
  modified_base 20: mod_base = OTHER; note = 2'-O-methylguanosine-3'-phosphate
  modified_base 21: mod_base = OTHER; note = 2'-O-methylcytidine-3'-phosphorothioate
  modified_base 22: mod_base = OTHER; note = 2'-O-methyladenosine-3'-phosphorothioate
  modified_base 23: mod_base = OTHER; note = 2'-O-methylguanosine
tttatcatcattaggctttgcag

SEQ ID NO: 12339 - RNA, 23 nt, synthetic construct
  source 1..23: mol_type = other RNA
  modified_base 1: mod_base = OTHER; note = 2'-O-methyluridine-3'-phosphorothioate 5'-(E)-Vinylphosphonate
  modified_base 2: mod_base = OTHER; note = 2'-deoxy-2'-fluoroadenosine-3'-phosphorothioate
  modified_base 3: mod_base = OTHER; note = 2'-O-methyluridine-3'-phosphate
  modified_base 4: mod_base = OTHER; note = 2'-O-methyluridine-3'-phosphate
  modified_base 5: mod_base = OTHER; note = 2'-O-methyladenosine-3'-phosphate
  modified_base 6: mod_base = OTHER; note = 2'-deoxy-2'-fluorouridine-3'-phosphate
  modified_base 7: mod_base = OTHER; note = 2'-O-methylcytidine-3'-phosphate
  modified_base 8: mod_base = OTHER; note = 2'-O-methyladenosine-3'-phosphate
  modified_base 9: mod_base = OTHER; note = 2'-O-methyluridine-3'-phosphate
  modified_base 10: mod_base = OTHER; note = 2'-O-methylcytidine-3'-phosphate
  modified_base 11: mod_base = OTHER; note = 2'-O-methyladenosine-3'-phosphate
  modified_base 12: mod_base = OTHER; note = 2'-O-methyluridine-3'-phosphate
  modified_base 13: mod_base = OTHER; note = 2'-O-methyluridine-3'-phosphate
  modified_base 14: mod_base = OTHER; note = 2'-deoxy-2'-fluoroadenosine-3'-phosphate
  modified_base 15: mod_base = OTHER; note = 2'-O-methylguanosine-3'-phosphate
  modified_base 16: mod_base = OTHER; note = 2'-deoxy-2'-fluoroguanosine-3'-phosphate
  modified_base 17: mod_base = OTHER; note = 2'-O-methylcytidine-3'-phosphate
  modified_base 18: mod_base = OTHER; note = 2'-O-methyluridine-3'-phosphate
  modified_base 19: mod_base = OTHER; note = 2'-O-methyluridine-3'-phosphate
  modified_base 20: mod_base = OTHER; note = 2'-O-methyluridine-3'-phosphate
  modified_base 21: mod_base = OTHER; note = 2'-O-methylguanosine-3'-phosphorothioate
  modified_base 22: mod_base = OTHER; note = 2'-O-methylcytidine-3'-phosphorothioate
  modified_base 23: mod_base = OTHER; note = 2'-O-methyladenosine
tattatcatcattaggctttgca

SEQ ID NO: 12340 - RNA, 23 nt, synthetic construct
  source 1..23: mol_type = other RNA
  modified_base 1: mod_base = OTHER; note = 2'-O-methyluridine-3'-phosphorothioate 5'-(E)-Vinylphosphonate
  modified_base 2: mod_base = OTHER; note = 2'-deoxy-2'-fluoroadenosine-3'-phosphorothioate
  modified_base 3: mod_base = OTHER; note = 2'-O-methyladenosine-3'-phosphate
  modified_base 4: mod_base = OTHER; note = 2'-O-methyluridine-3'-phosphate
  modified_base 5: mod_base = OTHER; note = 2'-O-methyluridine-3'-phosphate
  modified_base 6: mod_base = OTHER; note = 2'-deoxy-2'-fluoroadenosine-3'-phosphate
  modified_base 7: mod_base = OTHER; note = 2'-O-methyluridine-3'-phosphate
  modified_base 8: mod_base = OTHER; note = 2'-O-methylcytidine-3'-phosphate
  modified_base 9: mod_base = OTHER; note = 2'-O-methyladenosine-3'-phosphate
  modified_base 10: mod_base = OTHER; note = 2'-O-methyluridine-3'-phosphate
  modified_base 11: mod_base = OTHER; note = 2'-O-methylcytidine-3'-phosphate
  modified_base 12: mod_base = OTHER; note = 2'-O-methyladenosine-3'-phosphate
  modified_base 13: mod_base = OTHER; note = 2'-O-methyluridine-3'-phosphate
  modified_base 14: mod_base = OTHER; note = 2'-deoxy-2'-fluorouridine-3'-phosphate
  modified_base 15: mod_base = OTHER; note = 2'-O-methyladenosine-3'-phosphate
  modified_base 16: mod_base = OTHER; note = 2'-deoxy-2'-fluoroguanosine-3'-phosphate
  modified_base 17: mod_base = OTHER; note = 2'-O-methylguanosine-3'-phosphate
  modified_base 18: mod_base = OTHER; note = 2'-O-methylcytidine-3'-phosphate
  modified_base 19: mod_base = OTHER; note = 2'-O-methyluridine-3'-phosphate
  modified_base 20: mod_base = OTHER; note = 2'-O-methyluridine-3'-phosphate
  modified_base 21: mod_base = OTHER; note = 2'-O-methyluridine-3'-phosphorothioate
  modified_base 22: mod_base = OTHER; note = 2'-O-methylguanosine-3'-phosphorothioate
  modified_base 23: mod_base = OTHER; note = 2'-O-methylcytidine
taattatcatcattaggctttgc

SEQ ID NO: 12341 - RNA, 23 nt, synthetic construct
  source 1..23: mol_type = other RNA
  modified_base 1: mod_base = OTHER; note = 2'-O-methyluridine-3'-phosphorothioate 5'-(E)-Vinylphosphonate
  modified_base 2: mod_base = OTHER; note = 2'-deoxy-2'-fluorocytidine-3'-phosphorothioate
  modified_base 3: mod_base = OTHER; note = 2'-O-methyladenosine-3'-phosphate
  modified_base 4: mod_base = OTHER; note = 2'-O-methyluridine-3'-phosphate
  modified_base 5: mod_base = OTHER; note = 2'-O-methyladenosine-3'-phosphate
  modified_base 6: mod_base = OTHER; note = 2'-deoxy-2'-fluoroadenosine-3'-phosphate
  modified_base 7: mod_base = OTHER; note = 2'-O-methyluridine-3'-phosphate
  modified_base 8: mod_base = OTHER; note = 2'-O-methyluridine-3'-phosphate
  modified_base 9: mod_base = OTHER; note = 2'-O-methyladenosine-3'-phosphate
  modified_base 10: mod_base = OTHER; note = 2'-O-methyluridine-3'-phosphate
  modified_base 11: mod_base = OTHER; note = 2'-O-methylcytidine-3'-phosphate
  modified_base 12: mod_base = OTHER; note = 2'-O-methyladenosine-3'-phosphate
  modified_base 13: mod_base = OTHER; note = 2'-O-methyluridine-3'-phosphate
  modified_base 14: mod_base = OTHER; note = 2'-deoxy-2'-fluorocytidine-3'-phosphate
  modified_base 15: mod_base = OTHER; note = 2'-O-methyladenosine-3'-phosphate
  modified_base 16: mod_base = OTHER; note = 2'-deoxy-2'-fluorouridine-3'-phosphate
  modified_base 17: mod_base = OTHER; note = 2'-O-methyluridine-3'-phosphate
  modified_base 18: mod_base = OTHER; note = 2'-O-methyladenosine-3'-phosphate
  modified_base 19: mod_base = OTHER; note = 2'-O-methylguanosine-3'-phosphate
  modified_base 20: mod_base = OTHER; note = 2'-O-methylguanosine-3'-phosphate
  modified_base 21: mod_base = OTHER; note = 2'-O-methylcytidine-3'-phosphorothioate
  modified_base 22: mod_base = OTHER; note = 2'-O-methyluridine-3'-phosphorothioate
  modified_base 23: mod_base = OTHER; note = 2'-O-methyluridine
tcataattatcatcattaggctt

SEQ ID NO: 12342 - RNA, 23 nt, synthetic construct
  source 1..23: mol_type = other RNA
  modified_base 1: mod_base = OTHER; note = 2'-O-methyluridine-3'-phosphorothioate 5'-(E)-Vinylphosphonate
  modified_base 2: mod_base = OTHER; note = 2'-deoxy-2'-fluoroadenosine-3'-phosphorothioate
  modified_base 3: mod_base = OTHER; note = 2'-O-methylcytidine-3'-phosphate
  modified_base 4: mod_base = OTHER; note = 2'-O-methyladenosine-3'-phosphate
  modified_base 5: mod_base = OTHER; note = 2'-O-methyluridine-3'-phosphate
  modified_base 6: mod_base = OTHER; note = 2'-deoxy-2'-fluoroadenosine-3'-phosphate
  modified_base 7: mod_base = OTHER; note = 2'-O-methyladenosine-3'-phosphate
  modified_base 8: mod_base = OTHER; note = 2'-O-methyluridine-3'-phosphate
  modified_base 9: mod_base = OTHER; note = 2'-O-methyluridine-3'-phosphate
  modified_base 10: mod_base = OTHER; note = 2'-O-methyladenosine-3'-phosphate
  modified_base 11: mod_base = OTHER; note = 2'-O-methyluridine-3'-phosphate
  modified_base 12: mod_base = OTHER; note = 2'-O-methylcytidine-3'-phosphate
  modified_base 13: mod_base = OTHER; note = 2'-O-methyladenosine-3'-phosphate
  modified_base 14: mod_base = OTHER; note = 2'-deoxy-2'-fluorouridine-3'-phosphate
  modified_base 15: mod_base = OTHER; note = 2'-O-methylcytidine-3'-phosphate
  modified_base 16: mod_base = OTHER; note = 2'-deoxy-2'-fluoroadenosine-3'-phosphate
  modified_base 17: mod_base = OTHER; note = 2'-O-methyluridine-3'-phosphate
  modified_base 18: mod_base = OTHER; note = 2'-O-methyluridine-3'-phosphate
  modified_base 19: mod_base = OTHER; note = 2'-O-methyladenosine-3'-phosphate
  modified_base 20: mod_base = OTHER; note = 2'-O-methylguanosine-3'-phosphate
  modified_base 21: mod_base = OTHER; note = 2'-O-methylguanosine-3'-phosphorothioate
  modified_base 22: mod_base = OTHER; note = 2'-O-methylcytidine-3'-phosphorothioate
  modified_base 23: mod_base = OTHER; note = 2'-O-methyluridine
tacataattatcatcattaggct

SEQ ID NO: 12343 - RNA, 23 nt, synthetic construct
  source 1..23: mol_type = other RNA
  modified_base 1: mod_base = OTHER; note = 2'-O-methyluridine-3'-phosphorothioate 5'-(E)-Vinylphosphonate
  modified_base 2: mod_base = OTHER; note = 2'-deoxy-2'-fluoroadenosine-3'-phosphorothioate
  modified_base 3: mod_base = OTHER; note = 2'-O-methyladenosine-3'-phosphate
  modified_base 4: mod_base = OTHER; note = 2'-O-methylcytidine-3'-phosphate
  modified_base 5: mod_base = OTHER; note = 2'-O-methyladenosine-3'-phosphate
  modified_base 6: mod_base = OTHER; note = 2'-deoxy-2'-fluorouridine-3'-phosphate
  modified_base 7: mod_base = OTHER; note = 2'-O-methyladenosine-3'-phosphate
  modified_base 8: mod_base = OTHER; note = 2'-O-methyladenosine-3'-phosphate
  modified_base 9: mod_base = OTHER; note = 2'-O-methyluridine-3'-phosphate
  modified_base 10: mod_base = OTHER; note = 2'-O-methyluridine-3'-phosphate
  modified_base 11: mod_base = OTHER; note = 2'-O-methyladenosine-3'-phosphate
  modified_base 12: mod_base = OTHER; note = 2'-O-methyluridine-3'-phosphate
  modified_base 13: mod_base = OTHER; note = 2'-O-methylcytidine-3'-phosphate
  modified_base 14: mod_base = OTHER; note = 2'-deoxy-2'-fluoroadenosine-3'-phosphate
  modified_base 15: mod_base = OTHER; note = 2'-O-methyluridine-3'-phosphate
  modified_base 16: mod_base = OTHER; note = 2'-deoxy-2'-fluorocytidine-3'-phosphate
  modified_base 17: mod_base = OTHER; note = 2'-O-methyladenosine-3'-phosphate
  modified_base 18: mod_base = OTHER; note = 2'-O-methyluridine-3'-phosphate
  modified_base 19: mod_base = OTHER; note = 2'-O-methyluridine-3'-phosphate
  modified_base 20: mod_base = OTHER; note = 2'-O-methyladenosine-3'-phosphate
  modified_base 21: mod_base = OTHER; note = 2'-O-methylguanosine-3'-phosphorothioate
  modified_base 22: mod_base = OTHER; note = 2'-O-methylguanosine-3'-phosphorothioate
  modified_base 23: mod_base = OTHER; note = 2'-O-methylcytidine
taacataattatcatcattaggc

SEQ ID NO: 12344 - RNA, 23 nt, synthetic construct
  source 1..23: mol_type = other RNA
  modified_base 1: mod_base = OTHER; note = 2'-O-methyluridine-3'-phosphorothioate 5'-(E)-Vinylphosphonate
  modified_base 2: mod_base = OTHER; note = 2'-deoxy-2'-fluorocytidine-3'-phosphorothioate
  modified_base 3: mod_base = OTHER; note = 2'-O-methyluridine-3'-phosphate
  modified_base 4: mod_base = OTHER; note = 2'-O-methyladenosine-3'-phosphate
  modified_base 5: mod_base = OTHER; note = 2'-O-methyluridine-3'-phosphate
  modified_base 6: mod_base = OTHER; note = 2'-deoxy-2'-fluoroguanosine-3'-phosphate
  modified_base 7: mod_base = OTHER; note = 2'-O-methyladenosine-3'-phosphate
  modified_base 8: mod_base = OTHER; note = 2'-O-methylguanosine-3'-phosphate
  modified_base 9: mod_base = OTHER; note = 2'-O-methyladenosine-3'-phosphate
  modified_base 10: mod_base = OTHER; note = 2'-O-methylguanosine-3'-phosphate
  modified_base 11: mod_base = OTHER; note = 2'-O-methyladenosine-3'-phosphate
  modified_base 12: mod_base = OTHER; note = 2'-O-methyluridine-3'-phosphate
  modified_base 13: mod_base = OTHER; note = 2'-O-methyluridine-3'-phosphate
  modified_base 14: mod_base = OTHER; note = 2'-deoxy-2'-fluorouridine-3'-phosphate
  modified_base 15: mod_base = OTHER; note = 2'-O-methylcytidine-3'-phosphate
  modified_base 16: mod_base = OTHER; note = 2'-deoxy-2'-fluorouridine-3'-phosphate
  modified_base 17: mod_base = OTHER; note = 2'-O-methyluridine-3'-phosphate
  modified_base 18: mod_base = OTHER; note = 2'-O-methyluridine-3'-phosphate
  modified_base 19: mod_base = OTHER; note = 2'-O-methyluridine-3'-phosphate
  modified_base 20: mod_base = OTHER; note = 2'-O-methyluridine-3'-phosphate
  modified_base 21: mod_base = OTHER; note = 2'-O-methyladenosine-3'-phosphorothioate
  modified_base 22: mod_base = OTHER; note = 2'-O-methyladenosine-3'-phosphorothioate
  modified_base 23: mod_base = OTHER; note = 2'-O-methylcytidine
tctatgagagatttctttttaac

SEQ ID NO: 12345 - RNA, 23 nt, synthetic construct
  source 1..23: mol_type = other RNA
  modified_base 1: mod_base = OTHER; note = 2'-O-methyluridine-3'-phosphorothioate 5'-(E)-Vinylphosphonate
  modified_base 2: mod_base = OTHER; note = 2'-deoxy-2'-fluoroguanosine-3'-phosphorothioate
  modified_base 3: mod_base = OTHER; note = 2'-O-methylcytidine-3'-phosphate
  modified_base 4: mod_base = OTHER; note = 2'-O-methyluridine-3'-phosphate
  modified_base 5: mod_base = OTHER; note = 2'-O-methyladenosine-3'-phosphate
  modified_base 6: mod_base = OTHER; note = 2'-deoxy-2'-fluorouridine-3'-phosphate
  modified_base 7: mod_base = OTHER; note = 2'-O-methylguanosine-3'-phosphate
  modified_base 8: mod_base = OTHER; note = 2'-O-methyladenosine-3'-phosphate
  modified_base 9: mod_base = OTHER; note = 2'-O-methylguanosine-3'-phosphate
  modified_base 10: mod_base = OTHER; note = 2'-O-methyladenosine-3'-phosphate
  modified_base 11: mod_base = OTHER; note = 2'-O-methylguanosine-3'-phosphate
  modified_base 12: mod_base = OTHER; note = 2'-O-methyladenosine-3'-phosphate
  modified_base 13: mod_base = OTHER; note = 2'-O-methyluridine-3'-phosphate
  modified_base 14: mod_base = OTHER; note = 2'-deoxy-2'-fluorouridine-3'-phosphate
  modified_base 15: mod_base = OTHER; note = 2'-O-methyluridine-3'-phosphate
  modified_base 16: mod_base = OTHER; note = 2'-deoxy-2'-fluorocytidine-3'-phosphate
  modified_base 17: mod_base = OTHER; note = 2'-O-methyluridine-3'-phosphate
  modified_base 18: mod_base = OTHER; note = 2'-O-methyluridine-3'-phosphate
  modified_base 19: mod_base = OTHER; note = 2'-O-methyluridine-3'-phosphate
  modified_base 20: mod_base = OTHER; note = 2'-O-methyluridine-3'-phosphate
  modified_base 21: mod_base = OTHER; note = 2'-O-methyluridine-3'-phosphorothioate
  modified_base 22: mod_base = OTHER; note = 2'-O-methyladenosine-3'-phosphorothioate
  modified_base 23: mod_base = OTHER; note = 2'-O-methyladenosine
tgctatgagagatttctttttaa

SEQ ID NO: 12346 - RNA, 23 nt, synthetic construct
  source 1..23: mol_type = other RNA
  modified_base 1: mod_base = OTHER; note = 2'-O-methyluridine-3'-phosphorothioate 5'-(E)-Vinylphosphonate
  modified_base 2: mod_base = OTHER; note = 2'-deoxy-2'-fluoroadenosine-3'-phosphorothioate
  modified_base 3: mod_base = OTHER; note = 2'-O-methyladenosine-3'-phosphate
  modified_base 4: mod_base = OTHER; note = 2'-O-methyladenosine-3'-phosphate
  modified_base 5: mod_base = OTHER; note = 2'-O-methyladenosine-3'-phosphate
  modified_base 6: mod_base = OTHER; note = 2'-deoxy-2'-fluoroguanosine-3'-phosphate
  modified_base 7: mod_base = OTHER; note = 2'-O-methyladenosine-3'-phosphate
  modified_base 8: mod_base = OTHER; note = 2'-O-methyladenosine-3'-phosphate
  modified_base 9: mod_base = OTHER; note = 2'-O-methyladenosine-3'-phosphate
  modified_base 10: mod_base = OTHER; note = 2'-O-methylguanosine-3'-phosphate
  modified_base 11: mod_base = OTHER; note = 2'-O-methylcytidine-3'-phosphate
  modified_base 12: mod_base = OTHER; note = 2'-O-methyluridine-3'-phosphate
  modified_base 13: mod_base = OTHER; note = 2'-O-methyladenosine-3'-phosphate
  modified_base 14: mod_base = OTHER; note = 2'-deoxy-2'-fluorouridine-3'-phosphate
  modified_base 15: mod_base = OTHER; note = 2'-O-methylguanosine-3'-phosphate
  modified_base 16: mod_base = OTHER; note = 2'-deoxy-2'-fluoroadenosine-3'-phosphate
  modified_base 17: mod_base = OTHER; note = 2'-O-methylguanosine-3'-phosphate
  modified_base 18: mod_base = OTHER; note = 2'-O-methyladenosine-3'-phosphate
  modified_base 19: mod_base = OTHER; note = 2'-O-methylguanosine-3'-phosphate
  modified_base 20: mod_base = OTHER; note = 2'-O-methyladenosine-3'-phosphate
  modified_base 21: mod_base = OTHER; note = 2'-O-methyluridine-3'-phosphorothioate
  modified_base 22: mod_base = OTHER; note = 2'-O-methyluridine-3'-phosphorothioate
  modified_base 23: mod_base = OTHER; note = 2'-O-methyluridine
taaaagaaagctatgagagattt

SEQ ID NO: 12347 - RNA, 23 nt, synthetic construct
  source 1..23: mol_type = other RNA
  modified_base 1: mod_base = OTHER; note = 2'-O-methyluridine-3'-phosphorothioate 5'-(E)-Vinylphosphonate
  modified_base 2: mod_base = OTHER; note = 2'-deoxy-2'-fluoroadenosine-3'-phosphorothioate
  modified_base 3: mod_base = OTHER; note = 2'-O-methyladenosine-3'-phosphate
  modified_base 4: mod_base = OTHER; note = 2'-O-methyluridine-3'-phosphate
  modified_base 5: mod_base = OTHER; note = 2'-O-methylguanosine-3'-phosphate
  modified_base 6: mod_base = OTHER; note = 2'-deoxy-2'-fluoroguanosine-3'-phosphate
  modified_base 7: mod_base = OTHER; note = 2'-O-methyladenosine-3'-phosphate
  modified_base 8: mod_base = OTHER; note = 2'-O-methyladenosine-3'-phosphate
  modified_base 9: mod_base = OTHER; note = 2'-O-methyladenosine-3'-phosphate
  modified_base 10: mod_base = OTHER; note = 2'-O-methyladenosine-3'-phosphate
  modified_base 11: mod_base = OTHER; note = 2'-O-methylguanosine-3'-phosphate
  modified_base 12: mod_base = OTHER; note = 2'-O-methyladenosine-3'-phosphate
  modified_base 13: mod_base = OTHER; note = 2'-O-methyladenosine-3'-phosphate
  modified_base 14: mod_base = OTHER; note = 2'-deoxy-2'-fluoroadenosine-3'-phosphate
  modified_base 15: mod_base = OTHER; note = 2'-O-methylguanosine-3'-phosphate
  modified_base 16: mod_base = OTHER; note = 2'-deoxy-2'-fluorocytidine-3'-phosphate
  modified_base 17: mod_base = OTHER; note = 2'-O-methyluridine-3'-phosphate
  modified_base 18: mod_base = OTHER; note = 2'-O-methyladenosine-3'-phosphate
  modified_base 19: mod_base = OTHER; note = 2'-O-methyluridine-3'-phosphate
  modified_base 20: mod_base = OTHER; note = 2'-O-methylguanosine-3'-phosphate
  modified_base 21: mod_base = OTHER; note = 2'-O-methyladenosine-3'-phosphorothioate
  modified_base 22: mod_base = OTHER; note = 2'-O-methylguanosine-3'-phosphorothioate
  modified_base 23: mod_base = OTHER; note = 2'-O-methyladenosine
taatggaaaagaaagctatgaga

SEQ ID NO: 12348 - RNA, 23 nt, synthetic construct
  source 1..23: mol_type = other RNA
  modified_base 1: mod_base = OTHER; note = 2'-O-methyluridine-3'-phosphorothioate 5'-(E)-Vinylphosphonate
  modified_base 2: mod_base = OTHER; note = 2'-deoxy-2'-fluoroadenosine-3'-phosphorothioate
  modified_base 3: mod_base = OTHER; note = 2'-O-methyladenosine-3'-phosphate
  modified_base 4: mod_base = OTHER; note = 2'-O-methyladenosine-3'-phosphate
  modified_base 5: mod_base = OTHER; note = 2'-O-methyluridine-3'-phosphate
  modified_base 6: mod_base = OTHER; note = 2'-deoxy-2'-fluoroguanosine-3'-phosphate
  modified_base 7: mod_base = OTHER; note = 2'-O-methylguanosine-3'-phosphate
  modified_base 8: mod_base = OTHER; note = 2'-O-methyladenosine-3'-phosphate
  modified_base 9: mod_base = OTHER; note = 2'-O-methyladenosine-3'-phosphate
  modified_base 10: mod_base = OTHER; note = 2'-O-methyladenosine-3'-phosphate
  modified_base 11: mod_base = OTHER; note = 2'-O-methyladenosine-3'-phosphate
  modified_base 12: mod_base = OTHER; note = 2'-O-methylguanosine-3'-phosphate
  modified_base 13: mod_base = OTHER; note = 2'-O-methyladenosine-3'-phosphate
  modified_base 14: mod_base = OTHER; note = 2'-deoxy-2'-fluoroadenosine-3'-phosphate
  modified_base 15: mod_base = OTHER; note = 2'-O-methyladenosine-3'-phosphate
  modified_base 16: mod_base = OTHER; note = 2'-deoxy-2'-fluoroguanosine-3'-phosphate
  modified_base 17: mod_base = OTHER; note = 2'-O-methylcytidine-3'-phosphate
  modified_base 18: mod_base = OTHER; note = 2'-O-methyluridine-3'-phosphate
  modified_base 19: mod_base = OTHER; note = 2'-O-methyladenosine-3'-phosphate
  modified_base 20: mod_base = OTHER; note = 2'-O-methyluridine-3'-phosphate
  modified_base 21: mod_base = OTHER; note = 2'-O-methylguanosine-3'-phosphorothioate
  modified_base 22: mod_base = OTHER; note = 2'-O-methyladenosine-3'-phosphorothioate
  modified_base 23: mod_base = OTHER; note = 2'-O-methylguanosine
taaatggaaaagaaagctatgag

SEQ ID NO: 12349 - RNA, 23 nt, synthetic construct
  source 1..23: mol_type = other RNA
  modified_base 1: mod_base = OTHER; note = 2'-O-methyluridine-3'-phosphorothioate 5'-(E)-Vinylphosphonate
  modified_base 2: mod_base = OTHER; note = 2'-deoxy-2'-fluoroadenosine-3'-phosphorothioate
  modified_base 3: mod_base = OTHER; note = 2'-O-methyladenosine-3'-phosphate
  modified_base 4: mod_base = OTHER; note = 2'-O-methyladenosine-3'-phosphate
  modified_base 5: mod_base = OTHER; note = 2'-O-methyladenosine-3'-phosphate
  modified_base 6: mod_base = OTHER; note = 2'-deoxy-2'-fluorouridine-3'-phosphate
  modified_base 7: mod_base = OTHER; note = 2'-O-methylguanosine-3'-phosphate
  modified_base 8: mod_base = OTHER; note = 2'-O-methylguanosine-3'-phosphate
  modified_base 9: mod_base = OTHER; note = 2'-O-methylcytidine-3'-phosphate
  modified_base 10: mod_base = OTHER; note = 2'-O-methyladenosine-3'-phosphate
  modified_base 11: mod_base = OTHER; note = 2'-O-methyladenosine-3'-phosphate
  modified_base 12: mod_base = OTHER; note = 2'-O-methyladenosine-3'-phosphate
  modified_base 13: mod_base = OTHER; note = 2'-O-methyladenosine-3'-phosphate
  modified_base 14: mod_base = OTHER; note = 2'-deoxy-2'-fluoroadenosine-3'-phosphate
  modified_base 15: mod_base = OTHER; note = 2'-O-methylcytidine-3'-phosphate
  modified_base 16: mod_base = OTHER; note = 2'-deoxy-2'-fluoroadenosine-3'-phosphate
  modified_base 17: mod_base = OTHER; note = 2'-O-methyluridine-3'-phosphate
  modified_base 18: mod_base = OTHER; note = 2'-O-methyluridine-3'-phosphate
  modified_base 19: mod_base = OTHER; note = 2'-O-methylcytidine-3'-phosphate
  modified_base 20: mod_base = OTHER; note = 2'-O-methyladenosine-3'-phosphate
  modified_base 21: mod_base = OTHER; note = 2'-O-methylcytidine-3'-phosphorothioate
  modified_base 22: mod_base = OTHER; note = 2'-O-methyladenosine-3'-phosphorothioate
  modified_base 23: mod_base = OTHER; note = 2'-O-methyluridine
taaaatggcaaaaacattcacat

SEQ ID NO: 12350 - RNA, 23 nt, synthetic construct
  source 1..23: mol_type = other RNA
  modified_base 1: mod_base = OTHER; note = 2'-O-methyluridine-3'-phosphorothioate 5'-(E)-Vinylphosphonate
  modified_base 2: mod_base = OTHER; note = 2'-deoxy-2'-fluoroguanosine-3'-phosphorothioate
  modified_base 3: mod_base = OTHER; note = 2'-O-methylcytidine-3'-phosphate
  modified_base 4: mod_base = OTHER; note = 2'-O-methyladenosine-3'-phosphate
  modified_base 5: mod_base = OTHER; note = 2'-O-methyladenosine-3'-phosphate
  modified_base 6: mod_base = OTHER; note = 2'-deoxy-2'-fluoroadenosine-3'-phosphate
  modified_base 7: mod_base = OTHER; note = 2'-O-methyladenosine-3'-phosphate
  modified_base 8: mod_base = OTHER; note = 2'-O-methyladenosine-3'-phosphate
  modified_base 9: mod_base = OTHER; note = 2'-O-methylcytidine-3'-phosphate
  modified_base 10: mod_base = OTHER; note = 2'-O-methyladenosine-3'-phosphate
  modified_base 11: mod_base = OTHER; note = 2'-O-methyluridine-3'-phosphate
  modified_base 12: mod_base = OTHER; note = 2'-O-methyluridine-3'-phosphate
  modified_base 13: mod_base = OTHER; note = 2'-O-methylcytidine-3'-phosphate
  modified_base 14: mod_base = OTHER; note = 2'-deoxy-2'-fluoroadenosine-3'-phosphate
  modified_base 15: mod_base = OTHER; note = 2'-O-methylcytidine-3'-phosphate
  modified_base 16: mod_base = OTHER; note = 2'-deoxy-2'-fluoroadenosine-3'-phosphate
  modified_base 17: mod_base = OTHER; note = 2'-O-methyluridine-3'-phosphate
  modified_base 18: mod_base = OTHER; note = 2'-O-methyladenosine-3'-phosphate
  modified_base 19: mod_base = OTHER; note = 2'-O-methyladenosine-3'-phosphate
  modified_base 20: mod_base = OTHER; note = 2'-O-methyladenosine-3'-phosphate
  modified_base 21: mod_base = OTHER; note = 2'-O-methylguanosine-3'-phosphorothioate
  modified_base 22: mod_base = OTHER; note = 2'-O-methylguanosine-3'-phosphorothioate
  modified_base 23: mod_base = OTHER; note = 2'-O-methylguanosine
tgcaaaaacattcacataaaggg

SEQ ID NO: 12351 - RNA, 23 nt, synthetic construct
  source 1..23: mol_type = other RNA
  modified_base 1: mod_base = OTHER; note = 2'-O-methyluridine-3'-phosphorothioate 5'-(E)-Vinylphosphonate
  modified_base 2: mod_base = OTHER; note = 2'-deoxy-2'-fluoroadenosine-3'-phosphorothioate
  modified_base 3: mod_base = OTHER; note = 2'-O-methyladenosine-3'-phosphate
  modified_base 4: mod_base = OTHER; note = 2'-O-methyluridine-3'-phosphate
  modified_base 5: mod_base = OTHER; note = 2'-O-methylguanosine-3'-phosphate
  modified_base 6: mod_base = OTHER; note = 2'-deoxy-2'-fluoroguanosine-3'-phosphate
  modified_base 7: mod_base = OTHER; note = 2'-O-methylcytidine-3'-phosphate
  modified_base 8: mod_base = OTHER; note = 2'-O-methyladenosine-3'-phosphate
  modified_base 9: mod_base = OTHER; note = 2'-O-methyladenosine-3'-phosphate
  modified_base 10: mod_base = OTHER; note = 2'-O-methyladenosine-3'-phosphate
  modified_base 11: mod_base = OTHER; note = 2'-O-methyladenosine-3'-phosphate
  modified_base 12: mod_base = OTHER; note = 2'-O-methyladenosine-3'-phosphate
  modified_base 13: mod_base = OTHER; note = 2'-O-methylcytidine-3'-phosphate
  modified_base 14: mod_base = OTHER; note = 2'-deoxy-2'-fluoroadenosine-3'-phosphate
  modified_base 15: mod_base = OTHER; note = 2'-O-methyluridine-3'-phosphate
  modified_base 16: mod_base = OTHER; note = 2'-deoxy-2'-fluorouridine-3'-phosphate
  modified_base 17: mod_base = OTHER; note = 2'-O-methylcytidine-3'-phosphate
  modified_base 18: mod_base = OTHER; note = 2'-O-methyladenosine-3'-phosphate
  modified_base 19: mod_base = OTHER; note = 2'-O-methylcytidine-3'-phosphate
  modified_base 20: mod_base = OTHER; note = 2'-O-methyladenosine-3'-phosphate
  modified_base 21: mod_base = OTHER; note = 2'-O-methyluridine-3'-phosphorothioate
  modified_base 22: mod_base = OTHER; note = 2'-O-methyladenosine-3'-phosphorothioate
  modified_base 23: mod_base = OTHER; note = 2'-O-methyladenosine
taatggcaaaaacattcacataa

SEQ ID NO: 12352 - RNA, 23 nt, synthetic construct
  source 1..23: mol_type = other RNA
  modified_base 1: mod_base = OTHER; note = 2'-O-methyluridine-3'-phosphorothioate 5'-(E)-Vinylphosphonate
  modified_base 2: mod_base = OTHER; note = 2'-deoxy-2'-fluoroadenosine-3'-phosphorothioate
  modified_base 3: mod_base = OTHER; note = 2'-O-methyladenosine-3'-phosphate
  modified_base 4: mod_base = OTHER; note = 2'-O-methyladenosine-3'-phosphate
  modified_base 5: mod_base = OTHER; note = 2'-O-methyladenosine-3'-phosphate
  modified_base 6: mod_base = OTHER; note = 2'-deoxy-2'-fluoroadenosine-3'-phosphate
  modified_base 7: mod_base = OTHER; note = 2'-O-methyladenosine-3'-phosphate
  modified_base 8: mod_base = OTHER; note = 2'-O-methyluridine-3'-phosphate
  modified_base 9: mod_base = OTHER; note = 2'-O-methylguanosine-3'-phosphate
  modified_base 10: mod_base = OTHER; note = 2'-O-methylguanosine-3'-phosphate
  modified_base 11: mod_base = OTHER; note = 2'-O-methylcytidine-3'-phosphate
  modified_base 12: mod_base = OTHER; note = 2'-O-methyladenosine-3'-phosphate
  modified_base 13: mod_base = OTHER; note = 2'-O-methyladenosine-3'-phosphate
  modified_base 14: mod_base = OTHER; note = 2'-deoxy-2'-fluoroadenosine-3'-phosphate
  modified_base 15: mod_base = OTHER; note = 2'-O-methyladenosine-3'-phosphate
  modified_base 16: mod_base = OTHER; note = 2'-deoxy-2'-fluoroadenosine-3'-phosphate
  modified_base 17: mod_base = OTHER; note = 2'-O-methylcytidine-3'-phosphate
  modified_base 18: mod_base = OTHER; note = 2'-O-methyladenosine-3'-phosphate
  modified_base 19: mod_base = OTHER; note = 2'-O-methyluridine-3'-phosphate
  modified_base 20: mod_base = OTHER; note = 2'-O-methyluridine-3'-phosphate
  modified_base 21: mod_base = OTHER; note = 2'-O-methylcytidine-3'-phosphorothioate
  modified_base 22: mod_base = OTHER; note = 2'-O-methyladenosine-3'-phosphorothioate
  modified_base 23: mod_base = OTHER; note = 2'-O-methylcytidine
taaaaaatggcaaaaacattcac

SEQ ID NO: 12353 - RNA, 23 nt, synthetic construct
  source 1..23: mol_type = other RNA
  modified_base 1: mod_base = OTHER; note = 2'-O-methyluridine-3'-phosphorothioate 5'-(E)-Vinylphosphonate
  modified_base 2: mod_base = OTHER; note = 2'-deoxy-2'-fluoroadenosine-3'-phosphorothioate
  modified_base 3: mod_base = OTHER; note = 2'-O-methyladenosine-3'-phosphate
  modified_base 4: mod_base = OTHER; note = 2'-O-methyluridine-3'-phosphate
  modified_base 5: mod_base = OTHER; note = 2'-O-methyladenosine-3'-phosphate
  modified_base 6: mod_base = OTHER; note = 2'-deoxy-2'-fluorocytidine-3'-phosphate
  modified_base 7: mod_base = OTHER; note = 2'-O-methyluridine-3'-phosphate
  modified_base 8: mod_base = OTHER; note = 2'-O-methylguanosine-3'-phosphate
  modified_base 9: mod_base = OTHER; note = 2'-O-methyluridine-3'-phosphate
  modified_base 10: mod_base = OTHER; note = 2'-O-methyladenosine-3'-phosphate
  modified_base 11: mod_base = OTHER; note = 2'-O-methylcytidine-3'-phosphate
  modified_base 12: mod_base = OTHER; note = 2'-O-methyluridine-3'-phosphate
  modified_base 13: mod_base = OTHER; note = 2'-O-methylguanosine-3'-phosphate
  modified_base 14: mod_base = OTHER; note = 2'-deoxy-2'-fluorouridine-3'-phosphate
  modified_base 15: mod_base = OTHER; note = 2'-O-methylcytidine-3'-phosphate
  modified_base 16: mod_base = OTHER; note = 2'-deoxy-2'-fluorouridine-3'-phosphate
  modified_base 17: mod_base = OTHER; note = 2'-O-methyluridine-3'-phosphate
  modified_base 18: mod_base = OTHER; note = 2'-O-methyladenosine-3'-phosphate
  modified_base 19: mod_base = OTHER; note = 2'-O-methyluridine-3'-phosphate
  modified_base 20: mod_base = OTHER; note = 2'-O-methylcytidine-3'-phosphate
  modified_base 21: mod_base = OTHER; note = 2'-O-methyluridine-3'-phosphorothioate
  modified_base 22: mod_base = OTHER; note = 2'-O-methyluridine-3'-phosphorothioate
  modified_base 23: mod_base = OTHER; note = 2'-O-methyluridine
taatactgtactgtcttatcttt

SEQ ID NO: 12354 - RNA, 23 nt, synthetic construct
  source 1..23: mol_type = other RNA
  modified_base 1: mod_base = OTHER; note = 2'-O-methyluridine-3'-phosphorothioate 5'-(E)-Vinylphosphonate
  modified_base 2: mod_base = OTHER; note = 2'-deoxy-2'-fluorouridine-3'-phosphorothioate
  modified_base 3: mod_base = OTHER; note = 2'-O-methyluridine-3'-phosphate
  modified_base 4: mod_base = OTHER; note = 2'-O-methyladenosine-3'-phosphate
  modified_base 5: mod_base = OTHER; note = 2'-O-methyladenosine-3'-phosphate
  modified_base 6: mod_base = OTHER; note = 2'-deoxy-2'-fluoroadenosine-3'-phosphate
  modified_base 7: mod_base = OTHER; note = 2'-O-methyluridine-3'-phosphate
  modified_base 8: mod_base = OTHER; note = 2'-O-methyladenosine-3'-phosphate
  modified_base 9: mod_base = OTHER; note = 2'-O-methylcytidine-3'-phosphate
  modified_base 10: mod_base = OTHER; note = 2'-O-methyluridine-3'-phosphate
  modified_base 11: mod_base = OTHER; note = 2'-O-methylguanosine-3'-phosphate
  modified_base 12: mod_base = OTHER; note = 2'-O-methyluridine-3'-phosphate
  modified_base 13: mod_base = OTHER; note = 2'-O-methyladenosine-3'-phosphate
  modified_base 14: mod_base = OTHER; note = 2'-deoxy-2'-fluorocytidine-3'-phosphate
  modified_base 15: mod_base = OTHER; note = 2'-O-methyluridine-3'-phosphate
  modified_base 16: mod_base = OTHER; note = 2'-deoxy-2'-fluoroguanosine-3'-phosphate
  modified_base 17: mod_base = OTHER; note = 2'-O-methyluridine-3'-phosphate
  modified_base 18: mod_base = OTHER; note = 2'-O-methylcytidine-3'-phosphate
  modified_base 19: mod_base = OTHER; note = 2'-O-methyluridine-3'-phosphate
  modified_base 20: mod_base = OTHER; note = 2'-O-methyluridine-3'-phosphate
  modified_base 21: mod_base = OTHER; note = 2'-O-methyladenosine-3'-phosphorothioate
  modified_base 22: mod_base = OTHER; note = 2'-O-methyluridine-3'-phosphorothioate
  modified_base 23: mod_base = OTHER; note = 2'-O-methylcytidine
tttaaatactgtactgtcttatc

SEQ ID NO: 12355 - RNA, 23 nt, synthetic construct
  source 1..23: mol_type = other RNA
  modified_base 1: mod_base = OTHER; note = 2'-O-methyluridine-3'-phosphorothioate 5'-(E)-Vinylphosphonate
  modified_base 2: mod_base = OTHER; note = 2'-deoxy-2'-fluoroadenosine-3'-phosphorothioate
  modified_base 3: mod_base = OTHER; note = 2'-O-methylcytidine-3'-phosphate
  modified_base 4: mod_base = OTHER; note = 2'-O-methyluridine-3'-phosphate
  modified_base 5: mod_base = OTHER; note = 2'-O-methyluridine-3'-phosphate
  modified_base 6: mod_base = OTHER; note = 2'-deoxy-2'-fluoroadenosine-3'-phosphate
  modified_base 7: mod_base = OTHER; note = 2'-O-methyladenosine-3'-phosphate
  modified_base 8: mod_base = OTHER; note = 2'-O-methyladenosine-3'-phosphate
  modified_base 9: mod_base = OTHER; note = 2'-O-methyluridine-3'-phosphate
  modified_base 10: mod_base = OTHER; note = 2'-O-methyladenosine-3'-phosphate
  modified_base 11: mod_base = OTHER; note = 2'-O-methylcytidine-3'-phosphate
  modified_base 12: mod_base = OTHER; note = 2'-O-methyluridine-3'-phosphate
  modified_base 13: mod_base = OTHER; note = 2'-O-methylguanosine-3'-phosphate
  modified_base 14: mod_base = OTHER; note = 2'-deoxy-2'-fluorouridine-3'-phosphate
  modified_base 15: mod_base = OTHER; note = 2'-O-methyladenosine-3'-phosphate
  modified_base 16: mod_base = OTHER; note = 2'-deoxy-2'-fluorocytidine-3'-phosphate
  modified_base 17: mod_base = OTHER; note = 2'-O-methyluridine-3'-phosphate
  modified_base 18: mod_base = OTHER; note = 2'-O-methylguanosine-3'-phosphate
  modified_base 19: mod_base = OTHER; note = 2'-O-methyluridine-3'-phosphate
  modified_base 20: mod_base = OTHER; note = 2'-O-methylcytidine-3'-phosphate
  modified_base 21: mod_base = OTHER; note = 2'-O-methyluridine-3'-phosphorothioate
  modified_base 22: mod_base = OTHER; note = 2'-O-methyluridine-3'-phosphorothioate
  modified_base 23: mod_base = OTHER; note = 2'-O-methyladenosine
tacttaaatactgtactgtctta

SEQ ID NO: 12356 - RNA, 23 nt, synthetic construct
  source 1..23: mol_type = other RNA
  modified_base 1: mod_base = OTHER; note = 2'-O-methyluridine-3'-phosphorothioate 5'-(E)-Vinylphosphonate
  modified_base 2: mod_base = OTHER; note = 2'-deoxy-2'-fluoroadenosine-3'-phosphorothioate
  modified_base 3: mod_base = OTHER; note = 2'-O-methylguanosine-3'-phosphate
  modified_base 4: mod_base = OTHER; note = 2'-O-methyladenosine-3'-phosphate
  modified_base 5: mod_base = OTHER; note = 2'-O-methylguanosine-3'-phosphate
  modified_base 6: mod_base = OTHER; note = 2'-deoxy-2'-fluorouridine-3'-phosphate
  modified_base 7: mod_base = OTHER; note = 2'-O-methyluridine-3'-phosphate
  modified_base 8: mod_base = OTHER; note = 2'-O-methyladenosine-3'-phosphate
  modified_base 9: mod_base = OTHER; note = 2'-O-methyluridine-3'-phosphate
  modified_base 10: mod_base = OTHER; note = 2'-O-methylcytidine-3'-phosphate
  modified_base 11: mod_base = OTHER; note = 2'-O-methyluridine-3'-phosphate
  modified_base 12: mod_base = OTHER; note = 2'-O-methyluridine-3'-phosphate
  modified_base 13: mod_base = OTHER; note = 2'-O-methyluridine-3'-phosphate
  modified_base 14: mod_base = OTHER; note = 2'-deoxy-2'-fluorouridine-3'-phosphate
  modified_base 15: mod_base = OTHER; note = 2'-O-methylcytidine-3'-phosphate
  modified_base 16: mod_base = OTHER; note = 2'-deoxy-2'-fluoroadenosine-3'-phosphate
  modified_base 17: mod_base = OTHER; note = 2'-O-methyluridine-3'-phosphate
  modified_base 18: mod_base = OTHER; note = 2'-O-methylguanosine-3'-phosphate
  modified_base 19: mod_base = OTHER; note = 2'-O-methylcytidine-3'-phosphate
  modified_base 20: mod_base = OTHER; note = 2'-O-methyluridine-3'-phosphate
  modified_base 21: mod_base = OTHER; note = 2'-O-methylguanosine-3'-phosphorothioate
  modified_base 22: mod_base = OTHER; note = 2'-O-methylcytidine-3'-phosphorothioate
  modified_base 23: mod_base = OTHER; note = 2'-O-methylcytidine
tagagttatcttttcatgctgcc

SEQ ID NO: 12357 - RNA, 23 nt, synthetic construct
  source 1..23: mol_type = other RNA
  modified_base 1: mod_base = OTHER; note = 2'-O-methyluridine-3'-phosphorothioate 5'-(E)-Vinylphosphonate
  modified_base 2: mod_base = OTHER; note = 2'-deoxy-2'-fluorouridine-3'-phosphorothioate
  modified_base 3: mod_base = OTHER; note = 2'-O-methyladenosine-3'-phosphate
  modified_base 4: mod_base = OTHER; note = 2'-O-methyladenosine-3'-phosphate
  modified_base 5: mod_base = OTHER; note = 2'-O-methylcytidine-3'-phosphate
  modified_base 6: mod_base = OTHER; note = 2'-deoxy-2'-fluoroadenosine-3'-phosphate
  modified_base 7: mod_base = OTHER; note = 2'-O-methyluridine-3'-phosphate
  modified_base 8: mod_base = OTHER; note = 2'-O-methyladenosine-3'-phosphate
  modified_base 9: mod_base = OTHER; note = 2'-O-methylguanosine-3'-phosphate
  modified_base 10: mod_base = OTHER; note = 2'-O-methyladenosine-3'-phosphate
  modified_base 11: mod_base = OTHER; note = 2'-O-methylguanosine-3'-phosphate
  modified_base 12: mod_base = OTHER; note = 2'-O-methyladenosine-3'-phosphate
  modified_base 13: mod_base = OTHER; note = 2'-O-methyluridine-3'-phosphate
  modified_base 14: mod_base = OTHER; note = 2'-deoxy-2'-fluorouridine-3'-phosphate
  modified_base 15: mod_base = OTHER; note = 2'-O-methylguanosine-3'-phosphate
  modified_base 16: mod_base = OTHER; note = 2'-deoxy-2'-fluoroguanosine-3'-phosphate
  modified_base 17: mod_base = OTHER; note = 2'-O-methyladenosine-3'-phosphate
  modified_base 18: mod_base = OTHER; note = 2'-O-methyluridine-3'-phosphate
  modified_base 19: mod_base = OTHER; note = 2'-O-methylguanosine-3'-phosphate
  modified_base 20: mod_base = OTHER; note = 2'-O-methyladenosine-3'-phosphate
  modified_base 21: mod_base = OTHER; note = 2'-O-methyladenosine-3'-phosphorothioate
  modified_base 22: mod_base = OTHER; note = 2'-O-methylguanosine-3'-phosphorothioate
  modified_base 23: mod_base = OTHER; note = 2'-O-methyluridine
ttaacatagagattggatgaagt

SEQ ID NO: 12358 - RNA, 23 nt, synthetic construct
  source 1..23: mol_type = other RNA
  modified_base 1: mod_base = OTHER; note = 2'-O-methyluridine-3'-phosphorothioate 5'-(E)-Vinylphosphonate
  modified_base 2: mod_base = OTHER; note = 2'-deoxy-2'-fluoroadenosine-3'-phosphorothioate
  modified_base 3: mod_base = OTHER; note = 2'-O-methyladenosine-3'-phosphate
  modified_base 4: mod_base = OTHER; note = 2'-O-methyladenosine-3'-phosphate
  modified_base 5: mod_base = OTHER; note = 2'-O-methylguanosine-3'-phosphate
  modified_base 6: mod_base = OTHER; note = 2'-deoxy-2'-fluoroadenosine-3'-phosphate
  modified_base 7: mod_base = OTHER; note = 2'-O-methyluridine-3'-phosphate
  modified_base 8: mod_base = OTHER; note = 2'-O-methylguanosine-3'-phosphate
  modified_base 9: mod_base = OTHER; note = 2'-O-methyladenosine-3'-phosphate
  modified_base 10: mod_base = OTHER; note = 2'-O-methylguanosine-3'-phosphate
  modified_base 11: mod_base = OTHER; note = 2'-O-methyluridine-3'-phosphate
  modified_base 12: mod_base = OTHER; note = 2'-O-methyluridine-3'-phosphate
  modified_base 13: mod_base = OTHER; note = 2'-O-methylguanosine-3'-phosphate
  modified_base 14: mod_base = OTHER; note = 2'-deoxy-2'-fluoroadenosine-3'-phosphate
  modified_base 15: mod_base = OTHER; note = 2'-O-methylguanosine-3'-phosphate
  modified_base 16: mod_base = OTHER; note = 2'-deoxy-2'-fluoroguanosine-3'-phosphate
  modified_base 17: mod_base = OTHER; note = 2'-O-methyluridine-3'-phosphate
  modified_base 18: mod_base = OTHER; note = 2'-O-methylguanosine-3'-phosphate
  modified_base 19: mod_base = OTHER; note = 2'-O-methyluridine-3'-phosphate
  modified_base 20: mod_base = OTHER; note = 2'-O-methyluridine-3'-phosphate
  modified_base 21: mod_base = OTHER; note = 2'-O-methylguanosine-3'-phosphorothioate
  modified_base 22: mod_base = OTHER; note = 2'-O-methylcytidine-3'-phosphorothioate
  modified_base 23: mod_base = OTHER; note = 2'-O-methyluridine
taaagatgagttgaggtgttgct

SEQ ID NO: 12359 - RNA, 23 nt, synthetic construct
  source 1..23: mol_type = other RNA
  modified_base 1: mod_base = OTHER; note = 2'-O-methyluridine-3'-phosphorothioate 5'-(E)-Vinylphosphonate
  modified_base 2: mod_base = OTHER; note = 2'-deoxy-2'-fluoroguanosine-3'-phosphorothioate
  modified_base 3: mod_base = OTHER; note = 2'-O-methyladenosine-3'-phosphate
  modified_base 4: mod_base = OTHER; note = 2'-O-methyluridine-3'-phosphate
  modified_base 5: mod_base = OTHER; note = 2'-O-methylguanosine-3'-phosphate
  modified_base 6: mod_base = OTHER; note = 2'-deoxy-2'-fluoroadenosine-3'-phosphate
  modified_base 7: mod_base = OTHER; note = 2'-O-methylguanosine-3'-phosphate
  modified_base 8: mod_base = OTHER; note = 2'-O-methyluridine-3'-phosphate
  modified_base 9: mod_base = OTHER; note = 2'-O-methyluridine-3'-phosphate
  modified_base 10: mod_base = OTHER; note = 2'-O-methylguanosine-3'-phosphate
  modified_base 11: mod_base = OTHER; note = 2'-O-methyladenosine-3'-phosphate
  modified_base 12: mod_base = OTHER; note = 2'-O-methylguanosine-3'-phosphate
  modified_base 13: mod_base = OTHER; note = 2'-O-methylguanosine-3'-phosphate
  modified_base 14: mod_base = OTHER; note = 2'-deoxy-2'-fluorouridine-3'-phosphate
  modified_base 15: mod_base = OTHER; note = 2'-O-methylguanosine-3'-phosphate
  modified_base 16: mod_base = OTHER; note = 2'-deoxy-2'-fluorouridine-3'-phosphate
  modified_base 17: mod_base = OTHER; note = 2'-O-methyluridine-3'-phosphate
  modified_base 18: mod_base = OTHER; note = 2'-O-methylguanosine-3'-phosphate
  modified_base 19: mod_base = OTHER; note = 2'-O-methylcytidine-3'-phosphate
  modified_base 20: mod_base = OTHER; note = 2'-O-methyluridine-3'-phosphate
  modified_base 21: mod_base = OTHER; note = 2'-O-methyluridine-3'-phosphorothioate
  modified_base 22: mod_base = OTHER; note = 2'-O-methyluridine-3'-phosphorothioate
  modified_base 23: mod_base = OTHER; note = 2'-O-methylcytidine
tgatgagttgaggtgttgctttc

SEQ ID NO: 12360 - RNA, 23 nt, synthetic construct
  source 1..23: mol_type = other RNA
  modified_base 1: mod_base = OTHER; note = 2'-O-methyluridine-3'-phosphorothioate 5'-(E)-Vinylphosphonate
  modified_base 2: mod_base = OTHER; note = 2'-deoxy-2'-fluorouridine-3'-phosphorothioate
  modified_base 3: mod_base = OTHER; note = 2'-O-methyladenosine-3'-phosphate
  modified_base 4: mod_base = OTHER; note = 2'-O-methyladenosine-3'-phosphate
  modified_base 5: mod_base = OTHER; note = 2'-O-methyladenosine-3'-phosphate
  modified_base 6: mod_base = OTHER; note = 2'-deoxy-2'-fluoroadenosine-3'-phosphate
  modified_base 7: mod_base = OTHER; note = 2'-O-methyladenosine-3'-phosphate
  modified_base 8: mod_base = OTHER; note = 2'-O-methylguanosine-3'-phosphate
  modified_base 9: mod_base = OTHER; note = 2'-O-methyladenosine-3'-phosphate
  modified_base 10: mod_base = OTHER; note = 2'-O-methyluridine-3'-phosphate
  modified_base 11: mod_base = OTHER; note = 2'-O-methylguanosine-3'-phosphate
  modified_base 12: mod_base = OTHER; note = 2'-O-methyladenosine-3'-phosphate
  modified_base 13: mod_base = OTHER; note = 2'-O-methylguanosine-3'-phosphate
  modified_base 14: mod_base = OTHER; note = 2'-deoxy-2'-fluorouridine-3'-phosphate
  modified_base 15: mod_base = OTHER; note = 2'-O-methyluridine-3'-phosphate
  modified_base 16: mod_base = OTHER; note = 2'-deoxy-2'-fluoroguanosine-3'-phosphate
  modified_base 17: mod_base = OTHER; note = 2'-O-methyladenosine-3'-phosphate
  modified_base 18: mod_base = OTHER; note = 2'-O-methylguanosine-3'-phosphate
  modified_base 19: mod_base = OTHER; note = 2'-O-methylguanosine-3'-phosphate
  modified_base 20: mod_base = OTHER; note = 2'-O-methyluridine-3'-phosphate
  modified_base 21: mod_base = OTHER; note = 2'-O-methylguanosine-3'-phosphorothioate
  modified_base 22: mod_base = OTHER; note = 2'-O-methyluridine-3'-phosphorothioate
  modified_base 23: mod_base = OTHER; note = 2'-O-methyluridine
ttaaaaagatgagttgaggtgtt

SEQ ID NO: 12361 - RNA, 23 nt, synthetic construct
  source 1..23: mol_type = other RNA
  modified_base 1: mod_base = OTHER; note = 2'-O-methyluridine-3'-phosphorothioate 5'-(E)-Vinylphosphonate
  modified_base 2: mod_base = OTHER; note = 2'-deoxy-2'-fluoroadenosine-3'-phosphorothioate
  modified_base 3: mod_base = OTHER; note = 2'-O-methyladenosine-3'-phosphate
  modified_base 4: mod_base = OTHER; note = 2'-O-methyluridine-3'-phosphate
  modified_base 5: mod_base = OTHER; note = 2'-O-methyladenosine-3'-phosphate
  modified_base 6: mod_base = OTHER; note = 2'-deoxy-2'-fluoroadenosine-3'-phosphate
  modified_base 7: mod_base = OTHER; note = 2'-O-methyladenosine-3'-phosphate
  modified_base 8: mod_base = OTHER; note = 2'-O-methyladenosine-3'-phosphate
  modified_base 9: mod_base = OTHER; note = 2'-O-methyladenosine-3'-phosphate
  modified_base 10: mod_base = OTHER; note = 2'-O-methylguanosine-3'-phosphate
  modified_base 11: mod_base = OTHER; note = 2'-O-methyladenosine-3'-phosphate
  modified_base 12: mod_base = OTHER; note = 2'-O-methyluridine-3'-phosphate
  modified_base 13: mod_base = OTHER; note = 2'-O-methylguanosine-3'-phosphate
  modified_base 14: mod_base = OTHER; note = 2'-deoxy-2'-fluoroadenosine-3'-phosphate
  modified_base 15: mod_base = OTHER; note = 2'-O-methylguanosine-3'-phosphate
  modified_base 16: mod_base = OTHER; note = 2'-deoxy-2'-fluorouridine-3'-phosphate
  modified_base 17: mod_base = OTHER; note = 2'-O-methyluridine-3'-phosphate
  modified_base 18: mod_base = OTHER; note = 2'-O-methylguanosine-3'-phosphate
  modified_base 19: mod_base = OTHER; note = 2'-O-methyladenosine-3'-phosphate
  modified_base 20: mod_base = OTHER; note = 2'-O-methylguanosine-3'-phosphate
  modified_base 21: mod_base = OTHER; note = 2'-O-methylguanosine-3'-phosphorothioate
  modified_base 22: mod_base = OTHER; note = 2'-O-methyluridine-3'-phosphorothioate
  modified_base 23: mod_base = OTHER; note = 2'-O-methylguanosine
taataaaaagatgagttgaggtg

SEQ ID NO: 12362 - RNA, 23 nt, synthetic construct
  source 1..23: mol_type = other RNA
  modified_base 1: mod_base = OTHER; note = 2'-O-methyluridine-3'-phosphorothioate 5'-(E)-Vinylphosphonate
  modified_base 2: mod_base = OTHER; note = 2'-deoxy-2'-fluoroadenosine-3'-phosphorothioate
  modified_base 3: mod_base = OTHER; note = 2'-O-methyladenosine-3'-phosphate
  modified_base 4: mod_base = OTHER; note = 2'-O-methyladenosine-3'-phosphate
  modified_base 5: mod_base = OTHER; note = 2'-O-methyluridine-3'-phosphate
  modified_base 6: mod_base = OTHER; note = 2'-deoxy-2'-fluoroadenosine-3'-phosphate
  modified_base 7: mod_base = OTHER; note = 2'-O-methyladenosine-3'-phosphate
  modified_base 8: mod_base = OTHER; note = 2'-O-methyladenosine-3'-phosphate
  modified_base 9: mod_base = OTHER; note = 2'-O-methyladenosine-3'-phosphate
  modified_base 10: mod_base = OTHER; note = 2'-O-methyladenosine-3'-phosphate
  modified_base 11: mod_base = OTHER; note = 2'-O-methylguanosine-3'-phosphate
  modified_base 12: mod_base = OTHER; note = 2'-O-methyladenosine-3'-phosphate
  modified_base 13: mod_base = OTHER; note = 2'-O-methyluridine-3'-phosphate
  modified_base 14: mod_base = OTHER; note = 2'-deoxy-2'-fluoroguanosine-3'-phosphate
  modified_base 15: mod_base = OTHER; note = 2'-O-methyladenosine-3'-phosphate
  modified_base 16: mod_base = OTHER; note = 2'-deoxy-2'-fluoroguanosine-3'-phosphate
  modified_base 17: mod_base = OTHER; note = 2'-O-methyluridine-3'-phosphate
  modified_base 18: mod_base = OTHER; note = 2'-O-methyluridine-3'-phosphate
  modified_base 19: mod_base = OTHER; note = 2'-O-methylguanosine-3'-phosphate
  modified_base 20: mod_base = OTHER; note = 2'-O-methyladenosine-3'-phosphate
  modified_base 21: mod_base = OTHER; note = 2'-O-methylguanosine-3'-phosphorothioate
  modified_base 22: mod_base = OTHER; note = 2'-O-methylguanosine-3'-phosphorothioate
  modified_base 23: mod_base = OTHER; note = 2'-O-methyluridine
taaataaaaagatgagttgaggt

SEQ ID NO: 12363 - RNA, 23 nt, synthetic construct
  source 1..23: mol_type = other RNA
  modified_base 1: mod_base = OTHER; note = 2'-O-methyluridine-3'-phosphorothioate 5'-(E)-Vinylphosphonate
  modified_base 2: mod_base = OTHER; note = 2'-deoxy-2'-fluoroguanosine-3'-phosphorothioate
  modified_base 3: mod_base = OTHER; note = 2'-O-methyladenosine-3'-phosphate
  modified_base 4: mod_base = OTHER; note = 2'-O-methylcytidine-3'-phosphate
  modified_base 5: mod_base = OTHER; note = 2'-O-methyluridine-3'-phosphate
  modified_base 6: mod_base = OTHER; note = 2'-deoxy-2'-fluoroadenosine-3'-phosphate
  modified_base 7: mod_base = OTHER; note = 2'-O-methyluridine-3'-phosphate
  modified_base 8: mod_base = OTHER; note = 2'-O-methyladenosine-3'-phosphate
  modified_base 9: mod_base = OTHER; note = 2'-O-methyladenosine-3'-phosphate
  modified_base 10: mod_base = OTHER; note = 2'-O-methylcytidine-3'-phosphate
  modified_base 11: mod_base = OTHER; note = 2'-O-methyladenosine-3'-phosphate
  modified_base 12: mod_base = OTHER; note = 2'-O-methyluridine-3'-phosphate
  modified_base 13: mod_base = OTHER; note = 2'-O-methyluridine-3'-phosphate
  modified_base 14: mod_base = OTHER; note = 2'-deoxy-2'-fluorouridine-3'-phosphate
  modified_base 15: mod_base = OTHER; note = 2'-O-methyluridine-3'-phosphate
  modified_base 16: mod_base = OTHER; note = 2'-deoxy-2'-fluorouridine-3'-phosphate
  modified_base 17: mod_base = OTHER; note = 2'-O-methyladenosine-3'-phosphate
  modified_base 18: mod_base = OTHER; note = 2'-O-methyluridine-3'-phosphate
  modified_base 19: mod_base = OTHER; note = 2'-O-methyladenosine-3'-phosphate
  modified_base 20: mod_base = OTHER; note = 2'-O-methylguanosine-3'-phosphate
  modified_base 21: mod_base = OTHER; note = 2'-O-methyladenosine-3'-phosphorothioate
  modified_base 22: mod_base = OTHER; note = 2'-O-methylguanosine-3'-phosphorothioate
  modified_base 23: mod_base = OTHER; note = 2'-O-methylcytidine
tgactataacatttttatagagc

SEQ ID NO: 12364 - RNA, 23 nt, synthetic construct
  source 1..23: mol_type = other RNA
  modified_base 1: mod_base = OTHER; note = 2'-O-methyluridine-3'-phosphorothioate 5'-(E)-Vinylphosphonate
  modified_base 2: mod_base = OTHER; note = 2'-deoxy-2'-fluorouridine-3'-phosphorothioate
  modified_base 3: mod_base = OTHER; note = 2'-O-methyluridine-3'-phosphate
  modified_base 4: mod_base = OTHER; note = 2'-O-methylcytidine-3'-phosphate
  modified_base 5: mod_base = OTHER; note = 2'-O-methyladenosine-3'-phosphate
  modified_base 6: mod_base = OTHER; note = 2'-deoxy-2'-fluorouridine-3'-phosphate
  modified_base 7: mod_base = OTHER; note = 2'-O-methylguanosine-3'-phosphate
  modified_base 8: mod_base = OTHER; note = 2'-O-methyluridine-3'-phosphate
  modified_base 9: mod_base = OTHER; note = 2'-O-methylguanosine-3'-phosphate
  modified_base 10: mod_base = OTHER; note = 2'-O-methylcytidine-3'-phosphate
  modified_base 11: mod_base = OTHER; note = 2'-O-methyluridine-3'-phosphate
  modified_base 12: mod_base = OTHER; note = 2'-O-methylcytidine-3'-phosphate
  modified_base 13: mod_base = OTHER; note = 2'-O-methyluridine-3'-phosphate
  modified_base 14: mod_base = OTHER; note = 2'-deoxy-2'-fluorouridine-3'-phosphate
  modified_base 15: mod_base = OTHER; note = 2'-O-methylguanosine-3'-phosphate
  modified_base 16: mod_base = OTHER; note = 2'-deoxy-2'-fluoroguanosine-3'-phosphate
  modified_base 17: mod_base = OTHER; note = 2'-O-methyluridine-3'-phosphate
  modified_base 18: mod_base = OTHER; note = 2'-O-methyluridine-3'-phosphate
  modified_base 19: mod_base = OTHER; note = 2'-O-methylcytidine-3'-phosphate
  modified_base 20: mod_base = OTHER; note = 2'-O-methyladenosine-3'-phosphate
  modified_base 21: mod_base = OTHER; note = 2'-O-methyladenosine-3'-phosphorothioate
  modified_base 22: mod_base = OTHER; note = 2'-O-methylguanosine-3'-phosphorothioate
  modified_base 23: mod_base = OTHER; note = 2'-O-methyluridine
tttcatgtgctcttggttcaagt

SEQ ID NO: 12365 - RNA, 23 nt, synthetic construct
  source 1..23: mol_type = other RNA
  modified_base 1: mod_base = OTHER; note = 2'-O-methyluridine-3'-phosphorothioate 5'-(E)-Vinylphosphonate
  modified_base 2: mod_base = OTHER; note = 2'-deoxy-2'-fluoroguanosine-3'-phosphorothioate
  modified_base 3: mod_base = OTHER; note = 2'-O-methylcytidine-3'-phosphate
  modified_base 4: mod_base = OTHER; note = 2'-O-methyluridine-3'-phosphate
  modified_base 5: mod_base = OTHER; note = 2'-O-methylcytidine-3'-phosphate
  modified_base 6: mod_base = OTHER; note = 2'-deoxy-2'-fluorouridine-3'-phosphate
  modified_base 7: mod_base = OTHER; note = 2'-O-methyluridine-3'-phosphate
  modified_base 8: mod_base = OTHER; note = 2'-O-methylguanosine-3'-phosphate
  modified_base 9: mod_base = OTHER; note = 2'-O-methylguanosine-3'-phosphate
  modified_base 10: mod_base = OTHER; note = 2'-O-methyluridine-3'-phosphate
  modified_base 11: mod_base = OTHER; note = 2'-O-methyluridine-3'-phosphate
  modified_base 12: mod_base = OTHER; note = 2'-O-methylcytidine-3'-phosphate
  modified_base 13: mod_base = OTHER; note = 2'-O-methyladenosine-3'-phosphate
  modified_base 14: mod_base = OTHER; note = 2'-deoxy-2'-fluoroadenosine-3'-phosphate
  modified_base 15: mod_base = OTHER; note = 2'-O-methylguanosine-3'-phosphate
  modified_base 16: mod_base = OTHER; note = 2'-deoxy-2'-fluorouridine-3'-phosphate
  modified_base 17: mod_base = OTHER; note = 2'-O-methyladenosine-3'-phosphate
  modified_base 18: mod_base = OTHER; note = 2'-O-methyladenosine-3'-phosphate
  modified_base 19: mod_base = OTHER; note = 2'-O-methyladenosine-3'-phosphate
  modified_base 20: mod_base = OTHER; note = 2'-O-methyladenosine-3'-phosphate
  modified_base 21: mod_base = OTHER; note = 2'-O-methyluridine-3'-phosphorothioate
  modified_base 22: mod_base = OTHER; note = 2'-O-methyladenosine-3'-phosphorothioate
  modified_base 23: mod_base = OTHER; note = 2'-O-methyladenosine
tgctcttggttcaagtaaaataa

SEQ ID NO: 12366 - RNA, 23 nt, synthetic construct
  source 1..23: mol_type = other RNA
  modified_base 1: mod_base = OTHER; note = 2'-O-methyluridine-3'-phosphorothioate 5'-(E)-Vinylphosphonate
  modified_base 2: mod_base = OTHER; note = 2'-deoxy-2'-fluorouridine-3'-phosphorothioate
  modified_base 3: mod_base = OTHER; note = 2'-O-methylguanosine-3'-phosphate
  modified_base 4: mod_base = OTHER; note = 2'-O-methylcytidine-3'-phosphate
  modified_base 5: mod_base = OTHER; note = 2'-O-methyluridine-3'-phosphate
  modified_base 6: mod_base = OTHER; note = 2'-deoxy-2'-fluorocytidine-3'-phosphate
  modified_base 7: mod_base = OTHER; note = 2'-O-methyluridine-3'-phosphate
  modified_base 8: mod_base = OTHER; note = 2'-O-methyluridine-3'-phosphate
  modified_base 9: mod_base = OTHER; note = 2'-O-methylguanosine-3'-phosphate
  modified_base 10: mod_base = OTHER; note = 2'-O-methylguanosine-3'-phosphate
  modified_base 11: mod_base = OTHER; note = 2'-O-methyluridine-3'-phosphate
  modified_base 12: mod_base = OTHER; note = 2'-O-methyluridine-3'-phosphate
  modified_base 13: mod_base = OTHER; note = 2'-O-methylcytidine-3'-phosphate
  modified_base 14: mod_base = OTHER; note = 2'-deoxy-2'-fluoroadenosine-3'-phosphate
  modified_base 15: mod_base = OTHER; note = 2'-O-methyladenosine-3'-phosphate
  modified_base 16: mod_base = OTHER; note = 2'-deoxy-2'-fluoroguanosine-3'-phosphate
  modified_base 17: mod_base = OTHER; note = 2'-O-methyluridine-3'-phosphate
  modified_base 18: mod_base = OTHER; note = 2'-O-methyladenosine-3'-phosphate
  modified_base 19: mod_base = OTHER; note = 2'-O-methyladenosine-3'-phosphate
  modified_base 20: mod_base = OTHER; note = 2'-O-methyladenosine-3'-phosphate
  modified_base 21: mod_base = OTHER; note = 2'-O-methyladenosine-3'-phosphorothioate
  modified_base 22: mod_base = OTHER; note = 2'-O-methyluridine-3'-phosphorothioate
  modified_base 23: mod_base = OTHER; note = 2'-O-methyladenosine
ttgctcttggttcaagtaaaata

SEQ ID NO: 12367 - RNA, 23 nt, synthetic construct
  source 1..23: mol_type = other RNA
  modified_base 1: mod_base = OTHER; note = 2'-O-methyluridine-3'-phosphorothioate 5'-(E)-Vinylphosphonate
  modified_base 2: mod_base = OTHER; note = 2'-deoxy-2'-fluoroguanosine-3'-phosphorothioate
  modified_base 3: mod_base = OTHER; note = 2'-O-methyluridine-3'-phosphate
  modified_base 4: mod_base = OTHER; note = 2'-O-methylguanosine-3'-phosphate
  modified_base 5: mod_base = OTHER; note = 2'-O-methylcytidine-3'-phosphate
  modified_base 6: mod_base = OTHER; note = 2'-deoxy-2'-fluorouridine-3'-phosphate
  modified_base 7: mod_base = OTHER; note = 2'-O-methylcytidine-3'-phosphate
  modified_base 8: mod_base = OTHER; note = 2'-O-methyluridine-3'-phosphate
  modified_base 9: mod_base = OTHER; note = 2'-O-methyluridine-3'-phosphate
  modified_base 10: mod_base = OTHER; note = 2'-O-methylguanosine-3'-phosphate
  modified_base 11: mod_base = OTHER; note = 2'-O-methylguanosine-3'-phosphate
  modified_base 12: mod_base = OTHER; note = 2'-O-methyluridine-3'-phosphate
  modified_base 13: mod_base = OTHER; note = 2'-O-methyluridine-3'-phosphate
  modified_base 14: mod_base = OTHER; note = 2'-deoxy-2'-fluorocytidine-3'-phosphate
  modified_base 15: mod_base = OTHER; note = 2'-O-methyladenosine-3'-phosphate
  modified_base 16: mod_base = OTHER; note = 2'-deoxy-2'-fluoroadenosine-3'-phosphate
  modified_base 17: mod_base = OTHER; note = 2'-O-methylguanosine-3'-phosphate
  modified_base 18: mod_base = OTHER; note = 2'-O-methyluridine-3'-phosphate
  modified_base 19: mod_base = OTHER; note = 2'-O-methyladenosine-3'-phosphate
  modified_base 20: mod_base = OTHER; note = 2'-O-methyladenosine-3'-phosphate
  modified_base 21: mod_base = OTHER; note = 2'-O-methyladenosine-3'-phosphorothioate
  modified_base 22: mod_base = OTHER; note = 2'-O-methyladenosine-3'-phosphorothioate
  modified_base 23: mod_base = OTHER; note = 2'-O-methyluridine
tgtgctcttggttcaagtaaaat

SEQ ID NO: 12368 - RNA, 23 nt, synthetic construct
  source 1..23: mol_type = other RNA
  modified_base 1: mod_base = OTHER; note = 2'-O-methyluridine-3'-phosphorothioate 5'-(E)-Vinylphosphonate
  modified_base 2: mod_base = OTHER; note = 2'-deoxy-2'-fluorouridine-3'-phosphorothioate
  modified_base 3: mod_base = OTHER; note = 2'-O-methylguanosine-3'-phosphate
  modified_base 4: mod_base = OTHER; note = 2'-O-methyluridine-3'-phosphate
  modified_base 5: mod_base = OTHER; note = 2'-O-methylguanosine-3'-phosphate
  modified_base 6: mod_base = OTHER; note = 2'-deoxy-2'-fluorocytidine-3'-phosphate
  modified_base 7: mod_base = OTHER; note = 2'-O-methyluridine-3'-phosphate
  modified_base 8: mod_base = OTHER; note = 2'-O-methylcytidine-3'-phosphate
  modified_base 9: mod_base = OTHER; note = 2'-O-methyluridine-3'-phosphate
  modified_base 10: mod_base = OTHER; note = 2'-O-methyluridine-3'-phosphate
  modified_base 11: mod_base = OTHER; note = 2'-O-methylguanosine-3'-phosphate
  modified_base 12: mod_base = OTHER; note = 2'-O-methylguanosine-3'-phosphate
  modified_base 13: mod_base = OTHER; note = 2'-O-methyluridine-3'-phosphate
  modified_base 14: mod_base = OTHER; note = 2'-deoxy-2'-fluorouridine-3'-phosphate
  modified_base 15: mod_base = OTHER; note = 2'-O-methylcytidine-3'-phosphate
  modified_base 16: mod_base = OTHER; note = 2'-deoxy-2'-fluoroadenosine-3'-phosphate
  modified_base 17: mod_base = OTHER; note = 2'-O-methyladenosine-3'-phosphate
  modified_base 18: mod_base = OTHER; note = 2'-O-methylguanosine-3'-phosphate
  modified_base 19: mod_base = OTHER; note = 2'-O-methyluridine-3'-phosphate
  modified_base 20: mod_base = OTHER; note = 2'-O-methyladenosine-3'-phosphate
  modified_base 21: mod_base = OTHER; note = 2'-O-methyladenosine-3'-phosphorothioate
  modified_base 22: mod_base = OTHER; note = 2'-O-methyladenosine-3'-phosphorothioate
  modified_base 23: mod_base = OTHER; note = 2'-O-methyladenosine
ttgtgctcttggttcaagtaaaa

SEQ ID NO: 12369 - RNA, 23 nt, synthetic construct
  source 1..23: mol_type = other RNA
  modified_base 1: mod_base = OTHER; note = 2'-O-methyluridine-3'-phosphorothioate 5'-(E)-Vinylphosphonate
  modified_base 2: mod_base = OTHER; note = 2'-deoxy-2'-fluoroadenosine-3'-phosphorothioate
  modified_base 3: mod_base = OTHER; note = 2'-O-methyluridine-3'-phosphate
  modified_base 4: mod_base = OTHER; note = 2'-O-methylguanosine-3'-phosphate
  modified_base 5: mod_base = OTHER; note = 2'-O-methyluridine-3'-phosphate
  modified_base 6: mod_base = OTHER; note = 2'-deoxy-2'-fluoroguanosine-3'-phosphate
  modified_base 7: mod_base = OTHER; note = 2'-O-methylcytidine-3'-phosphate
  modified_base 8: mod_base = OTHER; note = 2'-O-methyluridine-3'-phosphate
  modified_base 9: mod_base = OTHER; note = 2'-O-methylcytidine-3'-phosphate
  modified_base 10: mod_base = OTHER; note = 2'-O-methyluridine-3'-phosphate
  modified_base 11: mod_base = OTHER; note = 2'-O-methyluridine-3'-phosphate
  modified_base 12: mod_base = OTHER; note = 2'-O-methylguanosine-3'-phosphate
  modified_base 13: mod_base = OTHER; note = 2'-O-methylguanosine-3'-phosphate
  modified_base 14: mod_base = OTHER; note = 2'-deoxy-2'-fluorouridine-3'-phosphate
  modified_base 15: mod_base = OTHER; note = 2'-O-methyluridine-3'-phosphate
  modified_base 16: mod_base = OTHER; note = 2'-deoxy-2'-fluorocytidine-3'-phosphate
  modified_base 17: mod_base = OTHER; note = 2'-O-methyladenosine-3'-phosphate
  modified_base 18: mod_base = OTHER; note = 2'-O-methyladenosine-3'-phosphate
  modified_base 19: mod_base = OTHER; note = 2'-O-methylguanosine-3'-phosphate
  modified_base 20: mod_base = OTHER; note = 2'-O-methyluridine-3'-phosphate
  modified_base 21: mod_base = OTHER; note = 2'-O-methyladenosine-3'-phosphorothioate
  modified_base 22: mod_base = OTHER; note = 2'-O-methyladenosine-3'-phosphorothioate
  modified_base 23: mod_base = OTHER; note = 2'-O-methyladenosine
tatgtgctcttggttcaagtaaa

SEQ ID NO: 12370 - RNA, 23 nt, synthetic construct
  source 1..23: mol_type = other RNA
  modified_base 1: mod_base = OTHER; note = 2'-O-methyluridine-3'-phosphorothioate 5'-(E)-Vinylphosphonate
  modified_base 2: mod_base = OTHER; note = 2'-deoxy-2'-fluorocytidine-3'-phosphorothioate
  modified_base 3: mod_base = OTHER; note = 2'-O-methyladenosine-3'-phosphate
  modified_base 4: mod_base = OTHER; note = 2'-O-methyluridine-3'-phosphate
  modified_base 5: mod_base = OTHER; note = 2'-O-methylguanosine-3'-phosphate
  modified_base 6: mod_base = OTHER; note = 2'-deoxy-2'-fluorouridine-3'-phosphate
  modified_base 7: mod_base = OTHER; note = 2'-O-methylguanosine-3'-phosphate
  modified_base 8: mod_base = OTHER; note = 2'-O-methylcytidine-3'-phosphate
  modified_base 9: mod_base = OTHER; note = 2'-O-methyluridine-3'-phosphate
  modified_base 10: mod_base = OTHER; note = 2'-O-methylcytidine-3'-phosphate
  modified_base 11: mod_base = OTHER; note = 2'-O-methyluridine-3'-phosphate
  modified_base 12: mod_base = OTHER; note = 2'-O-methyluridine-3'-phosphate
  modified_base 13: mod_base = OTHER; note = 2'-O-methylguanosine-3'-phosphate
  modified_base 14: mod_base = OTHER; note = 2'-deoxy-2'-fluoroguanosine-3'-phosphate
  modified_base 15: mod_base = OTHER; note = 2'-O-methyluridine-3'-phosphate
  modified_base 16: mod_base = OTHER; note = 2'-deoxy-2'-fluorouridine-3'-phosphate
  modified_base 17: mod_base = OTHER; note = 2'-O-methylcytidine-3'-phosphate
  modified_base 18: mod_base = OTHER; note = 2'-O-methyladenosine-3'-phosphate
  modified_base 19: mod_base = OTHER; note = 2'-O-methyladenosine-3'-phosphate
  modified_base 20: mod_base = OTHER; note = 2'-O-methylguanosine-3'-phosphate
  modified_base 21: mod_base = OTHER; note = 2'-O-methyluridine-3'-phosphorothioate
  modified_base 22: mod_base = OTHER; note = 2'-O-methyladenosine-3'-phosphorothioate
  modified_base 23: mod_base = OTHER; note = 2'-O-methyladenosine
tcatgtgctcttggttcaagtaa

SEQ ID NO: 12371 - RNA, 23 nt, synthetic construct
  source 1..23: mol_type = other RNA
  modified_base 1: mod_base = OTHER; note = 2'-O-methyluridine-3'-phosphorothioate 5'-(E)-Vinylphosphonate
  modified_base 2: mod_base = OTHER; note = 2'-deoxy-2'-fluorouridine-3'-phosphorothioate
  modified_base 3: mod_base = OTHER; note = 2'-O-methylcytidine-3'-phosphate
  modified_base 4: mod_base = OTHER; note = 2'-O-methyladenosine-3'-phosphate
  modified_base 5: mod_base = OTHER; note = 2'-O-methyluridine-3'-phosphate
  modified_base 6: mod_base = OTHER; note = 2'-deoxy-2'-fluoroguanosine-3'-phosphate
  modified_base 7: mod_base = OTHER; note = 2'-O-methyluridine-3'-phosphate
  modified_base 8: mod_base = OTHER; note = 2'-O-methylguanosine-3'-phosphate
  modified_base 9: mod_base = OTHER; note = 2'-O-methylcytidine-3'-phosphate
  modified_base 10: mod_base = OTHER; note = 2'-O-methyluridine-3'-phosphate
  modified_base 11: mod_base = OTHER; note = 2'-O-methylcytidine-3'-phosphate
  modified_base 12: mod_base = OTHER; note = 2'-O-methyluridine-3'-phosphate
  modified_base 13: mod_base = OTHER; note = 2'-O-methyluridine-3'-phosphate
  modified_base 14: mod_base = OTHER; note = 2'-deoxy-2'-fluoroguanosine-3'-phosphate
  modified_base 15: mod_base = OTHER; note = 2'-O-methylguanosine-3'-phosphate
  modified_base 16: mod_base = OTHER; note = 2'-deoxy-2'-fluorouridine-3'-phosphate
  modified_base 17: mod_base = OTHER; note = 2'-O-methyluridine-3'-phosphate
  modified_base 18: mod_base = OTHER; note = 2'-O-methylcytidine-3'-phosphate
  modified_base 19: mod_base = OTHER; note = 2'-O-methyladenosine-3'-phosphate
  modified_base 20: mod_base = OTHER; note = 2'-O-methyladenosine-3'-phosphate
  modified_base 21: mod_base = OTHER; note = 2'-O-methylguanosine-3'-phosphorothioate
  modified_base 22: mod_base = OTHER; note = 2'-O-methyluridine-3'-phosphorothioate
  modified_base 23: mod_base = OTHER; note = 2'-O-methyladenosine
ttcatgtgctcttggttcaagta

SEQ ID NO: 12372 - RNA, 23 nt, synthetic construct
  source 1..23: mol_type = other RNA
  modified_base 1: mod_base = OTHER; note = 2'-O-methyluridine-3'-phosphorothioate 5'-(E)-Vinylphosphonate
  modified_base 2: mod_base = OTHER; note = 2'-deoxy-2'-fluoroadenosine-3'-phosphorothioate
  modified_base 3: mod_base = OTHER; note = 2'-O-methyluridine-3'-phosphate
  modified_base 4: mod_base = OTHER; note = 2'-O-methyluridine-3'-phosphate
  modified_base 5: mod_base = OTHER; note = 2'-O-methylcytidine-3'-phosphate
  modified_base 6: mod_base = OTHER; note = 2'-deoxy-2'-fluoroadenosine-3'-phosphate
  modified_base 7: mod_base = OTHER; note = 2'-O-methyluridine-3'-phosphate
  modified_base 8: mod_base = OTHER; note = 2'-O-methylguanosine-3'-phosphate
  modified_base 9: mod_base = OTHER; note = 2'-O-methyluridine-3'-phosphate
  modified_base 10: mod_base = OTHER; note = 2'-O-methylguanosine-3'-phosphate
  modified_base 11: mod_base = OTHER; note = 2'-O-methylcytidine-3'-phosphate
  modified_base 12: mod_base = OTHER; note = 2'-O-methyluridine-3'-phosphate
  modified_base 13: mod_base = OTHER; note = 2'-O-methylcytidine-3'-phosphate
  modified_base 14: mod_base = OTHER; note = 2'-deoxy-2'-fluorouridine-3'-phosphate
  modified_base 15: mod_base = OTHER; note = 2'-O-methyluridine-3'-phosphate
  modified_base 16: mod_base = OTHER; note = 2'-deoxy-2'-fluoroguanosine-3'-phosphate
  modified_base 17: mod_base = OTHER; note = 2'-O-methylguanosine-3'-phosphate
  modified_base 18: mod_base = OTHER; note = 2'-O-methyluridine-3'-phosphate
  modified_base 19: mod_base = OTHER; note = 2'-O-methyluridine-3'-phosphate
  modified_base 20: mod_base = OTHER; note = 2'-O-methylcytidine-3'-phosphate
  modified_base 21: mod_base = OTHER; note = 2'-O-methyladenosine-3'-phosphorothioate
  modified_base 22: mod_base = OTHER; note = 2'-O-methyladenosine-3'-phosphorothioate
  modified_base 23: mod_base = OTHER; note = 2'-O-methylguanosine
tattcatgtgctcttggttcaag

SEQ ID NO: 12373 - RNA, 23 nt, synthetic construct
  source 1..23: mol_type = other RNA
  modified_base 1: mod_base = OTHER; note = 2'-O-methyluridine-3'-phosphorothioate 5'-(E)-Vinylphosphonate
  modified_base 2: mod_base = OTHER; note = 2'-deoxy-2'-fluorocytidine-3'-phosphorothioate
  modified_base 3: mod_base = OTHER; note = 2'-O-methyladenosine-3'-phosphate
  modified_base 4: mod_base = OTHER; note = 2'-O-methyluridine-3'-phosphate
  modified_base 5: mod_base = OTHER; note = 2'-O-methyluridine-3'-phosphate
  modified_base 6: mod_base = OTHER; note = 2'-deoxy-2'-fluorocytidine-3'-phosphate
  modified_base 7: mod_base = OTHER; note = 2'-O-methyladenosine-3'-phosphate
  modified_base 8: mod_base = OTHER; note = 2'-O-methyluridine-3'-phosphate
  modified_base 9: mod_base = OTHER; note = 2'-O-methylguanosine-3'-phosphate
  modified_base 10: mod_base = OTHER; note = 2'-O-methyluridine-3'-phosphate
  modified_base 11: mod_base = OTHER; note = 2'-O-methylguanosine-3'-phosphate
  modified_base 12: mod_base = OTHER; note = 2'-O-methylcytidine-3'-phosphate
  modified_base 13: mod_base = OTHER; note = 2'-O-methyluridine-3'-phosphate
  modified_base 14: mod_base = OTHER; note = 2'-deoxy-2'-fluorocytidine-3'-phosphate
  modified_base 15: mod_base = OTHER; note = 2'-O-methyluridine-3'-phosphate
  modified_base 16: mod_base = OTHER; note = 2'-deoxy-2'-fluorouridine-3'-phosphate
  modified_base 17: mod_base = OTHER; note = 2'-O-methylguanosine-3'-phosphate
  modified_base 18: mod_base = OTHER; note = 2'-O-methylguanosine-3'-phosphate
  modified_base 19: mod_base = OTHER; note = 2'-O-methyluridine-3'-phosphate
  modified_base 20: mod_base = OTHER; note = 2'-O-methyluridine-3'-phosphate
  modified_base 21: mod_base = OTHER; note = 2'-O-methylcytidine-3'-phosphorothioate
  modified_base 22: mod_base = OTHER; note = 2'-O-methyladenosine-3'-phosphorothioate
  modified_base 23: mod_base = OTHER; note = 2'-O-methyladenosine
tcattcatgtgctcttggttcaa

SEQ ID NO: 12374 - RNA, 23 nt, synthetic construct
  source 1..23: mol_type = other RNA
  modified_base 1: mod_base = OTHER; note = 2'-O-methyluridine-3'-phosphorothioate 5'-(E)-Vinylphosphonate
  modified_base 2: mod_base = OTHER; note = 2'-deoxy-2'-fluorouridine-3'-phosphorothioate
  modified_base 3: mod_base = OTHER; note = 2'-O-methylcytidine-3'-phosphate
  modified_base 4: mod_base = OTHER; note = 2'-O-methyladenosine-3'-phosphate
  modified_base 5: mod_base = OTHER; note = 2'-O-methyluridine-3'-phosphate
  modified_base 6: mod_base = OTHER; note = 2'-deoxy-2'-fluorouridine-3'-phosphate
  modified_base 7: mod_base = OTHER; note = 2'-O-methylcytidine-3'-phosphate
  modified_base 8: mod_base = OTHER; note = 2'-O-methyladenosine-3'-phosphate
  modified_base 9: mod_base = OTHER; note = 2'-O-methyluridine-3'-phosphate
  modified_base 10: mod_base = OTHER; note = 2'-O-methylguanosine-3'-phosphate
  modified_base 11: mod_base = OTHER; note = 2'-O-methyluridine-3'-phosphate
  modified_base 12: mod_base = OTHER; note = 2'-O-methylguanosine-3'-phosphate
  modified_base 13: mod_base = OTHER; note = 2'-O-methylcytidine-3'-phosphate
  modified_base 14: mod_base = OTHER; note = 2'-deoxy-2'-fluorouridine-3'-phosphate
  modified_base 15: mod_base = OTHER; note = 2'-O-methylcytidine-3'-phosphate
  modified_base 16: mod_base = OTHER; note = 2'-deoxy-2'-fluorouridine-3'-phosphate
  modified_base 17: mod_base = OTHER; note = 2'-O-methyluridine-3'-phosphate
  modified_base 18: mod_base = OTHER; note = 2'-O-methylguanosine-3'-phosphate
  modified_base 19: mod_base = OTHER; note = 2'-O-methylguanosine-3'-phosphate
  modified_base 20: mod_base = OTHER; note = 2'-O-methyluridine-3'-phosphate
  modified_base 21: mod_base = OTHER; note = 2'-O-methyluridine-3'-phosphorothioate
  modified_base 22: mod_base = OTHER; note = 2'-O-methylcytidine-3'-phosphorothioate
  modified_base 23: mod_base = OTHER; note = 2'-O-methyladenosine
ttcattcatgtgctcttggttca

SEQ ID NO: 12375 - RNA, 23 nt, synthetic construct
  source 1..23: mol_type = other RNA
  modified_base 1: mod_base = OTHER; note = 2'-O-methyluridine-3'-phosphorothioate 5'-(E)-Vinylphosphonate
  modified_base 2: mod_base = OTHER; note = 2'-deoxy-2'-fluorouridine-3'-phosphorothioate
  modified_base 3: mod_base = OTHER; note = 2'-O-methyluridine-3'-phosphate
  modified_base 4: mod_base = OTHER; note = 2'-O-methylcytidine-3'-phosphate
  modified_base 5: mod_base = OTHER; note = 2'-O-methyladenosine-3'-phosphate
  modified_base 6: mod_base = OTHER; note = 2'-deoxy-2'-fluorouridine-3'-phosphate
  modified_base 7: mod_base = OTHER; note = 2'-O-methyluridine-3'-phosphate
  modified_base 8: mod_base = OTHER; note = 2'-O-methylcytidine-3'-phosphate
  modified_base 9: mod_base = OTHER; note = 2'-O-methyladenosine-3'-phosphate
  modified_base 10: mod_base = OTHER; note = 2'-O-methyluridine-3'-phosphate
  modified_base 11: mod_base = OTHER; note = 2'-O-methylguanosine-3'-phosphate
  modified_base 12: mod_base = OTHER; note = 2'-O-methyluridine-3'-phosphate
  modified_base 13: mod_base = OTHER; note = 2'-O-methylguanosine-3'-phosphate
  modified_base 14: mod_base = OTHER; note = 2'-deoxy-2'-fluorocytidine-3'-phosphate
  modified_base 15: mod_base = OTHER; note = 2'-O-methyluridine-3'-phosphate
  modified_base 16: mod_base = OTHER; note = 2'-deoxy-2'-fluorocytidine-3'-phosphate
  modified_base 17: mod_base = OTHER; note = 2'-O-methyluridine-3'-phosphate
  modified_base 18: mod_base = OTHER; note = 2'-O-methyluridine-3'-phosphate
  modified_base 19: mod_base = OTHER; note = 2'-O-methylguanosine-3'-phosphate
  modified_base 20: mod_base = OTHER; note = 2'-O-methylguanosine-3'-phosphate
  modified_base 21: mod_base = OTHER; note = 2'-O-methyluridine-3'-phosphorothioate
  modified_base 22: mod_base = OTHER; note = 2'-O-methyluridine-3'-phosphorothioate
  modified_base 23: mod_base = OTHER; note = 2'-O-methylcytidine
tttcattcatgtgctcttggttc

SEQ ID NO: 12376 - RNA, 23 nt, synthetic construct
  source 1..23: mol_type = other RNA
  modified_base 1: mod_base = OTHER; note = 2'-O-methyluridine-3'-phosphorothioate 5'-(E)-Vinylphosphonate
  modified_base 2: mod_base = OTHER; note = 2'-deoxy-2'-fluoroguanosine-3'-phosphorothioate
  modified_base 3: mod_base = OTHER; note = 2'-O-methyluridine-3'-phosphate
  modified_base 4: mod_base = OTHER; note = 2'-O-methyluridine-3'-phosphate
  modified_base 5: mod_base = OTHER; note = 2'-O-methylcytidine-3'-phosphate
  modified_base 6: mod_base = OTHER; note = 2'-deoxy-2'-fluoroadenosine-3'-phosphate
  modified_base 7: mod_base = OTHER; note = 2'-O-methyluridine-3'-phosphate
  modified_base 8: mod_base = OTHER; note = 2'-O-methyluridine-3'-phosphate
  modified_base 9: mod_base = OTHER; note = 2'-O-methylcytidine-3'-phosphate
  modified_base 10: mod_base = OTHER; note = 2'-O-methyladenosine-3'-phosphate
  modified_base 11: mod_base = OTHER; note = 2'-O-methyluridine-3'-phosphate
  modified_base 12: mod_base = OTHER; note = 2'-O-methylguanosine-3'-phosphate
  modified_base 13: mod_base = OTHER; note = 2'-O-methyluridine-3'-phosphate
  modified_base 14: mod_base = OTHER; note = 2'-deoxy-2'-fluoroguanosine-3'-phosphate
  modified_base 15: mod_base = OTHER; note = 2'-O-methylcytidine-3'-phosphate
  modified_base 16: mod_base = OTHER; note = 2'-deoxy-2'-fluorouridine-3'-phosphate
  modified_base 17: mod_base = OTHER; note = 2'-O-methylcytidine-3'-phosphate
  modified_base 18: mod_base = OTHER; note = 2'-O-methyluridine-3'-phosphate
  modified_base 19: mod_base = OTHER; note = 2'-O-methyluridine-3'-phosphate
  modified_base 20: mod_base = OTHER; note = 2'-O-methylguanosine-3'-phosphate
  modified_base 21: mod_base = OTHER; note = 2'-O-methylguanosine-3'-phosphorothioate
  modified_base 22: mod_base = OTHER; note = 2'-O-methyluridine-3'-phosphorothioate
  modified_base 23: mod_base = OTHER; note = 2'-O-methyluridine
tgttcattcatgtgctcttggtt

SEQ ID NO: 12377 - RNA, 23 nt, synthetic construct
  source 1..23: mol_type = other RNA
  modified_base 1: mod_base = OTHER; note = 2'-O-methyluridine-3'-phosphorothioate 5'-(E)-Vinylphosphonate
  modified_base 2: mod_base = OTHER; note = 2'-deoxy-2'-fluorouridine-3'-phosphorothioate
  modified_base 3: mod_base = OTHER; note = 2'-O-methylguanosine-3'-phosphate
  modified_base 4: mod_base = OTHER; note = 2'-O-methyluridine-3'-phosphate
  modified_base 5: mod_base = OTHER; note = 2'-O-methyluridine-3'-phosphate
  modified_base 6: mod_base = OTHER; note = 2'-deoxy-2'-fluorocytidine-3'-phosphate
  modified_base 7: mod_base = OTHER; note = 2'-O-methyladenosine-3'-phosphate
  modified_base 8: mod_base = OTHER; note = 2'-O-methyluridine-3'-phosphate
  modified_base 9: mod_base = OTHER; note = 2'-O-methyluridine-3'-phosphate
  modified_base 10: mod_base = OTHER; note = 2'-O-methylcytidine-3'-phosphate
  modified_base 11: mod_base = OTHER; note = 2'-O-methyladenosine-3'-phosphate
  modified_base 12: mod_base = OTHER; note = 2'-O-methyluridine-3'-phosphate
  modified_base 13: mod_base = OTHER; note = 2'-O-methylguanosine-3'-phosphate
  modified_base 14: mod_base = OTHER; note = 2'-deoxy-2'-fluorouridine-3'-phosphate
  modified_base 15: mod_base = OTHER; note = 2'-O-methylguanosine-3'-phosphate
  modified_base 16: mod_base = OTHER; note = 2'-deoxy-2'-fluorocytidine-3'-phosphate
  modified_base 17: mod_base = OTHER; note = 2'-O-methyluridine-3'-phosphate
  modified_base 18: mod_base = OTHER; note = 2'-O-methylcytidine-3'-phosphate
  modified_base 19: mod_base = OTHER; note = 2'-O-methyluridine-3'-phosphate
  modified_base 20: mod_base = OTHER; note = 2'-O-methyluridine-3'-phosphate
  modified_base 21: mod_base = OTHER; note = 2'-O-methylguanosine-3'-phosphorothioate
  modified_base 22: mod_base = OTHER; note = 2'-O-methylguanosine-3'-phosphorothioate
  modified_base 23: mod_base = OTHER; note = 2'-O-methyluridine
ttgttcattcatgtgctcttggt

SEQ ID NO: 12378 - RNA, 23 nt, synthetic construct
  source 1..23: mol_type = other RNA
  modified_base 1: mod_base = OTHER; note = 2'-O-methyluridine-3'-phosphorothioate 5'-(E)-Vinylphosphonate
  modified_base 2: mod_base = OTHER; note = 2'-deoxy-2'-fluorocytidine-3'-phosphorothioate
  modified_base 3: mod_base = OTHER; note = 2'-O-methyluridine-3'-phosphate
  modified_base 4: mod_base = OTHER; note = 2'-O-methylguanosine-3'-phosphate
  modified_base 5: mod_base = OTHER; note = 2'-O-methyluridine-3'-phosphate
  modified_base 6: mod_base = OTHER; note = 2'-deoxy-2'-fluorouridine-3'-phosphate
  modified_base 7: mod_base = OTHER; note = 2'-O-methylcytidine-3'-phosphate
  modified_base 8: mod_base = OTHER; note = 2'-O-methyladenosine-3'-phosphate
  modified_base 9: mod_base = OTHER; note = 2'-O-methyluridine-3'-phosphate
  modified_base 10: mod_base = OTHER; note = 2'-O-methyluridine-3'-phosphate
  modified_base 11: mod_base = OTHER; note = 2'-O-methylcytidine-3'-phosphate
  modified_base 12: mod_base = OTHER; note = 2'-O-methyladenosine-3'-phosphate
  modified_base 13: mod_base = OTHER; note = 2'-O-methyluridine-3'-phosphate
  modified_base 14: mod_base = OTHER; note = 2'-deoxy-2'-fluoroguanosine-3'-phosphate
  modified_base 15: mod_base = OTHER; note = 2'-O-methyluridine-3'-phosphate
  modified_base 16: mod_base = OTHER; note = 2'-deoxy-2'-fluoroguanosine-3'-phosphate
  modified_base 17: mod_base = OTHER; note = 2'-O-methylcytidine-3'-phosphate
  modified_base 18: mod_base = OTHER; note = 2'-O-methyluridine-3'-phosphate
  modified_base 19: mod_base = OTHER; note = 2'-O-methylcytidine-3'-phosphate
  modified_base 20: mod_base = OTHER; note = 2'-O-methyluridine-3'-phosphate
  modified_base 21: mod_base = OTHER; note = 2'-O-methyluridine-3'-phosphorothioate
  modified_base 22: mod_base = OTHER; note = 2'-O-methylguanosine-3'-phosphorothioate
  modified_base 23: mod_base = OTHER; note = 2'-O-methylguanosine
tctgttcattcatgtgctcttgg

SEQ ID NO: 12379 - RNA, 23 nt, synthetic construct
  source 1..23: mol_type = other RNA
  modified_base 1: mod_base = OTHER; note = 2'-O-methyluridine-3'-phosphorothioate 5'-(E)-Vinylphosphonate
  modified_base 2: mod_base = OTHER; note = 2'-deoxy-2'-fluoroadenosine-3'-phosphorothioate
  modified_base 3: mod_base = OTHER; note = 2'-O-methyladenosine-3'-phosphate
  modified_base 4: mod_base = OTHER; note = 2'-O-methyluridine-3'-phosphate
  modified_base 5: mod_base = OTHER; note = 2'-O-methylguanosine-3'-phosphate
  modified_base 6: mod_base = OTHER; note = 2'-deoxy-2'-fluorouridine-3'-phosphate
  modified_base 7: mod_base = OTHER; note = 2'-O-methyluridine-3'-phosphate
  modified_base 8: mod_base = OTHER; note = 2'-O-methyluridine-3'-phosphate
  modified_base 9: mod_base = OTHER; note = 2'-O-methyluridine-3'-phosphate
  modified_base 10: mod_base = OTHER; note = 2'-O-methyluridine-3'-phosphate
  modified_base 11: mod_base = OTHER; note = 2'-O-methyladenosine-3'-phosphate
  modified_base 12: mod_base = OTHER; note = 2'-O-methylcytidine-3'-phosphate
  modified_base 13: mod_base = OTHER; note = 2'-O-methyladenosine-3'-phosphate
  modified_base 14: mod_base = OTHER; note = 2'-deoxy-2'-fluorouridine-3'-phosphate
  modified_base 15: mod_base = OTHER; note = 2'-O-methylcytidine-3'-phosphate
  modified_base 16: mod_base = OTHER; note = 2'-deoxy-2'-fluorouridine-3'-phosphate
  modified_base 17: mod_base = OTHER; note = 2'-O-methyluridine-3'-phosphate
  modified_base 18: mod_base = OTHER; note = 2'-O-methyluridine-3'-phosphate
  modified_base 19: mod_base = OTHER; note = 2'-O-methyluridine-3'-phosphate
  modified_base 20: mod_base = OTHER; note = 2'-O-methylcytidine-3'-phosphate
  modified_base 21: mod_base = OTHER; note = 2'-O-methylcytidine-3'-phosphorothioate
  modified_base 22: mod_base = OTHER; note = 2'-O-methyluridine-3'-phosphorothioate
  modified_base 23: mod_base = OTHER; note = 2'-O-methylguanosine
taatgtttttacatcttttcctg

SEQ ID NO: 12380 - RNA, 23 nt, synthetic construct
  source 1..23: mol_type = other RNA
  modified_base 1: mod_base = OTHER; note = 2'-O-methyluridine-3'-phosphorothioate 5'-(E)-Vinylphosphonate
  modified_base 2: mod_base = OTHER; note = 2'-deoxy-2'-fluoroguanosine-3'-phosphorothioate
  modified_base 3: mod_base = OTHER; note = 2'-O-methyluridine-3'-phosphate
  modified_base 4: mod_base = OTHER; note = 2'-O-methyluridine-3'-phosphate
  modified_base 5: mod_base = OTHER; note = 2'-O-methyluridine-3'-phosphate
  modified_base 6: mod_base = OTHER; note = 2'-deoxy-2'-fluorouridine-3'-phosphate
  modified_base 7: mod_base = OTHER; note = 2'-O-methylcytidine-3'-phosphate
  modified_base 8: mod_base = OTHER; note = 2'-O-methyladenosine-3'-phosphate
  modified_base 9: mod_base = OTHER; note = 2'-O-methyluridine-3'-phosphate
  modified_base 10: mod_base = OTHER; note = 2'-O-methylcytidine-3'-phosphate
  modified_base 11: mod_base = OTHER; note = 2'-O-methyluridine-3'-phosphate
  modified_base 12: mod_base = OTHER; note = 2'-O-methylcytidine-3'-phosphate
  modified_base 13: mod_base = OTHER; note = 2'-O-methyladenosine-3'-phosphate
  modified_base 14: mod_base = OTHER; note = 2'-deoxy-2'-fluoroguanosine-3'-phosphate
  modified_base 15: mod_base = OTHER; note = 2'-O-methyladenosine-3'-phosphate
  modified_base 16: mod_base = OTHER; note = 2'-deoxy-2'-fluoroadenosine-3'-phosphate
  modified_base 17: mod_base = OTHER; note = 2'-O-methyladenosine-3'-phosphate
  modified_base 18: mod_base = OTHER; note = 2'-O-methyladenosine-3'-phosphate
  modified_base 19: mod_base = OTHER; note = 2'-O-methyladenosine-3'-phosphate
  modified_base 20: mod_base = OTHER; note = 2'-O-methyladenosine-3'-phosphate
  modified_base 21: mod_base = OTHER; note = 2'-O-methyladenosine-3'-phosphorothioate
  modified_base 22: mod_base = OTHER; note = 2'-O-methyluridine-3'-phosphorothioate
  modified_base 23: mod_base = OTHER; note = 2'-O-methylguanosine
tgttttcatctcagaaaaaaatg

SEQ ID NO: 12381 - RNA, 23 nt, synthetic construct
  source 1..23: mol_type = other RNA
  modified_base 1: mod_base = OTHER; note = 2'-O-methyluridine-3'-phosphorothioate 5'-(E)-Vinylphosphonate
  modified_base 2: mod_base = OTHER; note = 2'-deoxy-2'-fluorouridine-3'-phosphorothioate
  modified_base 3: mod_base = OTHER; note = 2'-O-methyladenosine-3'-phosphate
  modified_base 4: mod_base = OTHER; note = 2'-O-methylguanosine-3'-phosphate
  modified_base 5: mod_base = OTHER; note = 2'-O-methylcytidine-3'-phosphate
  modified_base 6: mod_base = OTHER; note = 2'-deoxy-2'-fluoroadenosine-3'-phosphate
  modified_base 7: mod_base = OTHER; note = 2'-O-methyluridine-3'-phosphate
  modified_base 8: mod_base = OTHER; note = 2'-O-methylguanosine-3'-phosphate
  modified_base 9: mod_base = OTHER; note = 2'-O-methylcytidine-3'-phosphate
  modified_base 10: mod_base = OTHER; note = 2'-O-methyluridine-3'-phosphate
  modified_base 11: mod_base = OTHER; note = 2'-O-methylcytidine-3'-phosphate
  modified_base 12: mod_base = OTHER; note = 2'-O-methyluridine-3'-phosphate
  modified_base 13: mod_base = OTHER; note = 2'-O-methyladenosine-3'-phosphate
  modified_base 14: mod_base = OTHER; note = 2'-deoxy-2'-fluoroadenosine-3'-phosphate
  modified_base 15: mod_base = OTHER; note = 2'-O-methyluridine-3'-phosphate
  modified_base 16: mod_base = OTHER; note = 2'-deoxy-2'-fluorouridine-3'-phosphate
  modified_base 17: mod_base = OTHER; note = 2'-O-methyluridine-3'-phosphate
  modified_base 18: mod_base = OTHER; note = 2'-O-methylguanosine-3'-phosphate
  modified_base 19: mod_base = OTHER; note = 2'-O-methylcytidine-3'-phosphate
  modified_base 20: mod_base = OTHER; note = 2'-O-methyladenosine-3'-phosphate
  modified_base 21: mod_base = OTHER; note = 2'-O-methyluridine-3'-phosphorothioate
  modified_base 22: mod_base = OTHER; note = 2'-O-methylguanosine-3'-phosphorothioate
  modified_base 23: mod_base = OTHER; note = 2'-O-methyluridine
ttagcatgctctaatttgcatgt

SEQ ID NO: 12382 - RNA, 23 nt, synthetic construct
  source 1..23: mol_type = other RNA
  modified_base 1: mod_base = OTHER; note = 2'-O-methyluridine-3'-phosphorothioate 5'-(E)-Vinylphosphonate
  modified_base 2: mod_base = OTHER; note = 2'-deoxy-2'-fluoroadenosine-3'-phosphorothioate
  modified_base 3: mod_base = OTHER; note = 2'-O-methyluridine-3'-phosphate
  modified_base 4: mod_base = OTHER; note = 2'-O-methyladenosine-3'-phosphate
  modified_base 5: mod_base = OTHER; note = 2'-O-methylguanosine-3'-phosphate
  modified_base 6: mod_base = OTHER; note = 2'-deoxy-2'-fluorocytidine-3'-phosphate
  modified_base 7: mod_base = OTHER; note = 2'-O-methyladenosine-3'-phosphate
  modified_base 8: mod_base = OTHER; note = 2'-O-methyluridine-3'-phosphate
  modified_base 9: mod_base = OTHER; note = 2'-O-methylguanosine-3'-phosphate
  modified_base 10: mod_base = OTHER; note = 2'-O-methylcytidine-3'-phosphate
  modified_base 11: mod_base = OTHER; note = 2'-O-methyluridine-3'-phosphate
  modified_base 12: mod_base = OTHER; note = 2'-O-methylcytidine-3'-phosphate
  modified_base 13: mod_base = OTHER; note = 2'-O-methyluridine-3'-phosphate
  modified_base 14: mod_base = OTHER; note = 2'-deoxy-2'-fluoroadenosine-3'-phosphate
  modified_base 15: mod_base = OTHER; note = 2'-O-methyladenosine-3'-phosphate
  modified_base 16: mod_base = OTHER; note = 2'-deoxy-2'-fluorouridine-3'-phosphate
  modified_base 17: mod_base = OTHER; note = 2'-O-methyluridine-3'-phosphate
  modified_base 18: mod_base = OTHER; note = 2'-O-methyluridine-3'-phosphate
  modified_base 19: mod_base = OTHER; note = 2'-O-methylguanosine-3'-phosphate
  modified_base 20: mod_base = OTHER; note = 2'-O-methylcytidine-3'-phosphate
  modified_base 21: mod_base = OTHER; note = 2'-O-methyladenosine-3'-phosphorothioate
  modified_base 22: mod_base = OTHER; note = 2'-O-methyluridine-3'-phosphorothioate
  modified_base 23: mod_base = OTHER; note = 2'-O-methylguanosine
tatagcatgctctaatttgcatg

SEQ ID NO: 12383 - RNA, 23 nt, synthetic construct
  source 1..23: mol_type = other RNA
  modified_base 1: mod_base = OTHER; note = 2'-O-methyluridine-3'-phosphorothioate 5'-(E)-Vinylphosphonate
  modified_base 2: mod_base = OTHER; note = 2'-deoxy-2'-fluoroadenosine-3'-phosphorothioate
  modified_base 3: mod_base = OTHER; note = 2'-O-methyladenosine-3'-phosphate
  modified_base 4: mod_base = OTHER; note = 2'-O-methylguanosine-3'-phosphate
  modified_base 5: mod_base = OTHER; note = 2'-O-methyladenosine-3'-phosphate
  modified_base 6: mod_base = OTHER; note = 2'-deoxy-2'-fluorouridine-3'-phosphate
  modified_base 7: mod_base = OTHER; note = 2'-O-methyladenosine-3'-phosphate
  modified_base 8: mod_base = OTHER; note = 2'-O-methylguanosine-3'-phosphate
  modified_base 9: mod_base = OTHER; note = 2'-O-methylcytidine-3'-phosphate
  modified_base 10: mod_base = OTHER; note = 2'-O-methyladenosine-3'-phosphate
  modified_base 11: mod_base = OTHER; note = 2'-O-methyluridine-3'-phosphate
  modified_base 12: mod_base = OTHER; note = 2'-O-methylguanosine-3'-phosphate
  modified_base 13: mod_base = OTHER; note = 2'-O-methylcytidine-3'-phosphate
  modified_base 14: mod_base = OTHER; note = 2'-deoxy-2'-fluorouridine-3'-phosphate
  modified_base 15: mod_base = OTHER; note = 2'-O-methylcytidine-3'-phosphate
  modified_base 16: mod_base = OTHER; note = 2'-deoxy-2'-fluorouridine-3'-phosphate
  modified_base 17: mod_base = OTHER; note = 2'-O-methyladenosine-3'-phosphate
  modified_base 18: mod_base = OTHER; note = 2'-O-methyladenosine-3'-phosphate
  modified_base 19: mod_base = OTHER; note = 2'-O-methyluridine-3'-phosphate
  modified_base 20: mod_base = OTHER; note = 2'-O-methyluridine-3'-phosphate
  modified_base 21: mod_base = OTHER; note = 2'-O-methyluridine-3'-phosphorothioate
  modified_base 22: mod_base = OTHER; note = 2'-O-methylguanosine-3'-phosphorothioate
  modified_base 23: mod_base = OTHER; note = 2'-O-methylcytidine
taagatagcatgctctaatttgc

SEQ ID NO: 12384 - RNA, 23 nt, synthetic construct
  source 1..23: mol_type = other RNA
  modified_base 1: mod_base = OTHER; note = 2'-O-methyluridine-3'-phosphorothioate 5'-(E)-Vinylphosphonate
  modified_base 2: mod_base = OTHER; note = 2'-deoxy-2'-fluoroadenosine-3'-phosphorothioate
  modified_base 3: mod_base = OTHER; note = 2'-O-methylcytidine-3'-phosphate
  modified_base 4: mod_base = OTHER; note = 2'-O-methylcytidine-3'-phosphate
  modified_base 5: mod_base = OTHER; note = 2'-O-methyluridine-3'-phosphate
  modified_base 6: mod_base = OTHER; note = 2'-deoxy-2'-fluoroadenosine-3'-phosphate
  modified_base 7: mod_base = OTHER; note = 2'-O-methyladenosine-3'-phosphate
  modified_base 8: mod_base = OTHER; note = 2'-O-methyladenosine-3'-phosphate
  modified_base 9: mod_base = OTHER; note = 2'-O-methylguanosine-3'-phosphate
  modified_base 10: mod_base = OTHER; note = 2'-O-methyladenosine-3'-phosphate
  modified_base 11: mod_base = OTHER; note = 2'-O-methyluridine-3'-phosphate
  modified_base 12: mod_base = OTHER; note = 2'-O-methyladenosine-3'-phosphate
  modified_base 13: mod_base = OTHER; note = 2'-O-methylguanosine-3'-phosphate
  modified_base 14: mod_base = OTHER; note = 2'-deoxy-2'-fluorocytidine-3'-phosphate
  modified_base 15: mod_base = OTHER; note = 2'-O-methyladenosine-3'-phosphate
  modified_base 16: mod_base = OTHER; note = 2'-deoxy-2'-fluorouridine-3'-phosphate
  modified_base 17: mod_base = OTHER; note = 2'-O-methylguanosine-3'-phosphate
  modified_base 18: mod_base = OTHER; note = 2'-O-methylcytidine-3'-phosphate
  modified_base 19: mod_base = OTHER; note = 2'-O-methyluridine-3'-phosphate
  modified_base 20: mod_base = OTHER; note = 2'-O-methylcytidine-3'-phosphate
  modified_base 21: mod_base = OTHER; note = 2'-O-methyluridine-3'-phosphorothioate
  modified_base 22: mod_base = OTHER; note = 2'-O-methyladenosine-3'-phosphorothioate
  modified_base 23: mod_base = OTHER; note = 2'-O-methyladenosine
tacctaaagatagcatgctctaa

SEQ ID NO: 12385 - RNA, 23 nt, synthetic construct
  source 1..23: mol_type = other RNA
  modified_base 1: mod_base = OTHER; note = 2'-O-methyluridine-3'-phosphorothioate 5'-(E)-Vinylphosphonate
  modified_base 2: mod_base = OTHER; note = 2'-deoxy-2'-fluoroadenosine-3'-phosphorothioate
  modified_base 3: mod_base = OTHER; note = 2'-O-methyluridine-3'-phosphate
  modified_base 4: mod_base = OTHER; note = 2'-O-methylcytidine-3'-phosphate
  modified_base 5: mod_base = OTHER; note = 2'-O-methyladenosine-3'-phosphate
  modified_base 6: mod_base = OTHER; note = 2'-deoxy-2'-fluorocytidine-3'-phosphate
  modified_base 7: mod_base = OTHER; note = 2'-O-methylcytidine-3'-phosphate
  modified_base 8: mod_base = OTHER; note = 2'-O-methyluridine-3'-phosphate
  modified_base 9: mod_base = OTHER; note = 2'-O-methyladenosine-3'-phosphate
  modified_base 10: mod_base = OTHER; note = 2'-O-methyladenosine-3'-phosphate
  modified_base 11: mod_base = OTHER; note = 2'-O-methyladenosine-3'-phosphate
  modified_base 12: mod_base = OTHER; note = 2'-O-methylguanosine-3'-phosphate
  modified_base 13: mod_base = OTHER; note = 2'-O-methyladenosine-3'-phosphate
  modified_base 14: mod_base = OTHER; note = 2'-deoxy-2'-fluorouridine-3'-phosphate
  modified_base 15: mod_base = OTHER; note = 2'-O-methyladenosine-3'-phosphate
  modified_base 16: mod_base = OTHER; note = 2'-deoxy-2'-fluoroguanosine-3'-phosphate
  modified_base 17: mod_base = OTHER; note = 2'-O-methylcytidine-3'-phosphate
  modified_base 18: mod_base = OTHER; note = 2'-O-methyladenosine-3'-phosphate
  modified_base 19: mod_base = OTHER; note = 2'-O-methyluridine-3'-phosphate
  modified_base 20: mod_base = OTHER; note = 2'-O-methylguanosine-3'-phosphate
  modified_base 21: mod_base = OTHER; note = 2'-O-methylcytidine-3'-phosphorothioate
  modified_base 22: mod_base = OTHER; note = 2'-O-methyluridine-3'-phosphorothioate
  modified_base 23: mod_base = OTHER; note = 2'-O-methylcytidine
tatcacctaaagatagcatgctc

SEQ ID NO: 12386 - RNA, 23 nt, synthetic construct
  source 1..23: mol_type = other RNA
  modified_base 1: mod_base = OTHER; note = 2'-O-methyluridine-3'-phosphorothioate 5'-(E)-Vinylphosphonate
  modified_base 2: mod_base = OTHER; note = 2'-deoxy-2'-fluorouridine-3'-phosphorothioate
  modified_base 3: mod_base = OTHER; note = 2'-O-methyladenosine-3'-phosphate
  modified_base 4: mod_base = OTHER; note = 2'-O-methylguanosine-3'-phosphate
  modified_base 5: mod_base = OTHER; note = 2'-O-methyladenosine-3'-phosphate
  modified_base 6: mod_base = OTHER; note = 2'-deoxy-2'-fluorouridine-3'-phosphate
  modified_base 7: mod_base = OTHER; note = 2'-O-methyluridine-3'-phosphate
  modified_base 8: mod_base = OTHER; note = 2'-O-methylguanosine-3'-phosphate
  modified_base 9: mod_base = OTHER; note = 2'-O-methylcytidine-3'-phosphate
  modified_base 10: mod_base = OTHER; note = 2'-O-methyladenosine-3'-phosphate
  modified_base 11: mod_base = OTHER; note = 2'-O-methyluridine-3'-phosphate
  modified_base 12: mod_base = OTHER; note = 2'-O-methylcytidine-3'-phosphate
  modified_base 13: mod_base = OTHER; note = 2'-O-methyladenosine-3'-phosphate
  modified_base 14: mod_base = OTHER; note = 2'-deoxy-2'-fluorocytidine-3'-phosphate
  modified_base 15: mod_base = OTHER; note = 2'-O-methylcytidine-3'-phosphate
  modified_base 16: mod_base = OTHER; note = 2'-deoxy-2'-fluorouridine-3'-phosphate
  modified_base 17: mod_base = OTHER; note = 2'-O-methyladenosine-3'-phosphate
  modified_base 18: mod_base = OTHER; note = 2'-O-methyladenosine-3'-phosphate
  modified_base 19: mod_base = OTHER; note = 2'-O-methyladenosine-3'-phosphate
  modified_base 20: mod_base = OTHER; note = 2'-O-methylguanosine-3'-phosphate
  modified_base 21: mod_base = OTHER; note = 2'-O-methyladenosine-3'-phosphorothioate
  modified_base 22: mod_base = OTHER; note = 2'-O-methyluridine-3'-phosphorothioate
  modified_base 23: mod_base = OTHER; note = 2'-O-methyladenosine
ttagattgcatcacctaaagata

SEQ ID NO: 12387 - RNA, 23 nt, synthetic construct
  source 1..23: mol_type = other RNA
  modified_base 1: mod_base = OTHER; note = 2'-O-methyluridine-3'-phosphorothioate 5'-(E)-Vinylphosphonate
  modified_base 2: mod_base = OTHER; note = 2'-deoxy-2'-fluorouridine-3'-phosphorothioate
  modified_base 3: mod_base = OTHER; note = 2'-O-methyluridine-3'-phosphate
  modified_base 4: mod_base = OTHER; note = 2'-O-methyluridine-3'-phosphate
  modified_base 5: mod_base = OTHER; note = 2'-O-methyladenosine-3'-phosphate
  modified_base 6: mod_base = OTHER; note = 2'-deoxy-2'-fluoroadenosine-3'-phosphate
  modified_base 7: mod_base = OTHER; note = 2'-O-methyladenosine-3'-phosphate
  modified_base 8: mod_base = OTHER; note = 2'-O-methyladenosine-3'-phosphate
  modified_base 9: mod_base = OTHER; note = 2'-O-methyladenosine-3'-phosphate
  modified_base 10: mod_base = OTHER; note = 2'-O-methylguanosine-3'-phosphate
  modified_base 11: mod_base = OTHER; note = 2'-O-methyluridine-3'-phosphate
  modified_base 12: mod_base = OTHER; note = 2'-O-methylcytidine-3'-phosphate
  modified_base 13: mod_base = OTHER; note = 2'-O-methylcytidine-3'-phosphate
  modified_base 14: mod_base = OTHER; note = 2'-deoxy-2'-fluorouridine-3'-phosphate
  modified_base 15: mod_base = OTHER; note = 2'-O-methylguanosine-3'-phosphate
  modified_base 16: mod_base = OTHER; note = 2'-deoxy-2'-fluorocytidine-3'-phosphate
  modified_base 17: mod_base = OTHER; note = 2'-O-methyluridine-3'-phosphate
  modified_base 18: mod_base = OTHER; note = 2'-O-methyladenosine-3'-phosphate
  modified_base 19: mod_base = OTHER; note = 2'-O-methyladenosine-3'-phosphate
  modified_base 20: mod_base = OTHER; note = 2'-O-methylcytidine-3'-phosphate
  modified_base 21: mod_base = OTHER; note = 2'-O-methyluridine-3'-phosphorothioate
  modified_base 22: mod_base = OTHER; note = 2'-O-methyluridine-3'-phosphorothioate
  modified_base 23: mod_base = OTHER; note = 2'-O-methyladenosine
ttttaaaaagtcctgctaactta

SEQ ID NO: 12388 - RNA, 23 nt, synthetic construct
  source 1..23: mol_type = other RNA
  modified_base 1: mod_base = OTHER; note = 2'-O-methyluridine-3'-phosphorothioate 5'-(E)-Vinylphosphonate
  modified_base 2: mod_base = OTHER; note = 2'-deoxy-2'-fluorouridine-3'-phosphorothioate
  modified_base 3: mod_base = OTHER; note = 2'-O-methyluridine-3'-phosphate
  modified_base 4: mod_base = OTHER; note = 2'-O-methyluridine-3'-phosphate
  modified_base 5: mod_base = OTHER; note = 2'-O-methyluridine-3'-phosphate
  modified_base 6: mod_base = OTHER; note = 2'-deoxy-2'-fluoroadenosine-3'-phosphate
  modified_base 7: mod_base = OTHER; note = 2'-O-methyladenosine-3'-phosphate
  modified_base 8: mod_base = OTHER; note = 2'-O-methyladenosine-3'-phosphate
  modified_base 9: mod_base = OTHER; note = 2'-O-methyladenosine-3'-phosphate
  modified_base 10: mod_base = OTHER; note = 2'-O-methyladenosine-3'-phosphate
  modified_base 11: mod_base = OTHER; note = 2'-O-methylguanosine-3'-phosphate
  modified_base 12: mod_base = OTHER; note = 2'-O-methyluridine-3'-phosphate
  modified_base 13: mod_base = OTHER; note = 2'-O-methylcytidine-3'-phosphate
  modified_base 14: mod_base = OTHER; note = 2'-deoxy-2'-fluorocytidine-3'-phosphate
  modified_base 15: mod_base = OTHER; note = 2'-O-methyluridine-3'-phosphate
  modified_base 16: mod_base = OTHER; note = 2'-deoxy-2'-fluoroguanosine-3'-phosphate
  modified_base 17: mod_base = OTHER; note = 2'-O-methylcytidine-3'-phosphate
  modified_base 18: mod_base = OTHER; note = 2'-O-methyluridine-3'-phosphate
  modified_base 19: mod_base = OTHER; note = 2'-O-methyladenosine-3'-phosphate
  modified_base 20: mod_base = OTHER; note = 2'-O-methyladenosine-3'-phosphate
  modified_base 21: mod_base = OTHER; note = 2'-O-methylcytidine-3'-phosphorothioate
  modified_base 22: mod_base = OTHER; note = 2'-O-methyluridine-3'-phosphorothioate
  modified_base 23: mod_base = OTHER; note = 2'-O-methyluridine
tttttaaaaagtcctgctaactt

SEQ ID NO: 12389 - RNA, 23 nt, synthetic construct
  source 1..23: mol_type = other RNA
  modified_base 1: mod_base = OTHER; note = 2'-O-methyluridine-3'-phosphorothioate 5'-(E)-Vinylphosphonate
  modified_base 2: mod_base = OTHER; note = 2'-deoxy-2'-fluorouridine-3'-phosphorothioate
  modified_base 3: mod_base = OTHER; note = 2'-O-methyluridine-3'-phosphate
  modified_base 4: mod_base = OTHER; note = 2'-O-methyluridine-3'-phosphate
  modified_base 5: mod_base = OTHER; note = 2'-O-methyluridine-3'-phosphate
  modified_base 6: mod_base = OTHER; note = 2'-deoxy-2'-fluorouridine-3'-phosphate
  modified_base 7: mod_base = OTHER; note = 2'-O-methyladenosine-3'-phosphate
  modified_base 8: mod_base = OTHER; note = 2'-O-methyladenosine-3'-phosphate
  modified_base 9: mod_base = OTHER; note = 2'-O-methyladenosine-3'-phosphate
  modified_base 10: mod_base = OTHER; note = 2'-O-methyladenosine-3'-phosphate
  modified_base 11: mod_base = OTHER; note = 2'-O-methyladenosine-3'-phosphate
  modified_base 12: mod_base = OTHER; note = 2'-O-methylguanosine-3'-phosphate
  modified_base 13: mod_base = OTHER; note = 2'-O-methyluridine-3'-phosphate
  modified_base 14: mod_base = OTHER; note = 2'-deoxy-2'-fluorocytidine-3'-phosphate
  modified_base 15: mod_base = OTHER; note = 2'-O-methylcytidine-3'-phosphate
  modified_base 16: mod_base = OTHER; note = 2'-deoxy-2'-fluorouridine-3'-phosphate
  modified_base 17: mod_base = OTHER; note = 2'-O-methylguanosine-3'-phosphate
  modified_base 18: mod_base = OTHER; note = 2'-O-methylcytidine-3'-phosphate
  modified_base 19: mod_base = OTHER; note = 2'-O-methyluridine-3'-phosphate
  modified_base 20: mod_base = OTHER; note = 2'-O-methyladenosine-3'-phosphate
  modified_base 21: mod_base = OTHER; note = 2'-O-methyladenosine-3'-phosphorothioate
  modified_base 22: mod_base = OTHER; note = 2'-O-methylcytidine-3'-phosphorothioate
  modified_base 23: mod_base = OTHER; note = 2'-O-methyluridine
ttttttaaaaagtcctgctaact

SEQ ID NO: 12390 - RNA, 23 nt, synthetic construct
  source 1..23: mol_type = other RNA
  modified_base 1: mod_base = OTHER; note = 2'-O-methyluridine-3'-phosphorothioate 5'-(E)-Vinylphosphonate
  modified_base 2: mod_base = OTHER; note = 2'-deoxy-2'-fluoroadenosine-3'-phosphorothioate
  modified_base 3: mod_base = OTHER; note = 2'-O-methyluridine-3'-phosphate
  modified_base 4: mod_base = OTHER; note = 2'-O-methyluridine-3'-phosphate
  modified_base 5: mod_base = OTHER; note = 2'-O-methyluridine-3'-phosphate
  modified_base 6: mod_base = OTHER; note = 2'-deoxy-2'-fluorouridine-3'-phosphate
  modified_base 7: mod_base = OTHER; note = 2'-O-methyluridine-3'-phosphate
  modified_base 8: mod_base = OTHER; note = 2'-O-methyladenosine-3'-phosphate
  modified_base 9: mod_base = OTHER; note = 2'-O-methyladenosine-3'-phosphate
  modified_base 10: mod_base = OTHER; note = 2'-O-methyladenosine-3'-phosphate
  modified_base 11: mod_base = OTHER; note = 2'-O-methyladenosine-3'-phosphate
  modified_base 12: mod_base = OTHER; note = 2'-O-methyladenosine-3'-phosphate
  modified_base 13: mod_base = OTHER; note = 2'-O-methylguanosine-3'-phosphate
  modified_base 14: mod_base = OTHER; note = 2'-deoxy-2'-fluorouridine-3'-phosphate
  modified_base 15: mod_base = OTHER; note = 2'-O-methylcytidine-3'-phosphate
  modified_base 16: mod_base = OTHER; note = 2'-deoxy-2'-fluorocytidine-3'-phosphate
  modified_base 17: mod_base = OTHER; note = 2'-O-methyluridine-3'-phosphate
  modified_base 18: mod_base = OTHER; note = 2'-O-methylguanosine-3'-phosphate
  modified_base 19: mod_base = OTHER; note = 2'-O-methylcytidine-3'-phosphate
  modified_base 20: mod_base = OTHER; note = 2'-O-methyluridine-3'-phosphate
  modified_base 21: mod_base = OTHER; note = 2'-O-methyladenosine-3'-phosphorothioate
  modified_base 22: mod_base = OTHER; note = 2'-O-methyladenosine-3'-phosphorothioate
  modified_base 23: mod_base = OTHER; note = 2'-O-methylcytidine
tatttttaaaaagtcctgctaac

SEQ ID NO: 12391 - RNA, 23 nt, synthetic construct
  source 1..23: mol_type = other RNA
  modified_base 1: mod_base = OTHER; note = 2'-O-methyluridine-3'-phosphorothioate 5'-(E)-Vinylphosphonate
  modified_base 2: mod_base = OTHER; note = 2'-deoxy-2'-fluorouridine-3'-phosphorothioate
  modified_base 3: mod_base = OTHER; note = 2'-O-methylcytidine-3'-phosphate
  modified_base 4: mod_base = OTHER; note = 2'-O-methylguanosine-3'-phosphate
  modified_base 5: mod_base = OTHER; note = 2'-O-methyladenosine-3'-phosphate
  modified_base 6: mod_base = OTHER; note = 2'-deoxy-2'-fluorouridine-3'-phosphate
  modified_base 7: mod_base = OTHER; note = 2'-O-methyladenosine-3'-phosphate
  modified_base 8: mod_base = OTHER; note = 2'-O-methyluridine-3'-phosphate
  modified_base 9: mod_base = OTHER; note = 2'-O-methyladenosine-3'-phosphate
  modified_base 10: mod_base = OTHER; note = 2'-O-methyluridine-3'-phosphate
  modified_base 11: mod_base = OTHER; note = 2'-O-methyluridine-3'-phosphate
  modified_base 12: mod_base = OTHER; note = 2'-O-methyladenosine-3'-phosphate
  modified_base 13: mod_base = OTHER; note = 2'-O-methyladenosine-3'-phosphate
  modified_base 14: mod_base = OTHER; note = 2'-deoxy-2'-fluoroadenosine-3'-phosphate
  modified_base 15: mod_base = OTHER; note = 2'-O-methylguanosine-3'-phosphate
  modified_base 16: mod_base = OTHER; note = 2'-deoxy-2'-fluorouridine-3'-phosphate
  modified_base 17: mod_base = OTHER; note = 2'-O-methyluridine-3'-phosphate
  modified_base 18: mod_base = OTHER; note = 2'-O-methyluridine-3'-phosphate
  modified_base 19: mod_base = OTHER; note = 2'-O-methyladenosine-3'-phosphate
  modified_base 20: mod_base = OTHER; note = 2'-O-methylguanosine-3'-phosphate
  modified_base 21: mod_base = OTHER; note = 2'-O-methyladenosine-3'-phosphorothioate
  modified_base 22: mod_base = OTHER; note = 2'-O-methylguanosine-3'-phosphorothioate
  modified_base 23: mod_base = OTHER; note = 2'-O-methylcytidine
ttcgatatattaaagtttagagc

SEQ ID NO: 12392 - RNA, 23 nt, synthetic construct
  source 1..23: mol_type = other RNA
  modified_base 1: mod_base = OTHER; note = 2'-O-methyluridine-3'-phosphorothioate 5'-(E)-Vinylphosphonate
  modified_base 2: mod_base = OTHER; note = 2'-deoxy-2'-fluorocytidine-3'-phosphorothioate
  modified_base 3: mod_base = OTHER; note = 2'-O-methylguanosine-3'-phosphate
  modified_base 4: mod_base = OTHER; note = 2'-O-methyladenosine-3'-phosphate
  modified_base 5: mod_base = OTHER; note = 2'-O-methyluridine-3'-phosphate
  modified_base 6: mod_base = OTHER; note = 2'-deoxy-2'-fluoroadenosine-3'-phosphate
  modified_base 7: mod_base = OTHER; note = 2'-O-methyluridine-3'-phosphate
  modified_base 8: mod_base = OTHER; note = 2'-O-methyladenosine-3'-phosphate
  modified_base 9: mod_base = OTHER; note = 2'-O-methyluridine-3'-phosphate
  modified_base 10: mod_base = OTHER; note = 2'-O-methyluridine-3'-phosphate
  modified_base 11: mod_base = OTHER; note = 2'-O-methyladenosine-3'-phosphate
  modified_base 12: mod_base = OTHER; note = 2'-O-methyladenosine-3'-phosphate
  modified_base 13: mod_base = OTHER; note = 2'-O-methyladenosine-3'-phosphate
  modified_base 14: mod_base = OTHER; note = 2'-deoxy-2'-fluoroguanosine-3'-phosphate
  modified_base 15: mod_base = OTHER; note = 2'-O-methyluridine-3'-phosphate
  modified_base 16: mod_base = OTHER; note = 2'-deoxy-2'-fluorouridine-3'-phosphate
  modified_base 17: mod_base = OTHER; note = 2'-O-methyluridine-3'-phosphate
  modified_base 18: mod_base = OTHER; note = 2'-O-methyladenosine-3'-phosphate
  modified_base 19: mod_base = OTHER; note = 2'-O-methylguanosine-3'-phosphate
  modified_base 20: mod_base = OTHER; note = 2'-O-methyladenosine-3'-phosphate
  modified_base 21: mod_base = OTHER; note = 2'-O-methylguanosine-3'-phosphorothioate
  modified_base 22: mod_base = OTHER; note = 2'-O-methylcytidine-3'-phosphorothioate
  modified_base 23: mod_base = OTHER; note = 2'-O-methyladenosine
tcgatatattaaagtttagagca

SEQ ID NO: 12393 - RNA, 23 nt, synthetic construct
  source 1..23: mol_type = other RNA
  modified_base 1: mod_base = OTHER; note = 2'-O-methyluridine-3'-phosphorothioate 5'-(E)-Vinylphosphonate
  modified_base 2: mod_base = OTHER; note = 2'-deoxy-2'-fluorocytidine-3'-phosphorothioate
  modified_base 3: mod_base = OTHER; note = 2'-O-methylguanosine-3'-phosphate
  modified_base 4: mod_base = OTHER; note = 2'-O-methyluridine-3'-phosphate
  modified_base 5: mod_base = OTHER; note = 2'-O-methyluridine-3'-phosphate
  modified_base 6: mod_base = OTHER; note = 2'-deoxy-2'-fluorocytidine-3'-phosphate
  modified_base 7: mod_base = OTHER; note = 2'-O-methylguanosine-3'-phosphate
  modified_base 8: mod_base = OTHER; note = 2'-O-methyladenosine-3'-phosphate
  modified_base 9: mod_base = OTHER; note = 2'-O-methyluridine-3'-phosphate
  modified_base 10: mod_base = OTHER; note = 2'-O-methyladenosine-3'-phosphate
  modified_base 11: mod_base = OTHER; note = 2'-O-methyluridine-3'-phosphate
  modified_base 12: mod_base = OTHER; note = 2'-O-methyladenosine-3'-phosphate
  modified_base 13: mod_base = OTHER; note = 2'-O-methyluridine-3'-phosphate
  modified_base 14: mod_base = OTHER; note = 2'-deoxy-2'-fluorouridine-3'-phosphate
  modified_base 15: mod_base = OTHER; note = 2'-O-methyladenosine-3'-phosphate
  modified_base 16: mod_base = OTHER; note = 2'-deoxy-2'-fluoroadenosine-3'-phosphate
  modified_base 17: mod_base = OTHER; note = 2'-O-methyladenosine-3'-phosphate
  modified_base 18: mod_base = OTHER; note = 2'-O-methylguanosine-3'-phosphate
  modified_base 19: mod_base = OTHER; note = 2'-O-methyluridine-3'-phosphate
  modified_base 20: mod_base = OTHER; note = 2'-O-methyluridine-3'-phosphate
  modified_base 21: mod_base = OTHER; note = 2'-O-methyluridine-3'-phosphorothioate
  modified_base 22: mod_base = OTHER; note = 2'-O-methyladenosine-3'-phosphorothioate
  modified_base 23: mod_base = OTHER; note = 2'-O-methylguanosine
tcgttcgatatattaaagtttag

SEQ ID NO: 12394 - RNA, 23 nt, synthetic construct
  source 1..23: mol_type = other RNA
  modified_base 1: mod_base = OTHER; note = 2'-O-methyluridine-3'-phosphorothioate 5'-(E)-Vinylphosphonate
  modified_base 2: mod_base = OTHER; note = 2'-deoxy-2'-fluorocytidine-3'-phosphorothioate
  modified_base 3: mod_base = OTHER; note = 2'-O-methyladenosine-3'-phosphate
  modified_base 4: mod_base = OTHER; note = 2'-O-methylcytidine-3'-phosphate
  modified_base 5: mod_base = OTHER; note = 2'-O-methylguanosine-3'-phosphate
  modified_base 6: mod_base = OTHER; note = 2'-deoxy-2'-fluorouridine-3'-phosphate
  modified_base 7: mod_base = OTHER; note = 2'-O-methyluridine-3'-phosphate
  modified_base 8: mod_base = OTHER; note = 2'-O-methylcytidine-3'-phosphate
  modified_base 9: mod_base = OTHER; note = 2'-O-methylguanosine-3'-phosphate
  modified_base 10: mod_base = OTHER; note = 2'-O-methyladenosine-3'-phosphate
  modified_base 11: mod_base = OTHER; note = 2'-O-methyluridine-3'-phosphate
  modified_base 12: mod_base = OTHER; note = 2'-O-methyladenosine-3'-phosphate
  modified_base 13: mod_base = OTHER; note = 2'-O-methyluridine-3'-phosphate
  modified_base 14: mod_base = OTHER; note = 2'-deoxy-2'-fluoroadenosine-3'-phosphate
  modified_base 15: mod_base = OTHER; note = 2'-O-methyluridine-3'-phosphate
  modified_base 16: mod_base = OTHER; note = 2'-deoxy-2'-fluorouridine-3'-phosphate
  modified_base 17: mod_base = OTHER; note = 2'-O-methyladenosine-3'-phosphate
  modified_base 18: mod_base = OTHER; note = 2'-O-methyladenosine-3'-phosphate
  modified_base 19: mod_base = OTHER; note = 2'-O-methyladenosine-3'-phosphate
  modified_base 20: mod_base = OTHER; note = 2'-O-methylguanosine-3'-phosphate
  modified_base 21: mod_base = OTHER; note = 2'-O-methyluridine-3'-phosphorothioate
  modified_base 22: mod_base = OTHER; note = 2'-O-methyluridine-3'-phosphorothioate
  modified_base 23: mod_base = OTHER; note = 2'-O-methyluridine
tcacgttcgatatattaaagttt

SEQ ID NO: 12395 - RNA, 23 nt, synthetic construct
  source 1..23: mol_type = other RNA
  modified_base 1: mod_base = OTHER; note = 2'-O-methyluridine-3'-phosphorothioate 5'-(E)-Vinylphosphonate
  modified_base 2: mod_base = OTHER; note = 2'-deoxy-2'-fluorouridine-3'-phosphorothioate
  modified_base 3: mod_base = OTHER; note = 2'-O-methylcytidine-3'-phosphate
  modified_base 4: mod_base = OTHER; note = 2'-O-methyladenosine-3'-phosphate
  modified_base 5: mod_base = OTHER; note = 2'-O-methylcytidine-3'-phosphate
  modified_base 6: mod_base = OTHER; note = 2'-deoxy-2'-fluoroguanosine-3'-phosphate
  modified_base 7: mod_base = OTHER; note = 2'-O-methyluridine-3'-phosphate
  modified_base 8: mod_base = OTHER; note = 2'-O-methyluridine-3'-phosphate
  modified_base 9: mod_base = OTHER; note = 2'-O-methylcytidine-3'-phosphate
  modified_base 10: mod_base = OTHER; note = 2'-O-methylguanosine-3'-phosphate
  modified_base 11: mod_base = OTHER; note = 2'-O-methyladenosine-3'-phosphate
  modified_base 12: mod_base = OTHER; note = 2'-O-methyluridine-3'-phosphate
  modified_base 13: mod_base = OTHER; note = 2'-O-methyladenosine-3'-phosphate
  modified_base 14: mod_base = OTHER; note = 2'-deoxy-2'-fluorouridine-3'-phosphate
  modified_base 15: mod_base = OTHER; note = 2'-O-methyladenosine-3'-phosphate
  modified_base 16: mod_base = OTHER; note = 2'-deoxy-2'-fluorouridine-3'-phosphate
  modified_base 17: mod_base = OTHER; note = 2'-O-methyluridine-3'-phosphate
  modified_base 18: mod_base = OTHER; note = 2'-O-methyladenosine-3'-phosphate
  modified_base 19: mod_base = OTHER; note = 2'-O-methyladenosine-3'-phosphate
  modified_base 20: mod_base = OTHER; note = 2'-O-methyladenosine-3'-phosphate
  modified_base 21: mod_base = OTHER; note = 2'-O-methylguanosine-3'-phosphorothioate
  modified_base 22: mod_base = OTHER; note = 2'-O-methyluridine-3'-phosphorothioate
  modified_base 23: mod_base = OTHER; note = 2'-O-methyluridine
ttcacgttcgatatattaaagtt

SEQ ID NO: 12396 - RNA, 23 nt, synthetic construct
  source 1..23: mol_type = other RNA
  modified_base 1: mod_base = OTHER; note = 2'-O-methyluridine-3'-phosphorothioate 5'-(E)-Vinylphosphonate
  modified_base 2: mod_base = OTHER; note = 2'-deoxy-2'-fluorocytidine-3'-phosphorothioate
  modified_base 3: mod_base = OTHER; note = 2'-O-methyluridine-3'-phosphate
  modified_base 4: mod_base = OTHER; note = 2'-O-methylcytidine-3'-phosphate
  modified_base 5: mod_base = OTHER; note = 2'-O-methyladenosine-3'-phosphate
  modified_base 6: mod_base = OTHER; note = 2'-deoxy-2'-fluorocytidine-3'-phosphate
  modified_base 7: mod_base = OTHER; note = 2'-O-methylguanosine-3'-phosphate
  modified_base 8: mod_base = OTHER; note = 2'-O-methyluridine-3'-phosphate
  modified_base 9: mod_base = OTHER; note = 2'-O-methyluridine-3'-phosphate
  modified_base 10: mod_base = OTHER; note = 2'-O-methylcytidine-3'-phosphate
  modified_base 11: mod_base = OTHER; note = 2'-O-methylguanosine-3'-phosphate
  modified_base 12: mod_base = OTHER; note = 2'-O-methyladenosine-3'-phosphate
  modified_base 13: mod_base = OTHER; note = 2'-O-methyluridine-3'-phosphate
  modified_base 14: mod_base = OTHER; note = 2'-deoxy-2'-fluoroadenosine-3'-phosphate
  modified_base 15: mod_base = OTHER; note = 2'-O-methyluridine-3'-phosphate
  modified_base 16: mod_base = OTHER; note = 2'-deoxy-2'-fluoroadenosine-3'-phosphate
  modified_base 17: mod_base = OTHER; note = 2'-O-methyluridine-3'-phosphate
  modified_base 18: mod_base = OTHER; note = 2'-O-methyluridine-3'-phosphate
  modified_base 19: mod_base = OTHER; note = 2'-O-methyladenosine-3'-phosphate
  modified_base 20: mod_base = OTHER; note = 2'-O-methyladenosine-3'-phosphate
  modified_base 21: mod_base = OTHER; note = 2'-O-methyladenosine-3'-phosphorothioate
  modified_base 22: mod_base = OTHER; note = 2'-O-methylguanosine-3'-phosphorothioate
  modified_base 23: mod_base = OTHER; note = 2'-O-methyluridine
tctcacgttcgatatattaaagt

SEQ ID NO: 12397 - RNA, 23 nt, synthetic construct
  source 1..23: mol_type = other RNA
  modified_base 1: mod_base = OTHER; note = 2'-O-methyluridine-3'-phosphorothioate 5'-(E)-Vinylphosphonate
  modified_base 2: mod_base = OTHER; note = 2'-deoxy-2'-fluorouridine-3'-phosphorothioate
  modified_base 3: mod_base = OTHER; note = 2'-O-methylcytidine-3'-phosphate
  modified_base 4: mod_base = OTHER; note = 2'-O-methyluridine-3'-phosphate
  modified_base 5: mod_base = OTHER; note = 2'-O-methylcytidine-3'-phosphate
  modified_base 6: mod_base = OTHER; note = 2'-deoxy-2'-fluoroadenosine-3'-phosphate
  modified_base 7: mod_base = OTHER; note = 2'-O-methylcytidine-3'-phosphate
  modified_base 8: mod_base = OTHER; note = 2'-O-methylguanosine-3'-phosphate
  modified_base 9: mod_base = OTHER; note = 2'-O-methyluridine-3'-phosphate
  modified_base 10: mod_base = OTHER; note = 2'-O-methyluridine-3'-phosphate
  modified_base 11: mod_base = OTHER; note = 2'-O-methylcytidine-3'-phosphate
  modified_base 12: mod_base = OTHER; note = 2'-O-methylguanosine-3'-phosphate
  modified_base 13: mod_base = OTHER; note = 2'-O-methyladenosine-3'-phosphate
  modified_base 14: mod_base = OTHER; note = 2'-deoxy-2'-fluorouridine-3'-phosphate
  modified_base 15: mod_base = OTHER; note = 2'-O-methyladenosine-3'-phosphate
  modified_base 16: mod_base = OTHER; note = 2'-deoxy-2'-fluorouridine-3'-phosphate
  modified_base 17: mod_base = OTHER; note = 2'-O-methyladenosine-3'-phosphate
  modified_base 18: mod_base = OTHER; note = 2'-O-methyluridine-3'-phosphate
  modified_base 19: mod_base = OTHER; note = 2'-O-methyluridine-3'-phosphate
  modified_base 20: mod_base = OTHER; note = 2'-O-methyladenosine-3'-phosphate
  modified_base 21: mod_base = OTHER; note = 2'-O-methyladenosine-3'-phosphorothioate
  modified_base 22: mod_base = OTHER; note = 2'-O-methyladenosine-3'-phosphorothioate
  modified_base 23: mod_base = OTHER; note = 2'-O-methylguanosine
ttctcacgttcgatatattaaag

SEQ ID NO: 12398 - RNA, 23 nt, synthetic construct
  source 1..23: mol_type = other RNA
  modified_base 1: mod_base = OTHER; note = 2'-O-methyluridine-3'-phosphorothioate 5'-(E)-Vinylphosphonate
  modified_base 2: mod_base = OTHER; note = 2'-deoxy-2'-fluorocytidine-3'-phosphorothioate
  modified_base 3: mod_base = OTHER; note = 2'-O-methyluridine-3'-phosphate
  modified_base 4: mod_base = OTHER; note = 2'-O-methylcytidine-3'-phosphate
  modified_base 5: mod_base = OTHER; note = 2'-O-methyluridine-3'-phosphate
  modified_base 6: mod_base = OTHER; note = 2'-deoxy-2'-fluorocytidine-3'-phosphate
  modified_base 7: mod_base = OTHER; note = 2'-O-methyladenosine-3'-phosphate
  modified_base 8: mod_base = OTHER; note = 2'-O-methylcytidine-3'-phosphate
  modified_base 9: mod_base = OTHER; note = 2'-O-methylguanosine-3'-phosphate
  modified_base 10: mod_base = OTHER; note = 2'-O-methyluridine-3'-phosphate
  modified_base 11: mod_base = OTHER; note = 2'-O-methyluridine-3'-phosphate
  modified_base 12: mod_base = OTHER; note = 2'-O-methylcytidine-3'-phosphate
  modified_base 13: mod_base = OTHER; note = 2'-O-methylguanosine-3'-phosphate
  modified_base 14: mod_base = OTHER; note = 2'-deoxy-2'-fluoroadenosine-3'-phosphate
  modified_base 15: mod_base = OTHER; note = 2'-O-methyluridine-3'-phosphate
  modified_base 16: mod_base = OTHER; note = 2'-deoxy-2'-fluoroadenosine-3'-phosphate
  modified_base 17: mod_base = OTHER; note = 2'-O-methyluridine-3'-phosphate
  modified_base 18: mod_base = OTHER; note = 2'-O-methyladenosine-3'-phosphate
  modified_base 19: mod_base = OTHER; note = 2'-O-methyluridine-3'-phosphate
  modified_base 20: mod_base = OTHER; note = 2'-O-methyluridine-3'-phosphate
  modified_base 21: mod_base = OTHER; note = 2'-O-methyladenosine-3'-phosphorothioate
  modified_base 22: mod_base = OTHER; note = 2'-O-methyladenosine-3'-phosphorothioate
  modified_base 23: mod_base = OTHER; note = 2'-O-methyladenosine
tctctcacgttcgatatattaaa

SEQ ID NO: 12399 - RNA, 23 nt, synthetic construct
  source 1..23: mol_type = other RNA
  modified_base 1: mod_base = OTHER; note = 2'-O-methyluridine-3'-phosphorothioate 5'-(E)-Vinylphosphonate
  modified_base 2: mod_base = OTHER; note = 2'-deoxy-2'-fluoroadenosine-3'-phosphorothioate
  modified_base 3: mod_base = OTHER; note = 2'-O-methylcytidine-3'-phosphate
  modified_base 4: mod_base = OTHER; note = 2'-O-methyluridine-3'-phosphate
  modified_base 5: mod_base = OTHER; note = 2'-O-methylcytidine-3'-phosphate
  modified_base 6: mod_base = OTHER; note = 2'-deoxy-2'-fluorouridine-3'-phosphate
  modified_base 7: mod_base = OTHER; note = 2'-O-methylcytidine-3'-phosphate
  modified_base 8: mod_base = OTHER; note = 2'-O-methyladenosine-3'-phosphate
  modified_base 9: mod_base = OTHER; note = 2'-O-methylcytidine-3'-phosphate
  modified_base 10: mod_base = OTHER; note = 2'-O-methylguanosine-3'-phosphate
  modified_base 11: mod_base = OTHER; note = 2'-O-methyluridine-3'-phosphate
  modified_base 12: mod_base = OTHER; note = 2'-O-methyluridine-3'-phosphate
  modified_base 13: mod_base = OTHER; note = 2'-O-methylcytidine-3'-phosphate
  modified_base 14: mod_base = OTHER; note = 2'-deoxy-2'-fluoroguanosine-3'-phosphate
  modified_base 15: mod_base = OTHER; note = 2'-O-methyladenosine-3'-phosphate
  modified_base 16: mod_base = OTHER; note = 2'-deoxy-2'-fluorouridine-3'-phosphate
  modified_base 17: mod_base = OTHER; note = 2'-O-methyladenosine-3'-phosphate
  modified_base 18: mod_base = OTHER; note = 2'-O-methyluridine-3'-phosphate
  modified_base 19: mod_base = OTHER; note = 2'-O-methyladenosine-3'-phosphate
  modified_base 20: mod_base = OTHER; note = 2'-O-methyluridine-3'-phosphate
  modified_base 21: mod_base = OTHER; note = 2'-O-methyluridine-3'-phosphorothioate
  modified_base 22: mod_base = OTHER; note = 2'-O-methyladenosine-3'-phosphorothioate
  modified_base 23: mod_base = OTHER; note = 2'-O-methyladenosine
tactctcacgttcgatatattaa

SEQ ID NO: 12400 - RNA, 23 nt, synthetic construct
  source 1..23: mol_type = other RNA
  modified_base 1: mod_base = OTHER; note = 2'-O-methyluridine-3'-phosphorothioate 5'-(E)-Vinylphosphonate
  modified_base 2: mod_base = OTHER; note = 2'-deoxy-2'-fluorocytidine-3'-phosphorothioate
  modified_base 3: mod_base = OTHER; note = 2'-O-methyladenosine-3'-phosphate
  modified_base 4: mod_base = OTHER; note = 2'-O-methylcytidine-3'-phosphate
  modified_base 5: mod_base = OTHER; note = 2'-O-methyluridine-3'-phosphate
  modified_base 6: mod_base = OTHER; note = 2'-deoxy-2'-fluorocytidine-3'-phosphate
  modified_base 7: mod_base = OTHER; note = 2'-O-methyluridine-3'-phosphate
  modified_base 8: mod_base = OTHER; note = 2'-O-methylcytidine-3'-phosphate
  modified_base 9: mod_base = OTHER; note = 2'-O-methyladenosine-3'-phosphate
  modified_base 10: mod_base = OTHER; note = 2'-O-methylcytidine-3'-phosphate
  modified_base 11: mod_base = OTHER; note = 2'-O-methylguanosine-3'-phosphate
  modified_base 12: mod_base = OTHER; note = 2'-O-methyluridine-3'-phosphate
  modified_base 13: mod_base = OTHER; note = 2'-O-methyluridine-3'-phosphate
  modified_base 14: mod_base = OTHER; note = 2'-deoxy-2'-fluorocytidine-3'-phosphate
  modified_base 15: mod_base = OTHER; note = 2'-O-methylguanosine-3'-phosphate
  modified_base 16: mod_base = OTHER; note = 2'-deoxy-2'-fluoroadenosine-3'-phosphate
  modified_base 17: mod_base = OTHER; note = 2'-O-methyluridine-3'-phosphate
  modified_base 18: mod_base = OTHER; note = 2'-O-methyladenosine-3'-phosphate
  modified_base 19: mod_base = OTHER; note = 2'-O-methyluridine-3'-phosphate
  modified_base 20: mod_base = OTHER; note = 2'-O-methyladenosine-3'-phosphate
  modified_base 21: mod_base = OTHER; note = 2'-O-methyluridine-3'-phosphorothioate
  modified_base 22: mod_base = OTHER; note = 2'-O-methyluridine-3'-phosphorothioate
  modified_base 23: mod_base = OTHER; note = 2'-O-methyladenosine
tcactctcacgttcgatatatta

SEQ ID NO: 12401 - RNA, 23 nt, synthetic construct
  source 1..23: mol_type = other RNA
  modified_base 1: mod_base = OTHER; note = 2'-O-methyluridine-3'-phosphorothioate 5'-(E)-Vinylphosphonate
  modified_base 2: mod_base = OTHER; note = 2'-deoxy-2'-fluorocytidine-3'-phosphorothioate
  modified_base 3: mod_base = OTHER; note = 2'-O-methylcytidine-3'-phosphate
  modified_base 4: mod_base = OTHER; note = 2'-O-methyladenosine-3'-phosphate
  modified_base 5: mod_base = OTHER; note = 2'-O-methylcytidine-3'-phosphate
  modified_base 6: mod_base = OTHER; note = 2'-deoxy-2'-fluorouridine-3'-phosphate
  modified_base 7: mod_base = OTHER; note = 2'-O-methylcytidine-3'-phosphate
  modified_base 8: mod_base = OTHER; note = 2'-O-methyluridine-3'-phosphate
  modified_base 9: mod_base = OTHER; note = 2'-O-methylcytidine-3'-phosphate
  modified_base 10: mod_base = OTHER; note = 2'-O-methyladenosine-3'-phosphate
  modified_base 11: mod_base = OTHER; note = 2'-O-methylcytidine-3'-phosphate
  modified_base 12: mod_base = OTHER; note = 2'-O-methylguanosine-3'-phosphate
  modified_base 13: mod_base = OTHER; note = 2'-O-methyluridine-3'-phosphate
  modified_base 14: mod_base = OTHER; note = 2'-deoxy-2'-fluorouridine-3'-phosphate
  modified_base 15: mod_base = OTHER; note = 2'-O-methylcytidine-3'-phosphate
  modified_base 16: mod_base = OTHER; note = 2'-deoxy-2'-fluoroguanosine-3'-phosphate
  modified_base 17: mod_base = OTHER; note = 2'-O-methyladenosine-3'-phosphate
  modified_base 18: mod_base = OTHER; note = 2'-O-methyluridine-3'-phosphate
  modified_base 19: mod_base = OTHER; note = 2'-O-methyladenosine-3'-phosphate
  modified_base 20: mod_base = OTHER; note = 2'-O-methyluridine-3'-phosphate
  modified_base 21: mod_base = OTHER; note = 2'-O-methyladenosine-3'-phosphorothioate
  modified_base 22: mod_base = OTHER; note = 2'-O-methyluridine-3'-phosphorothioate
  modified_base 23: mod_base = OTHER; note = 2'-O-methyluridine
tccactctcacgttcgatatatt

SEQ ID NO: 12402 - RNA, 23 nt, synthetic construct
  source 1..23: mol_type = other RNA
  modified_base 1: mod_base = OTHER; note = 2'-O-methyluridine-3'-phosphorothioate 5'-(E)-Vinylphosphonate
  modified_base 2: mod_base = OTHER; note = 2'-deoxy-2'-fluoroadenosine-3'-phosphorothioate
  modified_base 3: mod_base = OTHER; note = 2'-O-methylguanosine-3'-phosphate
  modified_base 4: mod_base = OTHER; note = 2'-O-methyluridine-3'-phosphate
  modified_base 5: mod_base = OTHER; note = 2'-O-methyladenosine-3'-phosphate
  modified_base 6: mod_base = OTHER; note = 2'-deoxy-2'-fluoroguanosine-3'-phosphate
  modified_base 7: mod_base = OTHER; note = 2'-O-methyluridine-3'-phosphate
  modified_base 8: mod_base = OTHER; note = 2'-O-methylguanosine-3'-phosphate
  modified_base 9: mod_base = OTHER; note = 2'-O-methylguanosine-3'-phosphate
  modified_base 10: mod_base = OTHER; note = 2'-O-methyladenosine-3'-phosphate
  modified_base 11: mod_base = OTHER; note = 2'-O-methyluridine-3'-phosphate
  modified_base 12: mod_base = OTHER; note = 2'-O-methyluridine-3'-phosphate
  modified_base 13: mod_base = OTHER; note = 2'-O-methyladenosine-3'-phosphate
  modified_base 14: mod_base = OTHER; note = 2'-deoxy-2'-fluorouridine-3'-phosphate
  modified_base 15: mod_base = OTHER; note = 2'-O-methylguanosine-3'-phosphate
  modified_base 16: mod_base = OTHER; note = 2'-deoxy-2'-fluoroadenosine-3'-phosphate
  modified_base 17: mod_base = OTHER; note = 2'-O-methyladenosine-3'-phosphate
  modified_base 18: mod_base = OTHER; note = 2'-O-methylguanosine-3'-phosphate
  modified_base 19: mod_base = OTHER; note = 2'-O-methyladenosine-3'-phosphate
  modified_base 20: mod_base = OTHER; note = 2'-O-methyladenosine-3'-phosphate
  modified_base 21: mod_base = OTHER; note = 2'-O-methylcytidine-3'-phosphorothioate
  modified_base 22: mod_base = OTHER; note = 2'-O-methyladenosine-3'-phosphorothioate
  modified_base 23: mod_base = OTHER; note = 2'-O-methylguanosine
tagtagtggattatgaagaacag

SEQ ID NO: 12403 - RNA, 23 nt, synthetic construct
  source 1..23: mol_type = other RNA
  modified_base 1: mod_base = OTHER; note = 2'-O-methyluridine-3'-phosphorothioate 5'-(E)-Vinylphosphonate
  modified_base 2: mod_base = OTHER; note = 2'-deoxy-2'-fluoroadenosine-3'-phosphorothioate
  modified_base 3: mod_base = OTHER; note = 2'-O-methyladenosine-3'-phosphate
  modified_base 4: mod_base = OTHER; note = 2'-O-methyladenosine-3'-phosphate
  modified_base 5: mod_base = OTHER; note = 2'-O-methylguanosine-3'-phosphate
  modified_base 6: mod_base = OTHER; note = 2'-deoxy-2'-fluoroguanosine-3'-phosphate
  modified_base 7: mod_base = OTHER; note = 2'-O-methyladenosine-3'-phosphate
  modified_base 8: mod_base = OTHER; note = 2'-O-methyladenosine-3'-phosphate
  modified_base 9: mod_base = OTHER; note = 2'-O-methylcytidine-3'-phosphate
  modified_base 10: mod_base = OTHER; note = 2'-O-methyladenosine-3'-phosphate
  modified_base 11: mod_base = OTHER; note = 2'-O-methyladenosine-3'-phosphate
  modified_base 12: mod_base = OTHER; note = 2'-O-methylguanosine-3'-phosphate
  modified_base 13: mod_base = OTHER; note = 2'-O-methyluridine-3'-phosphate
  modified_base 14: mod_base = OTHER; note = 2'-deoxy-2'-fluorouridine-3'-phosphate
  modified_base 15: mod_base = OTHER; note = 2'-O-methyluridine-3'-phosphate
  modified_base 16: mod_base = OTHER; note = 2'-deoxy-2'-fluoroadenosine-3'-phosphate
  modified_base 17: mod_base = OTHER; note = 2'-O-methylguanosine-3'-phosphate
  modified_base 18: mod_base = OTHER; note = 2'-O-methyluridine-3'-phosphate
  modified_base 19: mod_base = OTHER; note = 2'-O-methylguanosine-3'-phosphate
  modified_base 20: mod_base = OTHER; note = 2'-O-methylguanosine-3'-phosphate
  modified_base 21: mod_base = OTHER; note = 2'-O-methyluridine-3'-phosphorothioate
  modified_base 22: mod_base = OTHER; note = 2'-O-methyluridine-3'-phosphorothioate
  modified_base 23: mod_base = OTHER; note = 2'-O-methylcytidine
taaaggaacaagtttagtggttc

SEQ ID NO: 12404 - RNA, 23 nt, synthetic construct
  source 1..23: mol_type = other RNA
  modified_base 1: mod_base = OTHER; note = 2'-O-methyluridine-3'-phosphorothioate 5'-(E)-Vinylphosphonate
  modified_base 2: mod_base = OTHER; note = 2'-deoxy-2'-fluoroguanosine-3'-phosphorothioate
  modified_base 3: mod_base = OTHER; note = 2'-O-methylguanosine-3'-phosphate
  modified_base 4: mod_base = OTHER; note = 2'-O-methyladenosine-3'-phosphate
  modified_base 5: mod_base = OTHER; note = 2'-O-methyladenosine-3'-phosphate
  modified_base 6: mod_base = OTHER; note = 2'-deoxy-2'-fluorocytidine-3'-phosphate
  modified_base 7: mod_base = OTHER; note = 2'-O-methyladenosine-3'-phosphate
  modified_base 8: mod_base = OTHER; note = 2'-O-methyladenosine-3'-phosphate
  modified_base 9: mod_base = OTHER; note = 2'-O-methylguanosine-3'-phosphate
  modified_base 10: mod_base = OTHER; note = 2'-O-methyluridine-3'-phosphate
  modified_base 11: mod_base = OTHER; note = 2'-O-methyluridine-3'-phosphate
  modified_base 12: mod_base = OTHER; note = 2'-O-methyluridine-3'-phosphate
  modified_base 13: mod_base = OTHER; note = 2'-O-methyladenosine-3'-phosphate
  modified_base 14: mod_base = OTHER; note = 2'-deoxy-2'-fluoroguanosine-3'-phosphate
  modified_base 15: mod_base = OTHER; note = 2'-O-methyluridine-3'-phosphate
  modified_base 16: mod_base = OTHER; note = 2'-deoxy-2'-fluoroguanosine-3'-phosphate
  modified_base 17: mod_base = OTHER; note = 2'-O-methylguanosine-3'-phosphate
  modified_base 18: mod_base = OTHER; note = 2'-O-methyluridine-3'-phosphate
  modified_base 19: mod_base = OTHER; note = 2'-O-methyluridine-3'-phosphate
  modified_base 20: mod_base = OTHER; note = 2'-O-methylcytidine-3'-phosphate
  modified_base 21: mod_base = OTHER; note = 2'-O-methyladenosine-3'-phosphorothioate
  modified_base 22: mod_base = OTHER; note = 2'-O-methylguanosine-3'-phosphorothioate
  modified_base 23: mod_base = OTHER; note = 2'-O-methylguanosine
tggaacaagtttagtggttcagg

SEQ ID NO: 12405 - RNA, 23 nt, synthetic construct
  source 1..23: mol_type = other RNA
  modified_base 1: mod_base = OTHER; note = 2'-O-methyluridine-3'-phosphorothioate 5'-(E)-Vinylphosphonate
  modified_base 2: mod_base = OTHER; note = 2'-deoxy-2'-fluoroadenosine-3'-phosphorothioate
  modified_base 3: mod_base = OTHER; note = 2'-O-methylguanosine-3'-phosphate
  modified_base 4: mod_base = OTHER; note = 2'-O-methylguanosine-3'-phosphate
  modified_base 5: mod_base = OTHER; note = 2'-O-methyladenosine-3'-phosphate
  modified_base 6: mod_base = OTHER; note = 2'-deoxy-2'-fluoroadenosine-3'-phosphate
  modified_base 7: mod_base = OTHER; note = 2'-O-methylcytidine-3'-phosphate
  modified_base 8: mod_base = OTHER; note = 2'-O-methyladenosine-3'-phosphate
  modified_base 9: mod_base = OTHER; note = 2'-O-methyladenosine-3'-phosphate
  modified_base 10: mod_base = OTHER; note = 2'-O-methylguanosine-3'-phosphate
  modified_base 11: mod_base = OTHER; note = 2'-O-methyluridine-3'-phosphate
  modified_base 12: mod_base = OTHER; note = 2'-O-methyluridine-3'-phosphate
  modified_base 13: mod_base = OTHER; note = 2'-O-methyluridine-3'-phosphate
  modified_base 14: mod_base = OTHER; note = 2'-deoxy-2'-fluoroadenosine-3'-phosphate
  modified_base 15: mod_base = OTHER; note = 2'-O-methylguanosine-3'-phosphate
  modified_base 16: mod_base = OTHER; note = 2'-deoxy-2'-fluorouridine-3'-phosphate
  modified_base 17: mod_base = OTHER; note = 2'-O-methylguanosine-3'-phosphate
  modified_base 18: mod_base = OTHER; note = 2'-O-methylguanosine-3'-phosphate
  modified_base 19: mod_base = OTHER; note = 2'-O-methyluridine-3'-phosphate
  modified_base 20: mod_base = OTHER; note = 2'-O-methyluridine-3'-phosphate
  modified_base 21: mod_base = OTHER; note = 2'-O-methylcytidine-3'-phosphorothioate
  modified_base 22: mod_base = OTHER; note = 2'-O-methyladenosine-3'-phosphorothioate
  modified_base 23: mod_base = OTHER; note = 2'-O-methylguanosine
taggaacaagtttagtggttcag

SEQ ID NO: 12406 - RNA, 23 nt, synthetic construct
  source 1..23: mol_type = other RNA
  modified_base 1: mod_base = OTHER; note = 2'-O-methyluridine-3'-phosphorothioate 5'-(E)-Vinylphosphonate
  modified_base 2: mod_base = OTHER; note = 2'-deoxy-2'-fluoroadenosine-3'-phosphorothioate
  modified_base 3: mod_base = OTHER; note = 2'-O-methyladenosine-3'-phosphate
  modified_base 4: mod_base = OTHER; note = 2'-O-methylguanosine-3'-phosphate
  modified_base 5: mod_base = OTHER; note = 2'-O-methylguanosine-3'-phosphate
  modified_base 6: mod_base = OTHER; note = 2'-deoxy-2'-fluoroadenosine-3'-phosphate
  modified_base 7: mod_base = OTHER; note = 2'-O-methyladenosine-3'-phosphate
  modified_base 8: mod_base = OTHER; note = 2'-O-methylcytidine-3'-phosphate
  modified_base 9: mod_base = OTHER; note = 2'-O-methyladenosine-3'-phosphate
  modified_base 10: mod_base = OTHER; note = 2'-O-methyladenosine-3'-phosphate
  modified_base 11: mod_base = OTHER; note = 2'-O-methylguanosine-3'-phosphate
  modified_base 12: mod_base = OTHER; note = 2'-O-methyluridine-3'-phosphate
  modified_base 13: mod_base = OTHER; note = 2'-O-methyluridine-3'-phosphate
  modified_base 14: mod_base = OTHER; note = 2'-deoxy-2'-fluorouridine-3'-phosphate
  modified_base 15: mod_base = OTHER; note = 2'-O-methyladenosine-3'-phosphate
  modified_base 16: mod_base = OTHER; note = 2'-deoxy-2'-fluoroguanosine-3'-phosphate
  modified_base 17: mod_base = OTHER; note = 2'-O-methyluridine-3'-phosphate
  modified_base 18: mod_base = OTHER; note = 2'-O-methylguanosine-3'-phosphate
  modified_base 19: mod_base = OTHER; note = 2'-O-methylguanosine-3'-phosphate
  modified_base 20: mod_base = OTHER; note = 2'-O-methyluridine-3'-phosphate
  modified_base 21: mod_base = OTHER; note = 2'-O-methyluridine-3'-phosphorothioate
  modified_base 22: mod_base = OTHER; note = 2'-O-methylcytidine-3'-phosphorothioate
  modified_base 23: mod_base = OTHER; note = 2'-O-methyladenosine
taaggaacaagtttagtggttca

SEQ ID NO: 12407 - RNA, 23 nt, synthetic construct
  source 1..23: mol_type = other RNA
  modified_base 1: mod_base = OTHER; note = 2'-O-methyluridine-3'-phosphorothioate 5'-(E)-Vinylphosphonate
  modified_base 2: mod_base = OTHER; note = 2'-deoxy-2'-fluoroguanosine-3'-phosphorothioate
  modified_base 3: mod_base = OTHER; note = 2'-O-methyladenosine-3'-phosphate
  modified_base 4: mod_base = OTHER; note = 2'-O-methyladenosine-3'-phosphate
  modified_base 5: mod_base = OTHER; note = 2'-O-methyladenosine-3'-phosphate
  modified_base 6: mod_base = OTHER; note = 2'-deoxy-2'-fluoroguanosine-3'-phosphate
  modified_base 7: mod_base = OTHER; note = 2'-O-methylguanosine-3'-phosphate
  modified_base 8: mod_base = OTHER; note = 2'-O-methyladenosine-3'-phosphate
  modified_base 9: mod_base = OTHER; note = 2'-O-methyladenosine-3'-phosphate
  modified_base 10: mod_base = OTHER; note = 2'-O-methylcytidine-3'-phosphate
  modified_base 11: mod_base = OTHER; note = 2'-O-methyladenosine-3'-phosphate
  modified_base 12: mod_base = OTHER; note = 2'-O-methyladenosine-3'-phosphate
  modified_base 13: mod_base = OTHER; note = 2'-O-methylguanosine-3'-phosphate
  modified_base 14: mod_base = OTHER; note = 2'-deoxy-2'-fluorouridine-3'-phosphate
  modified_base 15: mod_base = OTHER; note = 2'-O-methyluridine-3'-phosphate
  modified_base 16: mod_base = OTHER; note = 2'-deoxy-2'-fluorouridine-3'-phosphate
  modified_base 17: mod_base = OTHER; note = 2'-O-methyladenosine-3'-phosphate
  modified_base 18: mod_base = OTHER; note = 2'-O-methylguanosine-3'-phosphate
  modified_base 19: mod_base = OTHER; note = 2'-O-methyluridine-3'-phosphate
  modified_base 20: mod_base = OTHER; note = 2'-O-methylguanosine-3'-phosphate
  modified_base 21: mod_base = OTHER; note = 2'-O-methylguanosine-3'-phosphorothioate
  modified_base 22: mod_base = OTHER; note = 2'-O-methyluridine-3'-phosphorothioate
  modified_base 23: mod_base = OTHER; note = 2'-O-methyluridine
tgaaaggaacaagtttagtggtt

SEQ ID NO: 12408 - RNA, 23 nt, synthetic construct
  source 1..23: mol_type = other RNA
  modified_base 1: mod_base = OTHER; note = 2'-O-methyluridine-3'-phosphorothioate 5'-(E)-Vinylphosphonate
  modified_base 2: mod_base = OTHER; note = 2'-deoxy-2'-fluorouridine-3'-phosphorothioate
  modified_base 3: mod_base = OTHER; note = 2'-O-methylguanosine-3'-phosphate
  modified_base 4: mod_base = OTHER; note = 2'-O-methyladenosine-3'-phosphate
  modified_base 5: mod_base = OTHER; note = 2'-O-methyladenosine-3'-phosphate
  modified_base 6: mod_base = OTHER; note = 2'-deoxy-2'-fluoroadenosine-3'-phosphate
  modified_base 7: mod_base = OTHER; note = 2'-O-methylguanosine-3'-phosphate
  modified_base 8: mod_base = OTHER; note = 2'-O-methylguanosine-3'-phosphate
  modified_base 9: mod_base = OTHER; note = 2'-O-methyladenosine-3'-phosphate
  modified_base 10: mod_base = OTHER; note = 2'-O-methyladenosine-3'-phosphate
  modified_base 11: mod_base = OTHER; note = 2'-O-methylcytidine-3'-phosphate
  modified_base 12: mod_base = OTHER; note = 2'-O-methyladenosine-3'-phosphate
  modified_base 13: mod_base = OTHER; note = 2'-O-methyladenosine-3'-phosphate
  modified_base 14: mod_base = OTHER; note = 2'-deoxy-2'-fluoroguanosine-3'-phosphate
  modified_base 15: mod_base = OTHER; note = 2'-O-methyluridine-3'-phosphate
  modified_base 16: mod_base = OTHER; note = 2'-deoxy-2'-fluorouridine-3'-phosphate
  modified_base 17: mod_base = OTHER; note = 2'-O-methyluridine-3'-phosphate
  modified_base 18: mod_base = OTHER; note = 2'-O-methyladenosine-3'-phosphate
  modified_base 19: mod_base = OTHER; note = 2'-O-methylguanosine-3'-phosphate
  modified_base 20: mod_base = OTHER; note = 2'-O-methyluridine-3'-phosphate
  modified_base 21: mod_base = OTHER; note = 2'-O-methylguanosine-3'-phosphorothioate
  modified_base 22: mod_base = OTHER; note = 2'-O-methylguanosine-3'-phosphorothioate
  modified_base 23: mod_base = OTHER; note = 2'-O-methyluridine
ttgaaaggaacaagtttagtggt

SEQ ID NO: 12409 - RNA, 23 nt, synthetic construct
  source 1..23: mol_type = other RNA
  modified_base 1: mod_base = OTHER; note = 2'-O-methyluridine-3'-phosphorothioate 5'-(E)-Vinylphosphonate
  modified_base 2: mod_base = OTHER; note = 2'-deoxy-2'-fluoroadenosine-3'-phosphorothioate
  modified_base 3: mod_base = OTHER; note = 2'-O-methyluridine-3'-phosphate
  modified_base 4: mod_base = OTHER; note = 2'-O-methylguanosine-3'-phosphate
  modified_base 5: mod_base = OTHER; note = 2'-O-methyladenosine-3'-phosphate
  modified_base 6: mod_base = OTHER; note = 2'-deoxy-2'-fluoroadenosine-3'-phosphate
  modified_base 7: mod_base = OTHER; note = 2'-O-methyladenosine-3'-phosphate
  modified_base 8: mod_base = OTHER; note = 2'-O-methylguanosine-3'-phosphate
  modified_base 9: mod_base = OTHER; note = 2'-O-methylguanosine-3'-phosphate
  modified_base 10: mod_base = OTHER; note = 2'-O-methyladenosine-3'-phosphate
  modified_base 11: mod_base = OTHER; note = 2'-O-methyladenosine-3'-phosphate
  modified_base 12: mod_base = OTHER; note = 2'-O-methylcytidine-3'-phosphate
  modified_base 13: mod_base = OTHER; note = 2'-O-methyladenosine-3'-phosphate
  modified_base 14: mod_base = OTHER; note = 2'-deoxy-2'-fluoroadenosine-3'-phosphate
  modified_base 15: mod_base = OTHER; note = 2'-O-methylguanosine-3'-phosphate
  modified_base 16: mod_base = OTHER; note = 2'-deoxy-2'-fluorouridine-3'-phosphate
  modified_base 17: mod_base = OTHER; note = 2'-O-methyluridine-3'-phosphate
  modified_base 18: mod_base = OTHER; note = 2'-O-methyluridine-3'-phosphate
  modified_base 19: mod_base = OTHER; note = 2'-O-methyladenosine-3'-phosphate
  modified_base 20: mod_base = OTHER; note = 2'-O-methylguanosine-3'-phosphate
  modified_base 21: mod_base = OTHER; note = 2'-O-methyluridine-3'-phosphorothioate
  modified_base 22: mod_base = OTHER; note = 2'-O-methylguanosine-3'-phosphorothioate
  modified_base 23: mod_base = OTHER; note = 2'-O-methylguanosine
tatgaaaggaacaagtttagtgg

SEQ ID NO: 12410 - RNA, 23 nt, synthetic construct
  source 1..23: mol_type = other RNA
  modified_base 1: mod_base = OTHER; note = 2'-O-methyluridine-3'-phosphorothioate 5'-(E)-Vinylphosphonate
  modified_base 2: mod_base = OTHER; note = 2'-deoxy-2'-fluoroadenosine-3'-phosphorothioate
  modified_base 3: mod_base = OTHER; note = 2'-O-methyladenosine-3'-phosphate
  modified_base 4: mod_base = OTHER; note = 2'-O-methyluridine-3'-phosphate
  modified_base 5: mod_base = OTHER; note = 2'-O-methylguanosine-3'-phosphate
  modified_base 6: mod_base = OTHER; note = 2'-deoxy-2'-fluoroadenosine-3'-phosphate
  modified_base 7: mod_base = OTHER; note = 2'-O-methyladenosine-3'-phosphate
  modified_base 8: mod_base = OTHER; note = 2'-O-methyladenosine-3'-phosphate
  modified_base 9: mod_base = OTHER; note = 2'-O-methylguanosine-3'-phosphate
  modified_base 10: mod_base = OTHER; note = 2'-O-methylguanosine-3'-phosphate
  modified_base 11: mod_base = OTHER; note = 2'-O-methyladenosine-3'-phosphate
  modified_base 12: mod_base = OTHER; note = 2'-O-methyladenosine-3'-phosphate
  modified_base 13: mod_base = OTHER; note = 2'-O-methylcytidine-3'-phosphate
  modified_base 14: mod_base = OTHER; note = 2'-deoxy-2'-fluoroadenosine-3'-phosphate
  modified_base 15: mod_base = OTHER; note = 2'-O-methyladenosine-3'-phosphate
  modified_base 16: mod_base = OTHER; note = 2'-deoxy-2'-fluoroguanosine-3'-phosphate
  modified_base 17: mod_base = OTHER; note = 2'-O-methyluridine-3'-phosphate
  modified_base 18: mod_base = OTHER; note = 2'-O-methyluridine-3'-phosphate
  modified_base 19: mod_base = OTHER; note = 2'-O-methyluridine-3'-phosphate
  modified_base 20: mod_base = OTHER; note = 2'-O-methyladenosine-3'-phosphate
  modified_base 21: mod_base = OTHER; note = 2'-O-methylguanosine-3'-phosphorothioate
  modified_base 22: mod_base = OTHER; note = 2'-O-methyluridine-3'-phosphorothioate
  modified_base 23: mod_base = OTHER; note = 2'-O-methylguanosine
taatgaaaggaacaagtttagtg

SEQ ID NO: 12411 - RNA, 23 nt, synthetic construct
  source 1..23: mol_type = other RNA
  modified_base 1: mod_base = OTHER; note = 2'-O-methyluridine-3'-phosphorothioate 5'-(E)-Vinylphosphonate
  modified_base 2: mod_base = OTHER; note = 2'-deoxy-2'-fluoroadenosine-3'-phosphorothioate
  modified_base 3: mod_base = OTHER; note = 2'-O-methyladenosine-3'-phosphate
  modified_base 4: mod_base = OTHER; note = 2'-O-methyladenosine-3'-phosphate
  modified_base 5: mod_base = OTHER; note = 2'-O-methyluridine-3'-phosphate
  modified_base 6: mod_base = OTHER; note = 2'-deoxy-2'-fluoroguanosine-3'-phosphate
  modified_base 7: mod_base = OTHER; note = 2'-O-methyladenosine-3'-phosphate
  modified_base 8: mod_base = OTHER; note = 2'-O-methyladenosine-3'-phosphate
  modified_base 9: mod_base = OTHER; note = 2'-O-methyladenosine-3'-phosphate
  modified_base 10: mod_base = OTHER; note = 2'-O-methylguanosine-3'-phosphate
  modified_base 11: mod_base = OTHER; note = 2'-O-methylguanosine-3'-phosphate
  modified_base 12: mod_base = OTHER; note = 2'-O-methyladenosine-3'-phosphate
  modified_base 13: mod_base = OTHER; note = 2'-O-methyladenosine-3'-phosphate
  modified_base 14: mod_base = OTHER; note = 2'-deoxy-2'-fluorocytidine-3'-phosphate
  modified_base 15: mod_base = OTHER; note = 2'-O-methyladenosine-3'-phosphate
  modified_base 16: mod_base = OTHER; note = 2'-deoxy-2'-fluoroadenosine-3'-phosphate
  modified_base 17: mod_base = OTHER; note = 2'-O-methylguanosine-3'-phosphate
  modified_base 18: mod_base = OTHER; note = 2'-O-methyluridine-3'-phosphate
  modified_base 19: mod_base = OTHER; note = 2'-O-methyluridine-3'-phosphate
  modified_base 20: mod_base = OTHER; note = 2'-O-methyluridine-3'-phosphate
  modified_base 21: mod_base = OTHER; note = 2'-O-methyladenosine-3'-phosphorothioate
  modified_base 22: mod_base = OTHER; note = 2'-O-methylguanosine-3'-phosphorothioate
  modified_base 23: mod_base = OTHER; note = 2'-O-methyluridine
taaatgaaaggaacaagtttagt

SEQ ID NO: 12412 - RNA, 23 nt, synthetic construct
  source 1..23: mol_type = other RNA
  modified_base 1: mod_base = OTHER; note = 2'-O-methyluridine-3'-phosphorothioate 5'-(E)-Vinylphosphonate
  modified_base 2: mod_base = OTHER; note = 2'-deoxy-2'-fluorouridine-3'-phosphorothioate
  modified_base 3: mod_base = OTHER; note = 2'-O-methyladenosine-3'-phosphate
  modified_base 4: mod_base = OTHER; note = 2'-O-methyladenosine-3'-phosphate
  modified_base 5: mod_base = OTHER; note = 2'-O-methyladenosine-3'-phosphate
  modified_base 6: mod_base = OTHER; note = 2'-deoxy-2'-fluorouridine-3'-phosphate
  modified_base 7: mod_base = OTHER; note = 2'-O-methylguanosine-3'-phosphate
  modified_base 8: mod_base = OTHER; note = 2'-O-methyladenosine-3'-phosphate
  modified_base 9: mod_base = OTHER; note = 2'-O-methyladenosine-3'-phosphate
  modified_base 10: mod_base = OTHER; note = 2'-O-methyladenosine-3'-phosphate
  modified_base 11: mod_base = OTHER; note = 2'-O-methylguanosine-3'-phosphate
  modified_base 12: mod_base = OTHER; note = 2'-O-methylguanosine-3'-phosphate
  modified_base 13: mod_base = OTHER; note = 2'-O-methyladenosine-3'-phosphate
  modified_base 14: mod_base = OTHER; note = 2'-deoxy-2'-fluoroadenosine-3'-phosphate
  modified_base 15: mod_base = OTHER; note = 2'-O-methylcytidine-3'-phosphate
  modified_base 16: mod_base = OTHER; note = 2'-deoxy-2'-fluoroadenosine-3'-phosphate
  modified_base 17: mod_base = OTHER; note = 2'-O-methyladenosine-3'-phosphate
  modified_base 18: mod_base = OTHER; note = 2'-O-methylguanosine-3'-phosphate
  modified_base 19: mod_base = OTHER; note = 2'-O-methyluridine-3'-phosphate
  modified_base 20: mod_base = OTHER; note = 2'-O-methyluridine-3'-phosphate
  modified_base 21: mod_base = OTHER; note = 2'-O-methyluridine-3'-phosphorothioate
  modified_base 22: mod_base = OTHER; note = 2'-O-methyladenosine-3'-phosphorothioate
  modified_base 23: mod_base = OTHER; note = 2'-O-methylguanosine
ttaaatgaaaggaacaagtttag

SEQ ID NO: 12413 - RNA, 23 nt, synthetic construct
  source 1..23: mol_type = other RNA
  modified_base 1: mod_base = OTHER; note = 2'-O-methyluridine-3'-phosphorothioate 5'-(E)-Vinylphosphonate
  modified_base 2: mod_base = OTHER; note = 2'-deoxy-2'-fluoroguanosine-3'-phosphorothioate
  modified_base 3: mod_base = OTHER; note = 2'-O-methyluridine-3'-phosphate
  modified_base 4: mod_base = OTHER; note = 2'-O-methyladenosine-3'-phosphate
  modified_base 5: mod_base = OTHER; note = 2'-O-methyladenosine-3'-phosphate
  modified_base 6: mod_base = OTHER; note = 2'-deoxy-2'-fluoroadenosine-3'-phosphate
  modified_base 7: mod_base = OTHER; note = 2'-O-methyluridine-3'-phosphate
  modified_base 8: mod_base = OTHER; note = 2'-O-methylguanosine-3'-phosphate
  modified_base 9: mod_base = OTHER; note = 2'-O-methyladenosine-3'-phosphate
  modified_base 10: mod_base = OTHER; note = 2'-O-methyladenosine-3'-phosphate
  modified_base 11: mod_base = OTHER; note = 2'-O-methyladenosine-3'-phosphate
  modified_base 12: mod_base = OTHER; note = 2'-O-methylguanosine-3'-phosphate
  modified_base 13: mod_base = OTHER; note = 2'-O-methylguanosine-3'-phosphate
  modified_base 14: mod_base = OTHER; note = 2'-deoxy-2'-fluoroadenosine-3'-phosphate
  modified_base 15: mod_base = OTHER; note = 2'-O-methyladenosine-3'-phosphate
  modified_base 16: mod_base = OTHER; note = 2'-deoxy-2'-fluorocytidine-3'-phosphate
  modified_base 17: mod_base = OTHER; note = 2'-O-methyladenosine-3'-phosphate
  modified_base 18: mod_base = OTHER; note = 2'-O-methyladenosine-3'-phosphate
  modified_base 19: mod_base = OTHER; note = 2'-O-methylguanosine-3'-phosphate
  modified_base 20: mod_base = OTHER; note = 2'-O-methyluridine-3'-phosphate
  modified_base 21: mod_base = OTHER; note = 2'-O-methyluridine-3'-phosphorothioate
  modified_base 22: mod_base = OTHER; note = 2'-O-methyluridine-3'-phosphorothioate
  modified_base 23: mod_base = OTHER; note = 2'-O-methyladenosine
tgtaaatgaaaggaacaagttta

SEQ ID NO: 12414 - RNA, 23 nt, synthetic construct
  source 1..23: mol_type = other RNA
  modified_base 1: mod_base = OTHER; note = 2'-O-methyluridine-3'-phosphorothioate 5'-(E)-Vinylphosphonate
  modified_base 2: mod_base = OTHER; note = 2'-deoxy-2'-fluorouridine-3'-phosphorothioate
  modified_base 3: mod_base = OTHER; note = 2'-O-methylguanosine-3'-phosphate
  modified_base 4: mod_base = OTHER; note = 2'-O-methyluridine-3'-phosphate
  modified_base 5: mod_base = OTHER; note = 2'-O-methyladenosine-3'-phosphate
  modified_base 6: mod_base = OTHER; note = 2'-deoxy-2'-fluoroadenosine-3'-phosphate
  modified_base 7: mod_base = OTHER; note = 2'-O-methyladenosine-3'-phosphate
  modified_base 8: mod_base = OTHER; note = 2'-O-methyluridine-3'-phosphate
  modified_base 9: mod_base = OTHER; note = 2'-O-methylguanosine-3'-phosphate
  modified_base 10: mod_base = OTHER; note = 2'-O-methyladenosine-3'-phosphate
  modified_base 11: mod_base = OTHER; note = 2'-O-methyladenosine-3'-phosphate
  modified_base 12: mod_base = OTHER; note = 2'-O-methyladenosine-3'-phosphate
  modified_base 13: mod_base = OTHER; note = 2'-O-methylguanosine-3'-phosphate
  modified_base 14: mod_base = OTHER; note = 2'-deoxy-2'-fluoroguanosine-3'-phosphate
  modified_base 15: mod_base = OTHER; note = 2'-O-methyladenosine-3'-phosphate
  modified_base 16: mod_base = OTHER; note = 2'-deoxy-2'-fluoroadenosine-3'-phosphate
  modified_base 17: mod_base = OTHER; note = 2'-O-methylcytidine-3'-phosphate
  modified_base 18: mod_base = OTHER; note = 2'-O-methyladenosine-3'-phosphate
  modified_base 19: mod_base = OTHER; note = 2'-O-methyladenosine-3'-phosphate
  modified_base 20: mod_base = OTHER; note = 2'-O-methylguanosine-3'-phosphate
  modified_base 21: mod_base = OTHER; note = 2'-O-methyluridine-3'-phosphorothioate
  modified_base 22: mod_base = OTHER; note = 2'-O-methyluridine-3'-phosphorothioate
  modified_base 23: mod_base = OTHER; note = 2'-O-methyluridine
ttgtaaatgaaaggaacaagttt

SEQ ID NO: 12415 - RNA, 23 nt, synthetic construct
  source 1..23: mol_type = other RNA
  modified_base 1: mod_base = OTHER; note = 2'-O-methyluridine-3'-phosphorothioate 5'-(E)-Vinylphosphonate
  modified_base 2: mod_base = OTHER; note = 2'-deoxy-2'-fluorouridine-3'-phosphorothioate
  modified_base 3: mod_base = OTHER; note = 2'-O-methyluridine-3'-phosphate
  modified_base 4: mod_base = OTHER; note = 2'-O-methylguanosine-3'-phosphate
  modified_base 5: mod_base = OTHER; note = 2'-O-methyluridine-3'-phosphate
  modified_base 6: mod_base = OTHER; note = 2'-deoxy-2'-fluoroadenosine-3'-phosphate
  modified_base 7: mod_base = OTHER; note = 2'-O-methyladenosine-3'-phosphate
  modified_base 8: mod_base = OTHER; note = 2'-O-methyladenosine-3'-phosphate
  modified_base 9: mod_base = OTHER; note = 2'-O-methyluridine-3'-phosphate
  modified_base 10: mod_base = OTHER; note = 2'-O-methylguanosine-3'-phosphate
  modified_base 11: mod_base = OTHER; note = 2'-O-methyladenosine-3'-phosphate
  modified_base 12: mod_base = OTHER; note = 2'-O-methyladenosine-3'-phosphate
  modified_base 13: mod_base = OTHER; note = 2'-O-methyladenosine-3'-phosphate
  modified_base 14: mod_base = OTHER; note = 2'-deoxy-2'-fluoroguanosine-3'-phosphate
  modified_base 15: mod_base = OTHER; note = 2'-O-methylguanosine-3'-phosphate
  modified_base 16: mod_base = OTHER; note = 2'-deoxy-2'-fluoroadenosine-3'-phosphate
  modified_base 17: mod_base = OTHER; note = 2'-O-methyladenosine-3'-phosphate
  modified_base 18: mod_base = OTHER; note = 2'-O-methylcytidine-3'-phosphate
  modified_base 19: mod_base = OTHER; note = 2'-O-methyladenosine-3'-phosphate
  modified_base 20: mod_base = OTHER; note = 2'-O-methyladenosine-3'-phosphate
  modified_base 21: mod_base = OTHER; note = 2'-O-methylguanosine-3'-phosphorothioate
  modified_base 22: mod_base = OTHER; note = 2'-O-methyluridine-3'-phosphorothioate
  modified_base 23: mod_base = OTHER; note = 2'-O-methyluridine
tttgtaaatgaaaggaacaagtt

SEQ ID NO: 12416 - RNA, 23 nt, synthetic construct
  source 1..23: mol_type = other RNA
  modified_base 1: mod_base = OTHER; note = 2'-O-methyluridine-3'-phosphorothioate 5'-(E)-Vinylphosphonate
  modified_base 2: mod_base = OTHER; note = 2'-deoxy-2'-fluorouridine-3'-phosphorothioate
  modified_base 3: mod_base = OTHER; note = 2'-O-methyluridine-3'-phosphate
  modified_base 4: mod_base = OTHER; note = 2'-O-methyluridine-3'-phosphate
  modified_base 5: mod_base = OTHER; note = 2'-O-methylguanosine-3'-phosphate
  modified_base 6: mod_base = OTHER; note = 2'-deoxy-2'-fluorouridine-3'-phosphate
  modified_base 7: mod_base = OTHER; note = 2'-O-methyladenosine-3'-phosphate
  modified_base 8: mod_base = OTHER; note = 2'-O-methyladenosine-3'-phosphate
  modified_base 9: mod_base = OTHER; note = 2'-O-methyladenosine-3'-phosphate
  modified_base 10: mod_base = OTHER; note = 2'-O-methyluridine-3'-phosphate
  modified_base 11: mod_base = OTHER; note = 2'-O-methylguanosine-3'-phosphate
  modified_base 12: mod_base = OTHER; note = 2'-O-methyladenosine-3'-phosphate
  modified_base 13: mod_base = OTHER; note = 2'-O-methyladenosine-3'-phosphate
  modified_base 14: mod_base = OTHER; note = 2'-deoxy-2'-fluoroadenosine-3'-phosphate
  modified_base 15: mod_base = OTHER; note = 2'-O-methylguanosine-3'-phosphate
  modified_base 16: mod_base = OTHER; note = 2'-deoxy-2'-fluoroguanosine-3'-phosphate
  modified_base 17: mod_base = OTHER; note = 2'-O-methyladenosine-3'-phosphate
  modified_base 18: mod_base = OTHER; note = 2'-O-methyladenosine-3'-phosphate
  modified_base 19: mod_base = OTHER; note = 2'-O-methylcytidine-3'-phosphate
  modified_base 20: mod_base = OTHER; note = 2'-O-methyladenosine-3'-phosphate
  modified_base 21: mod_base = OTHER; note = 2'-O-methyladenosine-3'-phosphorothioate
  modified_base 22: mod_base = OTHER; note = 2'-O-methylguanosine-3'-phosphorothioate
  modified_base 23: mod_base = OTHER; note = 2'-O-methyluridine
ttttgtaaatgaaaggaacaagt

SEQ ID NO: 12417 - RNA, 23 nt, synthetic construct
  source 1..23: mol_type = other RNA
  modified_base 1: mod_base = OTHER; note = 2'-O-methyluridine-3'-phosphorothioate 5'-(E)-Vinylphosphonate
  modified_base 2: mod_base = OTHER; note = 2'-deoxy-2'-fluorouridine-3'-phosphorothioate
  modified_base 3: mod_base = OTHER; note = 2'-O-methyluridine-3'-phosphate
  modified_base 4: mod_base = OTHER; note = 2'-O-methyluridine-3'-phosphate
  modified_base 5: mod_base = OTHER; note = 2'-O-methyluridine-3'-phosphate
  modified_base 6: mod_base = OTHER; note = 2'-deoxy-2'-fluoroguanosine-3'-phosphate
  modified_base 7: mod_base = OTHER; note = 2'-O-methyluridine-3'-phosphate
  modified_base 8: mod_base = OTHER; note = 2'-O-methyladenosine-3'-phosphate
  modified_base 9: mod_base = OTHER; note = 2'-O-methyladenosine-3'-phosphate
  modified_base 10: mod_base = OTHER; note = 2'-O-methyladenosine-3'-phosphate
  modified_base 11: mod_base = OTHER; note = 2'-O-methyluridine-3'-phosphate
  modified_base 12: mod_base = OTHER; note = 2'-O-methylguanosine-3'-phosphate
  modified_base 13: mod_base = OTHER; note = 2'-O-methyladenosine-3'-phosphate
  modified_base 14: mod_base = OTHER; note = 2'-deoxy-2'-fluoroadenosine-3'-phosphate
  modified_base 15: mod_base = OTHER; note = 2'-O-methyladenosine-3'-phosphate
  modified_base 16: mod_base = OTHER; note = 2'-deoxy-2'-fluoroguanosine-3'-phosphate
  modified_base 17: mod_base = OTHER; note = 2'-O-methylguanosine-3'-phosphate
  modified_base 18: mod_base = OTHER; note = 2'-O-methyladenosine-3'-phosphate
  modified_base 19: mod_base = OTHER; note = 2'-O-methyladenosine-3'-phosphate
  modified_base 20: mod_base = OTHER; note = 2'-O-methylcytidine-3'-phosphate
  modified_base 21: mod_base = OTHER; note = 2'-O-methyladenosine-3'-phosphorothioate
  modified_base 22: mod_base = OTHER; note = 2'-O-methyladenosine-3'-phosphorothioate
  modified_base 23: mod_base = OTHER; note = 2'-O-methylguanosine
tttttgtaaatgaaaggaacaag

SEQ ID NO: 12418 - RNA, 23 nt, synthetic construct
  source 1..23: mol_type = other RNA
  modified_base 1: mod_base = OTHER; note = 2'-O-methyluridine-3'-phosphorothioate 5'-(E)-Vinylphosphonate
  modified_base 2: mod_base = OTHER; note = 2'-deoxy-2'-fluorocytidine-3'-phosphorothioate
  modified_base 3: mod_base = OTHER; note = 2'-O-methyluridine-3'-phosphate
  modified_base 4: mod_base = OTHER; note = 2'-O-methyluridine-3'-phosphate
  modified_base 5: mod_base = OTHER; note = 2'-O-methyluridine-3'-phosphate
  modified_base 6: mod_base = OTHER; note = 2'-deoxy-2'-fluorouridine-3'-phosphate
  modified_base 7: mod_base = OTHER; note = 2'-O-methylguanosine-3'-phosphate
  modified_base 8: mod_base = OTHER; note = 2'-O-methyluridine-3'-phosphate
  modified_base 9: mod_base = OTHER; note = 2'-O-methyladenosine-3'-phosphate
  modified_base 10: mod_base = OTHER; note = 2'-O-methyladenosine-3'-phosphate
  modified_base 11: mod_base = OTHER; note = 2'-O-methyladenosine-3'-phosphate
  modified_base 12: mod_base = OTHER; note = 2'-O-methyluridine-3'-phosphate
  modified_base 13: mod_base = OTHER; note = 2'-O-methylguanosine-3'-phosphate
  modified_base 14: mod_base = OTHER; note = 2'-deoxy-2'-fluoroadenosine-3'-phosphate
  modified_base 15: mod_base = OTHER; note = 2'-O-methyladenosine-3'-phosphate
  modified_base 16: mod_base = OTHER; note = 2'-deoxy-2'-fluoroadenosine-3'-phosphate
  modified_base 17: mod_base = OTHER; note = 2'-O-methylguanosine-3'-phosphate
  modified_base 18: mod_base = OTHER; note = 2'-O-methylguanosine-3'-phosphate
  modified_base 19: mod_base = OTHER; note = 2'-O-methyladenosine-3'-phosphate
  modified_base 20: mod_base = OTHER; note = 2'-O-methyladenosine-3'-phosphate
  modified_base 21: mod_base = OTHER; note = 2'-O-methylcytidine-3'-phosphorothioate
  modified_base 22: mod_base = OTHER; note = 2'-O-methyladenosine-3'-phosphorothioate
  modified_base 23: mod_base = OTHER; note = 2'-O-methyladenosine
tcttttgtaaatgaaaggaacaa

SEQ ID NO: 12419 - RNA, 23 nt, synthetic construct
  source 1..23: mol_type = other RNA
  modified_base 1: mod_base = OTHER; note = 2'-O-methyluridine-3'-phosphorothioate 5'-(E)-Vinylphosphonate
  modified_base 2: mod_base = OTHER; note = 2'-deoxy-2'-fluorouridine-3'-phosphorothioate
  modified_base 3: mod_base = OTHER; note = 2'-O-methylcytidine-3'-phosphate
  modified_base 4: mod_base = OTHER; note = 2'-O-methyluridine-3'-phosphate
  modified_base 5: mod_base = OTHER; note = 2'-O-methyluridine-3'-phosphate
  modified_base 6: mod_base = OTHER; note = 2'-deoxy-2'-fluorouridine-3'-phosphate
  modified_base 7: mod_base = OTHER; note = 2'-O-methyluridine-3'-phosphate
  modified_base 8: mod_base = OTHER; note = 2'-O-methylguanosine-3'-phosphate
  modified_base 9: mod_base = OTHER; note = 2'-O-methyluridine-3'-phosphate
  modified_base 10: mod_base = OTHER; note = 2'-O-methyladenosine-3'-phosphate
  modified_base 11: mod_base = OTHER; note = 2'-O-methyladenosine-3'-phosphate
  modified_base 12: mod_base = OTHER; note = 2'-O-methyladenosine-3'-phosphate
  modified_base 13: mod_base = OTHER; note = 2'-O-methyluridine-3'-phosphate
  modified_base 14: mod_base = OTHER; note = 2'-deoxy-2'-fluoroguanosine-3'-phosphate
  modified_base 15: mod_base = OTHER; note = 2'-O-methyladenosine-3'-phosphate
  modified_base 16: mod_base = OTHER; note = 2'-deoxy-2'-fluoroadenosine-3'-phosphate
  modified_base 17: mod_base = OTHER; note = 2'-O-methyladenosine-3'-phosphate
  modified_base 18: mod_base = OTHER; note = 2'-O-methylguanosine-3'-phosphate
  modified_base 19: mod_base = OTHER; note = 2'-O-methylguanosine-3'-phosphate
  modified_base 20: mod_base = OTHER; note = 2'-O-methyladenosine-3'-phosphate
  modified_base 21: mod_base = OTHER; note = 2'-O-methyladenosine-3'-phosphorothioate
  modified_base 22: mod_base = OTHER; note = 2'-O-methylcytidine-3'-phosphorothioate
  modified_base 23: mod_base = OTHER; note = 2'-O-methyladenosine
ttcttttgtaaatgaaaggaaca

SEQ ID NO: 12420 - RNA, 23 nt, synthetic construct
  source 1..23: mol_type = other RNA
  modified_base 1: mod_base = OTHER; note = 2'-O-methyluridine-3'-phosphorothioate 5'-(E)-Vinylphosphonate
  modified_base 2: mod_base = OTHER; note = 2'-deoxy-2'-fluorocytidine-3'-phosphorothioate
  modified_base 3: mod_base = OTHER; note = 2'-O-methyluridine-3'-phosphate
  modified_base 4: mod_base = OTHER; note = 2'-O-methylcytidine-3'-phosphate
  modified_base 5: mod_base = OTHER; note = 2'-O-methyluridine-3'-phosphate
  modified_base 6: mod_base = OTHER; note = 2'-deoxy-2'-fluorouridine-3'-phosphate
  modified_base 7: mod_base = OTHER; note = 2'-O-methyluridine-3'-phosphate
  modified_base 8: mod_base = OTHER; note = 2'-O-methyluridine-3'-phosphate
  modified_base 9: mod_base = OTHER; note = 2'-O-methylguanosine-3'-phosphate
  modified_base 10: mod_base = OTHER; note = 2'-O-methyluridine-3'-phosphate
  modified_base 11: mod_base = OTHER; note = 2'-O-methyladenosine-3'-phosphate
  modified_base 12: mod_base = OTHER; note = 2'-O-methyladenosine-3'-phosphate
  modified_base 13: mod_base = OTHER; note = 2'-O-methyladenosine-3'-phosphate
  modified_base 14: mod_base = OTHER; note = 2'-deoxy-2'-fluorouridine-3'-phosphate
  modified_base 15: mod_base = OTHER; note = 2'-O-methylguanosine-3'-phosphate
  modified_base 16: mod_base = OTHER; note = 2'-deoxy-2'-fluoroadenosine-3'-phosphate
  modified_base 17: mod_base = OTHER; note = 2'-O-methyladenosine-3'-phosphate
  modified_base 18: mod_base = OTHER; note = 2'-O-methyladenosine-3'-phosphate
  modified_base 19: mod_base = OTHER; note = 2'-O-methylguanosine-3'-phosphate
  modified_base 20: mod_base = OTHER; note = 2'-O-methylguanosine-3'-phosphate
  modified_base 21: mod_base = OTHER; note = 2'-O-methyladenosine-3'-phosphorothioate
  modified_base 22: mod_base = OTHER; note = 2'-O-methyladenosine-3'-phosphorothioate
  modified_base 23: mod_base = OTHER; note = 2'-O-methylcytidine
tctcttttgtaaatgaaaggaac

SEQ ID NO: 12421 - RNA, 23 nt, synthetic construct
  source 1..23: mol_type = other RNA
  modified_base 1: mod_base = OTHER; note = 2'-O-methyluridine-3'-phosphorothioate 5'-(E)-Vinylphosphonate
  modified_base 2: mod_base = OTHER; note = 2'-deoxy-2'-fluorouridine-3'-phosphorothioate
  modified_base 3: mod_base = OTHER; note = 2'-O-methylcytidine-3'-phosphate
  modified_base 4: mod_base = OTHER; note = 2'-O-methyluridine-3'-phosphate
  modified_base 5: mod_base = OTHER; note = 2'-O-methylcytidine-3'-phosphate
  modified_base 6: mod_base = OTHER; note = 2'-deoxy-2'-fluorouridine-3'-phosphate
  modified_base 7: mod_base = OTHER; note = 2'-O-methyluridine-3'-phosphate
  modified_base 8: mod_base = OTHER; note = 2'-O-methyluridine-3'-phosphate
  modified_base 9: mod_base = OTHER; note = 2'-O-methyluridine-3'-phosphate
  modified_base 10: mod_base = OTHER; note = 2'-O-methylguanosine-3'-phosphate
  modified_base 11: mod_base = OTHER; note = 2'-O-methyluridine-3'-phosphate
  modified_base 12: mod_base = OTHER; note = 2'-O-methyladenosine-3'-phosphate
  modified_base 13: mod_base = OTHER; note = 2'-O-methyladenosine-3'-phosphate
  modified_base 14: mod_base = OTHER; note = 2'-deoxy-2'-fluoroadenosine-3'-phosphate
  modified_base 15: mod_base = OTHER; note = 2'-O-methyluridine-3'-phosphate
  modified_base 16: mod_base = OTHER; note = 2'-deoxy-2'-fluoroguanosine-3'-phosphate
  modified_base 17: mod_base = OTHER; note = 2'-O-methyladenosine-3'-phosphate
  modified_base 18: mod_base = OTHER; note = 2'-O-methyladenosine-3'-phosphate
  modified_base 19: mod_base = OTHER; note = 2'-O-methyladenosine-3'-phosphate
  modified_base 20: mod_base = OTHER; note = 2'-O-methylguanosine-3'-phosphate
  modified_base 21: mod_base = OTHER; note = 2'-O-methylguanosine-3'-phosphorothioate
  modified_base 22: mod_base = OTHER; note = 2'-O-methyladenosine-3'-phosphorothioate
  modified_base 23: mod_base = OTHER; note = 2'-O-methyladenosine
ttctcttttgtaaatgaaaggaa

SEQ ID NO: 12422 - RNA, 23 nt, synthetic construct
  source 1..23: mol_type = other RNA
  modified_base 1: mod_base = OTHER; note = 2'-O-methyluridine-3'-phosphorothioate 5'-(E)-Vinylphosphonate
  modified_base 2: mod_base = OTHER; note = 2'-deoxy-2'-fluoroadenosine-3'-phosphorothioate
  modified_base 3: mod_base = OTHER; note = 2'-O-methyluridine-3'-phosphate
  modified_base 4: mod_base = OTHER; note = 2'-O-methylcytidine-3'-phosphate
  modified_base 5: mod_base = OTHER; note = 2'-O-methyluridine-3'-phosphate
  modified_base 6: mod_base = OTHER; note = 2'-deoxy-2'-fluorocytidine-3'-phosphate
  modified_base 7: mod_base = OTHER; note = 2'-O-methyluridine-3'-phosphate
  modified_base 8: mod_base = OTHER; note = 2'-O-methyluridine-3'-phosphate
  modified_base 9: mod_base = OTHER; note = 2'-O-methyluridine-3'-phosphate
  modified_base 10: mod_base = OTHER; note = 2'-O-methyluridine-3'-phosphate
  modified_base 11: mod_base = OTHER; note = 2'-O-methylguanosine-3'-phosphate
  modified_base 12: mod_base = OTHER; note = 2'-O-methyluridine-3'-phosphate
  modified_base 13: mod_base = OTHER; note = 2'-O-methyladenosine-3'-phosphate
  modified_base 14: mod_base = OTHER; note = 2'-deoxy-2'-fluoroadenosine-3'-phosphate
  modified_base 15: mod_base = OTHER; note = 2'-O-methyladenosine-3'-phosphate
  modified_base 16: mod_base = OTHER; note = 2'-deoxy-2'-fluorouridine-3'-phosphate
  modified_base 17: mod_base = OTHER; note = 2'-O-methylguanosine-3'-phosphate
  modified_base 18: mod_base = OTHER; note = 2'-O-methyladenosine-3'-phosphate
  modified_base 19: mod_base = OTHER; note = 2'-O-methyladenosine-3'-phosphate
  modified_base 20: mod_base = OTHER; note = 2'-O-methyladenosine-3'-phosphate
  modified_base 21: mod_base = OTHER; note = 2'-O-methylguanosine-3'-phosphorothioate
  modified_base 22: mod_base = OTHER; note = 2'-O-methylguanosine-3'-phosphorothioate
  modified_base 23: mod_base = OTHER; note = 2'-O-methyladenosine
tatctcttttgtaaatgaaagga

SEQ ID NO: 12423 - RNA, 23 nt, synthetic construct
  source 1..23: mol_type = other RNA
  modified_base 1: mod_base = OTHER; note = 2'-O-methyluridine-3'-phosphorothioate 5'-(E)-Vinylphosphonate
  modified_base 2: mod_base = OTHER; note = 2'-deoxy-2'-fluorouridine-3'-phosphorothioate
  modified_base 3: mod_base = OTHER; note = 2'-O-methyladenosine-3'-phosphate
  modified_base 4: mod_base = OTHER; note = 2'-O-methyluridine-3'-phosphate
  modified_base 5: mod_base = OTHER; note = 2'-O-methylcytidine-3'-phosphate
  modified_base 6: mod_base = OTHER; note = 2'-deoxy-2'-fluorouridine-3'-phosphate
  modified_base 7: mod_base = OTHER; note = 2'-O-methylcytidine-3'-phosphate
  modified_base 8: mod_base = OTHER; note = 2'-O-methyluridine-3'-phosphate
  modified_base 9: mod_base = OTHER; note = 2'-O-methyluridine-3'-phosphate
  modified_base 10: mod_base = OTHER; note = 2'-O-methyluridine-3'-phosphate
  modified_base 11: mod_base = OTHER; note = 2'-O-methyluridine-3'-phosphate
  modified_base 12: mod_base = OTHER; note = 2'-O-methylguanosine-3'-phosphate
  modified_base 13: mod_base = OTHER; note = 2'-O-methyluridine-3'-phosphate
  modified_base 14: mod_base = OTHER; note = 2'-deoxy-2'-fluoroadenosine-3'-phosphate
  modified_base 15: mod_base = OTHER; note = 2'-O-methyladenosine-3'-phosphate
  modified_base 16: mod_base = OTHER; note = 2'-deoxy-2'-fluoroadenosine-3'-phosphate
  modified_base 17: mod_base = OTHER; note = 2'-O-methyluridine-3'-phosphate
  modified_base 18: mod_base = OTHER; note = 2'-O-methylguanosine-3'-phosphate
  modified_base 19: mod_base = OTHER; note = 2'-O-methyladenosine-3'-phosphate
  modified_base 20: mod_base = OTHER; note = 2'-O-methyladenosine-3'-phosphate
  modified_base 21: mod_base = OTHER; note = 2'-O-methyladenosine-3'-phosphorothioate
  modified_base 22: mod_base = OTHER; note = 2'-O-methylguanosine-3'-phosphorothioate
  modified_base 23: mod_base = OTHER; note = 2'-O-methylguanosine
ttatctcttttgtaaatgaaagg

SEQ ID NO: 12424 - RNA, 23 nt, synthetic construct
  source 1..23: mol_type = other RNA
  modified_base 1: mod_base = OTHER; note = 2'-O-methyluridine-3'-phosphorothioate 5'-(E)-Vinylphosphonate
  modified_base 2: mod_base = OTHER; note = 2'-deoxy-2'-fluoroguanosine-3'-phosphorothioate
  modified_base 3: mod_base = OTHER; note = 2'-O-methyluridine-3'-phosphate
  modified_base 4: mod_base = OTHER; note = 2'-O-methyladenosine-3'-phosphate
  modified_base 5: mod_base = OTHER; note = 2'-O-methyluridine-3'-phosphate
  modified_base 6: mod_base = OTHER; note = 2'-deoxy-2'-fluorocytidine-3'-phosphate
  modified_base 7: mod_base = OTHER; note = 2'-O-methyluridine-3'-phosphate
  modified_base 8: mod_base = OTHER; note = 2'-O-methylcytidine-3'-phosphate
  modified_base 9: mod_base = OTHER; note = 2'-O-methyluridine-3'-phosphate
  modified_base 10: mod_base = OTHER; note = 2'-O-methyluridine-3'-phosphate
  modified_base 11: mod_base = OTHER; note = 2'-O-methyluridine-3'-phosphate
  modified_base 12: mod_base = OTHER; note = 2'-O-methyluridine-3'-phosphate
  modified_base 13: mod_base = OTHER; note = 2'-O-methylguanosine-3'-phosphate
  modified_base 14: mod_base = OTHER; note = 2'-deoxy-2'-fluorouridine-3'-phosphate
  modified_base 15: mod_base = OTHER; note = 2'-O-methyladenosine-3'-phosphate
  modified_base 16: mod_base = OTHER; note = 2'-deoxy-2'-fluoroadenosine-3'-phosphate
  modified_base 17: mod_base = OTHER; note = 2'-O-methyladenosine-3'-phosphate
  modified_base 18: mod_base = OTHER; note = 2'-O-methyluridine-3'-phosphate
  modified_base 19: mod_base = OTHER; note = 2'-O-methylguanosine-3'-phosphate
  modified_base 20: mod_base = OTHER; note = 2'-O-methyladenosine-3'-phosphate
  modified_base 21: mod_base = OTHER; note = 2'-O-methyladenosine-3'-phosphorothioate
  modified_base 22: mod_base = OTHER; note = 2'-O-methyladenosine-3'-phosphorothioate
  modified_base 23: mod_base = OTHER; note = 2'-O-methylguanosine
tgtatctcttttgtaaatgaaag

SEQ ID NO: 12425 - RNA, 23 nt, synthetic construct
  source 1..23: mol_type = other RNA
  modified_base 1: mod_base = OTHER; note = 2'-O-methyluridine-3'-phosphorothioate 5'-(E)-Vinylphosphonate
  modified_base 2: mod_base = OTHER; note = 2'-deoxy-2'-fluoroguanosine-3'-phosphorothioate
  modified_base 3: mod_base = OTHER; note = 2'-O-methylguanosine-3'-phosphate
  modified_base 4: mod_base = OTHER; note = 2'-O-methyluridine-3'-phosphate
  modified_base 5: mod_base = OTHER; note = 2'-O-methyladenosine-3'-phosphate
  modified_base 6: mod_base = OTHER; note = 2'-deoxy-2'-fluorouridine-3'-phosphate
  modified_base 7: mod_base = OTHER; note = 2'-O-methylcytidine-3'-phosphate
  modified_base 8: mod_base = OTHER; note = 2'-O-methyluridine-3'-phosphate
  modified_base 9: mod_base = OTHER; note = 2'-O-methylcytidine-3'-phosphate
  modified_base 10: mod_base = OTHER; note = 2'-O-methyluridine-3'-phosphate
  modified_base 11: mod_base = OTHER; note = 2'-O-methyluridine-3'-phosphate
  modified_base 12: mod_base = OTHER; note = 2'-O-methyluridine-3'-phosphate
  modified_base 13: mod_base = OTHER; note = 2'-O-methyluridine-3'-phosphate
  modified_base 14: mod_base = OTHER; note = 2'-deoxy-2'-fluoroguanosine-3'-phosphate
  modified_base 15: mod_base = OTHER; note = 2'-O-methyluridine-3'-phosphate
  modified_base 16: mod_base = OTHER; note = 2'-deoxy-2'-fluoroadenosine-3'-phosphate
  modified_base 17: mod_base = OTHER; note = 2'-O-methyladenosine-3'-phosphate
  modified_base 18: mod_base = OTHER; note = 2'-O-methyladenosine-3'-phosphate
  modified_base 19: mod_base = OTHER; note = 2'-O-methyluridine-3'-phosphate
  modified_base 20: mod_base = OTHER; note = 2'-O-methylguanosine-3'-phosphate
  modified_base 21: mod_base = OTHER; note = 2'-O-methyladenosine-3'-phosphorothioate
  modified_base 22: mod_base = OTHER; note = 2'-O-methyladenosine-3'-phosphorothioate
  modified_base 23: mod_base = OTHER; note = 2'-O-methyladenosine
tggtatctcttttgtaaatgaaa

SEQ ID NO: 12426 - RNA, 23 nt, synthetic construct
  source 1..23: mol_type = other RNA
  modified_base 1: mod_base = OTHER; note = 2'-O-methyluridine-3'-phosphorothioate 5'-(E)-Vinylphosphonate
  modified_base 2: mod_base = OTHER; note = 2'-deoxy-2'-fluoroadenosine-3'-phosphorothioate
  modified_base 3: mod_base = OTHER; note = 2'-O-methylguanosine-3'-phosphate
  modified_base 4: mod_base = OTHER; note = 2'-O-methylguanosine-3'-phosphate
  modified_base 5: mod_base = OTHER; note = 2'-O-methyluridine-3'-phosphate
  modified_base 6: mod_base = OTHER; note = 2'-deoxy-2'-fluoroadenosine-3'-phosphate
  modified_base 7: mod_base = OTHER; note = 2'-O-methyluridine-3'-phosphate
  modified_base 8: mod_base = OTHER; note = 2'-O-methylcytidine-3'-phosphate
  modified_base 9: mod_base = OTHER; note = 2'-O-methyluridine-3'-phosphate
  modified_base 10: mod_base = OTHER; note = 2'-O-methylcytidine-3'-phosphate
  modified_base 11: mod_base = OTHER; note = 2'-O-methyluridine-3'-phosphate
  modified_base 12: mod_base = OTHER; note = 2'-O-methyluridine-3'-phosphate
  modified_base 13: mod_base = OTHER; note = 2'-O-methyluridine-3'-phosphate
  modified_base 14: mod_base = OTHER; note = 2'-deoxy-2'-fluorouridine-3'-phosphate
  modified_base 15: mod_base = OTHER; note = 2'-O-methylguanosine-3'-phosphate
  modified_base 16: mod_base = OTHER; note = 2'-deoxy-2'-fluorouridine-3'-phosphate
  modified_base 17: mod_base = OTHER; note = 2'-O-methyladenosine-3'-phosphate
  modified_base 18: mod_base = OTHER; note = 2'-O-methyladenosine-3'-phosphate
  modified_base 19: mod_base = OTHER; note = 2'-O-methyladenosine-3'-phosphate
  modified_base 20: mod_base = OTHER; note = 2'-O-methyluridine-3'-phosphate
  modified_base 21: mod_base = OTHER; note = 2'-O-methylguanosine-3'-phosphorothioate
  modified_base 22: mod_base = OTHER; note = 2'-O-methyladenosine-3'-phosphorothioate
  modified_base 23: mod_base = OTHER; note = 2'-O-methyladenosine
taggtatctcttttgtaaatgaa

SEQ ID NO: 12427 - RNA, 23 nt, synthetic construct
  source 1..23: mol_type = other RNA
  modified_base 1: mod_base = OTHER; note = 2'-O-methyluridine-3'-phosphorothioate 5'-(E)-Vinylphosphonate
  modified_base 2: mod_base = OTHER; note = 2'-deoxy-2'-fluorocytidine-3'-phosphorothioate
  modified_base 3: mod_base = OTHER; note = 2'-O-methyladenosine-3'-phosphate
  modified_base 4: mod_base = OTHER; note = 2'-O-methylguanosine-3'-phosphate
  modified_base 5: mod_base = OTHER; note = 2'-O-methylguanosine-3'-phosphate
  modified_base 6: mod_base = OTHER; note = 2'-deoxy-2'-fluorouridine-3'-phosphate
  modified_base 7: mod_base = OTHER; note = 2'-O-methyladenosine-3'-phosphate
  modified_base 8: mod_base = OTHER; note = 2'-O-methyluridine-3'-phosphate
  modified_base 9: mod_base = OTHER; note = 2'-O-methylcytidine-3'-phosphate
  modified_base 10: mod_base = OTHER; note = 2'-O-methyluridine-3'-phosphate
  modified_base 11: mod_base = OTHER; note = 2'-O-methylcytidine-3'-phosphate
  modified_base 12: mod_base = OTHER; note = 2'-O-methyluridine-3'-phosphate
  modified_base 13: mod_base = OTHER; note = 2'-O-methyluridine-3'-phosphate
  modified_base 14: mod_base = OTHER; note = 2'-deoxy-2'-fluorouridine-3'-phosphate
  modified_base 15: mod_base = OTHER; note = 2'-O-methyluridine-3'-phosphate
  modified_base 16: mod_base = OTHER; note = 2'-deoxy-2'-fluoroguanosine-3'-phosphate
  modified_base 17: mod_base = OTHER; note = 2'-O-methyluridine-3'-phosphate
  modified_base 18: mod_base = OTHER; note = 2'-O-methyladenosine-3'-phosphate
  modified_base 19: mod_base = OTHER; note = 2'-O-methyladenosine-3'-phosphate
  modified_base 20: mod_base = OTHER; note = 2'-O-methyladenosine-3'-phosphate
  modified_base 21: mod_base = OTHER; note = 2'-O-methyluridine-3'-phosphorothioate
  modified_base 22: mod_base = OTHER; note = 2'-O-methylguanosine-3'-phosphorothioate
  modified_base 23: mod_base = OTHER; note = 2'-O-methyladenosine
tcaggtatctcttttgtaaatga

SEQ ID NO: 12428 - RNA, 23 nt, synthetic construct
  source 1..23: mol_type = other RNA
  modified_base 1: mod_base = OTHER; note = 2'-O-methyluridine-3'-phosphorothioate 5'-(E)-Vinylphosphonate
  modified_base 2: mod_base = OTHER; note = 2'-deoxy-2'-fluorouridine-3'-phosphorothioate
  modified_base 3: mod_base = OTHER; note = 2'-O-methylcytidine-3'-phosphate
  modified_base 4: mod_base = OTHER; note = 2'-O-methyladenosine-3'-phosphate
  modified_base 5: mod_base = OTHER; note = 2'-O-methylguanosine-3'-phosphate
  modified_base 6: mod_base = OTHER; note = 2'-deoxy-2'-fluoroguanosine-3'-phosphate
  modified_base 7: mod_base = OTHER; note = 2'-O-methyluridine-3'-phosphate
  modified_base 8: mod_base = OTHER; note = 2'-O-methyladenosine-3'-phosphate
  modified_base 9: mod_base = OTHER; note = 2'-O-methyluridine-3'-phosphate
  modified_base 10: mod_base = OTHER; note = 2'-O-methylcytidine-3'-phosphate
  modified_base 11: mod_base = OTHER; note = 2'-O-methyluridine-3'-phosphate
  modified_base 12: mod_base = OTHER; note = 2'-O-methylcytidine-3'-phosphate
  modified_base 13: mod_base = OTHER; note = 2'-O-methyluridine-3'-phosphate
  modified_base 14: mod_base = OTHER; note = 2'-deoxy-2'-fluorouridine-3'-phosphate
  modified_base 15: mod_base = OTHER; note = 2'-O-methyluridine-3'-phosphate
  modified_base 16: mod_base = OTHER; note = 2'-deoxy-2'-fluorouridine-3'-phosphate
  modified_base 17: mod_base = OTHER; note = 2'-O-methylguanosine-3'-phosphate
  modified_base 18: mod_base = OTHER; note = 2'-O-methyluridine-3'-phosphate
  modified_base 19: mod_base = OTHER; note = 2'-O-methyladenosine-3'-phosphate
  modified_base 20: mod_base = OTHER; note = 2'-O-methyladenosine-3'-phosphate
  modified_base 21: mod_base = OTHER; note = 2'-O-methyladenosine-3'-phosphorothioate
  modified_base 22: mod_base = OTHER; note = 2'-O-methyluridine-3'-phosphorothioate
  modified_base 23: mod_base = OTHER; note = 2'-O-methylguanosine
ttcaggtatctcttttgtaaatg

SEQ ID NO: 12429 - RNA, 23 nt, synthetic construct
  source 1..23: mol_type = other RNA
  modified_base 1: mod_base = OTHER; note = 2'-O-methyluridine-3'-phosphorothioate 5'-(E)-Vinylphosphonate
  modified_base 2: mod_base = OTHER; note = 2'-deoxy-2'-fluoroguanosine-3'-phosphorothioate
  modified_base 3: mod_base = OTHER; note = 2'-O-methyluridine-3'-phosphate
  modified_base 4: mod_base = OTHER; note = 2'-O-methylcytidine-3'-phosphate
  modified_base 5: mod_base = OTHER; note = 2'-O-methyladenosine-3'-phosphate
  modified_base 6: mod_base = OTHER; note = 2'-deoxy-2'-fluoroguanosine-3'-phosphate
  modified_base 7: mod_base = OTHER; note = 2'-O-methylguanosine-3'-phosphate
  modified_base 8: mod_base = OTHER; note = 2'-O-methyluridine-3'-phosphate
  modified_base 9: mod_base = OTHER; note = 2'-O-methyladenosine-3'-phosphate
  modified_base 10: mod_base = OTHER; note = 2'-O-methyluridine-3'-phosphate
  modified_base 11: mod_base = OTHER; note = 2'-O-methylcytidine-3'-phosphate
  modified_base 12: mod_base = OTHER; note = 2'-O-methyluridine-3'-phosphate
  modified_base 13: mod_base = OTHER; note = 2'-O-methylcytidine-3'-phosphate
  modified_base 14: mod_base = OTHER; note = 2'-deoxy-2'-fluorouridine-3'-phosphate
  modified_base 15: mod_base = OTHER; note = 2'-O-methyluridine-3'-phosphate
  modified_base 16: mod_base = OTHER; note = 2'-deoxy-2'-fluorouridine-3'-phosphate
  modified_base 17: mod_base = OTHER; note = 2'-O-methyluridine-3'-phosphate
  modified_base 18: mod_base = OTHER; note = 2'-O-methylguanosine-3'-phosphate
  modified_base 19: mod_base = OTHER; note = 2'-O-methyluridine-3'-phosphate
  modified_base 20: mod_base = OTHER; note = 2'-O-methyladenosine-3'-phosphate
  modified_base 21: mod_base = OTHER; note = 2'-O-methyladenosine-3'-phosphorothioate
  modified_base 22: mod_base = OTHER; note = 2'-O-methyladenosine-3'-phosphorothioate
  modified_base 23: mod_base = OTHER; note = 2'-O-methyluridine
tgtcaggtatctcttttgtaaat

SEQ ID NO: 12430 - RNA, 23 nt, synthetic construct
  source 1..23: mol_type = other RNA
  modified_base 1: mod_base = OTHER; note = 2'-O-methyluridine-3'-phosphorothioate 5'-(E)-Vinylphosphonate
  modified_base 2: mod_base = OTHER; note = 2'-deoxy-2'-fluorouridine-3'-phosphorothioate
  modified_base 3: mod_base = OTHER; note = 2'-O-methylguanosine-3'-phosphate
  modified_base 4: mod_base = OTHER; note = 2'-O-methyluridine-3'-phosphate
  modified_base 5: mod_base = OTHER; note = 2'-O-methylcytidine-3'-phosphate
  modified_base 6: mod_base = OTHER; note = 2'-deoxy-2'-fluoroadenosine-3'-phosphate
  modified_base 7: mod_base = OTHER; note = 2'-O-methylguanosine-3'-phosphate
  modified_base 8: mod_base = OTHER; note = 2'-O-methylguanosine-3'-phosphate
  modified_base 9: mod_base = OTHER; note = 2'-O-methyluridine-3'-phosphate
  modified_base 10: mod_base = OTHER; note = 2'-O-methyladenosine-3'-phosphate
  modified_base 11: mod_base = OTHER; note = 2'-O-methyluridine-3'-phosphate
  modified_base 12: mod_base = OTHER; note = 2'-O-methylcytidine-3'-phosphate
  modified_base 13: mod_base = OTHER; note = 2'-O-methyluridine-3'-phosphate
  modified_base 14: mod_base = OTHER; note = 2'-deoxy-2'-fluorocytidine-3'-phosphate
  modified_base 15: mod_base = OTHER; note = 2'-O-methyluridine-3'-phosphate
  modified_base 16: mod_base = OTHER; note = 2'-deoxy-2'-fluorouridine-3'-phosphate
  modified_base 17: mod_base = OTHER; note = 2'-O-methyluridine-3'-phosphate
  modified_base 18: mod_base = OTHER; note = 2'-O-methyluridine-3'-phosphate
  modified_base 19: mod_base = OTHER; note = 2'-O-methylguanosine-3'-phosphate
  modified_base 20: mod_base = OTHER; note = 2'-O-methyluridine-3'-phosphate
  modified_base 21: mod_base = OTHER; note = 2'-O-methyladenosine-3'-phosphorothioate
  modified_base 22: mod_base = OTHER; note = 2'-O-methyladenosine-3'-phosphorothioate
  modified_base 23: mod_base = OTHER; note = 2'-O-methyladenosine
ttgtcaggtatctcttttgtaaa

SEQ ID NO: 12431 - RNA, 23 nt, synthetic construct
  source 1..23: mol_type = other RNA
  modified_base 1: mod_base = OTHER; note = 2'-O-methyluridine-3'-phosphorothioate 5'-(E)-Vinylphosphonate
  modified_base 2: mod_base = OTHER; note = 2'-deoxy-2'-fluoroadenosine-3'-phosphorothioate
  modified_base 3: mod_base = OTHER; note = 2'-O-methyluridine-3'-phosphate
  modified_base 4: mod_base = OTHER; note = 2'-O-methylguanosine-3'-phosphate
  modified_base 5: mod_base = OTHER; note = 2'-O-methyluridine-3'-phosphate
  modified_base 6: mod_base = OTHER; note = 2'-deoxy-2'-fluorocytidine-3'-phosphate
  modified_base 7: mod_base = OTHER; note = 2'-O-methyladenosine-3'-phosphate
  modified_base 8: mod_base = OTHER; note = 2'-O-methylguanosine-3'-phosphate
  modified_base 9: mod_base = OTHER; note = 2'-O-methylguanosine-3'-phosphate
  modified_base 10: mod_base = OTHER; note = 2'-O-methyluridine-3'-phosphate
  modified_base 11: mod_base = OTHER; note = 2'-O-methyladenosine-3'-phosphate
  modified_base 12: mod_base = OTHER; note = 2'-O-methyluridine-3'-phosphate
  modified_base 13: mod_base = OTHER; note = 2'-O-methylcytidine-3'-phosphate
  modified_base 14: mod_base = OTHER; note = 2'-deoxy-2'-fluorouridine-3'-phosphate
  modified_base 15: mod_base = OTHER; note = 2'-O-methylcytidine-3'-phosphate
  modified_base 16: mod_base = OTHER; note = 2'-deoxy-2'-fluorouridine-3'-phosphate
  modified_base 17: mod_base = OTHER; note = 2'-O-methyluridine-3'-phosphate
  modified_base 18: mod_base = OTHER; note = 2'-O-methyluridine-3'-phosphate
  modified_base 19: mod_base = OTHER; note = 2'-O-methyluridine-3'-phosphate
  modified_base 20: mod_base = OTHER; note = 2'-O-methylguanosine-3'-phosphate
  modified_base 21: mod_base = OTHER; note = 2'-O-methyluridine-3'-phosphorothioate
  modified_base 22: mod_base = OTHER; note = 2'-O-methyladenosine-3'-phosphorothioate
  modified_base 23: mod_base = OTHER; note = 2'-O-methyladenosine
tatgtcaggtatctcttttgtaa

SEQ ID NO: 12432 - RNA, 23 nt, synthetic construct
  source 1..23: mol_type = other RNA
  modified_base 1: mod_base = OTHER; note = 2'-O-methyluridine-3'-phosphorothioate 5'-(E)-Vinylphosphonate
  modified_base 2: mod_base = OTHER; note = 2'-deoxy-2'-fluoroguanosine-3'-phosphorothioate
  modified_base 3: mod_base = OTHER; note = 2'-O-methyladenosine-3'-phosphate
  modified_base 4: mod_base = OTHER; note = 2'-O-methyluridine-3'-phosphate
  modified_base 5: mod_base = OTHER; note = 2'-O-methylguanosine-3'-phosphate
  modified_base 6: mod_base = OTHER; note = 2'-deoxy-2'-fluorouridine-3'-phosphate
  modified_base 7: mod_base = OTHER; note = 2'-O-methylcytidine-3'-phosphate
  modified_base 8: mod_base = OTHER; note = 2'-O-methyladenosine-3'-phosphate
  modified_base 9: mod_base = OTHER; note = 2'-O-methylguanosine-3'-phosphate
  modified_base 10: mod_base = OTHER; note = 2'-O-methylguanosine-3'-phosphate
  modified_base 11: mod_base = OTHER; note = 2'-O-methyluridine-3'-phosphate
  modified_base 12: mod_base = OTHER; note = 2'-O-methyladenosine-3'-phosphate
  modified_base 13: mod_base = OTHER; note = 2'-O-methyluridine-3'-phosphate
  modified_base 14: mod_base = OTHER; note = 2'-deoxy-2'-fluorocytidine-3'-phosphate
  modified_base 15: mod_base = OTHER; note = 2'-O-methyluridine-3'-phosphate
  modified_base 16: mod_base = OTHER; note = 2'-deoxy-2'-fluorocytidine-3'-phosphate
  modified_base 17: mod_base = OTHER; note = 2'-O-methyluridine-3'-phosphate
  modified_base 18: mod_base = OTHER; note = 2'-O-methyluridine-3'-phosphate
  modified_base 19: mod_base = OTHER; note = 2'-O-methyluridine-3'-phosphate
  modified_base 20: mod_base = OTHER; note = 2'-O-methyluridine-3'-phosphate
  modified_base 21: mod_base = OTHER; note = 2'-O-methylguanosine-3'-phosphorothioate
  modified_base 22: mod_base = OTHER; note = 2'-O-methyluridine-3'-phosphorothioate
  modified_base 23: mod_base = OTHER; note = 2'-O-methyladenosine
tgatgtcaggtatctcttttgta

SEQ ID NO: 12433 - RNA, 23 nt, synthetic construct
  source 1..23: mol_type = other RNA
  modified_base 1: mod_base = OTHER; note = 2'-O-methyluridine-3'-phosphorothioate 5'-(E)-Vinylphosphonate
  modified_base 2: mod_base = OTHER; note = 2'-deoxy-2'-fluoroguanosine-3'-phosphorothioate
  modified_base 3: mod_base = OTHER; note = 2'-O-methylguanosine-3'-phosphate
  modified_base 4: mod_base = OTHER; note = 2'-O-methyladenosine-3'-phosphate
  modified_base 5: mod_base = OTHER; note = 2'-O-methyluridine-3'-phosphate
  modified_base 6: mod_base = OTHER; note = 2'-deoxy-2'-fluoroguanosine-3'-phosphate
  modified_base 7: mod_base = OTHER; note = 2'-O-methyluridine-3'-phosphate
  modified_base 8: mod_base = OTHER; note = 2'-O-methylcytidine-3'-phosphate
  modified_base 9: mod_base = OTHER; note = 2'-O-methyladenosine-3'-phosphate
  modified_base 10: mod_base = OTHER; note = 2'-O-methylguanosine-3'-phosphate
  modified_base 11: mod_base = OTHER; note = 2'-O-methylguanosine-3'-phosphate
  modified_base 12: mod_base = OTHER; note = 2'-O-methyluridine-3'-phosphate
  modified_base 13: mod_base = OTHER; note = 2'-O-methyladenosine-3'-phosphate
  modified_base 14: mod_base = OTHER; note = 2'-deoxy-2'-fluorouridine-3'-phosphate
  modified_base 15: mod_base = OTHER; note = 2'-O-methylcytidine-3'-phosphate
  modified_base 16: mod_base = OTHER; note = 2'-deoxy-2'-fluorouridine-3'-phosphate
  modified_base 17: mod_base = OTHER; note = 2'-O-methylcytidine-3'-phosphate
  modified_base 18: mod_base = OTHER; note = 2'-O-methyluridine-3'-phosphate
  modified_base 19: mod_base = OTHER; note = 2'-O-methyluridine-3'-phosphate
  modified_base 20: mod_base = OTHER; note = 2'-O-methyluridine-3'-phosphate
  modified_base 21: mod_base = OTHER; note = 2'-O-methyluridine-3'-phosphorothioate
  modified_base 22: mod_base = OTHER; note = 2'-O-methylguanosine-3'-phosphorothioate
  modified_base 23: mod_base = OTHER; note = 2'-O-methyluridine
tggatgtcaggtatctcttttgt

SEQ ID NO: 12434 - RNA, 23 nt, synthetic construct
  source 1..23: mol_type = other RNA
  modified_base 1: mod_base = OTHER; note = 2'-O-methyluridine-3'-phosphorothioate 5'-(E)-Vinylphosphonate
  modified_base 2: mod_base = OTHER; note = 2'-deoxy-2'-fluoroguanosine-3'-phosphorothioate
  modified_base 3: mod_base = OTHER; note = 2'-O-methyladenosine-3'-phosphate
  modified_base 4: mod_base = OTHER; note = 2'-O-methylcytidine-3'-phosphate
  modified_base 5: mod_base = OTHER; note = 2'-O-methyladenosine-3'-phosphate
  modified_base 6: mod_base = OTHER; note = 2'-deoxy-2'-fluorouridine-3'-phosphate
  modified_base 7: mod_base = OTHER; note = 2'-O-methyluridine-3'-phosphate
  modified_base 8: mod_base = OTHER; note = 2'-O-methyluridine-3'-phosphate
  modified_base 9: mod_base = OTHER; note = 2'-O-methylcytidine-3'-phosphate
  modified_base 10: mod_base = OTHER; note = 2'-O-methyluridine-3'-phosphate
  modified_base 11: mod_base = OTHER; note = 2'-O-methylcytidine-3'-phosphate
  modified_base 12: mod_base = OTHER; note = 2'-O-methyladenosine-3'-phosphate
  modified_base 13: mod_base = OTHER; note = 2'-O-methylguanosine-3'-phosphate
  modified_base 14: mod_base = OTHER; note = 2'-deoxy-2'-fluorouridine-3'-phosphate
  modified_base 15: mod_base = OTHER; note = 2'-O-methylguanosine-3'-phosphate
  modified_base 16: mod_base = OTHER; note = 2'-deoxy-2'-fluorouridine-3'-phosphate
  modified_base 17: mod_base = OTHER; note = 2'-O-methylcytidine-3'-phosphate
  modified_base 18: mod_base = OTHER; note = 2'-O-methyluridine-3'-phosphate
  modified_base 19: mod_base = OTHER; note = 2'-O-methylcytidine-3'-phosphate
  modified_base 20: mod_base = OTHER; note = 2'-O-methyladenosine-3'-phosphate
  modified_base 21: mod_base = OTHER; note = 2'-O-methylguanosine-3'-phosphorothioate
  modified_base 22: mod_base = OTHER; note = 2'-O-methylguanosine-3'-phosphorothioate
  modified_base 23: mod_base = OTHER; note = 2'-O-methyladenosine
tgacatttctcagtgtctcagga

SEQ ID NO: 12435 - RNA, 23 nt, synthetic construct
  source 1..23: mol_type = other RNA
  modified_base 1: mod_base = OTHER; note = 2'-O-methyluridine-3'-phosphorothioate 5'-(E)-Vinylphosphonate
  modified_base 2: mod_base = OTHER; note = 2'-deoxy-2'-fluoroadenosine-3'-phosphorothioate
  modified_base 3: mod_base = OTHER; note = 2'-O-methyluridine-3'-phosphate
  modified_base 4: mod_base = OTHER; note = 2'-O-methyluridine-3'-phosphate
  modified_base 5: mod_base = OTHER; note = 2'-O-methyladenosine-3'-phosphate
  modified_base 6: mod_base = OTHER; note = 2'-deoxy-2'-fluoroguanosine-3'-phosphate
  modified_base 7: mod_base = OTHER; note = 2'-O-methylcytidine-3'-phosphate
  modified_base 8: mod_base = OTHER; note = 2'-O-methyluridine-3'-phosphate
  modified_base 9: mod_base = OTHER; note = 2'-O-methylguanosine-3'-phosphate
  modified_base 10: mod_base = OTHER; note = 2'-O-methyluridine-3'-phosphate
  modified_base 11: mod_base = OTHER; note = 2'-O-methylguanosine-3'-phosphate
  modified_base 12: mod_base = OTHER; note = 2'-O-methyluridine-3'-phosphate
  modified_base 13: mod_base = OTHER; note = 2'-O-methylguanosine-3'-phosphate
  modified_base 14: mod_base = OTHER; note = 2'-deoxy-2'-fluoroadenosine-3'-phosphate
  modified_base 15: mod_base = OTHER; note = 2'-O-methylcytidine-3'-phosphate
  modified_base 16: mod_base = OTHER; note = 2'-deoxy-2'-fluorouridine-3'-phosphate
  modified_base 17: mod_base = OTHER; note = 2'-O-methyluridine-3'-phosphate
  modified_base 18: mod_base = OTHER; note = 2'-O-methylcytidine-3'-phosphate
  modified_base 19: mod_base = OTHER; note = 2'-O-methyladenosine-3'-phosphate
  modified_base 20: mod_base = OTHER; note = 2'-O-methylguanosine-3'-phosphate
  modified_base 21: mod_base = OTHER; note = 2'-O-methylguanosine-3'-phosphorothioate
  modified_base 22: mod_base = OTHER; note = 2'-O-methyladenosine-3'-phosphorothioate
  modified_base 23: mod_base = OTHER; note = 2'-O-methylcytidine
tattagctgtgtgacttcaggac

SEQ ID NO: 12436 - RNA, 23 nt, synthetic construct
  source 1..23: mol_type = other RNA
  modified_base 1: mod_base = OTHER; note = 2'-O-methyluridine-3'-phosphorothioate 5'-(E)-Vinylphosphonate
  modified_base 2: mod_base = OTHER; note = 2'-deoxy-2'-fluorocytidine-3'-phosphorothioate
  modified_base 3: mod_base = OTHER; note = 2'-O-methyladenosine-3'-phosphate
  modified_base 4: mod_base = OTHER; note = 2'-O-methyluridine-3'-phosphate
  modified_base 5: mod_base = OTHER; note = 2'-O-methyluridine-3'-phosphate
  modified_base 6: mod_base = OTHER; note = 2'-deoxy-2'-fluorouridine-3'-phosphate
  modified_base 7: mod_base = OTHER; note = 2'-O-methylcytidine-3'-phosphate
  modified_base 8: mod_base = OTHER; note = 2'-O-methyluridine-3'-phosphate
  modified_base 9: mod_base = OTHER; note = 2'-O-methylcytidine-3'-phosphate
  modified_base 10: mod_base = OTHER; note = 2'-O-methyladenosine-3'-phosphate
  modified_base 11: mod_base = OTHER; note = 2'-O-methylguanosine-3'-phosphate
  modified_base 12: mod_base = OTHER; note = 2'-O-methyluridine-3'-phosphate
  modified_base 13: mod_base = OTHER; note = 2'-O-methylguanosine-3'-phosphate
  modified_base 14: mod_base = OTHER; note = 2'-deoxy-2'-fluorouridine-3'-phosphate
  modified_base 15: mod_base = OTHER; note = 2'-O-methylcytidine-3'-phosphate
  modified_base 16: mod_base = OTHER; note = 2'-deoxy-2'-fluorouridine-3'-phosphate
  modified_base 17: mod_base = OTHER; note = 2'-O-methylcytidine-3'-phosphate
  modified_base 18: mod_base = OTHER; note = 2'-O-methyladenosine-3'-phosphate
  modified_base 19: mod_base = OTHER; note = 2'-O-methylguanosine-3'-phosphate
  modified_base 20: mod_base = OTHER; note = 2'-O-methylguanosine-3'-phosphate
  modified_base 21: mod_base = OTHER; note = 2'-O-methyladenosine-3'-phosphorothioate
  modified_base 22: mod_base = OTHER; note = 2'-O-methyluridine-3'-phosphorothioate
  modified_base 23: mod_base = OTHER; note = 2'-O-methylguanosine
tcatttctcagtgtctcaggatg

SEQ ID NO: 12437 - RNA, 23 nt, synthetic construct
  source 1..23: mol_type = other RNA
  modified_base 1: mod_base = OTHER; note = 2'-O-methyluridine-3'-phosphorothioate 5'-(E)-Vinylphosphonate
  modified_base 2: mod_base = OTHER; note = 2'-deoxy-2'-fluoroadenosine-3'-phosphorothioate
  modified_base 3: mod_base = OTHER; note = 2'-O-methylguanosine-3'-phosphate
  modified_base 4: mod_base = OTHER; note = 2'-O-methylguanosine-3'-phosphate
  modified_base 5: mod_base = OTHER; note = 2'-O-methyladenosine-3'-phosphate
  modified_base 6: mod_base = OTHER; note = 2'-deoxy-2'-fluorocytidine-3'-phosphate
  modified_base 7: mod_base = OTHER; note = 2'-O-methyladenosine-3'-phosphate
  modified_base 8: mod_base = OTHER; note = 2'-O-methyluridine-3'-phosphate
  modified_base 9: mod_base = OTHER; note = 2'-O-methyluridine-3'-phosphate
  modified_base 10: mod_base = OTHER; note = 2'-O-methyluridine-3'-phosphate
  modified_base 11: mod_base = OTHER; note = 2'-O-methylcytidine-3'-phosphate
  modified_base 12: mod_base = OTHER; note = 2'-O-methyluridine-3'-phosphate
  modified_base 13: mod_base = OTHER; note = 2'-O-methylcytidine-3'-phosphate
  modified_base 14: mod_base = OTHER; note = 2'-deoxy-2'-fluoroadenosine-3'-phosphate
  modified_base 15: mod_base = OTHER; note = 2'-O-methylguanosine-3'-phosphate
  modified_base 16: mod_base = OTHER; note = 2'-deoxy-2'-fluorouridine-3'-phosphate
  modified_base 17: mod_base = OTHER; note = 2'-O-methylguanosine-3'-phosphate
  modified_base 18: mod_base = OTHER; note = 2'-O-methyluridine-3'-phosphate
  modified_base 19: mod_base = OTHER; note = 2'-O-methylcytidine-3'-phosphate
  modified_base 20: mod_base = OTHER; note = 2'-O-methyluridine-3'-phosphate
  modified_base 21: mod_base = OTHER; note = 2'-O-methylcytidine-3'-phosphorothioate
  modified_base 22: mod_base = OTHER; note = 2'-O-methyladenosine-3'-phosphorothioate
  modified_base 23: mod_base = OTHER; note = 2'-O-methylguanosine
taggacatttctcagtgtctcag

SEQ ID NO: 12438 - RNA, 23 nt, synthetic construct
  source 1..23: mol_type = other RNA
  modified_base 1: mod_base = OTHER; note = 2'-O-methyluridine-3'-phosphorothioate 5'-(E)-Vinylphosphonate
  modified_base 2: mod_base = OTHER; note = 2'-deoxy-2'-fluorouridine-3'-phosphorothioate
  modified_base 3: mod_base = OTHER; note = 2'-O-methylguanosine-3'-phosphate
  modified_base 4: mod_base = OTHER; note = 2'-O-methyluridine-3'-phosphate
  modified_base 5: mod_base = OTHER; note = 2'-O-methylguanosine-3'-phosphate
  modified_base 6: mod_base = OTHER; note = 2'-deoxy-2'-fluoroadenosine-3'-phosphate
  modified_base 7: mod_base = OTHER; note = 2'-O-methylcytidine-3'-phosphate
  modified_base 8: mod_base = OTHER; note = 2'-O-methyluridine-3'-phosphate
  modified_base 9: mod_base = OTHER; note = 2'-O-methyluridine-3'-phosphate
  modified_base 10: mod_base = OTHER; note = 2'-O-methylcytidine-3'-phosphate
  modified_base 11: mod_base = OTHER; note = 2'-O-methyladenosine-3'-phosphate
  modified_base 12: mod_base = OTHER; note = 2'-O-methylguanosine-3'-phosphate
  modified_base 13: mod_base = OTHER; note = 2'-O-methylguanosine-3'-phosphate
  modified_base 14: mod_base = OTHER; note = 2'-deoxy-2'-fluoroadenosine-3'-phosphate
  modified_base 15: mod_base = OTHER; note = 2'-O-methylcytidine-3'-phosphate
  modified_base 16: mod_base = OTHER; note = 2'-deoxy-2'-fluoroadenosine-3'-phosphate
  modified_base 17: mod_base = OTHER; note = 2'-O-methyluridine-3'-phosphate
  modified_base 18: mod_base = OTHER; note = 2'-O-methyluridine-3'-phosphate
  modified_base 19: mod_base = OTHER; note = 2'-O-methyluridine-3'-phosphate
  modified_base 20: mod_base = OTHER; note = 2'-O-methylcytidine-3'-phosphate
  modified_base 21: mod_base = OTHER; note = 2'-O-methyluridine-3'-phosphorothioate
  modified_base 22: mod_base = OTHER; note = 2'-O-methylcytidine-3'-phosphorothioate
  modified_base 23: mod_base = OTHER; note = 2'-O-methyladenosine
ttgtgacttcaggacatttctca

SEQ ID NO: 12439 - RNA, 23 nt, synthetic construct
  source 1..23: mol_type = other RNA
  modified_base 1: mod_base = OTHER; note = 2'-O-methyluridine-3'-phosphorothioate 5'-(E)-Vinylphosphonate
  modified_base 2: mod_base = OTHER; note = 2'-deoxy-2'-fluorouridine-3'-phosphorothioate
  modified_base 3: mod_base = OTHER; note = 2'-O-methyluridine-3'-phosphate
  modified_base 4: mod_base = OTHER; note = 2'-O-methyladenosine-3'-phosphate
  modified_base 5: mod_base = OTHER; note = 2'-O-methylcytidine-3'-phosphate
  modified_base 6: mod_base = OTHER; note = 2'-deoxy-2'-fluoroguanosine-3'-phosphate
  modified_base 7: mod_base = OTHER; note = 2'-O-methylguanosine-3'-phosphate
  modified_base 8: mod_base = OTHER; note = 2'-O-methyluridine-3'-phosphate
  modified_base 9: mod_base = OTHER; note = 2'-O-methylguanosine-3'-phosphate
  modified_base 10: mod_base = OTHER; note = 2'-O-methyluridine-3'-phosphate
  modified_base 11: mod_base = OTHER; note = 2'-O-methyluridine-3'-phosphate
  modified_base 12: mod_base = OTHER; note = 2'-O-methylcytidine-3'-phosphate
  modified_base 13: mod_base = OTHER; note = 2'-O-methyladenosine-3'-phosphate
  modified_base 14: mod_base = OTHER; note = 2'-deoxy-2'-fluorouridine-3'-phosphate
  modified_base 15: mod_base = OTHER; note = 2'-O-methyluridine-3'-phosphate
  modified_base 16: mod_base = OTHER; note = 2'-deoxy-2'-fluoroadenosine-3'-phosphate
  modified_base 17: mod_base = OTHER; note = 2'-O-methyluridine-3'-phosphate
  modified_base 18: mod_base = OTHER; note = 2'-O-methylcytidine-3'-phosphate
  modified_base 19: mod_base = OTHER; note = 2'-O-methyladenosine-3'-phosphate
  modified_base 20: mod_base = OTHER; note = 2'-O-methylcytidine-3'-phosphate
  modified_base 21: mod_base = OTHER; note = 2'-O-methyladenosine-3'-phosphorothioate
  modified_base 22: mod_base = OTHER; note = 2'-O-methyladenosine-3'-phosphorothioate
  modified_base 23: mod_base = OTHER; note = 2'-O-methylguanosine
tttacggtgttcattatcacaag

SEQ ID NO: 12440 - RNA, 23 nt, synthetic construct
  source 1..23: mol_type = other RNA
  modified_base 1: mod_base = OTHER; note = 2'-O-methyluridine-3'-phosphorothioate 5'-(E)-Vinylphosphonate
  modified_base 2: mod_base = OTHER; note = 2'-deoxy-2'-fluorouridine-3'-phosphorothioate
  modified_base 3: mod_base = OTHER; note = 2'-O-methyladenosine-3'-phosphate
  modified_base 4: mod_base = OTHER; note = 2'-O-methyluridine-3'-phosphate
  modified_base 5: mod_base = OTHER; note = 2'-O-methylcytidine-3'-phosphate
  modified_base 6: mod_base = OTHER; note = 2'-deoxy-2'-fluoroadenosine-3'-phosphate
  modified_base 7: mod_base = OTHER; note = 2'-O-methylcytidine-3'-phosphate
  modified_base 8: mod_base = OTHER; note = 2'-O-methyladenosine-3'-phosphate
  modified_base 9: mod_base = OTHER; note = 2'-O-methyladenosine-3'-phosphate
  modified_base 10: mod_base = OTHER; note = 2'-O-methylguanosine-3'-phosphate
  modified_base 11: mod_base = OTHER; note = 2'-O-methyladenosine-3'-phosphate
  modified_base 12: mod_base = OTHER; note = 2'-O-methyluridine-3'-phosphate
  modified_base 13: mod_base = OTHER; note = 2'-O-methyluridine-3'-phosphate
  modified_base 14: mod_base = OTHER; note = 2'-deoxy-2'-fluorouridine-3'-phosphate
  modified_base 15: mod_base = OTHER; note = 2'-O-methylguanosine-3'-phosphate
  modified_base 16: mod_base = OTHER; note = 2'-deoxy-2'-fluoroguanosine-3'-phosphate
  modified_base 17: mod_base = OTHER; note = 2'-O-methyladenosine-3'-phosphate
  modified_base 18: mod_base = OTHER; note = 2'-O-methylcytidine-3'-phosphate
  modified_base 19: mod_base = OTHER; note = 2'-O-methylcytidine-3'-phosphate
  modified_base 20: mod_base = OTHER; note = 2'-O-methyluridine-3'-phosphate
  modified_base 21: mod_base = OTHER; note = 2'-O-methyladenosine-3'-phosphorothioate
  modified_base 22: mod_base = OTHER; note = 2'-O-methylguanosine-3'-phosphorothioate
  modified_base 23: mod_base = OTHER; note = 2'-O-methyluridine
ttatcacaagatttggacctagt

SEQ ID NO: 12441 - RNA, 23 nt, synthetic construct
  source 1..23: mol_type = other RNA
  modified_base 1: mod_base = OTHER; note = 2'-O-methyluridine-3'-phosphorothioate 5'-(E)-Vinylphosphonate
  modified_base 2: mod_base = OTHER; note = 2'-deoxy-2'-fluorouridine-3'-phosphorothioate
  modified_base 3: mod_base = OTHER; note = 2'-O-methyluridine-3'-phosphate
  modified_base 4: mod_base = OTHER; note = 2'-O-methyladenosine-3'-phosphate
  modified_base 5: mod_base = OTHER; note = 2'-O-methyluridine-3'-phosphate
  modified_base 6: mod_base = OTHER; note = 2'-deoxy-2'-fluorocytidine-3'-phosphate
  modified_base 7: mod_base = OTHER; note = 2'-O-methyladenosine-3'-phosphate
  modified_base 8: mod_base = OTHER; note = 2'-O-methylcytidine-3'-phosphate
  modified_base 9: mod_base = OTHER; note = 2'-O-methyladenosine-3'-phosphate
  modified_base 10: mod_base = OTHER; note = 2'-O-methyladenosine-3'-phosphate
  modified_base 11: mod_base = OTHER; note = 2'-O-methylguanosine-3'-phosphate
  modified_base 12: mod_base = OTHER; note = 2'-O-methyladenosine-3'-phosphate
  modified_base 13: mod_base = OTHER; note = 2'-O-methyluridine-3'-phosphate
  modified_base 14: mod_base = OTHER; note = 2'-deoxy-2'-fluorouridine-3'-phosphate
  modified_base 15: mod_base = OTHER; note = 2'-O-methyluridine-3'-phosphate
  modified_base 16: mod_base = OTHER; note = 2'-deoxy-2'-fluoroguanosine-3'-phosphate
  modified_base 17: mod_base = OTHER; note = 2'-O-methylguanosine-3'-phosphate
  modified_base 18: mod_base = OTHER; note = 2'-O-methyladenosine-3'-phosphate
  modified_base 19: mod_base = OTHER; note = 2'-O-methylcytidine-3'-phosphate
  modified_base 20: mod_base = OTHER; note = 2'-O-methylcytidine-3'-phosphate
  modified_base 21: mod_base = OTHER; note = 2'-O-methyluridine-3'-phosphorothioate
  modified_base 22: mod_base = OTHER; note = 2'-O-methyladenosine-3'-phosphorothioate
  modified_base 23: mod_base = OTHER; note = 2'-O-methylguanosine
tttatcacaagatttggacctag

SEQ ID NO: 12442 - RNA, 23 nt, synthetic construct
  source 1..23: mol_type = other RNA
  modified_base 1: mod_base = OTHER; note = 2'-O-methyluridine-3'-phosphorothioate 5'-(E)-Vinylphosphonate
  modified_base 2: mod_base = OTHER; note = 2'-deoxy-2'-fluorocytidine-3'-phosphorothioate
  modified_base 3: mod_base = OTHER; note = 2'-O-methyladenosine-3'-phosphate
  modified_base 4: mod_base = OTHER; note = 2'-O-methyluridine-3'-phosphate
  modified_base 5: mod_base = OTHER; note = 2'-O-methyluridine-3'-phosphate
  modified_base 6: mod_base = OTHER; note = 2'-deoxy-2'-fluoroadenosine-3'-phosphate
  modified_base 7: mod_base = OTHER; note = 2'-O-methyluridine-3'-phosphate
  modified_base 8: mod_base = OTHER; note = 2'-O-methylcytidine-3'-phosphate
  modified_base 9: mod_base = OTHER; note = 2'-O-methyladenosine-3'-phosphate
  modified_base 10: mod_base = OTHER; note = 2'-O-methylcytidine-3'-phosphate
  modified_base 11: mod_base = OTHER; note = 2'-O-methyladenosine-3'-phosphate
  modified_base 12: mod_base = OTHER; note = 2'-O-methyladenosine-3'-phosphate
  modified_base 13: mod_base = OTHER; note = 2'-O-methylguanosine-3'-phosphate
  modified_base 14: mod_base = OTHER; note = 2'-deoxy-2'-fluoroadenosine-3'-phosphate
  modified_base 15: mod_base = OTHER; note = 2'-O-methyluridine-3'-phosphate
  modified_base 16: mod_base = OTHER; note = 2'-deoxy-2'-fluorouridine-3'-phosphate
  modified_base 17: mod_base = OTHER; note = 2'-O-methyluridine-3'-phosphate
  modified_base 18: mod_base = OTHER; note = 2'-O-methylguanosine-3'-phosphate
  modified_base 19: mod_base = OTHER; note = 2'-O-methylguanosine-3'-phosphate
  modified_base 20: mod_base = OTHER; note = 2'-O-methyladenosine-3'-phosphate
  modified_base 21: mod_base = OTHER; note = 2'-O-methylcytidine-3'-phosphorothioate
  modified_base 22: mod_base = OTHER; note = 2'-O-methylcytidine-3'-phosphorothioate
  modified_base 23: mod_base = OTHER; note = 2'-O-methyluridine
tcattatcacaagatttggacct

SEQ ID NO: 12443 - RNA, 23 nt, synthetic construct
  source 1..23: mol_type = other RNA
  modified_base 1: mod_base = OTHER; note = 2'-O-methyluridine-3'-phosphorothioate 5'-(E)-Vinylphosphonate
  modified_base 2: mod_base = OTHER; note = 2'-deoxy-2'-fluorouridine-3'-phosphorothioate
  modified_base 3: mod_base = OTHER; note = 2'-O-methyluridine-3'-phosphate
  modified_base 4: mod_base = OTHER; note = 2'-O-methylcytidine-3'-phosphate
  modified_base 5: mod_base = OTHER; note = 2'-O-methyladenosine-3'-phosphate
  modified_base 6: mod_base = OTHER; note = 2'-deoxy-2'-fluorouridine-3'-phosphate
  modified_base 7: mod_base = OTHER; note = 2'-O-methyluridine-3'-phosphate
  modified_base 8: mod_base = OTHER; note = 2'-O-methyladenosine-3'-phosphate
  modified_base 9: mod_base = OTHER; note = 2'-O-methyluridine-3'-phosphate
  modified_base 10: mod_base = OTHER; note = 2'-O-methylcytidine-3'-phosphate
  modified_base 11: mod_base = OTHER; note = 2'-O-methyladenosine-3'-phosphate
  modified_base 12: mod_base = OTHER; note = 2'-O-methylcytidine-3'-phosphate
  modified_base 13: mod_base = OTHER; note = 2'-O-methyladenosine-3'-phosphate
  modified_base 14: mod_base = OTHER; note = 2'-deoxy-2'-fluoroadenosine-3'-phosphate
  modified_base 15: mod_base = OTHER; note = 2'-O-methylguanosine-3'-phosphate
  modified_base 16: mod_base = OTHER; note = 2'-deoxy-2'-fluoroadenosine-3'-phosphate
  modified_base 17: mod_base = OTHER; note = 2'-O-methyluridine-3'-phosphate
  modified_base 18: mod_base = OTHER; note = 2'-O-methyluridine-3'-phosphate
  modified_base 19: mod_base = OTHER; note = 2'-O-methyluridine-3'-phosphate
  modified_base 20: mod_base = OTHER; note = 2'-O-methylguanosine-3'-phosphate
  modified_base 21: mod_base = OTHER; note = 2'-O-methylguanosine-3'-phosphorothioate
  modified_base 22: mod_base = OTHER; note = 2'-O-methyladenosine-3'-phosphorothioate
  modified_base 23: mod_base = OTHER; note = 2'-O-methylcytidine
tttcattatcacaagatttggac

SEQ ID NO: 12444 - RNA, 23 nt, synthetic construct
  source 1..23: mol_type = other RNA
  modified_base 1: mod_base = OTHER; note = 2'-O-methyluridine-3'-phosphorothioate 5'-(E)-Vinylphosphonate
  modified_base 2: mod_base = OTHER; note = 2'-deoxy-2'-fluorouridine-3'-phosphorothioate
  modified_base 3: mod_base = OTHER; note = 2'-O-methylguanosine-3'-phosphate
  modified_base 4: mod_base = OTHER; note = 2'-O-methyluridine-3'-phosphate
  modified_base 5: mod_base = OTHER; note = 2'-O-methyluridine-3'-phosphate
  modified_base 6: mod_base = OTHER; note = 2'-deoxy-2'-fluorocytidine-3'-phosphate
  modified_base 7: mod_base = OTHER; note = 2'-O-methyladenosine-3'-phosphate
  modified_base 8: mod_base = OTHER; note = 2'-O-methyluridine-3'-phosphate
  modified_base 9: mod_base = OTHER; note = 2'-O-methyluridine-3'-phosphate
  modified_base 10: mod_base = OTHER; note = 2'-O-methyladenosine-3'-phosphate
  modified_base 11: mod_base = OTHER; note = 2'-O-methyluridine-3'-phosphate
  modified_base 12: mod_base = OTHER; note = 2'-O-methylcytidine-3'-phosphate
  modified_base 13: mod_base = OTHER; note = 2'-O-methyladenosine-3'-phosphate
  modified_base 14: mod_base = OTHER; note = 2'-deoxy-2'-fluorocytidine-3'-phosphate
  modified_base 15: mod_base = OTHER; note = 2'-O-methyladenosine-3'-phosphate
  modified_base 16: mod_base = OTHER; note = 2'-deoxy-2'-fluoroadenosine-3'-phosphate
  modified_base 17: mod_base = OTHER; note = 2'-O-methylguanosine-3'-phosphate
  modified_base 18: mod_base = OTHER; note = 2'-O-methyladenosine-3'-phosphate
  modified_base 19: mod_base = OTHER; note = 2'-O-methyluridine-3'-phosphate
  modified_base 20: mod_base = OTHER; note = 2'-O-methyluridine-3'-phosphate
  modified_base 21: mod_base = OTHER; note = 2'-O-methyluridine-3'-phosphorothioate
  modified_base 22: mod_base = OTHER; note = 2'-O-methylguanosine-3'-phosphorothioate
  modified_base 23: mod_base = OTHER; note = 2'-O-methylguanosine
ttgttcattatcacaagatttgg

SEQ ID NO: 12445 - RNA, 23 nt, synthetic construct
  source 1..23: mol_type = other RNA
  modified_base 1: mod_base = OTHER; note = 2'-O-methyluridine-3'-phosphorothioate 5'-(E)-Vinylphosphonate
  modified_base 2: mod_base = OTHER; note = 2'-deoxy-2'-fluoroadenosine-3'-phosphorothioate
  modified_base 3: mod_base = OTHER; note = 2'-O-methyladenosine-3'-phosphate
  modified_base 4: mod_base = OTHER; note = 2'-O-methylguanosine-3'-phosphate
  modified_base 5: mod_base = OTHER; note = 2'-O-methyluridine-3'-phosphate
  modified_base 6: mod_base = OTHER; note = 2'-deoxy-2'-fluoroadenosine-3'-phosphate
  modified_base 7: mod_base = OTHER; note = 2'-O-methylguanosine-3'-phosphate
  modified_base 8: mod_base = OTHER; note = 2'-O-methylguanosine-3'-phosphate
  modified_base 9: mod_base = OTHER; note = 2'-O-methyladenosine-3'-phosphate
  modified_base 10: mod_base = OTHER; note = 2'-O-methyladenosine-3'-phosphate
  modified_base 11: mod_base = OTHER; note = 2'-O-methylguanosine-3'-phosphate
  modified_base 12: mod_base = OTHER; note = 2'-O-methylcytidine-3'-phosphate
  modified_base 13: mod_base = OTHER; note = 2'-O-methyluridine-3'-phosphate
  modified_base 14: mod_base = OTHER; note = 2'-deoxy-2'-fluoroadenosine-3'-phosphate
  modified_base 15: mod_base = OTHER; note = 2'-O-methylguanosine-3'-phosphate
  modified_base 16: mod_base = OTHER; note = 2'-deoxy-2'-fluorocytidine-3'-phosphate
  modified_base 17: mod_base = OTHER; note = 2'-O-methyluridine-3'-phosphate
  modified_base 18: mod_base = OTHER; note = 2'-O-methyladenosine-3'-phosphate
  modified_base 19: mod_base = OTHER; note = 2'-O-methyladenosine-3'-phosphate
  modified_base 20: mod_base = OTHER; note = 2'-O-methylcytidine-3'-phosphate
  modified_base 21: mod_base = OTHER; note = 2'-O-methylcytidine-3'-phosphorothioate
  modified_base 22: mod_base = OTHER; note = 2'-O-methyluridine-3'-phosphorothioate
  modified_base 23: mod_base = OTHER; note = 2'-O-methyluridine
taagtaggaagctagctaacctt

SEQ ID NO: 12446 - RNA, 23 nt, synthetic construct
  source 1..23: mol_type = other RNA
  modified_base 1: mod_base = OTHER; note = 2'-O-methyluridine-3'-phosphorothioate 5'-(E)-Vinylphosphonate
  modified_base 2: mod_base = OTHER; note = 2'-deoxy-2'-fluoroadenosine-3'-phosphorothioate
  modified_base 3: mod_base = OTHER; note = 2'-O-methyladenosine-3'-phosphate
  modified_base 4: mod_base = OTHER; note = 2'-O-methyladenosine-3'-phosphate
  modified_base 5: mod_base = OTHER; note = 2'-O-methylguanosine-3'-phosphate
  modified_base 6: mod_base = OTHER; note = 2'-deoxy-2'-fluorouridine-3'-phosphate
  modified_base 7: mod_base = OTHER; note = 2'-O-methyladenosine-3'-phosphate
  modified_base 8: mod_base = OTHER; note = 2'-O-methylguanosine-3'-phosphate
  modified_base 9: mod_base = OTHER; note = 2'-O-methylguanosine-3'-phosphate
  modified_base 10: mod_base = OTHER; note = 2'-O-methyladenosine-3'-phosphate
  modified_base 11: mod_base = OTHER; note = 2'-O-methyladenosine-3'-phosphate
  modified_base 12: mod_base = OTHER; note = 2'-O-methylguanosine-3'-phosphate
  modified_base 13: mod_base = OTHER; note = 2'-O-methylcytidine-3'-phosphate
  modified_base 14: mod_base = OTHER; note = 2'-deoxy-2'-fluorouridine-3'-phosphate
  modified_base 15: mod_base = OTHER; note = 2'-O-methyladenosine-3'-phosphate
  modified_base 16: mod_base = OTHER; note = 2'-deoxy-2'-fluoroguanosine-3'-phosphate
  modified_base 17: mod_base = OTHER; note = 2'-O-methylcytidine-3'-phosphate
  modified_base 18: mod_base = OTHER; note = 2'-O-methyluridine-3'-phosphate
  modified_base 19: mod_base = OTHER; note = 2'-O-methyladenosine-3'-phosphate
  modified_base 20: mod_base = OTHER; note = 2'-O-methyladenosine-3'-phosphate
  modified_base 21: mod_base = OTHER; note = 2'-O-methylcytidine-3'-phosphorothioate
  modified_base 22: mod_base = OTHER; note = 2'-O-methylcytidine-3'-phosphorothioate
  modified_base 23: mod_base = OTHER; note = 2'-O-methyluridine
taaagtaggaagctagctaacct

SEQ ID NO: 12447 - RNA, 23 nt, synthetic construct
  source 1..23: mol_type = other RNA
  modified_base 1: mod_base = OTHER; note = 2'-O-methyluridine-3'-phosphorothioate 5'-(E)-Vinylphosphonate
  modified_base 2: mod_base = OTHER; note = 2'-deoxy-2'-fluorouridine-3'-phosphorothioate
  modified_base 3: mod_base = OTHER; note = 2'-O-methylcytidine-3'-phosphate
  modified_base 4: mod_base = OTHER; note = 2'-O-methyladenosine-3'-phosphate
  modified_base 5: mod_base = OTHER; note = 2'-O-methyladenosine-3'-phosphate
  modified_base 6: mod_base = OTHER; note = 2'-deoxy-2'-fluoroguanosine-3'-phosphate
  modified_base 7: mod_base = OTHER; note = 2'-O-methylguanosine-3'-phosphate
  modified_base 8: mod_base = OTHER; note = 2'-O-methylguanosine-3'-phosphate
  modified_base 9: mod_base = OTHER; note = 2'-O-methyladenosine-3'-phosphate
  modified_base 10: mod_base = OTHER; note = 2'-O-methyladenosine-3'-phosphate
  modified_base 11: mod_base = OTHER; note = 2'-O-methyladenosine-3'-phosphate
  modified_base 12: mod_base = OTHER; note = 2'-O-methylguanosine-3'-phosphate
  modified_base 13: mod_base = OTHER; note = 2'-O-methyluridine-3'-phosphate
  modified_base 14: mod_base = OTHER; note = 2'-deoxy-2'-fluoroadenosine-3'-phosphate
  modified_base 15: mod_base = OTHER; note = 2'-O-methylguanosine-3'-phosphate
  modified_base 16: mod_base = OTHER; note = 2'-deoxy-2'-fluoroguanosine-3'-phosphate
  modified_base 17: mod_base = OTHER; note = 2'-O-methyladenosine-3'-phosphate
  modified_base 18: mod_base = OTHER; note = 2'-O-methyladenosine-3'-phosphate
  modified_base 19: mod_base = OTHER; note = 2'-O-methylguanosine-3'-phosphate
  modified_base 20: mod_base = OTHER; note = 2'-O-methylcytidine-3'-phosphate
  modified_base 21: mod_base = OTHER; note = 2'-O-methyluridine-3'-phosphorothioate
  modified_base 22: mod_base = OTHER; note = 2'-O-methyladenosine-3'-phosphorothioate
  modified_base 23: mod_base = OTHER; note = 2'-O-methylguanosine
ttcaagggaaagtaggaagctag

SEQ ID NO: 12448 - RNA, 23 nt, synthetic construct
  source 1..23: mol_type = other RNA
  modified_base 1: mod_base = OTHER; note = 2'-O-methyluridine-3'-phosphorothioate 5'-(E)-Vinylphosphonate
  modified_base 2: mod_base = OTHER; note = 2'-deoxy-2'-fluoroadenosine-3'-phosphorothioate
  modified_base 3: mod_base = OTHER; note = 2'-O-methylcytidine-3'-phosphate
  modified_base 4: mod_base = OTHER; note = 2'-O-methyluridine-3'-phosphate
  modified_base 5: mod_base = OTHER; note = 2'-O-methyladenosine-3'-phosphate
  modified_base 6: mod_base = OTHER; note = 2'-deoxy-2'-fluorouridine-3'-phosphate
  modified_base 7: mod_base = OTHER; note = 2'-O-methyluridine-3'-phosphate
  modified_base 8: mod_base = OTHER; note = 2'-O-methylcytidine-3'-phosphate
  modified_base 9: mod_base = OTHER; note = 2'-O-methyladenosine-3'-phosphate
  modified_base 10: mod_base = OTHER; note = 2'-O-methyladenosine-3'-phosphate
  modified_base 11: mod_base = OTHER; note = 2'-O-methylguanosine-3'-phosphate
  modified_base 12: mod_base = OTHER; note = 2'-O-methylguanosine-3'-phosphate
  modified_base 13: mod_base = OTHER; note = 2'-O-methylguanosine-3'-phosphate
  modified_base 14: mod_base = OTHER; note = 2'-deoxy-2'-fluoroadenosine-3'-phosphate
  modified_base 15: mod_base = OTHER; note = 2'-O-methyladenosine-3'-phosphate
  modified_base 16: mod_base = OTHER; note = 2'-deoxy-2'-fluoroadenosine-3'-phosphate
  modified_base 17: mod_base = OTHER; note = 2'-O-methylguanosine-3'-phosphate
  modified_base 18: mod_base = OTHER; note = 2'-O-methyluridine-3'-phosphate
  modified_base 19: mod_base = OTHER; note = 2'-O-methyladenosine-3'-phosphate
  modified_base 20: mod_base = OTHER; note = 2'-O-methylguanosine-3'-phosphate
  modified_base 21: mod_base = OTHER; note = 2'-O-methylguanosine-3'-phosphorothioate
  modified_base 22: mod_base = OTHER; note = 2'-O-methyladenosine-3'-phosphorothioate
  modified_base 23: mod_base = OTHER; note = 2'-O-methyladenosine
tactattcaagggaaagtaggaa

SEQ ID NO: 12449 - RNA, 23 nt, synthetic construct
  source 1..23: mol_type = other RNA
  modified_base 1: mod_base = OTHER; note = 2'-O-methyluridine-3'-phosphorothioate 5'-(E)-Vinylphosphonate
  modified_base 2: mod_base = OTHER; note = 2'-deoxy-2'-fluorocytidine-3'-phosphorothioate
  modified_base 3: mod_base = OTHER; note = 2'-O-methyladenosine-3'-phosphate
  modified_base 4: mod_base = OTHER; note = 2'-O-methylcytidine-3'-phosphate
  modified_base 5: mod_base = OTHER; note = 2'-O-methyluridine-3'-phosphate
  modified_base 6: mod_base = OTHER; note = 2'-deoxy-2'-fluoroadenosine-3'-phosphate
  modified_base 7: mod_base = OTHER; note = 2'-O-methyluridine-3'-phosphate
  modified_base 8: mod_base = OTHER; note = 2'-O-methyluridine-3'-phosphate
  modified_base 9: mod_base = OTHER; note = 2'-O-methylcytidine-3'-phosphate
  modified_base 10: mod_base = OTHER; note = 2'-O-methyladenosine-3'-phosphate
  modified_base 11: mod_base = OTHER; note = 2'-O-methyladenosine-3'-phosphate
  modified_base 12: mod_base = OTHER; note = 2'-O-methylguanosine-3'-phosphate
  modified_base 13: mod_base = OTHER; note = 2'-O-methylguanosine-3'-phosphate
  modified_base 14: mod_base = OTHER; note = 2'-deoxy-2'-fluoroguanosine-3'-phosphate
  modified_base 15: mod_base = OTHER; note = 2'-O-methyladenosine-3'-phosphate
  modified_base 16: mod_base = OTHER; note = 2'-deoxy-2'-fluoroadenosine-3'-phosphate
  modified_base 17: mod_base = OTHER; note = 2'-O-methyladenosine-3'-phosphate
  modified_base 18: mod_base = OTHER; note = 2'-O-methylguanosine-3'-phosphate
  modified_base 19: mod_base = OTHER; note = 2'-O-methyluridine-3'-phosphate
  modified_base 20: mod_base = OTHER; note = 2'-O-methyladenosine-3'-phosphate
  modified_base 21: mod_base = OTHER; note = 2'-O-methylguanosine-3'-phosphorothioate
  modified_base 22: mod_base = OTHER; note = 2'-O-methylguanosine-3'-phosphorothioate
  modified_base 23: mod_base = OTHER; note = 2'-O-methyladenosine
tcactattcaagggaaagtagga

SEQ ID NO: 12450 - RNA, 23 nt, synthetic construct
  source 1..23: mol_type = other RNA
  modified_base 1: mod_base = OTHER; note = 2'-O-methyluridine-3'-phosphorothioate 5'-(E)-Vinylphosphonate
  modified_base 2: mod_base = OTHER; note = 2'-deoxy-2'-fluoroguanosine-3'-phosphorothioate
  modified_base 3: mod_base = OTHER; note = 2'-O-methyladenosine-3'-phosphate
  modified_base 4: mod_base = OTHER; note = 2'-O-methyladenosine-3'-phosphate
  modified_base 5: mod_base = OTHER; note = 2'-O-methyladenosine-3'-phosphate
  modified_base 6: mod_base = OTHER; note = 2'-deoxy-2'-fluoroadenosine-3'-phosphate
  modified_base 7: mod_base = OTHER; note = 2'-O-methylguanosine-3'-phosphate
  modified_base 8: mod_base = OTHER; note = 2'-O-methylcytidine-3'-phosphate
  modified_base 9: mod_base = OTHER; note = 2'-O-methyladenosine-3'-phosphate
  modified_base 10: mod_base = OTHER; note = 2'-O-methylcytidine-3'-phosphate
  modified_base 11: mod_base = OTHER; note = 2'-O-methyluridine-3'-phosphate
  modified_base 12: mod_base = OTHER; note = 2'-O-methyladenosine-3'-phosphate
  modified_base 13: mod_base = OTHER; note = 2'-O-methyluridine-3'-phosphate
  modified_base 14: mod_base = OTHER; note = 2'-deoxy-2'-fluorouridine-3'-phosphate
  modified_base 15: mod_base = OTHER; note = 2'-O-methylcytidine-3'-phosphate
  modified_base 16: mod_base = OTHER; note = 2'-deoxy-2'-fluoroadenosine-3'-phosphate
  modified_base 17: mod_base = OTHER; note = 2'-O-methyladenosine-3'-phosphate
  modified_base 18: mod_base = OTHER; note = 2'-O-methylguanosine-3'-phosphate
  modified_base 19: mod_base = OTHER; note = 2'-O-methylguanosine-3'-phosphate
  modified_base 20: mod_base = OTHER; note = 2'-O-methylguanosine-3'-phosphate
  modified_base 21: mod_base = OTHER; note = 2'-O-methyladenosine-3'-phosphorothioate
  modified_base 22: mod_base = OTHER; note = 2'-O-methyladenosine-3'-phosphorothioate
  modified_base 23: mod_base = OTHER; note = 2'-O-methyladenosine
tgaaaagcactattcaagggaaa

SEQ ID NO: 12451 - RNA, 23 nt, synthetic construct
  source 1..23: mol_type = other RNA
  modified_base 1: mod_base = OTHER; note = 2'-O-methyluridine-3'-phosphorothioate 5'-(E)-Vinylphosphonate
  modified_base 2: mod_base = OTHER; note = 2'-deoxy-2'-fluoroadenosine-3'-phosphorothioate
  modified_base 3: mod_base = OTHER; note = 2'-O-methylguanosine-3'-phosphate
  modified_base 4: mod_base = OTHER; note = 2'-O-methyladenosine-3'-phosphate
  modified_base 5: mod_base = OTHER; note = 2'-O-methyladenosine-3'-phosphate
  modified_base 6: mod_base = OTHER; note = 2'-deoxy-2'-fluoroadenosine-3'-phosphate
  modified_base 7: mod_base = OTHER; note = 2'-O-methyladenosine-3'-phosphate
  modified_base 8: mod_base = OTHER; note = 2'-O-methylguanosine-3'-phosphate
  modified_base 9: mod_base = OTHER; note = 2'-O-methylcytidine-3'-phosphate
  modified_base 10: mod_base = OTHER; note = 2'-O-methyladenosine-3'-phosphate
  modified_base 11: mod_base = OTHER; note = 2'-O-methylcytidine-3'-phosphate
  modified_base 12: mod_base = OTHER; note = 2'-O-methyluridine-3'-phosphate
  modified_base 13: mod_base = OTHER; note = 2'-O-methyladenosine-3'-phosphate
  modified_base 14: mod_base = OTHER; note = 2'-deoxy-2'-fluorouridine-3'-phosphate
  modified_base 15: mod_base = OTHER; note = 2'-O-methyluridine-3'-phosphate
  modified_base 16: mod_base = OTHER; note = 2'-deoxy-2'-fluorocytidine-3'-phosphate
  modified_base 17: mod_base = OTHER; note = 2'-O-methyladenosine-3'-phosphate
  modified_base 18: mod_base = OTHER; note = 2'-O-methyladenosine-3'-phosphate
  modified_base 19: mod_base = OTHER; note = 2'-O-methylguanosine-3'-phosphate
  modified_base 20: mod_base = OTHER; note = 2'-O-methylguanosine-3'-phosphate
  modified_base 21: mod_base = OTHER; note = 2'-O-methylguanosine-3'-phosphorothioate
  modified_base 22: mod_base = OTHER; note = 2'-O-methyladenosine-3'-phosphorothioate
  modified_base 23: mod_base = OTHER; note = 2'-O-methyladenosine
tagaaaagcactattcaagggaa

SEQ ID NO: 12452 - RNA, 23 nt, synthetic construct
  source 1..23: mol_type = other RNA
  modified_base 1: mod_base = OTHER; note = 2'-O-methyluridine-3'-phosphorothioate 5'-(E)-Vinylphosphonate
  modified_base 2: mod_base = OTHER; note = 2'-deoxy-2'-fluoroguanosine-3'-phosphorothioate
  modified_base 3: mod_base = OTHER; note = 2'-O-methyladenosine-3'-phosphate
  modified_base 4: mod_base = OTHER; note = 2'-O-methylguanosine-3'-phosphate
  modified_base 5: mod_base = OTHER; note = 2'-O-methyladenosine-3'-phosphate
  modified_base 6: mod_base = OTHER; note = 2'-deoxy-2'-fluoroadenosine-3'-phosphate
  modified_base 7: mod_base = OTHER; note = 2'-O-methyladenosine-3'-phosphate
  modified_base 8: mod_base = OTHER; note = 2'-O-methyladenosine-3'-phosphate
  modified_base 9: mod_base = OTHER; note = 2'-O-methylguanosine-3'-phosphate
  modified_base 10: mod_base = OTHER; note = 2'-O-methylcytidine-3'-phosphate
  modified_base 11: mod_base = OTHER; note = 2'-O-methyladenosine-3'-phosphate
  modified_base 12: mod_base = OTHER; note = 2'-O-methylcytidine-3'-phosphate
  modified_base 13: mod_base = OTHER; note = 2'-O-methyluridine-3'-phosphate
  modified_base 14: mod_base = OTHER; note = 2'-deoxy-2'-fluoroadenosine-3'-phosphate
  modified_base 15: mod_base = OTHER; note = 2'-O-methyluridine-3'-phosphate
  modified_base 16: mod_base = OTHER; note = 2'-deoxy-2'-fluorouridine-3'-phosphate
  modified_base 17: mod_base = OTHER; note = 2'-O-methylcytidine-3'-phosphate
  modified_base 18: mod_base = OTHER; note = 2'-O-methyladenosine-3'-phosphate
  modified_base 19: mod_base = OTHER; note = 2'-O-methyladenosine-3'-phosphate
  modified_base 20: mod_base = OTHER; note = 2'-O-methylguanosine-3'-phosphate
  modified_base 21: mod_base = OTHER; note = 2'-O-methylguanosine-3'-phosphorothioate
  modified_base 22: mod_base = OTHER; note = 2'-O-methylguanosine-3'-phosphorothioate
  modified_base 23: mod_base = OTHER; note = 2'-O-methyladenosine
tgagaaaagcactattcaaggga

SEQ ID NO: 12453 - RNA, 23 nt, synthetic construct
  source 1..23: mol_type = other RNA
  modified_base 1: mod_base = OTHER; note = 2'-O-methyluridine-3'-phosphorothioate 5'-(E)-Vinylphosphonate
  modified_base 2: mod_base = OTHER; note = 2'-deoxy-2'-fluoroguanosine-3'-phosphorothioate
  modified_base 3: mod_base = OTHER; note = 2'-O-methylguanosine-3'-phosphate
  modified_base 4: mod_base = OTHER; note = 2'-O-methyladenosine-3'-phosphate
  modified_base 5: mod_base = OTHER; note = 2'-O-methylguanosine-3'-phosphate
  modified_base 6: mod_base = OTHER; note = 2'-deoxy-2'-fluoroadenosine-3'-phosphate
  modified_base 7: mod_base = OTHER; note = 2'-O-methyladenosine-3'-phosphate
  modified_base 8: mod_base = OTHER; note = 2'-O-methyladenosine-3'-phosphate
  modified_base 9: mod_base = OTHER; note = 2'-O-methyladenosine-3'-phosphate
  modified_base 10: mod_base = OTHER; note = 2'-O-methylguanosine-3'-phosphate
  modified_base 11: mod_base = OTHER; note = 2'-O-methylcytidine-3'-phosphate
  modified_base 12: mod_base = OTHER; note = 2'-O-methyladenosine-3'-phosphate
  modified_base 13: mod_base = OTHER; note = 2'-O-methylcytidine-3'-phosphate
  modified_base 14: mod_base = OTHER; note = 2'-deoxy-2'-fluorouridine-3'-phosphate
  modified_base 15: mod_base = OTHER; note = 2'-O-methyladenosine-3'-phosphate
  modified_base 16: mod_base = OTHER; note = 2'-deoxy-2'-fluorouridine-3'-phosphate
  modified_base 17: mod_base = OTHER; note = 2'-O-methyluridine-3'-phosphate
  modified_base 18: mod_base = OTHER; note = 2'-O-methylcytidine-3'-phosphate
  modified_base 19: mod_base = OTHER; note = 2'-O-methyladenosine-3'-phosphate
  modified_base 20: mod_base = OTHER; note = 2'-O-methyladenosine-3'-phosphate
  modified_base 21: mod_base = OTHER; note = 2'-O-methylguanosine-3'-phosphorothioate
  modified_base 22: mod_base = OTHER; note = 2'-O-methylguanosine-3'-phosphorothioate
  modified_base 23: mod_base = OTHER; note = 2'-O-methylguanosine
tggagaaaagcactattcaaggg

SEQ ID NO: 12454 - RNA, 23 nt, synthetic construct
  source 1..23: mol_type = other RNA
  modified_base 1: mod_base = OTHER; note = 2'-O-methyluridine-3'-phosphorothioate 5'-(E)-Vinylphosphonate
  modified_base 2: mod_base = OTHER; note = 2'-deoxy-2'-fluoroadenosine-3'-phosphorothioate
  modified_base 3: mod_base = OTHER; note = 2'-O-methylguanosine-3'-phosphate
  modified_base 4: mod_base = OTHER; note = 2'-O-methylguanosine-3'-phosphate
  modified_base 5: mod_base = OTHER; note = 2'-O-methylguanosine-3'-phosphate
  modified_base 6: mod_base = OTHER; note = 2'-deoxy-2'-fluoroadenosine-3'-phosphate
  modified_base 7: mod_base = OTHER; note = 2'-O-methylguanosine-3'-phosphate
  modified_base 8: mod_base = OTHER; note = 2'-O-methyladenosine-3'-phosphate
  modified_base 9: mod_base = OTHER; note = 2'-O-methyladenosine-3'-phosphate
  modified_base 10: mod_base = OTHER; note = 2'-O-methyladenosine-3'-phosphate
  modified_base 11: mod_base = OTHER; note = 2'-O-methyladenosine-3'-phosphate
  modified_base 12: mod_base = OTHER; note = 2'-O-methylguanosine-3'-phosphate
  modified_base 13: mod_base = OTHER; note = 2'-O-methylcytidine-3'-phosphate
  modified_base 14: mod_base = OTHER; note = 2'-deoxy-2'-fluoroadenosine-3'-phosphate
  modified_base 15: mod_base = OTHER; note = 2'-O-methylcytidine-3'-phosphate
  modified_base 16: mod_base = OTHER; note = 2'-deoxy-2'-fluorouridine-3'-phosphate
  modified_base 17: mod_base = OTHER; note = 2'-O-methyladenosine-3'-phosphate
  modified_base 18: mod_base = OTHER; note = 2'-O-methyluridine-3'-phosphate
  modified_base 19: mod_base = OTHER; note = 2'-O-methyluridine-3'-phosphate
  modified_base 20: mod_base = OTHER; note = 2'-O-methylcytidine-3'-phosphate
  modified_base 21: mod_base = OTHER; note = 2'-O-methyladenosine-3'-phosphorothioate
  modified_base 22: mod_base = OTHER; note = 2'-O-methyladenosine-3'-phosphorothioate
  modified_base 23: mod_base = OTHER; note = 2'-O-methylguanosine
tagggagaaaagcactattcaag

SEQ ID NO: 12455 - RNA, 23 nt, synthetic construct
  source 1..23: mol_type = other RNA
  modified_base 1: mod_base = OTHER; note = 2'-O-methyluridine-3'-phosphorothioate 5'-(E)-Vinylphosphonate
  modified_base 2: mod_base = OTHER; note = 2'-deoxy-2'-fluorouridine-3'-phosphorothioate
  modified_base 3: mod_base = OTHER; note = 2'-O-methyladenosine-3'-phosphate
  modified_base 4: mod_base = OTHER; note = 2'-O-methyluridine-3'-phosphate
  modified_base 5: mod_base = OTHER; note = 2'-O-methyluridine-3'-phosphate
  modified_base 6: mod_base = OTHER; note = 2'-deoxy-2'-fluoroadenosine-3'-phosphate
  modified_base 7: mod_base = OTHER; note = 2'-O-methylcytidine-3'-phosphate
  modified_base 8: mod_base = OTHER; note = 2'-O-methyladenosine-3'-phosphate
  modified_base 9: mod_base = OTHER; note = 2'-O-methyluridine-3'-phosphate
  modified_base 10: mod_base = OTHER; note = 2'-O-methyladenosine-3'-phosphate
  modified_base 11: mod_base = OTHER; note = 2'-O-methylguanosine-3'-phosphate
  modified_base 12: mod_base = OTHER; note = 2'-O-methylguanosine-3'-phosphate
  modified_base 13: mod_base = OTHER; note = 2'-O-methylguanosine-3'-phosphate
  modified_base 14: mod_base = OTHER; note = 2'-deoxy-2'-fluoroadenosine-3'-phosphate
  modified_base 15: mod_base = OTHER; note = 2'-O-methylguanosine-3'-phosphate
  modified_base 16: mod_base = OTHER; note = 2'-deoxy-2'-fluoroadenosine-3'-phosphate
  modified_base 17: mod_base = OTHER; note = 2'-O-methyladenosine-3'-phosphate
  modified_base 18: mod_base = OTHER; note = 2'-O-methyladenosine-3'-phosphate
  modified_base 19: mod_base = OTHER; note = 2'-O-methyladenosine-3'-phosphate
  modified_base 20: mod_base = OTHER; note = 2'-O-methylguanosine-3'-phosphate
  modified_base 21: mod_base = OTHER; note = 2'-O-methylcytidine-3'-phosphorothioate
  modified_base 22: mod_base = OTHER; note = 2'-O-methyladenosine-3'-phosphorothioate
  modified_base 23: mod_base = OTHER; note = 2'-O-methylcytidine
ttattacatagggagaaaagcac

SEQ ID NO: 12456 - RNA, 23 nt, synthetic construct
  source 1..23: mol_type = other RNA
  modified_base 1: mod_base = OTHER; note = 2'-O-methyluridine-3'-phosphorothioate 5'-(E)-Vinylphosphonate
  modified_base 2: mod_base = OTHER; note = 2'-deoxy-2'-fluoroadenosine-3'-phosphorothioate
  modified_base 3: mod_base = OTHER; note = 2'-O-methyladenosine-3'-phosphate
  modified_base 4: mod_base = OTHER; note = 2'-O-methyluridine-3'-phosphate
  modified_base 5: mod_base = OTHER; note = 2'-O-methyladenosine-3'-phosphate
  modified_base 6: mod_base = OTHER; note = 2'-deoxy-2'-fluoroadenosine-3'-phosphate
  modified_base 7: mod_base = OTHER; note = 2'-O-methylcytidine-3'-phosphate
  modified_base 8: mod_base = OTHER; note = 2'-O-methyluridine-3'-phosphate
  modified_base 9: mod_base = OTHER; note = 2'-O-methylcytidine-3'-phosphate
  modified_base 10: mod_base = OTHER; note = 2'-O-methyladenosine-3'-phosphate
  modified_base 11: mod_base = OTHER; note = 2'-O-methyladenosine-3'-phosphate
  modified_base 12: mod_base = OTHER; note = 2'-O-methyluridine-3'-phosphate
  modified_base 13: mod_base = OTHER; note = 2'-O-methyladenosine-3'-phosphate
  modified_base 14: mod_base = OTHER; note = 2'-deoxy-2'-fluorouridine-3'-phosphate
  modified_base 15: mod_base = OTHER; note = 2'-O-methylguanosine-3'-phosphate
  modified_base 16: mod_base = OTHER; note = 2'-deoxy-2'-fluorocytidine-3'-phosphate
  modified_base 17: mod_base = OTHER; note = 2'-O-methylcytidine-3'-phosphate
  modified_base 18: mod_base = OTHER; note = 2'-O-methyluridine-3'-phosphate
  modified_base 19: mod_base = OTHER; note = 2'-O-methyluridine-3'-phosphate
  modified_base 20: mod_base = OTHER; note = 2'-O-methylcytidine-3'-phosphate
  modified_base 21: mod_base = OTHER; note = 2'-O-methyluridine-3'-phosphorothioate
  modified_base 22: mod_base = OTHER; note = 2'-O-methyladenosine-3'-phosphorothioate
  modified_base 23: mod_base = OTHER; note = 2'-O-methyladenosine
taataactcaatatgccttctaa

SEQ ID NO: 12457 - RNA, 23 nt, synthetic construct
  source 1..23: mol_type = other RNA
  modified_base 1: mod_base = OTHER; note = 2'-O-methyluridine-3'-phosphorothioate 5'-(E)-Vinylphosphonate
  modified_base 2: mod_base = OTHER; note = 2'-deoxy-2'-fluoroadenosine-3'-phosphorothioate
  modified_base 3: mod_base = OTHER; note = 2'-O-methyladenosine-3'-phosphate
  modified_base 4: mod_base = OTHER; note = 2'-O-methyluridine-3'-phosphate
  modified_base 5: mod_base = OTHER; note = 2'-O-methyladenosine-3'-phosphate
  modified_base 6: mod_base = OTHER; note = 2'-deoxy-2'-fluorouridine-3'-phosphate
  modified_base 7: mod_base = OTHER; note = 2'-O-methylguanosine-3'-phosphate
  modified_base 8: mod_base = OTHER; note = 2'-O-methylcytidine-3'-phosphate
  modified_base 9: mod_base = OTHER; note = 2'-O-methylcytidine-3'-phosphate
  modified_base 10: mod_base = OTHER; note = 2'-O-methyluridine-3'-phosphate
  modified_base 11: mod_base = OTHER; note = 2'-O-methyluridine-3'-phosphate
  modified_base 12: mod_base = OTHER; note = 2'-O-methylcytidine-3'-phosphate
  modified_base 13: mod_base = OTHER; note = 2'-O-methyluridine-3'-phosphate
  modified_base 14: mod_base = OTHER; note = 2'-deoxy-2'-fluoroadenosine-3'-phosphate
  modified_base 15: mod_base = OTHER; note = 2'-O-methyladenosine-3'-phosphate
  modified_base 16: mod_base = OTHER; note = 2'-deoxy-2'-fluoroadenosine-3'-phosphate
  modified_base 17: mod_base = OTHER; note = 2'-O-methylcytidine-3'-phosphate
  modified_base 18: mod_base = OTHER; note = 2'-O-methylcytidine-3'-phosphate
  modified_base 19: mod_base = OTHER; note = 2'-O-methyladenosine-3'-phosphate
  modified_base 20: mod_base = OTHER; note = 2'-O-methylcytidine-3'-phosphate
  modified_base 21: mod_base = OTHER; note = 2'-O-methyladenosine-3'-phosphorothioate
  modified_base 22: mod_base = OTHER; note = 2'-O-methyladenosine-3'-phosphorothioate
  modified_base 23: mod_base = OTHER; note = 2'-O-methyladenosine
taatatgccttctaaaccacaaa

SEQ ID NO: 12458 - RNA, 23 nt, synthetic construct
  source 1..23: mol_type = other RNA
  modified_base 1: mod_base = OTHER; note = 2'-O-methyluridine-3'-phosphorothioate 5'-(E)-Vinylphosphonate
  modified_base 2: mod_base = OTHER; note = 2'-deoxy-2'-fluoroadenosine-3'-phosphorothioate
  modified_base 3: mod_base = OTHER; note = 2'-O-methyladenosine-3'-phosphate
  modified_base 4: mod_base = OTHER; note = 2'-O-methylcytidine-3'-phosphate
  modified_base 5: mod_base = OTHER; note = 2'-O-methyluridine-3'-phosphate
  modified_base 6: mod_base = OTHER; note = 2'-deoxy-2'-fluorocytidine-3'-phosphate
  modified_base 7: mod_base = OTHER; note = 2'-O-methyladenosine-3'-phosphate
  modified_base 8: mod_base = OTHER; note = 2'-O-methyladenosine-3'-phosphate
  modified_base 9: mod_base = OTHER; note = 2'-O-methyluridine-3'-phosphate
  modified_base 10: mod_base = OTHER; note = 2'-O-methyladenosine-3'-phosphate
  modified_base 11: mod_base = OTHER; note = 2'-O-methyluridine-3'-phosphate
  modified_base 12: mod_base = OTHER; note = 2'-O-methylguanosine-3'-phosphate
  modified_base 13: mod_base = OTHER; note = 2'-O-methylcytidine-3'-phosphate
  modified_base 14: mod_base = OTHER; note = 2'-deoxy-2'-fluorocytidine-3'-phosphate
  modified_base 15: mod_base = OTHER; note = 2'-O-methyluridine-3'-phosphate
  modified_base 16: mod_base = OTHER; note = 2'-deoxy-2'-fluorouridine-3'-phosphate
  modified_base 17: mod_base = OTHER; note = 2'-O-methylcytidine-3'-phosphate
  modified_base 18: mod_base = OTHER; note = 2'-O-methyluridine-3'-phosphate
  modified_base 19: mod_base = OTHER; note = 2'-O-methyladenosine-3'-phosphate
  modified_base 20: mod_base = OTHER; note = 2'-O-methyladenosine-3'-phosphate
  modified_base 21: mod_base = OTHER; note = 2'-O-methyladenosine-3'-phosphorothioate
  modified_base 22: mod_base = OTHER; note = 2'-O-methylcytidine-3'-phosphorothioate
  modified_base 23: mod_base = OTHER; note = 2'-O-methylcytidine
taactcaatatgccttctaaacc

SEQ ID NO: 12459 - RNA, 23 nt, synthetic construct
  source 1..23: mol_type = other RNA
  modified_base 1: mod_base = OTHER; note = 2'-O-methyluridine-3'-phosphorothioate 5'-(E)-Vinylphosphonate
  modified_base 2: mod_base = OTHER; note = 2'-deoxy-2'-fluoroadenosine-3'-phosphorothioate
  modified_base 3: mod_base = OTHER; note = 2'-O-methyluridine-3'-phosphate
  modified_base 4: mod_base = OTHER; note = 2'-O-methyladenosine-3'-phosphate
  modified_base 5: mod_base = OTHER; note = 2'-O-methyladenosine-3'-phosphate
  modified_base 6: mod_base = OTHER; note = 2'-deoxy-2'-fluorocytidine-3'-phosphate
  modified_base 7: mod_base = OTHER; note = 2'-O-methyluridine-3'-phosphate
  modified_base 8: mod_base = OTHER; note = 2'-O-methylcytidine-3'-phosphate
  modified_base 9: mod_base = OTHER; note = 2'-O-methyladenosine-3'-phosphate
  modified_base 10: mod_base = OTHER; note = 2'-O-methyladenosine-3'-phosphate
  modified_base 11: mod_base = OTHER; note = 2'-O-methyluridine-3'-phosphate
  modified_base 12: mod_base = OTHER; note = 2'-O-methyladenosine-3'-phosphate
  modified_base 13: mod_base = OTHER; note = 2'-O-methyluridine-3'-phosphate
  modified_base 14: mod_base = OTHER; note = 2'-deoxy-2'-fluoroguanosine-3'-phosphate
  modified_base 15: mod_base = OTHER; note = 2'-O-methylcytidine-3'-phosphate
  modified_base 16: mod_base = OTHER; note = 2'-deoxy-2'-fluorocytidine-3'-phosphate
  modified_base 17: mod_base = OTHER; note = 2'-O-methyluridine-3'-phosphate
  modified_base 18: mod_base = OTHER; note = 2'-O-methyluridine-3'-phosphate
  modified_base 19: mod_base = OTHER; note = 2'-O-methylcytidine-3'-phosphate
  modified_base 20: mod_base = OTHER; note = 2'-O-methyluridine-3'-phosphate
  modified_base 21: mod_base = OTHER; note = 2'-O-methyladenosine-3'-phosphorothioate
  modified_base 22: mod_base = OTHER; note = 2'-O-methyladenosine-3'-phosphorothioate
  modified_base 23: mod_base = OTHER; note = 2'-O-methyladenosine
tataactcaatatgccttctaaa

SEQ ID NO: 12460 - RNA, 23 nt, synthetic construct
  source 1..23: mol_type = other RNA
  modified_base 1: mod_base = OTHER; note = 2'-O-methyluridine-3'-phosphorothioate 5'-(E)-Vinylphosphonate
  modified_base 2: mod_base = OTHER; note = 2'-deoxy-2'-fluorocytidine-3'-phosphorothioate
  modified_base 3: mod_base = OTHER; note = 2'-O-methyluridine-3'-phosphate
  modified_base 4: mod_base = OTHER; note = 2'-O-methylguanosine-3'-phosphate
  modified_base 5: mod_base = OTHER; note = 2'-O-methylcytidine-3'-phosphate
  modified_base 6: mod_base = OTHER; note = 2'-deoxy-2'-fluoroadenosine-3'-phosphate
  modified_base 7: mod_base = OTHER; note = 2'-O-methyladenosine-3'-phosphate
  modified_base 8: mod_base = OTHER; note = 2'-O-methyladenosine-3'-phosphate
  modified_base 9: mod_base = OTHER; note = 2'-O-methyladenosine-3'-phosphate
  modified_base 10: mod_base = OTHER; note = 2'-O-methyluridine-3'-phosphate
  modified_base 11: mod_base = OTHER; note = 2'-O-methyladenosine-3'-phosphate
  modified_base 12: mod_base = OTHER; note = 2'-O-methyladenosine-3'-phosphate
  modified_base 13: mod_base = OTHER; note = 2'-O-methylcytidine-3'-phosphate
  modified_base 14: mod_base = OTHER; note = 2'-deoxy-2'-fluorouridine-3'-phosphate
  modified_base 15: mod_base = OTHER; note = 2'-O-methylcytidine-3'-phosphate
  modified_base 16: mod_base = OTHER; note = 2'-deoxy-2'-fluoroadenosine-3'-phosphate
  modified_base 17: mod_base = OTHER; note = 2'-O-methyladenosine-3'-phosphate
  modified_base 18: mod_base = OTHER; note = 2'-O-methyluridine-3'-phosphate
  modified_base 19: mod_base = OTHER; note = 2'-O-methyladenosine-3'-phosphate
  modified_base 20: mod_base = OTHER; note = 2'-O-methyluridine-3'-phosphate
  modified_base 21: mod_base = OTHER; note = 2'-O-methylguanosine-3'-phosphorothioate
  modified_base 22: mod_base = OTHER; note = 2'-O-methylcytidine-3'-phosphorothioate
  modified_base 23: mod_base = OTHER; note = 2'-O-methylcytidine
tctgcaaaataactcaatatgcc

SEQ ID NO: 12461 - RNA, 23 nt, synthetic construct
  source 1..23: mol_type = other RNA
  modified_base 1: mod_base = OTHER; note = 2'-O-methyluridine-3'-phosphorothioate 5'-(E)-Vinylphosphonate
  modified_base 2: mod_base = OTHER; note = 2'-deoxy-2'-fluorocytidine-3'-phosphorothioate
  modified_base 3: mod_base = OTHER; note = 2'-O-methyladenosine-3'-phosphate
  modified_base 4: mod_base = OTHER; note = 2'-O-methyluridine-3'-phosphate
  modified_base 5: mod_base = OTHER; note = 2'-O-methyluridine-3'-phosphate
  modified_base 6: mod_base = OTHER; note = 2'-deoxy-2'-fluoroadenosine-3'-phosphate
  modified_base 7: mod_base = OTHER; note = 2'-O-methyluridine-3'-phosphate
  modified_base 8: mod_base = OTHER; note = 2'-O-methylguanosine-3'-phosphate
  modified_base 9: mod_base = OTHER; note = 2'-O-methyladenosine-3'-phosphate
  modified_base 10: mod_base = OTHER; note = 2'-O-methyluridine-3'-phosphate
  modified_base 11: mod_base = OTHER; note = 2'-O-methyluridine-3'-phosphate
  modified_base 12: mod_base = OTHER; note = 2'-O-methylcytidine-3'-phosphate
  modified_base 13: mod_base = OTHER; note = 2'-O-methyluridine-3'-phosphate
  modified_base 14: mod_base = OTHER; note = 2'-deoxy-2'-fluoroguanosine-3'-phosphate
  modified_base 15: mod_base = OTHER; note = 2'-O-methylcytidine-3'-phosphate
  modified_base 16: mod_base = OTHER; note = 2'-deoxy-2'-fluoroadenosine-3'-phosphate
  modified_base 17: mod_base = OTHER; note = 2'-O-methyladenosine-3'-phosphate
  modified_base 18: mod_base = OTHER; note = 2'-O-methyladenosine-3'-phosphate
  modified_base 19: mod_base = OTHER; note = 2'-O-methyladenosine-3'-phosphate
  modified_base 20: mod_base = OTHER; note = 2'-O-methyluridine-3'-phosphate
  modified_base 21: mod_base = OTHER; note = 2'-O-methyladenosine-3'-phosphorothioate
  modified_base 22: mod_base = OTHER; note = 2'-O-methyladenosine-3'-phosphorothioate
  modified_base 23: mod_base = OTHER; note = 2'-O-methylcytidine
tcattatgattctgcaaaataac

SEQ ID NO: 12462 - RNA, 23 nt, synthetic construct
  source 1..23: mol_type = other RNA
  modified_base 1: mod_base = OTHER; note = 2'-O-methyluridine-3'-phosphorothioate 5'-(E)-Vinylphosphonate
  modified_base 2: mod_base = OTHER; note = 2'-deoxy-2'-fluorocytidine-3'-phosphorothioate
  modified_base 3: mod_base = OTHER; note = 2'-O-methylcytidine-3'-phosphate
  modified_base 4: mod_base = OTHER; note = 2'-O-methyladenosine-3'-phosphate
  modified_base 5: mod_base = OTHER; note = 2'-O-methyluridine-3'-phosphate
  modified_base 6: mod_base = OTHER; note = 2'-deoxy-2'-fluorouridine-3'-phosphate
  modified_base 7: mod_base = OTHER; note = 2'-O-methyladenosine-3'-phosphate
  modified_base 8: mod_base = OTHER; note = 2'-O-methyluridine-3'-phosphate
  modified_base 9: mod_base = OTHER; note = 2'-O-methylguanosine-3'-phosphate
  modified_base 10: mod_base = OTHER; note = 2'-O-methyladenosine-3'-phosphate
  modified_base 11: mod_base = OTHER; note = 2'-O-methyluridine-3'-phosphate
  modified_base 12: mod_base = OTHER; note = 2'-O-methyluridine-3'-phosphate
  modified_base 13: mod_base = OTHER; note = 2'-O-methylcytidine-3'-phosphate
  modified_base 14: mod_base = OTHER; note = 2'-deoxy-2'-fluorouridine-3'-phosphate
  modified_base 15: mod_base = OTHER; note = 2'-O-methylguanosine-3'-phosphate
  modified_base 16: mod_base = OTHER; note = 2'-deoxy-2'-fluorocytidine-3'-phosphate
  modified_base 17: mod_base = OTHER; note = 2'-O-methyladenosine-3'-phosphate
  modified_base 18: mod_base = OTHER; note = 2'-O-methyladenosine-3'-phosphate
  modified_base 19: mod_base = OTHER; note = 2'-O-methyladenosine-3'-phosphate
  modified_base 20: mod_base = OTHER; note = 2'-O-methyladenosine-3'-phosphate
  modified_base 21: mod_base = OTHER; note = 2'-O-methyluridine-3'-phosphorothioate
  modified_base 22: mod_base = OTHER; note = 2'-O-methyladenosine-3'-phosphorothioate
  modified_base 23: mod_base = OTHER; note = 2'-O-methyladenosine
tccattatgattctgcaaaataa

SEQ ID NO: 12463 - RNA, 23 nt, synthetic construct
  source 1..23: mol_type = other RNA
  modified_base 1: mod_base = OTHER; note = 2'-O-methyluridine-3'-phosphorothioate 5'-(E)-Vinylphosphonate
  modified_base 2: mod_base = OTHER; note = 2'-deoxy-2'-fluorouridine-3'-phosphorothioate
  modified_base 3: mod_base = OTHER; note = 2'-O-methylcytidine-3'-phosphate
  modified_base 4: mod_base = OTHER; note = 2'-O-methylcytidine-3'-phosphate
  modified_base 5: mod_base = OTHER; note = 2'-O-methyladenosine-3'-phosphate
  modified_base 6: mod_base = OTHER; note = 2'-deoxy-2'-fluorouridine-3'-phosphate
  modified_base 7: mod_base = OTHER; note = 2'-O-methyluridine-3'-phosphate
  modified_base 8: mod_base = OTHER; note = 2'-O-methyladenosine-3'-phosphate
  modified_base 9: mod_base = OTHER; note = 2'-O-methyluridine-3'-phosphate
  modified_base 10: mod_base = OTHER; note = 2'-O-methylguanosine-3'-phosphate
  modified_base 11: mod_base = OTHER; note = 2'-O-methyladenosine-3'-phosphate
  modified_base 12: mod_base = OTHER; note = 2'-O-methyluridine-3'-phosphate
  modified_base 13: mod_base = OTHER; note = 2'-O-methyluridine-3'-phosphate
  modified_base 14: mod_base = OTHER; note = 2'-deoxy-2'-fluorocytidine-3'-phosphate
  modified_base 15: mod_base = OTHER; note = 2'-O-methyluridine-3'-phosphate
  modified_base 16: mod_base = OTHER; note = 2'-deoxy-2'-fluoroguanosine-3'-phosphate
  modified_base 17: mod_base = OTHER; note = 2'-O-methylcytidine-3'-phosphate
  modified_base 18: mod_base = OTHER; note = 2'-O-methyladenosine-3'-phosphate
  modified_base 19: mod_base = OTHER; note = 2'-O-methyladenosine-3'-phosphate
  modified_base 20: mod_base = OTHER; note = 2'-O-methyladenosine-3'-phosphate
  modified_base 21: mod_base = OTHER; note = 2'-O-methyladenosine-3'-phosphorothioate
  modified_base 22: mod_base = OTHER; note = 2'-O-methyluridine-3'-phosphorothioate
  modified_base 23: mod_base = OTHER; note = 2'-O-methyladenosine
ttccattatgattctgcaaaata

SEQ ID NO: 12464 - RNA, 23 nt, synthetic construct
  source 1..23: mol_type = other RNA
  modified_base 1: mod_base = OTHER; note = 2'-O-methyluridine-3'-phosphorothioate 5'-(E)-Vinylphosphonate
  modified_base 2: mod_base = OTHER; note = 2'-deoxy-2'-fluoroguanosine-3'-phosphorothioate
  modified_base 3: mod_base = OTHER; note = 2'-O-methyluridine-3'-phosphate
  modified_base 4: mod_base = OTHER; note = 2'-O-methylcytidine-3'-phosphate
  modified_base 5: mod_base = OTHER; note = 2'-O-methylcytidine-3'-phosphate
  modified_base 6: mod_base = OTHER; note = 2'-deoxy-2'-fluoroadenosine-3'-phosphate
  modified_base 7: mod_base = OTHER; note = 2'-O-methyluridine-3'-phosphate
  modified_base 8: mod_base = OTHER; note = 2'-O-methyluridine-3'-phosphate
  modified_base 9: mod_base = OTHER; note = 2'-O-methyladenosine-3'-phosphate
  modified_base 10: mod_base = OTHER; note = 2'-O-methyluridine-3'-phosphate
  modified_base 11: mod_base = OTHER; note = 2'-O-methylguanosine-3'-phosphate
  modified_base 12: mod_base = OTHER; note = 2'-O-methyladenosine-3'-phosphate
  modified_base 13: mod_base = OTHER; note = 2'-O-methyluridine-3'-phosphate
  modified_base 14: mod_base = OTHER; note = 2'-deoxy-2'-fluorouridine-3'-phosphate
  modified_base 15: mod_base = OTHER; note = 2'-O-methylcytidine-3'-phosphate
  modified_base 16: mod_base = OTHER; note = 2'-deoxy-2'-fluorouridine-3'-phosphate
  modified_base 17: mod_base = OTHER; note = 2'-O-methylguanosine-3'-phosphate
  modified_base 18: mod_base = OTHER; note = 2'-O-methylcytidine-3'-phosphate
  modified_base 19: mod_base = OTHER; note = 2'-O-methyladenosine-3'-phosphate
  modified_base 20: mod_base = OTHER; note = 2'-O-methyladenosine-3'-phosphate
  modified_base 21: mod_base = OTHER; note = 2'-O-methyladenosine-3'-phosphorothioate
  modified_base 22: mod_base = OTHER; note = 2'-O-methyladenosine-3'-phosphorothioate
  modified_base 23: mod_base = OTHER; note = 2'-O-methyluridine
tgtccattatgattctgcaaaat

SEQ ID NO: 12465 - RNA, 23 nt, synthetic construct
  source 1..23: mol_type = other RNA
  modified_base 1: mod_base = OTHER; note = 2'-O-methyluridine-3'-phosphorothioate 5'-(E)-Vinylphosphonate
  modified_base 2: mod_base = OTHER; note = 2'-deoxy-2'-fluoroguanosine-3'-phosphorothioate
  modified_base 3: mod_base = OTHER; note = 2'-O-methylguanosine-3'-phosphate
  modified_base 4: mod_base = OTHER; note = 2'-O-methyluridine-3'-phosphate
  modified_base 5: mod_base = OTHER; note = 2'-O-methylcytidine-3'-phosphate
  modified_base 6: mod_base = OTHER; note = 2'-deoxy-2'-fluorocytidine-3'-phosphate
  modified_base 7: mod_base = OTHER; note = 2'-O-methyladenosine-3'-phosphate
  modified_base 8: mod_base = OTHER; note = 2'-O-methyluridine-3'-phosphate
  modified_base 9: mod_base = OTHER; note = 2'-O-methyluridine-3'-phosphate
  modified_base 10: mod_base = OTHER; note = 2'-O-methyladenosine-3'-phosphate
  modified_base 11: mod_base = OTHER; note = 2'-O-methyluridine-3'-phosphate
  modified_base 12: mod_base = OTHER; note = 2'-O-methylguanosine-3'-phosphate
  modified_base 13: mod_base = OTHER; note = 2'-O-methyladenosine-3'-phosphate
  modified_base 14: mod_base = OTHER; note = 2'-deoxy-2'-fluorouridine-3'-phosphate
  modified_base 15: mod_base = OTHER; note = 2'-O-methyluridine-3'-phosphate
  modified_base 16: mod_base = OTHER; note = 2'-deoxy-2'-fluorocytidine-3'-phosphate
  modified_base 17: mod_base = OTHER; note = 2'-O-methyluridine-3'-phosphate
  modified_base 18: mod_base = OTHER; note = 2'-O-methylguanosine-3'-phosphate
  modified_base 19: mod_base = OTHER; note = 2'-O-methylcytidine-3'-phosphate
  modified_base 20: mod_base = OTHER; note = 2'-O-methyladenosine-3'-phosphate
  modified_base 21: mod_base = OTHER; note = 2'-O-methyladenosine-3'-phosphorothioate
  modified_base 22: mod_base = OTHER; note = 2'-O-methyladenosine-3'-phosphorothioate
  modified_base 23: mod_base = OTHER; note = 2'-O-methyladenosine
tggtccattatgattctgcaaaa

SEQ ID NO: 12466 - RNA, 23 nt, synthetic construct
  source 1..23: mol_type = other RNA
  modified_base 1: mod_base = OTHER; note = 2'-O-methyluridine-3'-phosphorothioate 5'-(E)-Vinylphosphonate
  modified_base 2: mod_base = OTHER; note = 2'-deoxy-2'-fluoroguanosine-3'-phosphorothioate
  modified_base 3: mod_base = OTHER; note = 2'-O-methylguanosine-3'-phosphate
  modified_base 4: mod_base = OTHER; note = 2'-O-methylguanosine-3'-phosphate
  modified_base 5: mod_base = OTHER; note = 2'-O-methyluridine-3'-phosphate
  modified_base 6: mod_base = OTHER; note = 2'-deoxy-2'-fluorocytidine-3'-phosphate
  modified_base 7: mod_base = OTHER; note = 2'-O-methylcytidine-3'-phosphate
  modified_base 8: mod_base = OTHER; note = 2'-O-methyladenosine-3'-phosphate
  modified_base 9: mod_base = OTHER; note = 2'-O-methyluridine-3'-phosphate
  modified_base 10: mod_base = OTHER; note = 2'-O-methyluridine-3'-phosphate
  modified_base 11: mod_base = OTHER; note = 2'-O-methyladenosine-3'-phosphate
  modified_base 12: mod_base = OTHER; note = 2'-O-methyluridine-3'-phosphate
  modified_base 13: mod_base = OTHER; note = 2'-O-methylguanosine-3'-phosphate
  modified_base 14: mod_base = OTHER; note = 2'-deoxy-2'-fluoroadenosine-3'-phosphate
  modified_base 15: mod_base = OTHER; note = 2'-O-methyluridine-3'-phosphate
  modified_base 16: mod_base = OTHER; note = 2'-deoxy-2'-fluorouridine-3'-phosphate
  modified_base 17: mod_base = OTHER; note = 2'-O-methylcytidine-3'-phosphate
  modified_base 18: mod_base = OTHER; note = 2'-O-methyluridine-3'-phosphate
  modified_base 19: mod_base = OTHER; note = 2'-O-methylguanosine-3'-phosphate
  modified_base 20: mod_base = OTHER; note = 2'-O-methylcytidine-3'-phosphate
  modified_base 21: mod_base = OTHER; note = 2'-O-methyladenosine-3'-phosphorothioate
  modified_base 22: mod_base = OTHER; note = 2'-O-methyladenosine-3'-phosphorothioate
  modified_base 23: mod_base = OTHER; note = 2'-O-methyladenosine
tgggtccattatgattctgcaaa

SEQ ID NO: 12467 - RNA, 23 nt, synthetic construct
  source 1..23: mol_type = other RNA
  modified_base 1: mod_base = OTHER; note = 2'-O-methyluridine-3'-phosphorothioate 5'-(E)-Vinylphosphonate
  modified_base 2: mod_base = OTHER; note = 2'-deoxy-2'-fluorocytidine-3'-phosphorothioate
  modified_base 3: mod_base = OTHER; note = 2'-O-methylguanosine-3'-phosphate
  modified_base 4: mod_base = OTHER; note = 2'-O-methylguanosine-3'-phosphate
  modified_base 5: mod_base = OTHER; note = 2'-O-methylguanosine-3'-phosphate
  modified_base 6: mod_base = OTHER; note = 2'-deoxy-2'-fluorouridine-3'-phosphate
  modified_base 7: mod_base = OTHER; note = 2'-O-methylcytidine-3'-phosphate
  modified_base 8: mod_base = OTHER; note = 2'-O-methylcytidine-3'-phosphate
  modified_base 9: mod_base = OTHER; note = 2'-O-methyladenosine-3'-phosphate
  modified_base 10: mod_base = OTHER; note = 2'-O-methyluridine-3'-phosphate
  modified_base 11: mod_base = OTHER; note = 2'-O-methyluridine-3'-phosphate
  modified_base 12: mod_base = OTHER; note = 2'-O-methyladenosine-3'-phosphate
  modified_base 13: mod_base = OTHER; note = 2'-O-methyluridine-3'-phosphate
  modified_base 14: mod_base = OTHER; note = 2'-deoxy-2'-fluoroguanosine-3'-phosphate
  modified_base 15: mod_base = OTHER; note = 2'-O-methyladenosine-3'-phosphate
  modified_base 16: mod_base = OTHER; note = 2'-deoxy-2'-fluorouridine-3'-phosphate
  modified_base 17: mod_base = OTHER; note = 2'-O-methyluridine-3'-phosphate
  modified_base 18: mod_base = OTHER; note = 2'-O-methylcytidine-3'-phosphate
  modified_base 19: mod_base = OTHER; note = 2'-O-methyluridine-3'-phosphate
  modified_base 20: mod_base = OTHER; note = 2'-O-methylguanosine-3'-phosphate
  modified_base 21: mod_base = OTHER; note = 2'-O-methylcytidine-3'-phosphorothioate
  modified_base 22: mod_base = OTHER; note = 2'-O-methyladenosine-3'-phosphorothioate
  modified_base 23: mod_base = OTHER; note = 2'-O-methyladenosine
tcgggtccattatgattctgcaa

SEQ ID NO: 12468 - RNA, 23 nt, synthetic construct
  source 1..23: mol_type = other RNA
  modified_base 1: mod_base = OTHER; note = 2'-O-methyluridine-3'-phosphorothioate 5'-(E)-Vinylphosphonate
  modified_base 2: mod_base = OTHER; note = 2'-deoxy-2'-fluoroguanosine-3'-phosphorothioate
  modified_base 3: mod_base = OTHER; note = 2'-O-methylcytidine-3'-phosphate
  modified_base 4: mod_base = OTHER; note = 2'-O-methylguanosine-3'-phosphate
  modified_base 5: mod_base = OTHER; note = 2'-O-methylguanosine-3'-phosphate
  modified_base 6: mod_base = OTHER; note = 2'-deoxy-2'-fluoroguanosine-3'-phosphate
  modified_base 7: mod_base = OTHER; note = 2'-O-methyluridine-3'-phosphate
  modified_base 8: mod_base = OTHER; note = 2'-O-methylcytidine-3'-phosphate
  modified_base 9: mod_base = OTHER; note = 2'-O-methylcytidine-3'-phosphate
  modified_base 10: mod_base = OTHER; note = 2'-O-methyladenosine-3'-phosphate
  modified_base 11: mod_base = OTHER; note = 2'-O-methyluridine-3'-phosphate
  modified_base 12: mod_base = OTHER; note = 2'-O-methyluridine-3'-phosphate
  modified_base 13: mod_base = OTHER; note = 2'-O-methyladenosine-3'-phosphate
  modified_base 14: mod_base = OTHER; note = 2'-deoxy-2'-fluorouridine-3'-phosphate
  modified_base 15: mod_base = OTHER; note = 2'-O-methylguanosine-3'-phosphate
  modified_base 16: mod_base = OTHER; note = 2'-deoxy-2'-fluoroadenosine-3'-phosphate
  modified_base 17: mod_base = OTHER; note = 2'-O-methyluridine-3'-phosphate
  modified_base 18: mod_base = OTHER; note = 2'-O-methyluridine-3'-phosphate
  modified_base 19: mod_base = OTHER; note = 2'-O-methylcytidine-3'-phosphate
  modified_base 20: mod_base = OTHER; note = 2'-O-methyluridine-3'-phosphate
  modified_base 21: mod_base = OTHER; note = 2'-O-methylguanosine-3'-phosphorothioate
  modified_base 22: mod_base = OTHER; note = 2'-O-methylcytidine-3'-phosphorothioate
  modified_base 23: mod_base = OTHER; note = 2'-O-methyladenosine
tgcgggtccattatgattctgca

SEQ ID NO: 12469 - RNA, 23 nt, synthetic construct
  source 1..23: mol_type = other RNA
  modified_base 1: mod_base = OTHER; note = 2'-O-methyluridine-3'-phosphorothioate 5'-(E)-Vinylphosphonate
  modified_base 2: mod_base = OTHER; note = 2'-deoxy-2'-fluorouridine-3'-phosphorothioate
  modified_base 3: mod_base = OTHER; note = 2'-O-methylguanosine-3'-phosphate
  modified_base 4: mod_base = OTHER; note = 2'-O-methylcytidine-3'-phosphate
  modified_base 5: mod_base = OTHER; note = 2'-O-methylguanosine-3'-phosphate
  modified_base 6: mod_base = OTHER; note = 2'-deoxy-2'-fluoroguanosine-3'-phosphate
  modified_base 7: mod_base = OTHER; note = 2'-O-methylguanosine-3'-phosphate
  modified_base 8: mod_base = OTHER; note = 2'-O-methyluridine-3'-phosphate
  modified_base 9: mod_base = OTHER; note = 2'-O-methylcytidine-3'-phosphate
  modified_base 10: mod_base = OTHER; note = 2'-O-methylcytidine-3'-phosphate
  modified_base 11: mod_base = OTHER; note = 2'-O-methyladenosine-3'-phosphate
  modified_base 12: mod_base = OTHER; note = 2'-O-methyluridine-3'-phosphate
  modified_base 13: mod_base = OTHER; note = 2'-O-methyluridine-3'-phosphate
  modified_base 14: mod_base = OTHER; note = 2'-deoxy-2'-fluoroadenosine-3'-phosphate
  modified_base 15: mod_base = OTHER; note = 2'-O-methyluridine-3'-phosphate
  modified_base 16: mod_base = OTHER; note = 2'-deoxy-2'-fluoroguanosine-3'-phosphate
  modified_base 17: mod_base = OTHER; note = 2'-O-methyladenosine-3'-phosphate
  modified_base 18: mod_base = OTHER; note = 2'-O-methyluridine-3'-phosphate
  modified_base 19: mod_base = OTHER; note = 2'-O-methyluridine-3'-phosphate
  modified_base 20: mod_base = OTHER; note = 2'-O-methylcytidine-3'-phosphate
  modified_base 21: mod_base = OTHER; note = 2'-O-methyluridine-3'-phosphorothioate
  modified_base 22: mod_base = OTHER; note = 2'-O-methylguanosine-3'-phosphorothioate
  modified_base 23: mod_base = OTHER; note = 2'-O-methylcytidine
ttgcgggtccattatgattctgc

SEQ ID NO: 12470 - RNA, 23 nt, synthetic construct
  source 1..23: mol_type = other RNA
  modified_base 1: mod_base = OTHER; note = 2'-O-methyluridine-3'-phosphorothioate 5'-(E)-Vinylphosphonate
  modified_base 2: mod_base = OTHER; note = 2'-deoxy-2'-fluoroguanosine-3'-phosphorothioate
  modified_base 3: mod_base = OTHER; note = 2'-O-methyluridine-3'-phosphate
  modified_base 4: mod_base = OTHER; note = 2'-O-methylguanosine-3'-phosphate
  modified_base 5: mod_base = OTHER; note = 2'-O-methylcytidine-3'-phosphate
  modified_base 6: mod_base = OTHER; note = 2'-deoxy-2'-fluoroguanosine-3'-phosphate
  modified_base 7: mod_base = OTHER; note = 2'-O-methylguanosine-3'-phosphate
  modified_base 8: mod_base = OTHER; note = 2'-O-methylguanosine-3'-phosphate
  modified_base 9: mod_base = OTHER; note = 2'-O-methyluridine-3'-phosphate
  modified_base 10: mod_base = OTHER; note = 2'-O-methylcytidine-3'-phosphate
  modified_base 11: mod_base = OTHER; note = 2'-O-methylcytidine-3'-phosphate
  modified_base 12: mod_base = OTHER; note = 2'-O-methyladenosine-3'-phosphate
  modified_base 13: mod_base = OTHER; note = 2'-O-methyluridine-3'-phosphate
  modified_base 14: mod_base = OTHER; note = 2'-deoxy-2'-fluorouridine-3'-phosphate
  modified_base 15: mod_base = OTHER; note = 2'-O-methyladenosine-3'-phosphate
  modified_base 16: mod_base = OTHER; note = 2'-deoxy-2'-fluorouridine-3'-phosphate
  modified_base 17: mod_base = OTHER; note = 2'-O-methylguanosine-3'-phosphate
  modified_base 18: mod_base = OTHER; note = 2'-O-methyladenosine-3'-phosphate
  modified_base 19: mod_base = OTHER; note = 2'-O-methyluridine-3'-phosphate
  modified_base 20: mod_base = OTHER; note = 2'-O-methyluridine-3'-phosphate
  modified_base 21: mod_base = OTHER; note = 2'-O-methylcytidine-3'-phosphorothioate
  modified_base 22: mod_base = OTHER; note = 2'-O-methyluridine-3'-phosphorothioate
  modified_base 23: mod_base = OTHER; note = 2'-O-methylguanosine
tgtgcgggtccattatgattctg

SEQ ID NO: 12471 - RNA, 23 nt, synthetic construct
  source 1..23: mol_type = other RNA
  modified_base 1: mod_base = OTHER; note = 2'-O-methyluridine-3'-phosphorothioate 5'-(E)-Vinylphosphonate
  modified_base 2: mod_base = OTHER; note = 2'-deoxy-2'-fluorouridine-3'-phosphorothioate
  modified_base 3: mod_base = OTHER; note = 2'-O-methylguanosine-3'-phosphate
  modified_base 4: mod_base = OTHER; note = 2'-O-methyluridine-3'-phosphate
  modified_base 5: mod_base = OTHER; note = 2'-O-methylguanosine-3'-phosphate
  modified_base 6: mod_base = OTHER; note = 2'-deoxy-2'-fluorocytidine-3'-phosphate
  modified_base 7: mod_base = OTHER; note = 2'-O-methylguanosine-3'-phosphate
  modified_base 8: mod_base = OTHER; note = 2'-O-methylguanosine-3'-phosphate
  modified_base 9: mod_base = OTHER; note = 2'-O-methylguanosine-3'-phosphate
  modified_base 10: mod_base = OTHER; note = 2'-O-methyluridine-3'-phosphate
  modified_base 11: mod_base = OTHER; note = 2'-O-methylcytidine-3'-phosphate
  modified_base 12: mod_base = OTHER; note = 2'-O-methylcytidine-3'-phosphate
  modified_base 13: mod_base = OTHER; note = 2'-O-methyladenosine-3'-phosphate
  modified_base 14: mod_base = OTHER; note = 2'-deoxy-2'-fluorouridine-3'-phosphate
  modified_base 15: mod_base = OTHER; note = 2'-O-methyluridine-3'-phosphate
  modified_base 16: mod_base = OTHER; note = 2'-deoxy-2'-fluoroadenosine-3'-phosphate
  modified_base 17: mod_base = OTHER; note = 2'-O-methyluridine-3'-phosphate
  modified_base 18: mod_base = OTHER; note = 2'-O-methylguanosine-3'-phosphate
  modified_base 19: mod_base = OTHER; note = 2'-O-methyladenosine-3'-phosphate
  modified_base 20: mod_base = OTHER; note = 2'-O-methyluridine-3'-phosphate
  modified_base 21: mod_base = OTHER; note = 2'-O-methyluridine-3'-phosphorothioate
  modified_base 22: mod_base = OTHER; note = 2'-O-methylcytidine-3'-phosphorothioate
  modified_base 23: mod_base = OTHER; note = 2'-O-methyluridine
ttgtgcgggtccattatgattct

SEQ ID NO: 12472 - RNA, 23 nt, synthetic construct
  source 1..23: mol_type = other RNA
  modified_base 1: mod_base = OTHER; note = 2'-O-methyluridine-3'-phosphorothioate 5'-(E)-Vinylphosphonate
  modified_base 2: mod_base = OTHER; note = 2'-deoxy-2'-fluorouridine-3'-phosphorothioate
  modified_base 3: mod_base = OTHER; note = 2'-O-methyluridine-3'-phosphate
  modified_base 4: mod_base = OTHER; note = 2'-O-methylguanosine-3'-phosphate
  modified_base 5: mod_base = OTHER; note = 2'-O-methyluridine-3'-phosphate
  modified_base 6: mod_base = OTHER; note = 2'-deoxy-2'-fluoroguanosine-3'-phosphate
  modified_base 7: mod_base = OTHER; note = 2'-O-methylcytidine-3'-phosphate
  modified_base 8: mod_base = OTHER; note = 2'-O-methylguanosine-3'-phosphate
  modified_base 9: mod_base = OTHER; note = 2'-O-methylguanosine-3'-phosphate
  modified_base 10: mod_base = OTHER; note = 2'-O-methylguanosine-3'-phosphate
  modified_base 11: mod_base = OTHER; note = 2'-O-methyluridine-3'-phosphate
  modified_base 12: mod_base = OTHER; note = 2'-O-methylcytidine-3'-phosphate
  modified_base 13: mod_base = OTHER; note = 2'-O-methylcytidine-3'-phosphate
  modified_base 14: mod_base = OTHER; note = 2'-deoxy-2'-fluoroadenosine-3'-phosphate
  modified_base 15: mod_base = OTHER; note = 2'-O-methyluridine-3'-phosphate
  modified_base 16: mod_base = OTHER; note = 2'-deoxy-2'-fluorouridine-3'-phosphate
  modified_base 17: mod_base = OTHER; note = 2'-O-methyladenosine-3'-phosphate
  modified_base 18: mod_base = OTHER; note = 2'-O-methyluridine-3'-phosphate
  modified_base 19: mod_base = OTHER; note = 2'-O-methylguanosine-3'-phosphate
  modified_base 20: mod_base = OTHER; note = 2'-O-methyladenosine-3'-phosphate
  modified_base 21: mod_base = OTHER; note = 2'-O-methyluridine-3'-phosphorothioate
  modified_base 22: mod_base = OTHER; note = 2'-O-methyluridine-3'-phosphorothioate
  modified_base 23: mod_base = OTHER; note = 2'-O-methylcytidine
tttgtgcgggtccattatgattc

SEQ ID NO: 12473 - RNA, 23 nt, synthetic construct
  source 1..23: mol_type = other RNA
  modified_base 1: mod_base = OTHER; note = 2'-O-methyluridine-3'-phosphorothioate 5'-(E)-Vinylphosphonate
  modified_base 2: mod_base = OTHER; note = 2'-deoxy-2'-fluorouridine-3'-phosphorothioate
  modified_base 3: mod_base = OTHER; note = 2'-O-methyluridine-3'-phosphate
  modified_base 4: mod_base = OTHER; note = 2'-O-methyluridine-3'-phosphate
  modified_base 5: mod_base = OTHER; note = 2'-O-methylguanosine-3'-phosphate
  modified_base 6: mod_base = OTHER; note = 2'-deoxy-2'-fluorouridine-3'-phosphate
  modified_base 7: mod_base = OTHER; note = 2'-O-methylguanosine-3'-phosphate
  modified_base 8: mod_base = OTHER; note = 2'-O-methylcytidine-3'-phosphate
  modified_base 9: mod_base = OTHER; note = 2'-O-methylguanosine-3'-phosphate
  modified_base 10: mod_base = OTHER; note = 2'-O-methylguanosine-3'-phosphate
  modified_base 11: mod_base = OTHER; note = 2'-O-methylguanosine-3'-phosphate
  modified_base 12: mod_base = OTHER; note = 2'-O-methyluridine-3'-phosphate
  modified_base 13: mod_base = OTHER; note = 2'-O-methylcytidine-3'-phosphate
  modified_base 14: mod_base = OTHER; note = 2'-deoxy-2'-fluorocytidine-3'-phosphate
  modified_base 15: mod_base = OTHER; note = 2'-O-methyladenosine-3'-phosphate
  modified_base 16: mod_base = OTHER; note = 2'-deoxy-2'-fluorouridine-3'-phosphate
  modified_base 17: mod_base = OTHER; note = 2'-O-methyluridine-3'-phosphate
  modified_base 18: mod_base = OTHER; note = 2'-O-methyladenosine-3'-phosphate
  modified_base 19: mod_base = OTHER; note = 2'-O-methyluridine-3'-phosphate
  modified_base 20: mod_base = OTHER; note = 2'-O-methylguanosine-3'-phosphate
  modified_base 21: mod_base = OTHER; note = 2'-O-methyladenosine-3'-phosphorothioate
  modified_base 22: mod_base = OTHER; note = 2'-O-methyluridine-3'-phosphorothioate
  modified_base 23: mod_base = OTHER; note = 2'-O-methyluridine
ttttgtgcgggtccattatgatt

SEQ ID NO: 12474 - RNA, 23 nt, synthetic construct
  source 1..23: mol_type = other RNA
  modified_base 1: mod_base = OTHER; note = 2'-O-methyluridine-3'-phosphorothioate 5'-(E)-Vinylphosphonate
  modified_base 2: mod_base = OTHER; note = 2'-deoxy-2'-fluorouridine-3'-phosphorothioate
  modified_base 3: mod_base = OTHER; note = 2'-O-methyluridine-3'-phosphate
  modified_base 4: mod_base = OTHER; note = 2'-O-methyluridine-3'-phosphate
  modified_base 5: mod_base = OTHER; note = 2'-O-methyluridine-3'-phosphate
  modified_base 6: mod_base = OTHER; note = 2'-deoxy-2'-fluoroguanosine-3'-phosphate
  modified_base 7: mod_base = OTHER; note = 2'-O-methyluridine-3'-phosphate
  modified_base 8: mod_base = OTHER; note = 2'-O-methylguanosine-3'-phosphate
  modified_base 9: mod_base = OTHER; note = 2'-O-methylcytidine-3'-phosphate
  modified_base 10: mod_base = OTHER; note = 2'-O-methylguanosine-3'-phosphate
  modified_base 11: mod_base = OTHER; note = 2'-O-methylguanosine-3'-phosphate
  modified_base 12: mod_base = OTHER; note = 2'-O-methylguanosine-3'-phosphate
  modified_base 13: mod_base = OTHER; note = 2'-O-methyluridine-3'-phosphate
  modified_base 14: mod_base = OTHER; note = 2'-deoxy-2'-fluorocytidine-3'-phosphate
  modified_base 15: mod_base = OTHER; note = 2'-O-methylcytidine-3'-phosphate
  modified_base 16: mod_base = OTHER; note = 2'-deoxy-2'-fluoroadenosine-3'-phosphate
  modified_base 17: mod_base = OTHER; note = 2'-O-methyluridine-3'-phosphate
  modified_base 18: mod_base = OTHER; note = 2'-O-methyluridine-3'-phosphate
  modified_base 19: mod_base = OTHER; note = 2'-O-methyladenosine-3'-phosphate
  modified_base 20: mod_base = OTHER; note = 2'-O-methyluridine-3'-phosphate
  modified_base 21: mod_base = OTHER; note = 2'-O-methylguanosine-3'-phosphorothioate
  modified_base 22: mod_base = OTHER; note = 2'-O-methyladenosine-3'-phosphorothioate
  modified_base 23: mod_base = OTHER; note = 2'-O-methyluridine
tttttgtgcgggtccattatgat

SEQ ID NO: 12475 - RNA, 23 nt, synthetic construct
  source 1..23: mol_type = other RNA
  modified_base 1: mod_base = OTHER; note = 2'-O-methyluridine-3'-phosphorothioate 5'-(E)-Vinylphosphonate
  modified_base 2: mod_base = OTHER; note = 2'-deoxy-2'-fluoroadenosine-3'-phosphorothioate
  modified_base 3: mod_base = OTHER; note = 2'-O-methyluridine-3'-phosphate
  modified_base 4: mod_base = OTHER; note = 2'-O-methyluridine-3'-phosphate
  modified_base 5: mod_base = OTHER; note = 2'-O-methyluridine-3'-phosphate
  modified_base 6: mod_base = OTHER; note = 2'-deoxy-2'-fluorouridine-3'-phosphate
  modified_base 7: mod_base = OTHER; note = 2'-O-methylguanosine-3'-phosphate
  modified_base 8: mod_base = OTHER; note = 2'-O-methyluridine-3'-phosphate
  modified_base 9: mod_base = OTHER; note = 2'-O-methylguanosine-3'-phosphate
  modified_base 10: mod_base = OTHER; note = 2'-O-methylcytidine-3'-phosphate
  modified_base 11: mod_base = OTHER; note = 2'-O-methylguanosine-3'-phosphate
  modified_base 12: mod_base = OTHER; note = 2'-O-methylguanosine-3'-phosphate
  modified_base 13: mod_base = OTHER; note = 2'-O-methylguanosine-3'-phosphate
  modified_base 14: mod_base = OTHER; note = 2'-deoxy-2'-fluorouridine-3'-phosphate
  modified_base 15: mod_base = OTHER; note = 2'-O-methylcytidine-3'-phosphate
  modified_base 16: mod_base = OTHER; note = 2'-deoxy-2'-fluorocytidine-3'-phosphate
  modified_base 17: mod_base = OTHER; note = 2'-O-methyladenosine-3'-phosphate
  modified_base 18: mod_base = OTHER; note = 2'-O-methyluridine-3'-phosphate
  modified_base 19: mod_base = OTHER; note = 2'-O-methyluridine-3'-phosphate
  modified_base 20: mod_base = OTHER; note = 2'-O-methyladenosine-3'-phosphate
  modified_base 21: mod_base = OTHER; note = 2'-O-methyluridine-3'-phosphorothioate
  modified_base 22: mod_base = OTHER; note = 2'-O-methylguanosine-3'-phosphorothioate
  modified_base 23: mod_base = OTHER; note = 2'-O-methyladenosine
tattttgtgcgggtccattatga

SEQ ID NO: 12476 - RNA, 23 nt, synthetic construct
  source 1..23: mol_type = other RNA
  modified_base 1: mod_base = OTHER; note = 2'-O-methyluridine-3'-phosphorothioate 5'-(E)-Vinylphosphonate
  modified_base 2: mod_base = OTHER; note = 2'-deoxy-2'-fluoroadenosine-3'-phosphorothioate
  modified_base 3: mod_base = OTHER; note = 2'-O-methyladenosine-3'-phosphate
  modified_base 4: mod_base = OTHER; note = 2'-O-methylcytidine-3'-phosphate
  modified_base 5: mod_base = OTHER; note = 2'-O-methyladenosine-3'-phosphate
  modified_base 6: mod_base = OTHER; note = 2'-deoxy-2'-fluoroguanosine-3'-phosphate
  modified_base 7: mod_base = OTHER; note = 2'-O-methyladenosine-3'-phosphate
  modified_base 8: mod_base = OTHER; note = 2'-O-methyluridine-3'-phosphate
  modified_base 9: mod_base = OTHER; note = 2'-O-methyladenosine-3'-phosphate
  modified_base 10: mod_base = OTHER; note = 2'-O-methyluridine-3'-phosphate
  modified_base 11: mod_base = OTHER; note = 2'-O-methylguanosine-3'-phosphate
  modified_base 12: mod_base = OTHER; note = 2'-O-methylguanosine-3'-phosphate
  modified_base 13: mod_base = OTHER; note = 2'-O-methyluridine-3'-phosphate
  modified_base 14: mod_base = OTHER; note = 2'-deoxy-2'-fluorouridine-3'-phosphate
  modified_base 15: mod_base = OTHER; note = 2'-O-methylcytidine-3'-phosphate
  modified_base 16: mod_base = OTHER; note = 2'-deoxy-2'-fluorouridine-3'-phosphate
  modified_base 17: mod_base = OTHER; note = 2'-O-methylguanosine-3'-phosphate
  modified_base 18: mod_base = OTHER; note = 2'-O-methyladenosine-3'-phosphate
  modified_base 19: mod_base = OTHER; note = 2'-O-methylguanosine-3'-phosphate
  modified_base 20: mod_base = OTHER; note = 2'-O-methyladenosine-3'-phosphate
  modified_base 21: mod_base = OTHER; note = 2'-O-methyluridine-3'-phosphorothioate
  modified_base 22: mod_base = OTHER; note = 2'-O-methyluridine-3'-phosphorothioate
  modified_base 23: mod_base = OTHER; note = 2'-O-methyluridine
taacagatatggttctgagattt

SEQ ID NO: 12477 - RNA, 23 nt, synthetic construct
  source 1..23: mol_type = other RNA
  modified_base 1: mod_base = OTHER; note = 2'-O-methyluridine-3'-phosphorothioate 5'-(E)-Vinylphosphonate
  modified_base 2: mod_base = OTHER; note = 2'-deoxy-2'-fluorouridine-3'-phosphorothioate
  modified_base 3: mod_base = OTHER; note = 2'-O-methyluridine-3'-phosphate
  modified_base 4: mod_base = OTHER; note = 2'-O-methylcytidine-3'-phosphate
  modified_base 5: mod_base = OTHER; note = 2'-O-methyluridine-3'-phosphate
  modified_base 6: mod_base = OTHER; note = 2'-deoxy-2'-fluoroadenosine-3'-phosphate
  modified_base 7: mod_base = OTHER; note = 2'-O-methyluridine-3'-phosphate
  modified_base 8: mod_base = OTHER; note = 2'-O-methylguanosine-3'-phosphate
  modified_base 9: mod_base = OTHER; note = 2'-O-methyladenosine-3'-phosphate
  modified_base 10: mod_base = OTHER; note = 2'-O-methylguanosine-3'-phosphate
  modified_base 11: mod_base = OTHER; note = 2'-O-methyladenosine-3'-phosphate
  modified_base 12: mod_base = OTHER; note = 2'-O-methyladenosine-3'-phosphate
  modified_base 13: mod_base = OTHER; note = 2'-O-methyladenosine-3'-phosphate
  modified_base 14: mod_base = OTHER; note = 2'-deoxy-2'-fluoroadenosine-3'-phosphate
  modified_base 15: mod_base = OTHER; note = 2'-O-methyladenosine-3'-phosphate
  modified_base 16: mod_base = OTHER; note = 2'-deoxy-2'-fluoroadenosine-3'-phosphate
  modified_base 17: mod_base = OTHER; note = 2'-O-methyluridine-3'-phosphate
  modified_base 18: mod_base = OTHER; note = 2'-O-methylguanosine-3'-phosphate
  modified_base 19: mod_base = OTHER; note = 2'-O-methyluridine-3'-phosphate
  modified_base 20: mod_base = OTHER; note = 2'-O-methylcytidine-3'-phosphate
  modified_base 21: mod_base = OTHER; note = 2'-O-methyladenosine-3'-phosphorothioate
  modified_base 22: mod_base = OTHER; note = 2'-O-methyladenosine-3'-phosphorothioate
  modified_base 23: mod_base = OTHER; note = 2'-O-methylcytidine
tttctatgagaaaaaatgtcaac

SEQ ID NO: 12478 - RNA, 23 nt, synthetic construct
  source 1..23: mol_type = other RNA
  modified_base 1: mod_base = OTHER; note = 2'-O-methyluridine-3'-phosphorothioate 5'-(E)-Vinylphosphonate
  modified_base 2: mod_base = OTHER; note = 2'-deoxy-2'-fluoroguanosine-3'-phosphorothioate
  modified_base 3: mod_base = OTHER; note = 2'-O-methyladenosine-3'-phosphate
  modified_base 4: mod_base = OTHER; note = 2'-O-methyluridine-3'-phosphate
  modified_base 5: mod_base = OTHER; note = 2'-O-methyluridine-3'-phosphate
  modified_base 6: mod_base = OTHER; note = 2'-deoxy-2'-fluorouridine-3'-phosphate
  modified_base 7: mod_base = OTHER; note = 2'-O-methyluridine-3'-phosphate
  modified_base 8: mod_base = OTHER; note = 2'-O-methylguanosine-3'-phosphate
  modified_base 9: mod_base = OTHER; note = 2'-O-methyluridine-3'-phosphate
  modified_base 10: mod_base = OTHER; note = 2'-O-methylguanosine-3'-phosphate
  modified_base 11: mod_base = OTHER; note = 2'-O-methylcytidine-3'-phosphate
  modified_base 12: mod_base = OTHER; note = 2'-O-methylguanosine-3'-phosphate
  modified_base 13: mod_base = OTHER; note = 2'-O-methylguanosine-3'-phosphate
  modified_base 14: mod_base = OTHER; note = 2'-deoxy-2'-fluoroguanosine-3'-phosphate
  modified_base 15: mod_base = OTHER; note = 2'-O-methyluridine-3'-phosphate
  modified_base 16: mod_base = OTHER; note = 2'-deoxy-2'-fluorocytidine-3'-phosphate
  modified_base 17: mod_base = OTHER; note = 2'-O-methylcytidine-3'-phosphate
  modified_base 18: mod_base = OTHER; note = 2'-O-methyladenosine-3'-phosphate
  modified_base 19: mod_base = OTHER; note = 2'-O-methyluridine-3'-phosphate
  modified_base 20: mod_base = OTHER; note = 2'-O-methyluridine-3'-phosphate
  modified_base 21: mod_base = OTHER; note = 2'-O-methyladenosine-3'-phosphorothioate
  modified_base 22: mod_base = OTHER; note = 2'-O-methyluridine-3'-phosphorothioate
  modified_base 23: mod_base = OTHER; note = 2'-O-methylguanosine
tgattttgtgcgggtccattatg

SEQ ID NO: 12479 - RNA, 23 nt, synthetic construct
  source 1..23: mol_type = other RNA
  modified_base 1: mod_base = OTHER; note = 2'-O-methyluridine-3'-phosphorothioate 5'-(E)-Vinylphosphonate
  modified_base 2: mod_base = OTHER; note = 2'-deoxy-2'-fluoroadenosine-3'-phosphorothioate
  modified_base 3: mod_base = OTHER; note = 2'-O-methylguanosine-3'-phosphate
  modified_base 4: mod_base = OTHER; note = 2'-O-methyladenosine-3'-phosphate
  modified_base 5: mod_base = OTHER; note = 2'-O-methyluridine-3'-phosphate
  modified_base 6: mod_base = OTHER; note = 2'-deoxy-2'-fluorouridine-3'-phosphate
  modified_base 7: mod_base = OTHER; note = 2'-O-methyluridine-3'-phosphate
  modified_base 8: mod_base = OTHER; note = 2'-O-methyluridine-3'-phosphate
  modified_base 9: mod_base = OTHER; note = 2'-O-methylguanosine-3'-phosphate
  modified_base 10: mod_base = OTHER; note = 2'-O-methyluridine-3'-phosphate
  modified_base 11: mod_base = OTHER; note = 2'-O-methylguanosine-3'-phosphate
  modified_base 12: mod_base = OTHER; note = 2'-O-methylcytidine-3'-phosphate
  modified_base 13: mod_base = OTHER; note = 2'-O-methylguanosine-3'-phosphate
  modified_base 14: mod_base = OTHER; note = 2'-deoxy-2'-fluoroguanosine-3'-phosphate
  modified_base 15: mod_base = OTHER; note = 2'-O-methylguanosine-3'-phosphate
  modified_base 16: mod_base = OTHER; note = 2'-deoxy-2'-fluorouridine-3'-phosphate
  modified_base 17: mod_base = OTHER; note = 2'-O-methylcytidine-3'-phosphate
  modified_base 18: mod_base = OTHER; note = 2'-O-methylcytidine-3'-phosphate
  modified_base 19: mod_base = OTHER; note = 2'-O-methyladenosine-3'-phosphate
  modified_base 20: mod_base = OTHER; note = 2'-O-methyluridine-3'-phosphate
  modified_base 21: mod_base = OTHER; note = 2'-O-methyluridine-3'-phosphorothioate
  modified_base 22: mod_base = OTHER; note = 2'-O-methyladenosine-3'-phosphorothioate
  modified_base 23: mod_base = OTHER; note = 2'-O-methyluridine
tagattttgtgcgggtccattat

SEQ ID NO: 12480 - RNA, 23 nt, synthetic construct
  source 1..23: mol_type = other RNA
  modified_base 1: mod_base = OTHER; note = 2'-O-methyluridine-3'-phosphorothioate 5'-(E)-Vinylphosphonate
  modified_base 2: mod_base = OTHER; note = 2'-deoxy-2'-fluoroguanosine-3'-phosphorothioate
  modified_base 3: mod_base = OTHER; note = 2'-O-methyladenosine-3'-phosphate
  modified_base 4: mod_base = OTHER; note = 2'-O-methylguanosine-3'-phosphate
  modified_base 5: mod_base = OTHER; note = 2'-O-methyladenosine-3'-phosphate
  modified_base 6: mod_base = OTHER; note = 2'-deoxy-2'-fluorouridine-3'-phosphate
  modified_base 7: mod_base = OTHER; note = 2'-O-methyluridine-3'-phosphate
  modified_base 8: mod_base = OTHER; note = 2'-O-methyluridine-3'-phosphate
  modified_base 9: mod_base = OTHER; note = 2'-O-methyluridine-3'-phosphate
  modified_base 10: mod_base = OTHER; note = 2'-O-methylguanosine-3'-phosphate
  modified_base 11: mod_base = OTHER; note = 2'-O-methyluridine-3'-phosphate
  modified_base 12: mod_base = OTHER; note = 2'-O-methylguanosine-3'-phosphate
  modified_base 13: mod_base = OTHER; note = 2'-O-methylcytidine-3'-phosphate
  modified_base 14: mod_base = OTHER; note = 2'-deoxy-2'-fluoroguanosine-3'-phosphate
  modified_base 15: mod_base = OTHER; note = 2'-O-methylguanosine-3'-phosphate
  modified_base 16: mod_base = OTHER; note = 2'-deoxy-2'-fluoroguanosine-3'-phosphate
  modified_base 17: mod_base = OTHER; note = 2'-O-methyluridine-3'-phosphate
  modified_base 18: mod_base = OTHER; note = 2'-O-methylcytidine-3'-phosphate
  modified_base 19: mod_base = OTHER; note = 2'-O-methylcytidine-3'-phosphate
  modified_base 20: mod_base = OTHER; note = 2'-O-methyladenosine-3'-phosphate
  modified_base 21: mod_base = OTHER; note = 2'-O-methyluridine-3'-phosphorothioate
  modified_base 22: mod_base = OTHER; note = 2'-O-methyluridine-3'-phosphorothioate
  modified_base 23: mod_base = OTHER; note = 2'-O-methyladenosine
tgagattttgtgcgggtccatta

SEQ ID NO: 12481 - RNA, 23 nt, synthetic construct
  source 1..23: mol_type = other RNA
  modified_base 1: mod_base = OTHER; note = 2'-O-methyluridine-3'-phosphorothioate 5'-(E)-Vinylphosphonate
  modified_base 2: mod_base = OTHER; note = 2'-deoxy-2'-fluorouridine-3'-phosphorothioate
  modified_base 3: mod_base = OTHER; note = 2'-O-methylguanosine-3'-phosphate
  modified_base 4: mod_base = OTHER; note = 2'-O-methyladenosine-3'-phosphate
  modified_base 5: mod_base = OTHER; note = 2'-O-methylguanosine-3'-phosphate
  modified_base 6: mod_base = OTHER; note = 2'-deoxy-2'-fluoroadenosine-3'-phosphate
  modified_base 7: mod_base = OTHER; note = 2'-O-methyluridine-3'-phosphate
  modified_base 8: mod_base = OTHER; note = 2'-O-methyluridine-3'-phosphate
  modified_base 9: mod_base = OTHER; note = 2'-O-methyluridine-3'-phosphate
  modified_base 10: mod_base = OTHER; note = 2'-O-methyluridine-3'-phosphate
  modified_base 11: mod_base = OTHER; note = 2'-O-methylguanosine-3'-phosphate
  modified_base 12: mod_base = OTHER; note = 2'-O-methyluridine-3'-phosphate
  modified_base 13: mod_base = OTHER; note = 2'-O-methylguanosine-3'-phosphate
  modified_base 14: mod_base = OTHER; note = 2'-deoxy-2'-fluorocytidine-3'-phosphate
  modified_base 15: mod_base = OTHER; note = 2'-O-methylguanosine-3'-phosphate
  modified_base 16: mod_base = OTHER; note = 2'-deoxy-2'-fluoroguanosine-3'-phosphate
  modified_base 17: mod_base = OTHER; note = 2'-O-methylguanosine-3'-phosphate
  modified_base 18: mod_base = OTHER; note = 2'-O-methyluridine-3'-phosphate
  modified_base 19: mod_base = OTHER; note = 2'-O-methylcytidine-3'-phosphate
  modified_base 20: mod_base = OTHER; note = 2'-O-methylcytidine-3'-phosphate
  modified_base 21: mod_base = OTHER; note = 2'-O-methyladenosine-3'-phosphorothioate
  modified_base 22: mod_base = OTHER; note = 2'-O-methyluridine-3'-phosphorothioate
  modified_base 23: mod_base = OTHER; note = 2'-O-methyluridine
ttgagattttgtgcgggtccatt

SEQ ID NO: 12482 - RNA, 23 nt, synthetic construct
  source 1..23: mol_type = other RNA
  modified_base 1: mod_base = OTHER; note = 2'-O-methyluridine-3'-phosphorothioate 5'-(E)-Vinylphosphonate
  modified_base 2: mod_base = OTHER; note = 2'-deoxy-2'-fluorocytidine-3'-phosphorothioate
  modified_base 3: mod_base = OTHER; note = 2'-O-methyluridine-3'-phosphate
  modified_base 4: mod_base = OTHER; note = 2'-O-methylguanosine-3'-phosphate
  modified_base 5: mod_base = OTHER; note = 2'-O-methyladenosine-3'-phosphate
  modified_base 6: mod_base = OTHER; note = 2'-deoxy-2'-fluoroguanosine-3'-phosphate
  modified_base 7: mod_base = OTHER; note = 2'-O-methyladenosine-3'-phosphate
  modified_base 8: mod_base = OTHER; note = 2'-O-methyluridine-3'-phosphate
  modified_base 9: mod_base = OTHER; note = 2'-O-methyluridine-3'-phosphate
  modified_base 10: mod_base = OTHER; note = 2'-O-methyluridine-3'-phosphate
  modified_base 11: mod_base = OTHER; note = 2'-O-methyluridine-3'-phosphate
  modified_base 12: mod_base = OTHER; note = 2'-O-methylguanosine-3'-phosphate
  modified_base 13: mod_base = OTHER; note = 2'-O-methyluridine-3'-phosphate
  modified_base 14: mod_base = OTHER; note = 2'-deoxy-2'-fluoroguanosine-3'-phosphate
  modified_base 15: mod_base = OTHER; note = 2'-O-methylcytidine-3'-phosphate
  modified_base 16: mod_base = OTHER; note = 2'-deoxy-2'-fluoroguanosine-3'-phosphate
  modified_base 17: mod_base = OTHER; note = 2'-O-methylguanosine-3'-phosphate
  modified_base 18: mod_base = OTHER; note = 2'-O-methylguanosine-3'-phosphate
  modified_base 19: mod_base = OTHER; note = 2'-O-methyluridine-3'-phosphate
  modified_base 20: mod_base = OTHER; note = 2'-O-methylcytidine-3'-phosphate
  modified_base 21: mod_base = OTHER; note = 2'-O-methylcytidine-3'-phosphorothioate
  modified_base 22: mod_base = OTHER; note = 2'-O-methyladenosine-3'-phosphorothioate
  modified_base 23: mod_base = OTHER; note = 2'-O-methyluridine
tctgagattttgtgcgggtccat

SEQ ID NO: 12483 - RNA, 23 nt, synthetic construct
  source 1..23: mol_type = other RNA
  modified_base 1: mod_base = OTHER; note = 2'-O-methyluridine-3'-phosphorothioate 5'-(E)-Vinylphosphonate
  modified_base 2: mod_base = OTHER; note = 2'-deoxy-2'-fluorouridine-3'-phosphorothioate
  modified_base 3: mod_base = OTHER; note = 2'-O-methylcytidine-3'-phosphate
  modified_base 4: mod_base = OTHER; note = 2'-O-methyluridine-3'-phosphate
  modified_base 5: mod_base = OTHER; note = 2'-O-methylguanosine-3'-phosphate
  modified_base 6: mod_base = OTHER; note = 2'-deoxy-2'-fluoroadenosine-3'-phosphate
  modified_base 7: mod_base = OTHER; note = 2'-O-methylguanosine-3'-phosphate
  modified_base 8: mod_base = OTHER; note = 2'-O-methyladenosine-3'-phosphate
  modified_base 9: mod_base = OTHER; note = 2'-O-methyluridine-3'-phosphate
  modified_base 10: mod_base = OTHER; note = 2'-O-methyluridine-3'-phosphate
  modified_base 11: mod_base = OTHER; note = 2'-O-methyluridine-3'-phosphate
  modified_base 12: mod_base = OTHER; note = 2'-O-methyluridine-3'-phosphate
  modified_base 13: mod_base = OTHER; note = 2'-O-methylguanosine-3'-phosphate
  modified_base 14: mod_base = OTHER; note = 2'-deoxy-2'-fluorouridine-3'-phosphate
  modified_base 15: mod_base = OTHER; note = 2'-O-methylguanosine-3'-phosphate
  modified_base 16: mod_base = OTHER; note = 2'-deoxy-2'-fluorocytidine-3'-phosphate
  modified_base 17: mod_base = OTHER; note = 2'-O-methylguanosine-3'-phosphate
  modified_base 18: mod_base = OTHER; note = 2'-O-methylguanosine-3'-phosphate
  modified_base 19: mod_base = OTHER; note = 2'-O-methylguanosine-3'-phosphate
  modified_base 20: mod_base = OTHER; note = 2'-O-methyluridine-3'-phosphate
  modified_base 21: mod_base = OTHER; note = 2'-O-methylcytidine-3'-phosphorothioate
  modified_base 22: mod_base = OTHER; note = 2'-O-methylcytidine-3'-phosphorothioate
  modified_base 23: mod_base = OTHER; note = 2'-O-methyladenosine
ttctgagattttgtgcgggtcca

SEQ ID NO: 12484 - RNA, 23 nt, synthetic construct
  source 1..23: mol_type = other RNA
  modified_base 1: mod_base = OTHER; note = 2'-O-methyluridine-3'-phosphorothioate 5'-(E)-Vinylphosphonate
  modified_base 2: mod_base = OTHER; note = 2'-deoxy-2'-fluorouridine-3'-phosphorothioate
  modified_base 3: mod_base = OTHER; note = 2'-O-methyluridine-3'-phosphate
  modified_base 4: mod_base = OTHER; note = 2'-O-methylcytidine-3'-phosphate
  modified_base 5: mod_base = OTHER; note = 2'-O-methyluridine-3'-phosphate
  modified_base 6: mod_base = OTHER; note = 2'-deoxy-2'-fluoroguanosine-3'-phosphate
  modified_base 7: mod_base = OTHER; note = 2'-O-methyladenosine-3'-phosphate
  modified_base 8: mod_base = OTHER; note = 2'-O-methylguanosine-3'-phosphate
  modified_base 9: mod_base = OTHER; note = 2'-O-methyladenosine-3'-phosphate
  modified_base 10: mod_base = OTHER; note = 2'-O-methyluridine-3'-phosphate
  modified_base 11: mod_base = OTHER; note = 2'-O-methyluridine-3'-phosphate
  modified_base 12: mod_base = OTHER; note = 2'-O-methyluridine-3'-phosphate
  modified_base 13: mod_base = OTHER; note = 2'-O-methyluridine-3'-phosphate
  modified_base 14: mod_base = OTHER; note = 2'-deoxy-2'-fluoroguanosine-3'-phosphate
  modified_base 15: mod_base = OTHER; note = 2'-O-methyluridine-3'-phosphate
  modified_base 16: mod_base = OTHER; note = 2'-deoxy-2'-fluoroguanosine-3'-phosphate
  modified_base 17: mod_base = OTHER; note = 2'-O-methylcytidine-3'-phosphate
  modified_base 18: mod_base = OTHER; note = 2'-O-methylguanosine-3'-phosphate
  modified_base 19: mod_base = OTHER; note = 2'-O-methylguanosine-3'-phosphate
  modified_base 20: mod_base = OTHER; note = 2'-O-methylguanosine-3'-phosphate
  modified_base 21: mod_base = OTHER; note = 2'-O-methyluridine-3'-phosphorothioate
  modified_base 22: mod_base = OTHER; note = 2'-O-methylcytidine-3'-phosphorothioate
  modified_base 23: mod_base = OTHER; note = 2'-O-methylcytidine
tttctgagattttgtgcgggtcc

SEQ ID NO: 12485 - RNA, 23 nt, synthetic construct
  source 1..23: mol_type = other RNA
  modified_base 1: mod_base = OTHER; note = 2'-O-methyluridine-3'-phosphorothioate 5'-(E)-Vinylphosphonate
  modified_base 2: mod_base = OTHER; note = 2'-deoxy-2'-fluoroguanosine-3'-phosphorothioate
  modified_base 3: mod_base = OTHER; note = 2'-O-methyluridine-3'-phosphate
  modified_base 4: mod_base = OTHER; note = 2'-O-methyluridine-3'-phosphate
  modified_base 5: mod_base = OTHER; note = 2'-O-methylcytidine-3'-phosphate
  modified_base 6: mod_base = OTHER; note = 2'-deoxy-2'-fluorouridine-3'-phosphate
  modified_base 7: mod_base = OTHER; note = 2'-O-methylguanosine-3'-phosphate
  modified_base 8: mod_base = OTHER; note = 2'-O-methyladenosine-3'-phosphate
  modified_base 9: mod_base = OTHER; note = 2'-O-methylguanosine-3'-phosphate
  modified_base 10: mod_base = OTHER; note = 2'-O-methyladenosine-3'-phosphate
  modified_base 11: mod_base = OTHER; note = 2'-O-methyluridine-3'-phosphate
  modified_base 12: mod_base = OTHER; note = 2'-O-methyluridine-3'-phosphate
  modified_base 13: mod_base = OTHER; note = 2'-O-methyluridine-3'-phosphate
  modified_base 14: mod_base = OTHER; note = 2'-deoxy-2'-fluorouridine-3'-phosphate
  modified_base 15: mod_base = OTHER; note = 2'-O-methylguanosine-3'-phosphate
  modified_base 16: mod_base = OTHER; note = 2'-deoxy-2'-fluorouridine-3'-phosphate
  modified_base 17: mod_base = OTHER; note = 2'-O-methylguanosine-3'-phosphate
  modified_base 18: mod_base = OTHER; note = 2'-O-methylcytidine-3'-phosphate
  modified_base 19: mod_base = OTHER; note = 2'-O-methylguanosine-3'-phosphate
  modified_base 20: mod_base = OTHER; note = 2'-O-methylguanosine-3'-phosphate
  modified_base 21: mod_base = OTHER; note = 2'-O-methylguanosine-3'-phosphorothioate
  modified_base 22: mod_base = OTHER; note = 2'-O-methyluridine-3'-phosphorothioate
  modified_base 23: mod_base = OTHER; note = 2'-O-methylcytidine
tgttctgagattttgtgcgggtc

SEQ ID NO: 12486 - RNA, 23 nt, synthetic construct
  source 1..23: mol_type = other RNA
  modified_base 1: mod_base = OTHER; note = 2'-O-methyluridine-3'-phosphorothioate 5'-(E)-Vinylphosphonate
  modified_base 2: mod_base = OTHER; note = 2'-deoxy-2'-fluoroguanosine-3'-phosphorothioate
  modified_base 3: mod_base = OTHER; note = 2'-O-methylguanosine-3'-phosphate
  modified_base 4: mod_base = OTHER; note = 2'-O-methyluridine-3'-phosphate
  modified_base 5: mod_base = OTHER; note = 2'-O-methyluridine-3'-phosphate
  modified_base 6: mod_base = OTHER; note = 2'-deoxy-2'-fluorocytidine-3'-phosphate
  modified_base 7: mod_base = OTHER; note = 2'-O-methyluridine-3'-phosphate
  modified_base 8: mod_base = OTHER; note = 2'-O-methylguanosine-3'-phosphate
  modified_base 9: mod_base = OTHER; note = 2'-O-methyladenosine-3'-phosphate
  modified_base 10: mod_base = OTHER; note = 2'-O-methylguanosine-3'-phosphate
  modified_base 11: mod_base = OTHER; note = 2'-O-methyladenosine-3'-phosphate
  modified_base 12: mod_base = OTHER; note = 2'-O-methyluridine-3'-phosphate
  modified_base 13: mod_base = OTHER; note = 2'-O-methyluridine-3'-phosphate
  modified_base 14: mod_base = OTHER; note = 2'-deoxy-2'-fluorouridine-3'-phosphate
  modified_base 15: mod_base = OTHER; note = 2'-O-methyluridine-3'-phosphate
  modified_base 16: mod_base = OTHER; note = 2'-deoxy-2'-fluoroguanosine-3'-phosphate
  modified_base 17: mod_base = OTHER; note = 2'-O-methyluridine-3'-phosphate
  modified_base 18: mod_base = OTHER; note = 2'-O-methylguanosine-3'-phosphate
  modified_base 19: mod_base = OTHER; note = 2'-O-methylcytidine-3'-phosphate
  modified_base 20: mod_base = OTHER; note = 2'-O-methylguanosine-3'-phosphate
  modified_base 21: mod_base = OTHER; note = 2'-O-methylguanosine-3'-phosphorothioate
  modified_base 22: mod_base = OTHER; note = 2'-O-methylguanosine-3'-phosphorothioate
  modified_base 23: mod_base = OTHER; note = 2'-O-methyluridine
tggttctgagattttgtgcgggt

SEQ ID NO: 12487 - RNA, 23 nt, synthetic construct
  source 1..23: mol_type = other RNA
  modified_base 1: mod_base = OTHER; note = 2'-O-methyluridine-3'-phosphorothioate 5'-(E)-Vinylphosphonate
  modified_base 2: mod_base = OTHER; note = 2'-deoxy-2'-fluorouridine-3'-phosphorothioate
  modified_base 3: mod_base = OTHER; note = 2'-O-methylguanosine-3'-phosphate
  modified_base 4: mod_base = OTHER; note = 2'-O-methylguanosine-3'-phosphate
  modified_base 5: mod_base = OTHER; note = 2'-O-methyluridine-3'-phosphate
  modified_base 6: mod_base = OTHER; note = 2'-deoxy-2'-fluorouridine-3'-phosphate
  modified_base 7: mod_base = OTHER; note = 2'-O-methylcytidine-3'-phosphate
  modified_base 8: mod_base = OTHER; note = 2'-O-methyluridine-3'-phosphate
  modified_base 9: mod_base = OTHER; note = 2'-O-methylguanosine-3'-phosphate
  modified_base 10: mod_base = OTHER; note = 2'-O-methyladenosine-3'-phosphate
  modified_base 11: mod_base = OTHER; note = 2'-O-methylguanosine-3'-phosphate
  modified_base 12: mod_base = OTHER; note = 2'-O-methyladenosine-3'-phosphate
  modified_base 13: mod_base = OTHER; note = 2'-O-methyluridine-3'-phosphate
  modified_base 14: mod_base = OTHER; note = 2'-deoxy-2'-fluorouridine-3'-phosphate
  modified_base 15: mod_base = OTHER; note = 2'-O-methyluridine-3'-phosphate
  modified_base 16: mod_base = OTHER; note = 2'-deoxy-2'-fluorouridine-3'-phosphate
  modified_base 17: mod_base = OTHER; note = 2'-O-methylguanosine-3'-phosphate
  modified_base 18: mod_base = OTHER; note = 2'-O-methyluridine-3'-phosphate
  modified_base 19: mod_base = OTHER; note = 2'-O-methylguanosine-3'-phosphate
  modified_base 20: mod_base = OTHER; note = 2'-O-methylcytidine-3'-phosphate
  modified_base 21: mod_base = OTHER; note = 2'-O-methylguanosine-3'-phosphorothioate
  modified_base 22: mod_base = OTHER; note = 2'-O-methylguanosine-3'-phosphorothioate
  modified_base 23: mod_base = OTHER; note = 2'-O-methylguanosine
ttggttctgagattttgtgcggg

SEQ ID NO: 12488 - RNA, 23 nt, synthetic construct
  source 1..23: mol_type = other RNA
  modified_base 1: mod_base = OTHER; note = 2'-O-methyluridine-3'-phosphorothioate 5'-(E)-Vinylphosphonate
  modified_base 2: mod_base = OTHER; note = 2'-deoxy-2'-fluoroadenosine-3'-phosphorothioate
  modified_base 3: mod_base = OTHER; note = 2'-O-methyluridine-3'-phosphate
  modified_base 4: mod_base = OTHER; note = 2'-O-methylguanosine-3'-phosphate
  modified_base 5: mod_base = OTHER; note = 2'-O-methylguanosine-3'-phosphate
  modified_base 6: mod_base = OTHER; note = 2'-deoxy-2'-fluorouridine-3'-phosphate
  modified_base 7: mod_base = OTHER; note = 2'-O-methyluridine-3'-phosphate
  modified_base 8: mod_base = OTHER; note = 2'-O-methylcytidine-3'-phosphate
  modified_base 9: mod_base = OTHER; note = 2'-O-methyluridine-3'-phosphate
  modified_base 10: mod_base = OTHER; note = 2'-O-methylguanosine-3'-phosphate
  modified_base 11: mod_base = OTHER; note = 2'-O-methyladenosine-3'-phosphate
  modified_base 12: mod_base = OTHER; note = 2'-O-methylguanosine-3'-phosphate
  modified_base 13: mod_base = OTHER; note = 2'-O-methyladenosine-3'-phosphate
  modified_base 14: mod_base = OTHER; note = 2'-deoxy-2'-fluorouridine-3'-phosphate
  modified_base 15: mod_base = OTHER; note = 2'-O-methyluridine-3'-phosphate
  modified_base 16: mod_base = OTHER; note = 2'-deoxy-2'-fluorouridine-3'-phosphate
  modified_base 17: mod_base = OTHER; note = 2'-O-methyluridine-3'-phosphate
  modified_base 18: mod_base = OTHER; note = 2'-O-methylguanosine-3'-phosphate
  modified_base 19: mod_base = OTHER; note = 2'-O-methyluridine-3'-phosphate
  modified_base 20: mod_base = OTHER; note = 2'-O-methylguanosine-3'-phosphate
  modified_base 21: mod_base = OTHER; note = 2'-O-methylcytidine-3'-phosphorothioate
  modified_base 22: mod_base = OTHER; note = 2'-O-methylguanosine-3'-phosphorothioate
  modified_base 23: mod_base = OTHER; note = 2'-O-methylguanosine
tatggttctgagattttgtgcgg

SEQ ID NO: 12489 - RNA, 23 nt, synthetic construct
  source 1..23: mol_type = other RNA
  modified_base 1: mod_base = OTHER; note = 2'-O-methyluridine-3'-phosphorothioate 5'-(E)-Vinylphosphonate
  modified_base 2: mod_base = OTHER; note = 2'-deoxy-2'-fluorouridine-3'-phosphorothioate
  modified_base 3: mod_base = OTHER; note = 2'-O-methyladenosine-3'-phosphate
  modified_base 4: mod_base = OTHER; note = 2'-O-methyluridine-3'-phosphate
  modified_base 5: mod_base = OTHER; note = 2'-O-methylguanosine-3'-phosphate
  modified_base 6: mod_base = OTHER; note = 2'-deoxy-2'-fluoroguanosine-3'-phosphate
  modified_base 7: mod_base = OTHER; note = 2'-O-methyluridine-3'-phosphate
  modified_base 8: mod_base = OTHER; note = 2'-O-methyluridine-3'-phosphate
  modified_base 9: mod_base = OTHER; note = 2'-O-methylcytidine-3'-phosphate
  modified_base 10: mod_base = OTHER; note = 2'-O-methyluridine-3'-phosphate
  modified_base 11: mod_base = OTHER; note = 2'-O-methylguanosine-3'-phosphate
  modified_base 12: mod_base = OTHER; note = 2'-O-methyladenosine-3'-phosphate
  modified_base 13: mod_base = OTHER; note = 2'-O-methylguanosine-3'-phosphate
  modified_base 14: mod_base = OTHER; note = 2'-deoxy-2'-fluoroadenosine-3'-phosphate
  modified_base 15: mod_base = OTHER; note = 2'-O-methyluridine-3'-phosphate
  modified_base 16: mod_base = OTHER; note = 2'-deoxy-2'-fluorouridine-3'-phosphate
  modified_base 17: mod_base = OTHER; note = 2'-O-methyluridine-3'-phosphate
  modified_base 18: mod_base = OTHER; note = 2'-O-methyluridine-3'-phosphate
  modified_base 19: mod_base = OTHER; note = 2'-O-methylguanosine-3'-phosphate
  modified_base 20: mod_base = OTHER; note = 2'-O-methyluridine-3'-phosphate
  modified_base 21: mod_base = OTHER; note = 2'-O-methylguanosine-3'-phosphorothioate
  modified_base 22: mod_base = OTHER; note = 2'-O-methylcytidine-3'-phosphorothioate
  modified_base 23: mod_base = OTHER; note = 2'-O-methylguanosine
ttatggttctgagattttgtgcg

SEQ ID NO: 12490 - RNA, 23 nt, synthetic construct
  source 1..23: mol_type = other RNA
  modified_base 1: mod_base = OTHER; note = 2'-O-methyluridine-3'-phosphorothioate 5'-(E)-Vinylphosphonate
  modified_base 2: mod_base = OTHER; note = 2'-deoxy-2'-fluoroadenosine-3'-phosphorothioate
  modified_base 3: mod_base = OTHER; note = 2'-O-methyluridine-3'-phosphate
  modified_base 4: mod_base = OTHER; note = 2'-O-methyladenosine-3'-phosphate
  modified_base 5: mod_base = OTHER; note = 2'-O-methyluridine-3'-phosphate
  modified_base 6: mod_base = OTHER; note = 2'-deoxy-2'-fluoroguanosine-3'-phosphate
  modified_base 7: mod_base = OTHER; note = 2'-O-methylguanosine-3'-phosphate
  modified_base 8: mod_base = OTHER; note = 2'-O-methyluridine-3'-phosphate
  modified_base 9: mod_base = OTHER; note = 2'-O-methyluridine-3'-phosphate
  modified_base 10: mod_base = OTHER; note = 2'-O-methylcytidine-3'-phosphate
  modified_base 11: mod_base = OTHER; note = 2'-O-methyluridine-3'-phosphate
  modified_base 12: mod_base = OTHER; note = 2'-O-methylguanosine-3'-phosphate
  modified_base 13: mod_base = OTHER; note = 2'-O-methyladenosine-3'-phosphate
  modified_base 14: mod_base = OTHER; note = 2'-deoxy-2'-fluoroguanosine-3'-phosphate
  modified_base 15: mod_base = OTHER; note = 2'-O-methyladenosine-3'-phosphate
  modified_base 16: mod_base = OTHER; note = 2'-deoxy-2'-fluorouridine-3'-phosphate
  modified_base 17: mod_base = OTHER; note = 2'-O-methyluridine-3'-phosphate
  modified_base 18: mod_base = OTHER; note = 2'-O-methyluridine-3'-phosphate
  modified_base 19: mod_base = OTHER; note = 2'-O-methyluridine-3'-phosphate
  modified_base 20: mod_base = OTHER; note = 2'-O-methylguanosine-3'-phosphate
  modified_base 21: mod_base = OTHER; note = 2'-O-methyluridine-3'-phosphorothioate
  modified_base 22: mod_base = OTHER; note = 2'-O-methylguanosine-3'-phosphorothioate
  modified_base 23: mod_base = OTHER; note = 2'-O-methylcytidine
tatatggttctgagattttgtgc

SEQ ID NO: 12491 - RNA, 23 nt, synthetic construct
  source 1..23: mol_type = other RNA
  modified_base 1: mod_base = OTHER; note = 2'-O-methyluridine-3'-phosphorothioate 5'-(E)-Vinylphosphonate
  modified_base 2: mod_base = OTHER; note = 2'-deoxy-2'-fluoroguanosine-3'-phosphorothioate
  modified_base 3: mod_base = OTHER; note = 2'-O-methyladenosine-3'-phosphate
  modified_base 4: mod_base = OTHER; note = 2'-O-methyluridine-3'-phosphate
  modified_base 5: mod_base = OTHER; note = 2'-O-methyladenosine-3'-phosphate
  modified_base 6: mod_base = OTHER; note = 2'-deoxy-2'-fluorouridine-3'-phosphate
  modified_base 7: mod_base = OTHER; note = 2'-O-methylguanosine-3'-phosphate
  modified_base 8: mod_base = OTHER; note = 2'-O-methylguanosine-3'-phosphate
  modified_base 9: mod_base = OTHER; note = 2'-O-methyluridine-3'-phosphate
  modified_base 10: mod_base = OTHER; note = 2'-O-methyluridine-3'-phosphate
  modified_base 11: mod_base = OTHER; note = 2'-O-methylcytidine-3'-phosphate
  modified_base 12: mod_base = OTHER; note = 2'-O-methyluridine-3'-phosphate
  modified_base 13: mod_base = OTHER; note = 2'-O-methylguanosine-3'-phosphate
  modified_base 14: mod_base = OTHER; note = 2'-deoxy-2'-fluoroadenosine-3'-phosphate
  modified_base 15: mod_base = OTHER; note = 2'-O-methylguanosine-3'-phosphate
  modified_base 16: mod_base = OTHER; note = 2'-deoxy-2'-fluoroadenosine-3'-phosphate
  modified_base 17: mod_base = OTHER; note = 2'-O-methyluridine-3'-phosphate
  modified_base 18: mod_base = OTHER; note = 2'-O-methyluridine-3'-phosphate
  modified_base 19: mod_base = OTHER; note = 2'-O-methyluridine-3'-phosphate
  modified_base 20: mod_base = OTHER; note = 2'-O-methyluridine-3'-phosphate
  modified_base 21: mod_base = OTHER; note = 2'-O-methylguanosine-3'-phosphorothioate
  modified_base 22: mod_base = OTHER; note = 2'-O-methyluridine-3'-phosphorothioate
  modified_base 23: mod_base = OTHER; note = 2'-O-methylguanosine
tgatatggttctgagattttgtg

SEQ ID NO: 12492 - RNA, 23 nt, synthetic construct
  source 1..23: mol_type = other RNA
  modified_base 1: mod_base = OTHER; note = 2'-O-methyluridine-3'-phosphorothioate 5'-(E)-Vinylphosphonate
  modified_base 2: mod_base = OTHER; note = 2'-deoxy-2'-fluoroadenosine-3'-phosphorothioate
  modified_base 3: mod_base = OTHER; note = 2'-O-methylguanosine-3'-phosphate
  modified_base 4: mod_base = OTHER; note = 2'-O-methyladenosine-3'-phosphate
  modified_base 5: mod_base = OTHER; note = 2'-O-methyluridine-3'-phosphate
  modified_base 6: mod_base = OTHER; note = 2'-deoxy-2'-fluoroadenosine-3'-phosphate
  modified_base 7: mod_base = OTHER; note = 2'-O-methyluridine-3'-phosphate
  modified_base 8: mod_base = OTHER; note = 2'-O-methylguanosine-3'-phosphate
  modified_base 9: mod_base = OTHER; note = 2'-O-methylguanosine-3'-phosphate
  modified_base 10: mod_base = OTHER; note = 2'-O-methyluridine-3'-phosphate
  modified_base 11: mod_base = OTHER; note = 2'-O-methyluridine-3'-phosphate
  modified_base 12: mod_base = OTHER; note = 2'-O-methylcytidine-3'-phosphate
  modified_base 13: mod_base = OTHER; note = 2'-O-methyluridine-3'-phosphate
  modified_base 14: mod_base = OTHER; note = 2'-deoxy-2'-fluoroguanosine-3'-phosphate
  modified_base 15: mod_base = OTHER; note = 2'-O-methyladenosine-3'-phosphate
  modified_base 16: mod_base = OTHER; note = 2'-deoxy-2'-fluoroguanosine-3'-phosphate
  modified_base 17: mod_base = OTHER; note = 2'-O-methyladenosine-3'-phosphate
  modified_base 18: mod_base = OTHER; note = 2'-O-methyluridine-3'-phosphate
  modified_base 19: mod_base = OTHER; note = 2'-O-methyluridine-3'-phosphate
  modified_base 20: mod_base = OTHER; note = 2'-O-methyluridine-3'-phosphate
  modified_base 21: mod_base = OTHER; note = 2'-O-methyluridine-3'-phosphorothioate
  modified_base 22: mod_base = OTHER; note = 2'-O-methylguanosine-3'-phosphorothioate
  modified_base 23: mod_base = OTHER; note = 2'-O-methyluridine
tagatatggttctgagattttgt

SEQ ID NO: 12493 - RNA, 23 nt, synthetic construct
  source 1..23: mol_type = other RNA
  modified_base 1: mod_base = OTHER; note = 2'-O-methyluridine-3'-phosphorothioate 5'-(E)-Vinylphosphonate
  modified_base 2: mod_base = OTHER; note = 2'-deoxy-2'-fluorocytidine-3'-phosphorothioate
  modified_base 3: mod_base = OTHER; note = 2'-O-methyladenosine-3'-phosphate
  modified_base 4: mod_base = OTHER; note = 2'-O-methylguanosine-3'-phosphate
  modified_base 5: mod_base = OTHER; note = 2'-O-methyladenosine-3'-phosphate
  modified_base 6: mod_base = OTHER; note = 2'-deoxy-2'-fluorouridine-3'-phosphate
  modified_base 7: mod_base = OTHER; note = 2'-O-methyladenosine-3'-phosphate
  modified_base 8: mod_base = OTHER; note = 2'-O-methyluridine-3'-phosphate
  modified_base 9: mod_base = OTHER; note = 2'-O-methylguanosine-3'-phosphate
  modified_base 10: mod_base = OTHER; note = 2'-O-methylguanosine-3'-phosphate
  modified_base 11: mod_base = OTHER; note = 2'-O-methyluridine-3'-phosphate
  modified_base 12: mod_base = OTHER; note = 2'-O-methyluridine-3'-phosphate
  modified_base 13: mod_base = OTHER; note = 2'-O-methylcytidine-3'-phosphate
  modified_base 14: mod_base = OTHER; note = 2'-deoxy-2'-fluorouridine-3'-phosphate
  modified_base 15: mod_base = OTHER; note = 2'-O-methylguanosine-3'-phosphate
  modified_base 16: mod_base = OTHER; note = 2'-deoxy-2'-fluoroadenosine-3'-phosphate
  modified_base 17: mod_base = OTHER; note = 2'-O-methylguanosine-3'-phosphate
  modified_base 18: mod_base = OTHER; note = 2'-O-methyladenosine-3'-phosphate
  modified_base 19: mod_base = OTHER; note = 2'-O-methyluridine-3'-phosphate
  modified_base 20: mod_base = OTHER; note = 2'-O-methyluridine-3'-phosphate
  modified_base 21: mod_base = OTHER; note = 2'-O-methyluridine-3'-phosphorothioate
  modified_base 22: mod_base = OTHER; note = 2'-O-methyluridine-3'-phosphorothioate
  modified_base 23: mod_base = OTHER; note = 2'-O-methylguanosine
tcagatatggttctgagattttg

SEQ ID NO: 12494 - RNA, 23 nt, synthetic construct
  source 1..23: mol_type = other RNA
  modified_base 1: mod_base = OTHER; note = 2'-O-methyluridine-3'-phosphorothioate 5'-(E)-Vinylphosphonate
  modified_base 2: mod_base = OTHER; note = 2'-deoxy-2'-fluoroadenosine-3'-phosphorothioate
  modified_base 3: mod_base = OTHER; note = 2'-O-methylcytidine-3'-phosphate
  modified_base 4: mod_base = OTHER; note = 2'-O-methyladenosine-3'-phosphate
  modified_base 5: mod_base = OTHER; note = 2'-O-methylguanosine-3'-phosphate
  modified_base 6: mod_base = OTHER; note = 2'-deoxy-2'-fluoroadenosine-3'-phosphate
  modified_base 7: mod_base = OTHER; note = 2'-O-methyluridine-3'-phosphate
  modified_base 8: mod_base = OTHER; note = 2'-O-methyladenosine-3'-phosphate
  modified_base 9: mod_base = OTHER; note = 2'-O-methyluridine-3'-phosphate
  modified_base 10: mod_base = OTHER; note = 2'-O-methylguanosine-3'-phosphate
  modified_base 11: mod_base = OTHER; note = 2'-O-methylguanosine-3'-phosphate
  modified_base 12: mod_base = OTHER; note = 2'-O-methyluridine-3'-phosphate
  modified_base 13: mod_base = OTHER; note = 2'-O-methyluridine-3'-phosphate
  modified_base 14: mod_base = OTHER; note = 2'-deoxy-2'-fluorocytidine-3'-phosphate
  modified_base 15: mod_base = OTHER; note = 2'-O-methyluridine-3'-phosphate
  modified_base 16: mod_base = OTHER; note = 2'-deoxy-2'-fluoroguanosine-3'-phosphate
  modified_base 17: mod_base = OTHER; note = 2'-O-methyladenosine-3'-phosphate
  modified_base 18: mod_base = OTHER; note = 2'-O-methylguanosine-3'-phosphate
  modified_base 19: mod_base = OTHER; note = 2'-O-methyladenosine-3'-phosphate
  modified_base 20: mod_base = OTHER; note = 2'-O-methyluridine-3'-phosphate
  modified_base 21: mod_base = OTHER; note = 2'-O-methyluridine-3'-phosphorothioate
  modified_base 22: mod_base = OTHER; note = 2'-O-methyluridine-3'-phosphorothioate
  modified_base 23: mod_base = OTHER; note = 2'-O-methyluridine
tacagatatggttctgagatttt

SEQ ID NO: 12495 - RNA, 23 nt, synthetic construct
  source 1..23: mol_type = other RNA
  modified_base 1: mod_base = OTHER; note = 2'-O-methyluridine-3'-phosphorothioate 5'-(E)-Vinylphosphonate
  modified_base 2: mod_base = OTHER; note = 2'-deoxy-2'-fluorocytidine-3'-phosphorothioate
  modified_base 3: mod_base = OTHER; note = 2'-O-methyladenosine-3'-phosphate
  modified_base 4: mod_base = OTHER; note = 2'-O-methyladenosine-3'-phosphate
  modified_base 5: mod_base = OTHER; note = 2'-O-methylcytidine-3'-phosphate
  modified_base 6: mod_base = OTHER; note = 2'-deoxy-2'-fluoroadenosine-3'-phosphate
  modified_base 7: mod_base = OTHER; note = 2'-O-methylguanosine-3'-phosphate
  modified_base 8: mod_base = OTHER; note = 2'-O-methyladenosine-3'-phosphate
  modified_base 9: mod_base = OTHER; note = 2'-O-methyluridine-3'-phosphate
  modified_base 10: mod_base = OTHER; note = 2'-O-methyladenosine-3'-phosphate
  modified_base 11: mod_base = OTHER; note = 2'-O-methyluridine-3'-phosphate
  modified_base 12: mod_base = OTHER; note = 2'-O-methylguanosine-3'-phosphate
  modified_base 13: mod_base = OTHER; note = 2'-O-methylguanosine-3'-phosphate
  modified_base 14: mod_base = OTHER; note = 2'-deoxy-2'-fluorouridine-3'-phosphate
  modified_base 15: mod_base = OTHER; note = 2'-O-methyluridine-3'-phosphate
  modified_base 16: mod_base = OTHER; note = 2'-deoxy-2'-fluorocytidine-3'-phosphate
  modified_base 17: mod_base = OTHER; note = 2'-O-methyluridine-3'-phosphate
  modified_base 18: mod_base = OTHER; note = 2'-O-methylguanosine-3'-phosphate
  modified_base 19: mod_base = OTHER; note = 2'-O-methyladenosine-3'-phosphate
  modified_base 20: mod_base = OTHER; note = 2'-O-methylguanosine-3'-phosphate
  modified_base 21: mod_base = OTHER; note = 2'-O-methyladenosine-3'-phosphorothioate
  modified_base 22: mod_base = OTHER; note = 2'-O-methyluridine-3'-phosphorothioate
  modified_base 23: mod_base = OTHER; note = 2'-O-methyluridine
tcaacagatatggttctgagatt

SEQ ID NO: 12496 - RNA, 23 nt, synthetic construct
  source 1..23: mol_type = other RNA
  modified_base 1: mod_base = OTHER; note = 2'-O-methyluridine-3'-phosphorothioate 5'-(E)-Vinylphosphonate
  modified_base 2: mod_base = OTHER; note = 2'-deoxy-2'-fluorouridine-3'-phosphorothioate
  modified_base 3: mod_base = OTHER; note = 2'-O-methylcytidine-3'-phosphate
  modified_base 4: mod_base = OTHER; note = 2'-O-methyladenosine-3'-phosphate
  modified_base 5: mod_base = OTHER; note = 2'-O-methyladenosine-3'-phosphate
  modified_base 6: mod_base = OTHER; note = 2'-deoxy-2'-fluorocytidine-3'-phosphate
  modified_base 7: mod_base = OTHER; note = 2'-O-methyladenosine-3'-phosphate
  modified_base 8: mod_base = OTHER; note = 2'-O-methylguanosine-3'-phosphate
  modified_base 9: mod_base = OTHER; note = 2'-O-methyladenosine-3'-phosphate
  modified_base 10: mod_base = OTHER; note = 2'-O-methyluridine-3'-phosphate
  modified_base 11: mod_base = OTHER; note = 2'-O-methyladenosine-3'-phosphate
  modified_base 12: mod_base = OTHER; note = 2'-O-methyluridine-3'-phosphate
  modified_base 13: mod_base = OTHER; note = 2'-O-methylguanosine-3'-phosphate
  modified_base 14: mod_base = OTHER; note = 2'-deoxy-2'-fluoroguanosine-3'-phosphate
  modified_base 15: mod_base = OTHER; note = 2'-O-methyluridine-3'-phosphate
  modified_base 16: mod_base = OTHER; note = 2'-deoxy-2'-fluorouridine-3'-phosphate
  modified_base 17: mod_base = OTHER; note = 2'-O-methylcytidine-3'-phosphate
  modified_base 18: mod_base = OTHER; note = 2'-O-methyluridine-3'-phosphate
  modified_base 19: mod_base = OTHER; note = 2'-O-methylguanosine-3'-phosphate
  modified_base 20: mod_base = OTHER; note = 2'-O-methyladenosine-3'-phosphate
  modified_base 21: mod_base = OTHER; note = 2'-O-methylguanosine-3'-phosphorothioate
  modified_base 22: mod_base = OTHER; note = 2'-O-methyladenosine-3'-phosphorothioate
  modified_base 23: mod_base = OTHER; note = 2'-O-methyluridine
ttcaacagatatggttctgagat

SEQ ID NO: 12497 - RNA, 23 nt, synthetic construct
  source 1..23: mol_type = other RNA
  modified_base 1: mod_base = OTHER; note = 2'-O-methyluridine-3'-phosphorothioate 5'-(E)-Vinylphosphonate
  modified_base 2: mod_base = OTHER; note = 2'-deoxy-2'-fluoroguanosine-3'-phosphorothioate
  modified_base 3: mod_base = OTHER; note = 2'-O-methyluridine-3'-phosphate
  modified_base 4: mod_base = OTHER; note = 2'-O-methylcytidine-3'-phosphate
  modified_base 5: mod_base = OTHER; note = 2'-O-methyladenosine-3'-phosphate
  modified_base 6: mod_base = OTHER; note = 2'-deoxy-2'-fluoroadenosine-3'-phosphate
  modified_base 7: mod_base = OTHER; note = 2'-O-methylcytidine-3'-phosphate
  modified_base 8: mod_base = OTHER; note = 2'-O-methyladenosine-3'-phosphate
  modified_base 9: mod_base = OTHER; note = 2'-O-methylguanosine-3'-phosphate
  modified_base 10: mod_base = OTHER; note = 2'-O-methyladenosine-3'-phosphate
  modified_base 11: mod_base = OTHER; note = 2'-O-methyluridine-3'-phosphate
  modified_base 12: mod_base = OTHER; note = 2'-O-methyladenosine-3'-phosphate
  modified_base 13: mod_base = OTHER; note = 2'-O-methyluridine-3'-phosphate
  modified_base 14: mod_base = OTHER; note = 2'-deoxy-2'-fluoroguanosine-3'-phosphate
  modified_base 15: mod_base = OTHER; note = 2'-O-methylguanosine-3'-phosphate
  modified_base 16: mod_base = OTHER; note = 2'-deoxy-2'-fluorouridine-3'-phosphate
  modified_base 17: mod_base = OTHER; note = 2'-O-methyluridine-3'-phosphate
  modified_base 18: mod_base = OTHER; note = 2'-O-methylcytidine-3'-phosphate
  modified_base 19: mod_base = OTHER; note = 2'-O-methyluridine-3'-phosphate
  modified_base 20: mod_base = OTHER; note = 2'-O-methylguanosine-3'-phosphate
  modified_base 21: mod_base = OTHER; note = 2'-O-methyladenosine-3'-phosphorothioate
  modified_base 22: mod_base = OTHER; note = 2'-O-methylguanosine-3'-phosphorothioate
  modified_base 23: mod_base = OTHER; note = 2'-O-methyladenosine
tgtcaacagatatggttctgaga

SEQ ID NO: 12498 - RNA, 23 nt, synthetic construct
  source 1..23: mol_type = other RNA
  modified_base 1: mod_base = OTHER; note = 2'-O-methyluridine-3'-phosphorothioate 5'-(E)-Vinylphosphonate
  modified_base 2: mod_base = OTHER; note = 2'-deoxy-2'-fluorouridine-3'-phosphorothioate
  modified_base 3: mod_base = OTHER; note = 2'-O-methylguanosine-3'-phosphate
  modified_base 4: mod_base = OTHER; note = 2'-O-methyluridine-3'-phosphate
  modified_base 5: mod_base = OTHER; note = 2'-O-methylcytidine-3'-phosphate
  modified_base 6: mod_base = OTHER; note = 2'-deoxy-2'-fluoroadenosine-3'-phosphate
  modified_base 7: mod_base = OTHER; note = 2'-O-methyladenosine-3'-phosphate
  modified_base 8: mod_base = OTHER; note = 2'-O-methylcytidine-3'-phosphate
  modified_base 9: mod_base = OTHER; note = 2'-O-methyladenosine-3'-phosphate
  modified_base 10: mod_base = OTHER; note = 2'-O-methylguanosine-3'-phosphate
  modified_base 11: mod_base = OTHER; note = 2'-O-methyladenosine-3'-phosphate
  modified_base 12: mod_base = OTHER; note = 2'-O-methyluridine-3'-phosphate
  modified_base 13: mod_base = OTHER; note = 2'-O-methyladenosine-3'-phosphate
  modified_base 14: mod_base = OTHER; note = 2'-deoxy-2'-fluorouridine-3'-phosphate
  modified_base 15: mod_base = OTHER; note = 2'-O-methylguanosine-3'-phosphate
  modified_base 16: mod_base = OTHER; note = 2'-deoxy-2'-fluoroguanosine-3'-phosphate
  modified_base 17: mod_base = OTHER; note = 2'-O-methyluridine-3'-phosphate
  modified_base 18: mod_base = OTHER; note = 2'-O-methyluridine-3'-phosphate
  modified_base 19: mod_base = OTHER; note = 2'-O-methylcytidine-3'-phosphate
  modified_base 20: mod_base = OTHER; note = 2'-O-methyluridine-3'-phosphate
  modified_base 21: mod_base = OTHER; note = 2'-O-methylguanosine-3'-phosphorothioate
  modified_base 22: mod_base = OTHER; note = 2'-O-methyladenosine-3'-phosphorothioate
  modified_base 23: mod_base = OTHER; note = 2'-O-methylguanosine
ttgtcaacagatatggttctgag

SEQ ID NO: 12499 - RNA, 23 nt, synthetic construct
  source 1..23: mol_type = other RNA
  modified_base 1: mod_base = OTHER; note = 2'-O-methyluridine-3'-phosphorothioate 5'-(E)-Vinylphosphonate
  modified_base 2: mod_base = OTHER; note = 2'-deoxy-2'-fluoroadenosine-3'-phosphorothioate
  modified_base 3: mod_base = OTHER; note = 2'-O-methyluridine-3'-phosphate
  modified_base 4: mod_base = OTHER; note = 2'-O-methylguanosine-3'-phosphate
  modified_base 5: mod_base = OTHER; note = 2'-O-methyluridine-3'-phosphate
  modified_base 6: mod_base = OTHER; note = 2'-deoxy-2'-fluorocytidine-3'-phosphate
  modified_base 7: mod_base = OTHER; note = 2'-O-methyladenosine-3'-phosphate
  modified_base 8: mod_base = OTHER; note = 2'-O-methyladenosine-3'-phosphate
  modified_base 9: mod_base = OTHER; note = 2'-O-methylcytidine-3'-phosphate
  modified_base 10: mod_base = OTHER; note = 2'-O-methyladenosine-3'-phosphate
  modified_base 11: mod_base = OTHER; note = 2'-O-methylguanosine-3'-phosphate
  modified_base 12: mod_base = OTHER; note = 2'-O-methyladenosine-3'-phosphate
  modified_base 13: mod_base = OTHER; note = 2'-O-methyluridine-3'-phosphate
  modified_base 14: mod_base = OTHER; note = 2'-deoxy-2'-fluoroadenosine-3'-phosphate
  modified_base 15: mod_base = OTHER; note = 2'-O-methyluridine-3'-phosphate
  modified_base 16: mod_base = OTHER; note = 2'-deoxy-2'-fluoroguanosine-3'-phosphate
  modified_base 17: mod_base = OTHER; note = 2'-O-methylguanosine-3'-phosphate
  modified_base 18: mod_base = OTHER; note = 2'-O-methyluridine-3'-phosphate
  modified_base 19: mod_base = OTHER; note = 2'-O-methyluridine-3'-phosphate
  modified_base 20: mod_base = OTHER; note = 2'-O-methylcytidine-3'-phosphate
  modified_base 21: mod_base = OTHER; note = 2'-O-methyluridine-3'-phosphorothioate
  modified_base 22: mod_base = OTHER; note = 2'-O-methylguanosine-3'-phosphorothioate
  modified_base 23: mod_base = OTHER; note = 2'-O-methyladenosine
tatgtcaacagatatggttctga

SEQ ID NO: 12500 - RNA, 23 nt, synthetic construct
  source 1..23: mol_type = other RNA
  modified_base 1: mod_base = OTHER; note = 2'-O-methyluridine-3'-phosphorothioate 5'-(E)-Vinylphosphonate
  modified_base 2: mod_base = OTHER; note = 2'-deoxy-2'-fluoroadenosine-3'-phosphorothioate
  modified_base 3: mod_base = OTHER; note = 2'-O-methyladenosine-3'-phosphate
  modified_base 4: mod_base = OTHER; note = 2'-O-methyluridine-3'-phosphate
  modified_base 5: mod_base = OTHER; note = 2'-O-methylguanosine-3'-phosphate
  modified_base 6: mod_base = OTHER; note = 2'-deoxy-2'-fluorouridine-3'-phosphate
  modified_base 7: mod_base = OTHER; note = 2'-O-methylcytidine-3'-phosphate
  modified_base 8: mod_base = OTHER; note = 2'-O-methyladenosine-3'-phosphate
  modified_base 9: mod_base = OTHER; note = 2'-O-methyladenosine-3'-phosphate
  modified_base 10: mod_base = OTHER; note = 2'-O-methylcytidine-3'-phosphate
  modified_base 11: mod_base = OTHER; note = 2'-O-methyladenosine-3'-phosphate
  modified_base 12: mod_base = OTHER; note = 2'-O-methylguanosine-3'-phosphate
  modified_base 13: mod_base = OTHER; note = 2'-O-methyladenosine-3'-phosphate
  modified_base 14: mod_base = OTHER; note = 2'-deoxy-2'-fluorouridine-3'-phosphate
  modified_base 15: mod_base = OTHER; note = 2'-O-methyladenosine-3'-phosphate
  modified_base 16: mod_base = OTHER; note = 2'-deoxy-2'-fluorouridine-3'-phosphate
  modified_base 17: mod_base = OTHER; note = 2'-O-methylguanosine-3'-phosphate
  modified_base 18: mod_base = OTHER; note = 2'-O-methylguanosine-3'-phosphate
  modified_base 19: mod_base = OTHER; note = 2'-O-methyluridine-3'-phosphate
  modified_base 20: mod_base = OTHER; note = 2'-O-methyluridine-3'-phosphate
  modified_base 21: mod_base = OTHER; note = 2'-O-methylcytidine-3'-phosphorothioate
  modified_base 22: mod_base = OTHER; note = 2'-O-methyluridine-3'-phosphorothioate
  modified_base 23: mod_base = OTHER; note = 2'-O-methylguanosine
taatgtcaacagatatggttctg

SEQ ID NO: 12501 - RNA, 23 nt, synthetic construct
  source 1..23: mol_type = other RNA
  modified_base 1: mod_base = OTHER; note = 2'-O-methyluridine-3'-phosphorothioate 5'-(E)-Vinylphosphonate
  modified_base 2: mod_base = OTHER; note = 2'-deoxy-2'-fluoroadenosine-3'-phosphorothioate
  modified_base 3: mod_base = OTHER; note = 2'-O-methyladenosine-3'-phosphate
  modified_base 4: mod_base = OTHER; note = 2'-O-methyladenosine-3'-phosphate
  modified_base 5: mod_base = OTHER; note = 2'-O-methyluridine-3'-phosphate
  modified_base 6: mod_base = OTHER; note = 2'-deoxy-2'-fluoroguanosine-3'-phosphate
  modified_base 7: mod_base = OTHER; note = 2'-O-methyluridine-3'-phosphate
  modified_base 8: mod_base = OTHER; note = 2'-O-methylcytidine-3'-phosphate
  modified_base 9: mod_base = OTHER; note = 2'-O-methyladenosine-3'-phosphate
  modified_base 10: mod_base = OTHER; note = 2'-O-methyladenosine-3'-phosphate
  modified_base 11: mod_base = OTHER; note = 2'-O-methylcytidine-3'-phosphate
  modified_base 12: mod_base = OTHER; note = 2'-O-methyladenosine-3'-phosphate
  modified_base 13: mod_base = OTHER; note = 2'-O-methylguanosine-3'-phosphate
  modified_base 14: mod_base = OTHER; note = 2'-deoxy-2'-fluoroadenosine-3'-phosphate
  modified_base 15: mod_base = OTHER; note = 2'-O-methyluridine-3'-phosphate
  modified_base 16: mod_base = OTHER; note = 2'-deoxy-2'-fluoroadenosine-3'-phosphate
  modified_base 17: mod_base = OTHER; note = 2'-O-methyluridine-3'-phosphate
  modified_base 18: mod_base = OTHER; note = 2'-O-methylguanosine-3'-phosphate
  modified_base 19: mod_base = OTHER; note = 2'-O-methylguanosine-3'-phosphate
  modified_base 20: mod_base = OTHER; note = 2'-O-methyluridine-3'-phosphate
  modified_base 21: mod_base = OTHER; note = 2'-O-methyluridine-3'-phosphorothioate
  modified_base 22: mod_base = OTHER; note = 2'-O-methylcytidine-3'-phosphorothioate
  modified_base 23: mod_base = OTHER; note = 2'-O-methyluridine
taaatgtcaacagatatggttct

SEQ ID NO: 12502 - RNA, 23 nt, synthetic construct
  source 1..23: mol_type = other RNA
  modified_base 1: mod_base = OTHER; note = 2'-O-methyluridine-3'-phosphorothioate 5'-(E)-Vinylphosphonate
  modified_base 2: mod_base = OTHER; note = 2'-deoxy-2'-fluoroadenosine-3'-phosphorothioate
  modified_base 3: mod_base = OTHER; note = 2'-O-methyladenosine-3'-phosphate
  modified_base 4: mod_base = OTHER; note = 2'-O-methyladenosine-3'-phosphate
  modified_base 5: mod_base = OTHER; note = 2'-O-methyladenosine-3'-phosphate
  modified_base 6: mod_base = OTHER; note = 2'-deoxy-2'-fluorouridine-3'-phosphate
  modified_base 7: mod_base = OTHER; note = 2'-O-methylguanosine-3'-phosphate
  modified_base 8: mod_base = OTHER; note = 2'-O-methyluridine-3'-phosphate
  modified_base 9: mod_base = OTHER; note = 2'-O-methylcytidine-3'-phosphate
  modified_base 10: mod_base = OTHER; note = 2'-O-methyladenosine-3'-phosphate
  modified_base 11: mod_base = OTHER; note = 2'-O-methyladenosine-3'-phosphate
  modified_base 12: mod_base = OTHER; note = 2'-O-methylcytidine-3'-phosphate
  modified_base 13: mod_base = OTHER; note = 2'-O-methyladenosine-3'-phosphate
  modified_base 14: mod_base = OTHER; note = 2'-deoxy-2'-fluoroguanosine-3'-phosphate
  modified_base 15: mod_base = OTHER; note = 2'-O-methyladenosine-3'-phosphate
  modified_base 16: mod_base = OTHER; note = 2'-deoxy-2'-fluorouridine-3'-phosphate
  modified_base 17: mod_base = OTHER; note = 2'-O-methyladenosine-3'-phosphate
  modified_base 18: mod_base = OTHER; note = 2'-O-methyluridine-3'-phosphate
  modified_base 19: mod_base = OTHER; note = 2'-O-methylguanosine-3'-phosphate
  modified_base 20: mod_base = OTHER; note = 2'-O-methylguanosine-3'-phosphate
  modified_base 21: mod_base = OTHER; note = 2'-O-methyluridine-3'-phosphorothioate
  modified_base 22: mod_base = OTHER; note = 2'-O-methyluridine-3'-phosphorothioate
  modified_base 23: mod_base = OTHER; note = 2'-O-methylcytidine
taaaatgtcaacagatatggttc

SEQ ID NO: 12503 - RNA, 23 nt, synthetic construct
  source 1..23: mol_type = other RNA
  modified_base 1: mod_base = OTHER; note = 2'-O-methyluridine-3'-phosphorothioate 5'-(E)-Vinylphosphonate
  modified_base 2: mod_base = OTHER; note = 2'-deoxy-2'-fluoroadenosine-3'-phosphorothioate
  modified_base 3: mod_base = OTHER; note = 2'-O-methyladenosine-3'-phosphate
  modified_base 4: mod_base = OTHER; note = 2'-O-methyladenosine-3'-phosphate
  modified_base 5: mod_base = OTHER; note = 2'-O-methyladenosine-3'-phosphate
  modified_base 6: mod_base = OTHER; note = 2'-deoxy-2'-fluoroadenosine-3'-phosphate
  modified_base 7: mod_base = OTHER; note = 2'-O-methyluridine-3'-phosphate
  modified_base 8: mod_base = OTHER; note = 2'-O-methylguanosine-3'-phosphate
  modified_base 9: mod_base = OTHER; note = 2'-O-methyluridine-3'-phosphate
  modified_base 10: mod_base = OTHER; note = 2'-O-methylcytidine-3'-phosphate
  modified_base 11: mod_base = OTHER; note = 2'-O-methyladenosine-3'-phosphate
  modified_base 12: mod_base = OTHER; note = 2'-O-methyladenosine-3'-phosphate
  modified_base 13: mod_base = OTHER; note = 2'-O-methylcytidine-3'-phosphate
  modified_base 14: mod_base = OTHER; note = 2'-deoxy-2'-fluoroadenosine-3'-phosphate
  modified_base 15: mod_base = OTHER; note = 2'-O-methylguanosine-3'-phosphate
  modified_base 16: mod_base = OTHER; note = 2'-deoxy-2'-fluoroadenosine-3'-phosphate
  modified_base 17: mod_base = OTHER; note = 2'-O-methyluridine-3'-phosphate
  modified_base 18: mod_base = OTHER; note = 2'-O-methyladenosine-3'-phosphate
  modified_base 19: mod_base = OTHER; note = 2'-O-methyluridine-3'-phosphate
  modified_base 20: mod_base = OTHER; note = 2'-O-methylguanosine-3'-phosphate
  modified_base 21: mod_base = OTHER; note = 2'-O-methylguanosine-3'-phosphorothioate
  modified_base 22: mod_base = OTHER; note = 2'-O-methyluridine-3'-phosphorothioate
  modified_base 23: mod_base = OTHER; note = 2'-O-methyluridine
taaaaatgtcaacagatatggtt

SEQ ID NO: 12504 - RNA, 23 nt, synthetic construct
  source 1..23: mol_type = other RNA
  modified_base 1: mod_base = OTHER; note = 2'-O-methyluridine-3'-phosphorothioate 5'-(E)-Vinylphosphonate
  modified_base 2: mod_base = OTHER; note = 2'-deoxy-2'-fluoroadenosine-3'-phosphorothioate
  modified_base 3: mod_base = OTHER; note = 2'-O-methyladenosine-3'-phosphate
  modified_base 4: mod_base = OTHER; note = 2'-O-methyladenosine-3'-phosphate
  modified_base 5: mod_base = OTHER; note = 2'-O-methyladenosine-3'-phosphate
  modified_base 6: mod_base = OTHER; note = 2'-deoxy-2'-fluoroadenosine-3'-phosphate
  modified_base 7: mod_base = OTHER; note = 2'-O-methyladenosine-3'-phosphate
  modified_base 8: mod_base = OTHER; note = 2'-O-methyluridine-3'-phosphate
  modified_base 9: mod_base = OTHER; note = 2'-O-methylguanosine-3'-phosphate
  modified_base 10: mod_base = OTHER; note = 2'-O-methyluridine-3'-phosphate
  modified_base 11: mod_base = OTHER; note = 2'-O-methylcytidine-3'-phosphate
  modified_base 12: mod_base = OTHER; note = 2'-O-methyladenosine-3'-phosphate
  modified_base 13: mod_base = OTHER; note = 2'-O-methyladenosine-3'-phosphate
  modified_base 14: mod_base = OTHER; note = 2'-deoxy-2'-fluorocytidine-3'-phosphate
  modified_base 15: mod_base = OTHER; note = 2'-O-methyladenosine-3'-phosphate
  modified_base 16: mod_base = OTHER; note = 2'-deoxy-2'-fluoroguanosine-3'-phosphate
  modified_base 17: mod_base = OTHER; note = 2'-O-methyladenosine-3'-phosphate
  modified_base 18: mod_base = OTHER; note = 2'-O-methyluridine-3'-phosphate
  modified_base 19: mod_base = OTHER; note = 2'-O-methyladenosine-3'-phosphate
  modified_base 20: mod_base = OTHER; note = 2'-O-methyluridine-3'-phosphate
  modified_base 21: mod_base = OTHER; note = 2'-O-methylguanosine-3'-phosphorothioate
  modified_base 22: mod_base = OTHER; note = 2'-O-methylguanosine-3'-phosphorothioate
  modified_base 23: mod_base = OTHER; note = 2'-O-methyluridine
taaaaaatgtcaacagatatggt

SEQ ID NO: 12505 - RNA, 23 nt, synthetic construct
  source 1..23: mol_type = other RNA
  modified_base 1: mod_base = OTHER; note = 2'-O-methyluridine-3'-phosphorothioate 5'-(E)-Vinylphosphonate
  modified_base 2: mod_base = OTHER; note = 2'-deoxy-2'-fluoroguanosine-3'-phosphorothioate
  modified_base 3: mod_base = OTHER; note = 2'-O-methyladenosine-3'-phosphate
  modified_base 4: mod_base = OTHER; note = 2'-O-methyladenosine-3'-phosphate
  modified_base 5: mod_base = OTHER; note = 2'-O-methyladenosine-3'-phosphate
  modified_base 6: mod_base = OTHER; note = 2'-deoxy-2'-fluoroadenosine-3'-phosphate
  modified_base 7: mod_base = OTHER; note = 2'-O-methyladenosine-3'-phosphate
  modified_base 8: mod_base = OTHER; note = 2'-O-methyladenosine-3'-phosphate
  modified_base 9: mod_base = OTHER; note = 2'-O-methyluridine-3'-phosphate
  modified_base 10: mod_base = OTHER; note = 2'-O-methylguanosine-3'-phosphate
  modified_base 11: mod_base = OTHER; note = 2'-O-methyluridine-3'-phosphate
  modified_base 12: mod_base = OTHER; note = 2'-O-methylcytidine-3'-phosphate
  modified_base 13: mod_base = OTHER; note = 2'-O-methyladenosine-3'-phosphate
  modified_base 14: mod_base = OTHER; note = 2'-deoxy-2'-fluoroadenosine-3'-phosphate
  modified_base 15: mod_base = OTHER; note = 2'-O-methylcytidine-3'-phosphate
  modified_base 16: mod_base = OTHER; note = 2'-deoxy-2'-fluoroadenosine-3'-phosphate
  modified_base 17: mod_base = OTHER; note = 2'-O-methylguanosine-3'-phosphate
  modified_base 18: mod_base = OTHER; note = 2'-O-methyladenosine-3'-phosphate
  modified_base 19: mod_base = OTHER; note = 2'-O-methyluridine-3'-phosphate
  modified_base 20: mod_base = OTHER; note = 2'-O-methyladenosine-3'-phosphate
  modified_base 21: mod_base = OTHER; note = 2'-O-methyluridine-3'-phosphorothioate
  modified_base 22: mod_base = OTHER; note = 2'-O-methylguanosine-3'-phosphorothioate
  modified_base 23: mod_base = OTHER; note = 2'-O-methylguanosine
tgaaaaaatgtcaacagatatgg

SEQ ID NO: 12506 - RNA, 23 nt, synthetic construct
  source 1..23: mol_type = other RNA
  modified_base 1: mod_base = OTHER; note = 2'-O-methyluridine-3'-phosphorothioate 5'-(E)-Vinylphosphonate
  modified_base 2: mod_base = OTHER; note = 2'-deoxy-2'-fluoroadenosine-3'-phosphorothioate
  modified_base 3: mod_base = OTHER; note = 2'-O-methylguanosine-3'-phosphate
  modified_base 4: mod_base = OTHER; note = 2'-O-methyladenosine-3'-phosphate
  modified_base 5: mod_base = OTHER; note = 2'-O-methyladenosine-3'-phosphate
  modified_base 6: mod_base = OTHER; note = 2'-deoxy-2'-fluoroadenosine-3'-phosphate
  modified_base 7: mod_base = OTHER; note = 2'-O-methyladenosine-3'-phosphate
  modified_base 8: mod_base = OTHER; note = 2'-O-methyladenosine-3'-phosphate
  modified_base 9: mod_base = OTHER; note = 2'-O-methyladenosine-3'-phosphate
  modified_base 10: mod_base = OTHER; note = 2'-O-methyluridine-3'-phosphate
  modified_base 11: mod_base = OTHER; note = 2'-O-methylguanosine-3'-phosphate
  modified_base 12: mod_base = OTHER; note = 2'-O-methyluridine-3'-phosphate
  modified_base 13: mod_base = OTHER; note = 2'-O-methylcytidine-3'-phosphate
  modified_base 14: mod_base = OTHER; note = 2'-deoxy-2'-fluoroadenosine-3'-phosphate
  modified_base 15: mod_base = OTHER; note = 2'-O-methyladenosine-3'-phosphate
  modified_base 16: mod_base = OTHER; note = 2'-deoxy-2'-fluorocytidine-3'-phosphate
  modified_base 17: mod_base = OTHER; note = 2'-O-methyladenosine-3'-phosphate
  modified_base 18: mod_base = OTHER; note = 2'-O-methylguanosine-3'-phosphate
  modified_base 19: mod_base = OTHER; note = 2'-O-methyladenosine-3'-phosphate
  modified_base 20: mod_base = OTHER; note = 2'-O-methyluridine-3'-phosphate
  modified_base 21: mod_base = OTHER; note = 2'-O-methyladenosine-3'-phosphorothioate
  modified_base 22: mod_base = OTHER; note = 2'-O-methyluridine-3'-phosphorothioate
  modified_base 23: mod_base = OTHER; note = 2'-O-methylguanosine
tagaaaaaatgtcaacagatatg

SEQ ID NO: 12507 - RNA, 23 nt, synthetic construct
  source 1..23: mol_type = other RNA
  modified_base 1: mod_base = OTHER; note = 2'-O-methyluridine-3'-phosphorothioate 5'-(E)-Vinylphosphonate
  modified_base 2: mod_base = OTHER; note = 2'-deoxy-2'-fluoroguanosine-3'-phosphorothioate
  modified_base 3: mod_base = OTHER; note = 2'-O-methyladenosine-3'-phosphate
  modified_base 4: mod_base = OTHER; note = 2'-O-methylguanosine-3'-phosphate
  modified_base 5: mod_base = OTHER; note = 2'-O-methyladenosine-3'-phosphate
  modified_base 6: mod_base = OTHER; note = 2'-deoxy-2'-fluoroadenosine-3'-phosphate
  modified_base 7: mod_base = OTHER; note = 2'-O-methyladenosine-3'-phosphate
  modified_base 8: mod_base = OTHER; note = 2'-O-methyladenosine-3'-phosphate
  modified_base 9: mod_base = OTHER; note = 2'-O-methyladenosine-3'-phosphate
  modified_base 10: mod_base = OTHER; note = 2'-O-methyladenosine-3'-phosphate
  modified_base 11: mod_base = OTHER; note = 2'-O-methyluridine-3'-phosphate
  modified_base 12: mod_base = OTHER; note = 2'-O-methylguanosine-3'-phosphate
  modified_base 13: mod_base = OTHER; note = 2'-O-methyluridine-3'-phosphate
  modified_base 14: mod_base = OTHER; note = 2'-deoxy-2'-fluorocytidine-3'-phosphate
  modified_base 15: mod_base = OTHER; note = 2'-O-methyladenosine-3'-phosphate
  modified_base 16: mod_base = OTHER; note = 2'-deoxy-2'-fluoroadenosine-3'-phosphate
  modified_base 17: mod_base = OTHER; note = 2'-O-methylcytidine-3'-phosphate
  modified_base 18: mod_base = OTHER; note = 2'-O-methyladenosine-3'-phosphate
  modified_base 19: mod_base = OTHER; note = 2'-O-methylguanosine-3'-phosphate
  modified_base 20: mod_base = OTHER; note = 2'-O-methyladenosine-3'-phosphate
  modified_base 21: mod_base = OTHER; note = 2'-O-methyluridine-3'-phosphorothioate
  modified_base 22: mod_base = OTHER; note = 2'-O-methyladenosine-3'-phosphorothioate
  modified_base 23: mod_base = OTHER; note = 2'-O-methyluridine
tgagaaaaaatgtcaacagatat

SEQ ID NO: 12508 - RNA, 23 nt, synthetic construct
  source 1..23: mol_type = other RNA
  modified_base 1: mod_base = OTHER; note = 2'-O-methyluridine-3'-phosphorothioate 5'-(E)-Vinylphosphonate
  modified_base 2: mod_base = OTHER; note = 2'-deoxy-2'-fluorouridine-3'-phosphorothioate
  modified_base 3: mod_base = OTHER; note = 2'-O-methylguanosine-3'-phosphate
  modified_base 4: mod_base = OTHER; note = 2'-O-methyladenosine-3'-phosphate
  modified_base 5: mod_base = OTHER; note = 2'-O-methylguanosine-3'-phosphate
  modified_base 6: mod_base = OTHER; note = 2'-deoxy-2'-fluoroadenosine-3'-phosphate
  modified_base 7: mod_base = OTHER; note = 2'-O-methyladenosine-3'-phosphate
  modified_base 8: mod_base = OTHER; note = 2'-O-methyladenosine-3'-phosphate
  modified_base 9: mod_base = OTHER; note = 2'-O-methyladenosine-3'-phosphate
  modified_base 10: mod_base = OTHER; note = 2'-O-methyladenosine-3'-phosphate
  modified_base 11: mod_base = OTHER; note = 2'-O-methyladenosine-3'-phosphate
  modified_base 12: mod_base = OTHER; note = 2'-O-methyluridine-3'-phosphate
  modified_base 13: mod_base = OTHER; note = 2'-O-methylguanosine-3'-phosphate
  modified_base 14: mod_base = OTHER; note = 2'-deoxy-2'-fluorouridine-3'-phosphate
  modified_base 15: mod_base = OTHER; note = 2'-O-methylcytidine-3'-phosphate
  modified_base 16: mod_base = OTHER; note = 2'-deoxy-2'-fluoroadenosine-3'-phosphate
  modified_base 17: mod_base = OTHER; note = 2'-O-methyladenosine-3'-phosphate
  modified_base 18: mod_base = OTHER; note = 2'-O-methylcytidine-3'-phosphate
  modified_base 19: mod_base = OTHER; note = 2'-O-methyladenosine-3'-phosphate
  modified_base 20: mod_base = OTHER; note = 2'-O-methylguanosine-3'-phosphate
  modified_base 21: mod_base = OTHER; note = 2'-O-methyladenosine-3'-phosphorothioate
  modified_base 22: mod_base = OTHER; note = 2'-O-methyluridine-3'-phosphorothioate
  modified_base 23: mod_base = OTHER; note = 2'-O-methyladenosine
ttgagaaaaaatgtcaacagata

SEQ ID NO: 12509 - RNA, 23 nt, synthetic construct
  source 1..23: mol_type = other RNA
  modified_base 1: mod_base = OTHER; note = 2'-O-methyluridine-3'-phosphorothioate 5'-(E)-Vinylphosphonate
  modified_base 2: mod_base = OTHER; note = 2'-deoxy-2'-fluoroadenosine-3'-phosphorothioate
  modified_base 3: mod_base = OTHER; note = 2'-O-methyluridine-3'-phosphate
  modified_base 4: mod_base = OTHER; note = 2'-O-methylguanosine-3'-phosphate
  modified_base 5: mod_base = OTHER; note = 2'-O-methyladenosine-3'-phosphate
  modified_base 6: mod_base = OTHER; note = 2'-deoxy-2'-fluoroguanosine-3'-phosphate
  modified_base 7: mod_base = OTHER; note = 2'-O-methyladenosine-3'-phosphate
  modified_base 8: mod_base = OTHER; note = 2'-O-methyladenosine-3'-phosphate
  modified_base 9: mod_base = OTHER; note = 2'-O-methyladenosine-3'-phosphate
  modified_base 10: mod_base = OTHER; note = 2'-O-methyladenosine-3'-phosphate
  modified_base 11: mod_base = OTHER; note = 2'-O-methyladenosine-3'-phosphate
  modified_base 12: mod_base = OTHER; note = 2'-O-methyladenosine-3'-phosphate
  modified_base 13: mod_base = OTHER; note = 2'-O-methyluridine-3'-phosphate
  modified_base 14: mod_base = OTHER; note = 2'-deoxy-2'-fluoroguanosine-3'-phosphate
  modified_base 15: mod_base = OTHER; note = 2'-O-methyluridine-3'-phosphate
  modified_base 16: mod_base = OTHER; note = 2'-deoxy-2'-fluorocytidine-3'-phosphate
  modified_base 17: mod_base = OTHER; note = 2'-O-methyladenosine-3'-phosphate
  modified_base 18: mod_base = OTHER; note = 2'-O-methyladenosine-3'-phosphate
  modified_base 19: mod_base = OTHER; note = 2'-O-methylcytidine-3'-phosphate
  modified_base 20: mod_base = OTHER; note = 2'-O-methyladenosine-3'-phosphate
  modified_base 21: mod_base = OTHER; note = 2'-O-methylguanosine-3'-phosphorothioate
  modified_base 22: mod_base = OTHER; note = 2'-O-methyladenosine-3'-phosphorothioate
  modified_base 23: mod_base = OTHER; note = 2'-O-methyluridine
tatgagaaaaaatgtcaacagat

SEQ ID NO: 12510 - RNA, 23 nt, synthetic construct
  source 1..23: mol_type = other RNA
  modified_base 1: mod_base = OTHER; note = 2'-O-methyluridine-3'-phosphorothioate 5'-(E)-Vinylphosphonate
  modified_base 2: mod_base = OTHER; note = 2'-deoxy-2'-fluorouridine-3'-phosphorothioate
  modified_base 3: mod_base = OTHER; note = 2'-O-methyladenosine-3'-phosphate
  modified_base 4: mod_base = OTHER; note = 2'-O-methyluridine-3'-phosphate
  modified_base 5: mod_base = OTHER; note = 2'-O-methylguanosine-3'-phosphate
  modified_base 6: mod_base = OTHER; note = 2'-deoxy-2'-fluoroadenosine-3'-phosphate
  modified_base 7: mod_base = OTHER; note = 2'-O-methylguanosine-3'-phosphate
  modified_base 8: mod_base = OTHER; note = 2'-O-methyladenosine-3'-phosphate
  modified_base 9: mod_base = OTHER; note = 2'-O-methyladenosine-3'-phosphate
  modified_base 10: mod_base = OTHER; note = 2'-O-methyladenosine-3'-phosphate
  modified_base 11: mod_base = OTHER; note = 2'-O-methyladenosine-3'-phosphate
  modified_base 12: mod_base = OTHER; note = 2'-O-methyladenosine-3'-phosphate
  modified_base 13: mod_base = OTHER; note = 2'-O-methyladenosine-3'-phosphate
  modified_base 14: mod_base = OTHER; note = 2'-deoxy-2'-fluorouridine-3'-phosphate
  modified_base 15: mod_base = OTHER; note = 2'-O-methylguanosine-3'-phosphate
  modified_base 16: mod_base = OTHER; note = 2'-deoxy-2'-fluorouridine-3'-phosphate
  modified_base 17: mod_base = OTHER; note = 2'-O-methylcytidine-3'-phosphate
  modified_base 18: mod_base = OTHER; note = 2'-O-methyladenosine-3'-phosphate
  modified_base 19: mod_base = OTHER; note = 2'-O-methyladenosine-3'-phosphate
  modified_base 20: mod_base = OTHER; note = 2'-O-methylcytidine-3'-phosphate
  modified_base 21: mod_base = OTHER; note = 2'-O-methyladenosine-3'-phosphorothioate
  modified_base 22: mod_base = OTHER; note = 2'-O-methylguanosine-3'-phosphorothioate
  modified_base 23: mod_base = OTHER; note = 2'-O-methyladenosine
ttatgagaaaaaatgtcaacaga

SEQ ID NO: 12511 - RNA, 23 nt, synthetic construct
  source 1..23: mol_type = other RNA
  modified_base 1: mod_base = OTHER; note = 2'-O-methyluridine-3'-phosphorothioate 5'-(E)-Vinylphosphonate
  modified_base 2: mod_base = OTHER; note = 2'-deoxy-2'-fluorocytidine-3'-phosphorothioate
  modified_base 3: mod_base = OTHER; note = 2'-O-methyluridine-3'-phosphate
  modified_base 4: mod_base = OTHER; note = 2'-O-methyladenosine-3'-phosphate
  modified_base 5: mod_base = OTHER; note = 2'-O-methyluridine-3'-phosphate
  modified_base 6: mod_base = OTHER; note = 2'-deoxy-2'-fluoroguanosine-3'-phosphate
  modified_base 7: mod_base = OTHER; note = 2'-O-methyladenosine-3'-phosphate
  modified_base 8: mod_base = OTHER; note = 2'-O-methylguanosine-3'-phosphate
  modified_base 9: mod_base = OTHER; note = 2'-O-methyladenosine-3'-phosphate
  modified_base 10: mod_base = OTHER; note = 2'-O-methyladenosine-3'-phosphate
  modified_base 11: mod_base = OTHER; note = 2'-O-methyladenosine-3'-phosphate
  modified_base 12: mod_base = OTHER; note = 2'-O-methyladenosine-3'-phosphate
  modified_base 13: mod_base = OTHER; note = 2'-O-methyladenosine-3'-phosphate
  modified_base 14: mod_base = OTHER; note = 2'-deoxy-2'-fluoroadenosine-3'-phosphate
  modified_base 15: mod_base = OTHER; note = 2'-O-methyluridine-3'-phosphate
  modified_base 16: mod_base = OTHER; note = 2'-deoxy-2'-fluoroguanosine-3'-phosphate
  modified_base 17: mod_base = OTHER; note = 2'-O-methyluridine-3'-phosphate
  modified_base 18: mod_base = OTHER; note = 2'-O-methylcytidine-3'-phosphate
  modified_base 19: mod_base = OTHER; note = 2'-O-methyladenosine-3'-phosphate
  modified_base 20: mod_base = OTHER; note = 2'-O-methyladenosine-3'-phosphate
  modified_base 21: mod_base = OTHER; note = 2'-O-methylcytidine-3'-phosphorothioate
  modified_base 22: mod_base = OTHER; note = 2'-O-methyladenosine-3'-phosphorothioate
  modified_base 23: mod_base = OTHER; note = 2'-O-methylguanosine
tctatgagaaaaaatgtcaacag

SEQ ID NO: 12512 - RNA, 23 nt, synthetic construct
  source 1..23: mol_type = other RNA
  modified_base 1: mod_base = OTHER; note = 2'-O-methyluridine-3'-phosphorothioate 5'-(E)-Vinylphosphonate
  modified_base 2: mod_base = OTHER; note = 2'-deoxy-2'-fluorouridine-3'-phosphorothioate
  modified_base 3: mod_base = OTHER; note = 2'-O-methylcytidine-3'-phosphate
  modified_base 4: mod_base = OTHER; note = 2'-O-methyluridine-3'-phosphate
  modified_base 5: mod_base = OTHER; note = 2'-O-methyladenosine-3'-phosphate
  modified_base 6: mod_base = OTHER; note = 2'-deoxy-2'-fluorouridine-3'-phosphate
  modified_base 7: mod_base = OTHER; note = 2'-O-methylguanosine-3'-phosphate
  modified_base 8: mod_base = OTHER; note = 2'-O-methyladenosine-3'-phosphate
  modified_base 9: mod_base = OTHER; note = 2'-O-methylguanosine-3'-phosphate
  modified_base 10: mod_base = OTHER; note = 2'-O-methyladenosine-3'-phosphate
  modified_base 11: mod_base = OTHER; note = 2'-O-methyladenosine-3'-phosphate
  modified_base 12: mod_base = OTHER; note = 2'-O-methyladenosine-3'-phosphate
  modified_base 13: mod_base = OTHER; note = 2'-O-methyladenosine-3'-phosphate
  modified_base 14: mod_base = OTHER; note = 2'-deoxy-2'-fluoroadenosine-3'-phosphate
  modified_base 15: mod_base = OTHER; note = 2'-O-methyladenosine-3'-phosphate
  modified_base 16: mod_base = OTHER; note = 2'-deoxy-2'-fluorouridine-3'-phosphate
  modified_base 17: mod_base = OTHER; note = 2'-O-methylguanosine-3'-phosphate
  modified_base 18: mod_base = OTHER; note = 2'-O-methyluridine-3'-phosphate
  modified_base 19: mod_base = OTHER; note = 2'-O-methylcytidine-3'-phosphate
  modified_base 20: mod_base = OTHER; note = 2'-O-methyladenosine-3'-phosphate
  modified_base 21: mod_base = OTHER; note = 2'-O-methyladenosine-3'-phosphorothioate
  modified_base 22: mod_base = OTHER; note = 2'-O-methylcytidine-3'-phosphorothioate
  modified_base 23: mod_base = OTHER; note = 2'-O-methyladenosine
ttctatgagaaaaaatgtcaaca

SEQ ID NO: 12513 - RNA, 23 nt, synthetic construct
  source 1..23: mol_type = other RNA
  modified_base 1: mod_base = OTHER; note = 2'-O-methyluridine-3'-phosphorothioate 5'-(E)-Vinylphosphonate
  modified_base 2: mod_base = OTHER; note = 2'-deoxy-2'-fluoroadenosine-3'-phosphorothioate
  modified_base 3: mod_base = OTHER; note = 2'-O-methylcytidine-3'-phosphate
  modified_base 4: mod_base = OTHER; note = 2'-O-methylcytidine-3'-phosphate
  modified_base 5: mod_base = OTHER; note = 2'-O-methyladenosine-3'-phosphate
  modified_base 6: mod_base = OTHER; note = 2'-deoxy-2'-fluorouridine-3'-phosphate
  modified_base 7: mod_base = OTHER; note = 2'-O-methylguanosine-3'-phosphate
  modified_base 8: mod_base = OTHER; note = 2'-O-methyladenosine-3'-phosphate
  modified_base 9: mod_base = OTHER; note = 2'-O-methyluridine-3'-phosphate
  modified_base 10: mod_base = OTHER; note = 2'-O-methyladenosine-3'-phosphate
  modified_base 11: mod_base = OTHER; note = 2'-O-methyluridine-3'-phosphate
  modified_base 12: mod_base = OTHER; note = 2'-O-methyluridine-3'-phosphate
  modified_base 13: mod_base = OTHER; note = 2'-O-methyluridine-3'-phosphate
  modified_base 14: mod_base = OTHER; note = 2'-deoxy-2'-fluorocytidine-3'-phosphate
  modified_base 15: mod_base = OTHER; note = 2'-O-methyluridine-3'-phosphate
  modified_base 16: mod_base = OTHER; note = 2'-deoxy-2'-fluoroadenosine-3'-phosphate
  modified_base 17: mod_base = OTHER; note = 2'-O-methyluridine-3'-phosphate
  modified_base 18: mod_base = OTHER; note = 2'-O-methylguanosine-3'-phosphate
  modified_base 19: mod_base = OTHER; note = 2'-O-methyladenosine-3'-phosphate
  modified_base 20: mod_base = OTHER; note = 2'-O-methylguanosine-3'-phosphate
  modified_base 21: mod_base = OTHER; note = 2'-O-methyladenosine-3'-phosphorothioate
  modified_base 22: mod_base = OTHER; note = 2'-O-methyladenosine-3'-phosphorothioate
  modified_base 23: mod_base = OTHER; note = 2'-O-methyladenosine
taccatgatatttctatgagaaa

SEQ ID NO: 12514 - RNA, 23 nt, synthetic construct
  source 1..23: mol_type = other RNA
  modified_base 1: mod_base = OTHER; note = 2'-O-methyluridine-3'-phosphorothioate 5'-(E)-Vinylphosphonate
  modified_base 2: mod_base = OTHER; note = 2'-deoxy-2'-fluoroadenosine-3'-phosphorothioate
  modified_base 3: mod_base = OTHER; note = 2'-O-methyladenosine-3'-phosphate
  modified_base 4: mod_base = OTHER; note = 2'-O-methylcytidine-3'-phosphate
  modified_base 5: mod_base = OTHER; note = 2'-O-methylcytidine-3'-phosphate
  modified_base 6: mod_base = OTHER; note = 2'-deoxy-2'-fluoroadenosine-3'-phosphate
  modified_base 7: mod_base = OTHER; note = 2'-O-methyluridine-3'-phosphate
  modified_base 8: mod_base = OTHER; note = 2'-O-methylguanosine-3'-phosphate
  modified_base 9: mod_base = OTHER; note = 2'-O-methyladenosine-3'-phosphate
  modified_base 10: mod_base = OTHER; note = 2'-O-methyluridine-3'-phosphate
  modified_base 11: mod_base = OTHER; note = 2'-O-methyladenosine-3'-phosphate
  modified_base 12: mod_base = OTHER; note = 2'-O-methyluridine-3'-phosphate
  modified_base 13: mod_base = OTHER; note = 2'-O-methyluridine-3'-phosphate
  modified_base 14: mod_base = OTHER; note = 2'-deoxy-2'-fluorouridine-3'-phosphate
  modified_base 15: mod_base = OTHER; note = 2'-O-methylcytidine-3'-phosphate
  modified_base 16: mod_base = OTHER; note = 2'-deoxy-2'-fluorouridine-3'-phosphate
  modified_base 17: mod_base = OTHER; note = 2'-O-methyladenosine-3'-phosphate
  modified_base 18: mod_base = OTHER; note = 2'-O-methyluridine-3'-phosphate
  modified_base 19: mod_base = OTHER; note = 2'-O-methylguanosine-3'-phosphate
  modified_base 20: mod_base = OTHER; note = 2'-O-methyladenosine-3'-phosphate
  modified_base 21: mod_base = OTHER; note = 2'-O-methylguanosine-3'-phosphorothioate
  modified_base 22: mod_base = OTHER; note = 2'-O-methyladenosine-3'-phosphorothioate
  modified_base 23: mod_base = OTHER; note = 2'-O-methyladenosine
taaccatgatatttctatgagaa

SEQ ID NO: 12515 - RNA, 23 nt, synthetic construct
  source 1..23: mol_type = other RNA
  modified_base 1: mod_base = OTHER; note = 2'-O-methyluridine-3'-phosphorothioate 5'-(E)-Vinylphosphonate
  modified_base 2: mod_base = OTHER; note = 2'-deoxy-2'-fluorouridine-3'-phosphorothioate
  modified_base 3: mod_base = OTHER; note = 2'-O-methyladenosine-3'-phosphate
  modified_base 4: mod_base = OTHER; note = 2'-O-methyladenosine-3'-phosphate
  modified_base 5: mod_base = OTHER; note = 2'-O-methylcytidine-3'-phosphate
  modified_base 6: mod_base = OTHER; note = 2'-deoxy-2'-fluorocytidine-3'-phosphate
  modified_base 7: mod_base = OTHER; note = 2'-O-methyladenosine-3'-phosphate
  modified_base 8: mod_base = OTHER; note = 2'-O-methyluridine-3'-phosphate
  modified_base 9: mod_base = OTHER; note = 2'-O-methylguanosine-3'-phosphate
  modified_base 10: mod_base = OTHER; note = 2'-O-methyladenosine-3'-phosphate
  modified_base 11: mod_base = OTHER; note = 2'-O-methyluridine-3'-phosphate
  modified_base 12: mod_base = OTHER; note = 2'-O-methyladenosine-3'-phosphate
  modified_base 13: mod_base = OTHER; note = 2'-O-methyluridine-3'-phosphate
  modified_base 14: mod_base = OTHER; note = 2'-deoxy-2'-fluorouridine-3'-phosphate
  modified_base 15: mod_base = OTHER; note = 2'-O-methyluridine-3'-phosphate
  modified_base 16: mod_base = OTHER; note = 2'-deoxy-2'-fluorocytidine-3'-phosphate
  modified_base 17: mod_base = OTHER; note = 2'-O-methyluridine-3'-phosphate
  modified_base 18: mod_base = OTHER; note = 2'-O-methyladenosine-3'-phosphate
  modified_base 19: mod_base = OTHER; note = 2'-O-methyluridine-3'-phosphate
  modified_base 20: mod_base = OTHER; note = 2'-O-methylguanosine-3'-phosphate
  modified_base 21: mod_base = OTHER; note = 2'-O-methyladenosine-3'-phosphorothioate
  modified_base 22: mod_base = OTHER; note = 2'-O-methylguanosine-3'-phosphorothioate
  modified_base 23: mod_base = OTHER; note = 2'-O-methyladenosine
ttaaccatgatatttctatgaga

SEQ ID NO: 12516 - RNA, 23 nt, synthetic construct
  source 1..23: mol_type = other RNA
  modified_base 1: mod_base = OTHER; note = 2'-O-methyluridine-3'-phosphorothioate 5'-(E)-Vinylphosphonate
  modified_base 2: mod_base = OTHER; note = 2'-deoxy-2'-fluorouridine-3'-phosphorothioate
  modified_base 3: mod_base = OTHER; note = 2'-O-methyluridine-3'-phosphate
  modified_base 4: mod_base = OTHER; note = 2'-O-methyladenosine-3'-phosphate
  modified_base 5: mod_base = OTHER; note = 2'-O-methyladenosine-3'-phosphate
  modified_base 6: mod_base = OTHER; note = 2'-deoxy-2'-fluorouridine-3'-phosphate
  modified_base 7: mod_base = OTHER; note = 2'-O-methylguanosine-3'-phosphate
  modified_base 8: mod_base = OTHER; note = 2'-O-methylcytidine-3'-phosphate
  modified_base 9: mod_base = OTHER; note = 2'-O-methyluridine-3'-phosphate
  modified_base 10: mod_base = OTHER; note = 2'-O-methylcytidine-3'-phosphate
  modified_base 11: mod_base = OTHER; note = 2'-O-methyladenosine-3'-phosphate
  modified_base 12: mod_base = OTHER; note = 2'-O-methyluridine-3'-phosphate
  modified_base 13: mod_base = OTHER; note = 2'-O-methyluridine-3'-phosphate
  modified_base 14: mod_base = OTHER; note = 2'-deoxy-2'-fluoroadenosine-3'-phosphate
  modified_base 15: mod_base = OTHER; note = 2'-O-methyladenosine-3'-phosphate
  modified_base 16: mod_base = OTHER; note = 2'-deoxy-2'-fluorocytidine-3'-phosphate
  modified_base 17: mod_base = OTHER; note = 2'-O-methyladenosine-3'-phosphate
  modified_base 18: mod_base = OTHER; note = 2'-O-methyladenosine-3'-phosphate
  modified_base 19: mod_base = OTHER; note = 2'-O-methyladenosine-3'-phosphate
  modified_base 20: mod_base = OTHER; note = 2'-O-methyluridine-3'-phosphate
  modified_base 21: mod_base = OTHER; note = 2'-O-methylguanosine-3'-phosphorothioate
  modified_base 22: mod_base = OTHER; note = 2'-O-methylguanosine-3'-phosphorothioate
  modified_base 23: mod_base = OTHER; note = 2'-O-methylguanosine
tttaatgctcattaacaaatggg

SEQ ID NO: 12517 - RNA, 23 nt, synthetic construct
  source 1..23: mol_type = other RNA
  modified_base 1: mod_base = OTHER; note = 2'-O-methyluridine-3'-phosphorothioate 5'-(E)-Vinylphosphonate
  modified_base 2: mod_base = OTHER; note = 2'-deoxy-2'-fluorocytidine-3'-phosphorothioate
  modified_base 3: mod_base = OTHER; note = 2'-O-methyladenosine-3'-phosphate
  modified_base 4: mod_base = OTHER; note = 2'-O-methylguanosine-3'-phosphate
  modified_base 5: mod_base = OTHER; note = 2'-O-methyladenosine-3'-phosphate
  modified_base 6: mod_base = OTHER; note = 2'-deoxy-2'-fluoroadenosine-3'-phosphate
  modified_base 7: mod_base = OTHER; note = 2'-O-methyladenosine-3'-phosphate
  modified_base 8: mod_base = OTHER; note = 2'-O-methyladenosine-3'-phosphate
  modified_base 9: mod_base = OTHER; note = 2'-O-methylcytidine-3'-phosphate
  modified_base 10: mod_base = OTHER; note = 2'-O-methyladenosine-3'-phosphate
  modified_base 11: mod_base = OTHER; note = 2'-O-methyluridine-3'-phosphate
  modified_base 12: mod_base = OTHER; note = 2'-O-methyluridine-3'-phosphate
  modified_base 13: mod_base = OTHER; note = 2'-O-methyladenosine-3'-phosphate
  modified_base 14: mod_base = OTHER; note = 2'-deoxy-2'-fluoroadenosine-3'-phosphate
  modified_base 15: mod_base = OTHER; note = 2'-O-methyluridine-3'-phosphate
  modified_base 16: mod_base = OTHER; note = 2'-deoxy-2'-fluoroguanosine-3'-phosphate
  modified_base 17: mod_base = OTHER; note = 2'-O-methylcytidine-3'-phosphate
  modified_base 18: mod_base = OTHER; note = 2'-O-methyluridine-3'-phosphate
  modified_base 19: mod_base = OTHER; note = 2'-O-methylcytidine-3'-phosphate
  modified_base 20: mod_base = OTHER; note = 2'-O-methyladenosine-3'-phosphate
  modified_base 21: mod_base = OTHER; note = 2'-O-methyluridine-3'-phosphorothioate
  modified_base 22: mod_base = OTHER; note = 2'-O-methyluridine-3'-phosphorothioate
  modified_base 23: mod_base = OTHER; note = 2'-O-methyladenosine
tcagaaaacattaatgctcatta

SEQ ID NO: 12518 - RNA, 23 nt, synthetic construct
  source 1..23: mol_type = other RNA
  modified_base 1: mod_base = OTHER; note = 2'-O-methyluridine-3'-phosphorothioate 5'-(E)-Vinylphosphonate
  modified_base 2: mod_base = OTHER; note = 2'-deoxy-2'-fluoroadenosine-3'-phosphorothioate
  modified_base 3: mod_base = OTHER; note = 2'-O-methyluridine-3'-phosphate
  modified_base 4: mod_base = OTHER; note = 2'-O-methyluridine-3'-phosphate
  modified_base 5: mod_base = OTHER; note = 2'-O-methyladenosine-3'-phosphate
  modified_base 6: mod_base = OTHER; note = 2'-deoxy-2'-fluoroadenosine-3'-phosphate
  modified_base 7: mod_base = OTHER; note = 2'-O-methyluridine-3'-phosphate
  modified_base 8: mod_base = OTHER; note = 2'-O-methylcytidine-3'-phosphate
  modified_base 9: mod_base = OTHER; note = 2'-O-methyluridine-3'-phosphate
  modified_base 10: mod_base = OTHER; note = 2'-O-methyluridine-3'-phosphate
  modified_base 11: mod_base = OTHER; note = 2'-O-methyluridine-3'-phosphate
  modified_base 12: mod_base = OTHER; note = 2'-O-methylguanosine-3'-phosphate
  modified_base 13: mod_base = OTHER; note = 2'-O-methylguanosine-3'-phosphate
  modified_base 14: mod_base = OTHER; note = 2'-deoxy-2'-fluoroadenosine-3'-phosphate
  modified_base 15: mod_base = OTHER; note = 2'-O-methyladenosine-3'-phosphate
  modified_base 16: mod_base = OTHER; note = 2'-deoxy-2'-fluoroguanosine-3'-phosphate
  modified_base 17: mod_base = OTHER; note = 2'-O-methyluridine-3'-phosphate
  modified_base 18: mod_base = OTHER; note = 2'-O-methylguanosine-3'-phosphate
  modified_base 19: mod_base = OTHER; note = 2'-O-methyluridine-3'-phosphate
  modified_base 20: mod_base = OTHER; note = 2'-O-methyluridine-3'-phosphate
  modified_base 21: mod_base = OTHER; note = 2'-O-methylcytidine-3'-phosphorothioate
  modified_base 22: mod_base = OTHER; note = 2'-O-methyladenosine-3'-phosphorothioate
  modified_base 23: mod_base = OTHER; note = 2'-O-methylguanosine
tattaatctttggaagtgttcag

SEQ ID NO: 12519 - RNA, 23 nt, synthetic construct
  source 1..23: mol_type = other RNA
  modified_base 1: mod_base = OTHER; note = 2'-O-methyluridine-3'-phosphorothioate 5'-(E)-Vinylphosphonate
  modified_base 2: mod_base = OTHER; note = 2'-deoxy-2'-fluorocytidine-3'-phosphorothioate
  modified_base 3: mod_base = OTHER; note = 2'-O-methyladenosine-3'-phosphate
  modified_base 4: mod_base = OTHER; note = 2'-O-methyluridine-3'-phosphate
  modified_base 5: mod_base = OTHER; note = 2'-O-methyluridine-3'-phosphate
  modified_base 6: mod_base = OTHER; note = 2'-deoxy-2'-fluoroadenosine-3'-phosphate
  modified_base 7: mod_base = OTHER; note = 2'-O-methyladenosine-3'-phosphate
  modified_base 8: mod_base = OTHER; note = 2'-O-methyluridine-3'-phosphate
  modified_base 9: mod_base = OTHER; note = 2'-O-methylguanosine-3'-phosphate
  modified_base 10: mod_base = OTHER; note = 2'-O-methylcytidine-3'-phosphate
  modified_base 11: mod_base = OTHER; note = 2'-O-methyluridine-3'-phosphate
  modified_base 12: mod_base = OTHER; note = 2'-O-methylcytidine-3'-phosphate
  modified_base 13: mod_base = OTHER; note = 2'-O-methyladenosine-3'-phosphate
  modified_base 14: mod_base = OTHER; note = 2'-deoxy-2'-fluorouridine-3'-phosphate
  modified_base 15: mod_base = OTHER; note = 2'-O-methyluridine-3'-phosphate
  modified_base 16: mod_base = OTHER; note = 2'-deoxy-2'-fluoroadenosine-3'-phosphate
  modified_base 17: mod_base = OTHER; note = 2'-O-methyladenosine-3'-phosphate
  modified_base 18: mod_base = OTHER; note = 2'-O-methylcytidine-3'-phosphate
  modified_base 19: mod_base = OTHER; note = 2'-O-methyladenosine-3'-phosphate
  modified_base 20: mod_base = OTHER; note = 2'-O-methyladenosine-3'-phosphate
  modified_base 21: mod_base = OTHER; note = 2'-O-methyladenosine-3'-phosphorothioate
  modified_base 22: mod_base = OTHER; note = 2'-O-methyluridine-3'-phosphorothioate
  modified_base 23: mod_base = OTHER; note = 2'-O-methylguanosine
tcattaatgctcattaacaaatg

SEQ ID NO: 12520 - RNA, 23 nt, synthetic construct
  source 1..23: mol_type = other RNA
  modified_base 1: mod_base = OTHER; note = 2'-O-methyluridine-3'-phosphorothioate 5'-(E)-Vinylphosphonate
  modified_base 2: mod_base = OTHER; note = 2'-deoxy-2'-fluoroguanosine-3'-phosphorothioate
  modified_base 3: mod_base = OTHER; note = 2'-O-methyladenosine-3'-phosphate
  modified_base 4: mod_base = OTHER; note = 2'-O-methyladenosine-3'-phosphate
  modified_base 5: mod_base = OTHER; note = 2'-O-methyladenosine-3'-phosphate
  modified_base 6: mod_base = OTHER; note = 2'-deoxy-2'-fluoroadenosine-3'-phosphate
  modified_base 7: mod_base = OTHER; note = 2'-O-methylcytidine-3'-phosphate
  modified_base 8: mod_base = OTHER; note = 2'-O-methyladenosine-3'-phosphate
  modified_base 9: mod_base = OTHER; note = 2'-O-methyluridine-3'-phosphate
  modified_base 10: mod_base = OTHER; note = 2'-O-methyluridine-3'-phosphate
  modified_base 11: mod_base = OTHER; note = 2'-O-methyladenosine-3'-phosphate
  modified_base 12: mod_base = OTHER; note = 2'-O-methyladenosine-3'-phosphate
  modified_base 13: mod_base = OTHER; note = 2'-O-methyluridine-3'-phosphate
  modified_base 14: mod_base = OTHER; note = 2'-deoxy-2'-fluoroguanosine-3'-phosphate
  modified_base 15: mod_base = OTHER; note = 2'-O-methylcytidine-3'-phosphate
  modified_base 16: mod_base = OTHER; note = 2'-deoxy-2'-fluorouridine-3'-phosphate
  modified_base 17: mod_base = OTHER; note = 2'-O-methylcytidine-3'-phosphate
  modified_base 18: mod_base = OTHER; note = 2'-O-methyladenosine-3'-phosphate
  modified_base 19: mod_base = OTHER; note = 2'-O-methyluridine-3'-phosphate
  modified_base 20: mod_base = OTHER; note = 2'-O-methyluridine-3'-phosphate
  modified_base 21: mod_base = OTHER; note = 2'-O-methyladenosine-3'-phosphorothioate
  modified_base 22: mod_base = OTHER; note = 2'-O-methyladenosine-3'-phosphorothioate
  modified_base 23: mod_base = OTHER; note = 2'-O-methylcytidine
tgaaaacattaatgctcattaac

SEQ ID NO: 12521 - RNA, 23 nt, synthetic construct
  source 1..23: mol_type = other RNA
  modified_base 1: mod_base = OTHER; note = 2'-O-methyluridine-3'-phosphorothioate 5'-(E)-Vinylphosphonate
  modified_base 2: mod_base = OTHER; note = 2'-deoxy-2'-fluorouridine-3'-phosphorothioate
  modified_base 3: mod_base = OTHER; note = 2'-O-methylcytidine-3'-phosphate
  modified_base 4: mod_base = OTHER; note = 2'-O-methyladenosine-3'-phosphate
  modified_base 5: mod_base = OTHER; note = 2'-O-methylguanosine-3'-phosphate
  modified_base 6: mod_base = OTHER; note = 2'-deoxy-2'-fluoroadenosine-3'-phosphate
  modified_base 7: mod_base = OTHER; note = 2'-O-methyladenosine-3'-phosphate
  modified_base 8: mod_base = OTHER; note = 2'-O-methyladenosine-3'-phosphate
  modified_base 9: mod_base = OTHER; note = 2'-O-methyladenosine-3'-phosphate
  modified_base 10: mod_base = OTHER; note = 2'-O-methylcytidine-3'-phosphate
  modified_base 11: mod_base = OTHER; note = 2'-O-methyladenosine-3'-phosphate
  modified_base 12: mod_base = OTHER; note = 2'-O-methyluridine-3'-phosphate
  modified_base 13: mod_base = OTHER; note = 2'-O-methyluridine-3'-phosphate
  modified_base 14: mod_base = OTHER; note = 2'-deoxy-2'-fluoroadenosine-3'-phosphate
  modified_base 15: mod_base = OTHER; note = 2'-O-methyladenosine-3'-phosphate
  modified_base 16: mod_base = OTHER; note = 2'-deoxy-2'-fluorouridine-3'-phosphate
  modified_base 17: mod_base = OTHER; note = 2'-O-methylguanosine-3'-phosphate
  modified_base 18: mod_base = OTHER; note = 2'-O-methylcytidine-3'-phosphate
  modified_base 19: mod_base = OTHER; note = 2'-O-methyluridine-3'-phosphate
  modified_base 20: mod_base = OTHER; note = 2'-O-methylcytidine-3'-phosphate
  modified_base 21: mod_base = OTHER; note = 2'-O-methyladenosine-3'-phosphorothioate
  modified_base 22: mod_base = OTHER; note = 2'-O-methyluridine-3'-phosphorothioate
  modified_base 23: mod_base = OTHER; note = 2'-O-methyluridine
ttcagaaaacattaatgctcatt

SEQ ID NO: 12522 - RNA, 23 nt, synthetic construct
  source 1..23: mol_type = other RNA
  modified_base 1: mod_base = OTHER; note = 2'-O-methyluridine-3'-phosphorothioate 5'-(E)-Vinylphosphonate
  modified_base 2: mod_base = OTHER; note = 2'-deoxy-2'-fluorouridine-3'-phosphorothioate
  modified_base 3: mod_base = OTHER; note = 2'-O-methyluridine-3'-phosphate
  modified_base 4: mod_base = OTHER; note = 2'-O-methylcytidine-3'-phosphate
  modified_base 5: mod_base = OTHER; note = 2'-O-methyladenosine-3'-phosphate
  modified_base 6: mod_base = OTHER; note = 2'-deoxy-2'-fluoroguanosine-3'-phosphate
  modified_base 7: mod_base = OTHER; note = 2'-O-methyladenosine-3'-phosphate
  modified_base 8: mod_base = OTHER; note = 2'-O-methyladenosine-3'-phosphate
  modified_base 9: mod_base = OTHER; note = 2'-O-methyladenosine-3'-phosphate
  modified_base 10: mod_base = OTHER; note = 2'-O-methyladenosine-3'-phosphate
  modified_base 11: mod_base = OTHER; note = 2'-O-methylcytidine-3'-phosphate
  modified_base 12: mod_base = OTHER; note = 2'-O-methyladenosine-3'-phosphate
  modified_base 13: mod_base = OTHER; note = 2'-O-methyluridine-3'-phosphate
  modified_base 14: mod_base = OTHER; note = 2'-deoxy-2'-fluorouridine-3'-phosphate
  modified_base 15: mod_base = OTHER; note = 2'-O-methyladenosine-3'-phosphate
  modified_base 16: mod_base = OTHER; note = 2'-deoxy-2'-fluoroadenosine-3'-phosphate
  modified_base 17: mod_base = OTHER; note = 2'-O-methyluridine-3'-phosphate
  modified_base 18: mod_base = OTHER; note = 2'-O-methylguanosine-3'-phosphate
  modified_base 19: mod_base = OTHER; note = 2'-O-methylcytidine-3'-phosphate
  modified_base 20: mod_base = OTHER; note = 2'-O-methyluridine-3'-phosphate
  modified_base 21: mod_base = OTHER; note = 2'-O-methylcytidine-3'-phosphorothioate
  modified_base 22: mod_base = OTHER; note = 2'-O-methyladenosine-3'-phosphorothioate
  modified_base 23: mod_base = OTHER; note = 2'-O-methyluridine
tttcagaaaacattaatgctcat

SEQ ID NO: 12523 - RNA, 23 nt, synthetic construct
  source 1..23: mol_type = other RNA
  modified_base 1: mod_base = OTHER; note = 2'-O-methyluridine-3'-phosphorothioate 5'-(E)-Vinylphosphonate
  modified_base 2: mod_base = OTHER; note = 2'-deoxy-2'-fluoroguanosine-3'-phosphorothioate
  modified_base 3: mod_base = OTHER; note = 2'-O-methyluridine-3'-phosphate
  modified_base 4: mod_base = OTHER; note = 2'-O-methyluridine-3'-phosphate
  modified_base 5: mod_base = OTHER; note = 2'-O-methylcytidine-3'-phosphate
  modified_base 6: mod_base = OTHER; note = 2'-deoxy-2'-fluoroadenosine-3'-phosphate
  modified_base 7: mod_base = OTHER; note = 2'-O-methylguanosine-3'-phosphate
  modified_base 8: mod_base = OTHER; note = 2'-O-methyladenosine-3'-phosphate
  modified_base 9: mod_base = OTHER; note = 2'-O-methyladenosine-3'-phosphate
  modified_base 10: mod_base = OTHER; note = 2'-O-methyladenosine-3'-phosphate
  modified_base 11: mod_base = OTHER; note = 2'-O-methyladenosine-3'-phosphate
  modified_base 12: mod_base = OTHER; note = 2'-O-methylcytidine-3'-phosphate
  modified_base 13: mod_base = OTHER; note = 2'-O-methyladenosine-3'-phosphate
  modified_base 14: mod_base = OTHER; note = 2'-deoxy-2'-fluorouridine-3'-phosphate
  modified_base 15: mod_base = OTHER; note = 2'-O-methyluridine-3'-phosphate
  modified_base 16: mod_base = OTHER; note = 2'-deoxy-2'-fluoroadenosine-3'-phosphate
  modified_base 17: mod_base = OTHER; note = 2'-O-methyladenosine-3'-phosphate
  modified_base 18: mod_base = OTHER; note = 2'-O-methyluridine-3'-phosphate
  modified_base 19: mod_base = OTHER; note = 2'-O-methylguanosine-3'-phosphate
  modified_base 20: mod_base = OTHER; note = 2'-O-methylcytidine-3'-phosphate
  modified_base 21: mod_base = OTHER; note = 2'-O-methyluridine-3'-phosphorothioate
  modified_base 22: mod_base = OTHER; note = 2'-O-methylcytidine-3'-phosphorothioate
  modified_base 23: mod_base = OTHER; note = 2'-O-methyladenosine
tgttcagaaaacattaatgctca

SEQ ID NO: 12524 - RNA, 23 nt, synthetic construct
  source 1..23: mol_type = other RNA
  modified_base 1: mod_base = OTHER; note = 2'-O-methyluridine-3'-phosphorothioate 5'-(E)-Vinylphosphonate
  modified_base 2: mod_base = OTHER; note = 2'-deoxy-2'-fluorouridine-3'-phosphorothioate
  modified_base 3: mod_base = OTHER; note = 2'-O-methylguanosine-3'-phosphate
  modified_base 4: mod_base = OTHER; note = 2'-O-methyluridine-3'-phosphate
  modified_base 5: mod_base = OTHER; note = 2'-O-methyluridine-3'-phosphate
  modified_base 6: mod_base = OTHER; note = 2'-deoxy-2'-fluorocytidine-3'-phosphate
  modified_base 7: mod_base = OTHER; note = 2'-O-methyladenosine-3'-phosphate
  modified_base 8: mod_base = OTHER; note = 2'-O-methylguanosine-3'-phosphate
  modified_base 9: mod_base = OTHER; note = 2'-O-methyladenosine-3'-phosphate
  modified_base 10: mod_base = OTHER; note = 2'-O-methyladenosine-3'-phosphate
  modified_base 11: mod_base = OTHER; note = 2'-O-methyladenosine-3'-phosphate
  modified_base 12: mod_base = OTHER; note = 2'-O-methyladenosine-3'-phosphate
  modified_base 13: mod_base = OTHER; note = 2'-O-methylcytidine-3'-phosphate
  modified_base 14: mod_base = OTHER; note = 2'-deoxy-2'-fluoroadenosine-3'-phosphate
  modified_base 15: mod_base = OTHER; note = 2'-O-methyluridine-3'-phosphate
  modified_base 16: mod_base = OTHER; note = 2'-deoxy-2'-fluorouridine-3'-phosphate
  modified_base 17: mod_base = OTHER; note = 2'-O-methyladenosine-3'-phosphate
  modified_base 18: mod_base = OTHER; note = 2'-O-methyladenosine-3'-phosphate
  modified_base 19: mod_base = OTHER; note = 2'-O-methyluridine-3'-phosphate
  modified_base 20: mod_base = OTHER; note = 2'-O-methylguanosine-3'-phosphate
  modified_base 21: mod_base = OTHER; note = 2'-O-methylcytidine-3'-phosphorothioate
  modified_base 22: mod_base = OTHER; note = 2'-O-methyluridine-3'-phosphorothioate
  modified_base 23: mod_base = OTHER; note = 2'-O-methylcytidine
ttgttcagaaaacattaatgctc

SEQ ID NO: 12525 - RNA, 23 nt, synthetic construct
  source 1..23: mol_type = other RNA
  modified_base 1: mod_base = OTHER; note = 2'-O-methyluridine-3'-phosphorothioate 5'-(E)-Vinylphosphonate
  modified_base 2: mod_base = OTHER; note = 2'-deoxy-2'-fluoroguanosine-3'-phosphorothioate
  modified_base 3: mod_base = OTHER; note = 2'-O-methyluridine-3'-phosphate
  modified_base 4: mod_base = OTHER; note = 2'-O-methylguanosine-3'-phosphate
  modified_base 5: mod_base = OTHER; note = 2'-O-methyluridine-3'-phosphate
  modified_base 6: mod_base = OTHER; note = 2'-deoxy-2'-fluorouridine-3'-phosphate
  modified_base 7: mod_base = OTHER; note = 2'-O-methylcytidine-3'-phosphate
  modified_base 8: mod_base = OTHER; note = 2'-O-methyladenosine-3'-phosphate
  modified_base 9: mod_base = OTHER; note = 2'-O-methylguanosine-3'-phosphate
  modified_base 10: mod_base = OTHER; note = 2'-O-methyladenosine-3'-phosphate
  modified_base 11: mod_base = OTHER; note = 2'-O-methyladenosine-3'-phosphate
  modified_base 12: mod_base = OTHER; note = 2'-O-methyladenosine-3'-phosphate
  modified_base 13: mod_base = OTHER; note = 2'-O-methyladenosine-3'-phosphate
  modified_base 14: mod_base = OTHER; note = 2'-deoxy-2'-fluorocytidine-3'-phosphate
  modified_base 15: mod_base = OTHER; note = 2'-O-methyladenosine-3'-phosphate
  modified_base 16: mod_base = OTHER; note = 2'-deoxy-2'-fluorouridine-3'-phosphate
  modified_base 17: mod_base = OTHER; note = 2'-O-methyluridine-3'-phosphate
  modified_base 18: mod_base = OTHER; note = 2'-O-methyladenosine-3'-phosphate
  modified_base 19: mod_base = OTHER; note = 2'-O-methyladenosine-3'-phosphate
  modified_base 20: mod_base = OTHER; note = 2'-O-methyluridine-3'-phosphate
  modified_base 21: mod_base = OTHER; note = 2'-O-methylguanosine-3'-phosphorothioate
  modified_base 22: mod_base = OTHER; note = 2'-O-methylcytidine-3'-phosphorothioate
  modified_base 23: mod_base = OTHER; note = 2'-O-methyluridine
tgtgttcagaaaacattaatgct

SEQ ID NO: 12526 - RNA, 23 nt, synthetic construct
  source 1..23: mol_type = other RNA
  modified_base 1: mod_base = OTHER; note = 2'-O-methyluridine-3'-phosphorothioate 5'-(E)-Vinylphosphonate
  modified_base 2: mod_base = OTHER; note = 2'-deoxy-2'-fluoroadenosine-3'-phosphorothioate
  modified_base 3: mod_base = OTHER; note = 2'-O-methylguanosine-3'-phosphate
  modified_base 4: mod_base = OTHER; note = 2'-O-methyluridine-3'-phosphate
  modified_base 5: mod_base = OTHER; note = 2'-O-methylguanosine-3'-phosphate
  modified_base 6: mod_base = OTHER; note = 2'-deoxy-2'-fluorouridine-3'-phosphate
  modified_base 7: mod_base = OTHER; note = 2'-O-methyluridine-3'-phosphate
  modified_base 8: mod_base = OTHER; note = 2'-O-methylcytidine-3'-phosphate
  modified_base 9: mod_base = OTHER; note = 2'-O-methyladenosine-3'-phosphate
  modified_base 10: mod_base = OTHER; note = 2'-O-methylguanosine-3'-phosphate
  modified_base 11: mod_base = OTHER; note = 2'-O-methyladenosine-3'-phosphate
  modified_base 12: mod_base = OTHER; note = 2'-O-methyladenosine-3'-phosphate
  modified_base 13: mod_base = OTHER; note = 2'-O-methyladenosine-3'-phosphate
  modified_base 14: mod_base = OTHER; note = 2'-deoxy-2'-fluoroadenosine-3'-phosphate
  modified_base 15: mod_base = OTHER; note = 2'-O-methylcytidine-3'-phosphate
  modified_base 16: mod_base = OTHER; note = 2'-deoxy-2'-fluoroadenosine-3'-phosphate
  modified_base 17: mod_base = OTHER; note = 2'-O-methyluridine-3'-phosphate
  modified_base 18: mod_base = OTHER; note = 2'-O-methyluridine-3'-phosphate
  modified_base 19: mod_base = OTHER; note = 2'-O-methyladenosine-3'-phosphate
  modified_base 20: mod_base = OTHER; note = 2'-O-methyladenosine-3'-phosphate
  modified_base 21: mod_base = OTHER; note = 2'-O-methyluridine-3'-phosphorothioate
  modified_base 22: mod_base = OTHER; note = 2'-O-methylguanosine-3'-phosphorothioate
  modified_base 23: mod_base = OTHER; note = 2'-O-methylcytidine
tagtgttcagaaaacattaatgc

SEQ ID NO: 12527 - RNA, 23 nt, synthetic construct
  source 1..23: mol_type = other RNA
  modified_base 1: mod_base = OTHER; note = 2'-O-methyluridine-3'-phosphorothioate 5'-(E)-Vinylphosphonate
  modified_base 2: mod_base = OTHER; note = 2'-deoxy-2'-fluoroadenosine-3'-phosphorothioate
  modified_base 3: mod_base = OTHER; note = 2'-O-methyladenosine-3'-phosphate
  modified_base 4: mod_base = OTHER; note = 2'-O-methylguanosine-3'-phosphate
  modified_base 5: mod_base = OTHER; note = 2'-O-methyluridine-3'-phosphate
  modified_base 6: mod_base = OTHER; note = 2'-deoxy-2'-fluoroguanosine-3'-phosphate
  modified_base 7: mod_base = OTHER; note = 2'-O-methyluridine-3'-phosphate
  modified_base 8: mod_base = OTHER; note = 2'-O-methyluridine-3'-phosphate
  modified_base 9: mod_base = OTHER; note = 2'-O-methylcytidine-3'-phosphate
  modified_base 10: mod_base = OTHER; note = 2'-O-methyladenosine-3'-phosphate
  modified_base 11: mod_base = OTHER; note = 2'-O-methylguanosine-3'-phosphate
  modified_base 12: mod_base = OTHER; note = 2'-O-methyladenosine-3'-phosphate
  modified_base 13: mod_base = OTHER; note = 2'-O-methyladenosine-3'-phosphate
  modified_base 14: mod_base = OTHER; note = 2'-deoxy-2'-fluoroadenosine-3'-phosphate
  modified_base 15: mod_base = OTHER; note = 2'-O-methyladenosine-3'-phosphate
  modified_base 16: mod_base = OTHER; note = 2'-deoxy-2'-fluorocytidine-3'-phosphate
  modified_base 17: mod_base = OTHER; note = 2'-O-methyladenosine-3'-phosphate
  modified_base 18: mod_base = OTHER; note = 2'-O-methyluridine-3'-phosphate
  modified_base 19: mod_base = OTHER; note = 2'-O-methyluridine-3'-phosphate
  modified_base 20: mod_base = OTHER; note = 2'-O-methyladenosine-3'-phosphate
  modified_base 21: mod_base = OTHER; note = 2'-O-methyladenosine-3'-phosphorothioate
  modified_base 22: mod_base = OTHER; note = 2'-O-methyluridine-3'-phosphorothioate
  modified_base 23: mod_base = OTHER; note = 2'-O-methylguanosine
taagtgttcagaaaacattaatg

SEQ ID NO: 12528 - RNA, 23 nt, synthetic construct
  source 1..23: mol_type = other RNA
  modified_base 1: mod_base = OTHER; note = 2'-O-methyluridine-3'-phosphorothioate 5'-(E)-Vinylphosphonate
  modified_base 2: mod_base = OTHER; note = 2'-deoxy-2'-fluoroadenosine-3'-phosphorothioate
  modified_base 3: mod_base = OTHER; note = 2'-O-methyladenosine-3'-phosphate
  modified_base 4: mod_base = OTHER; note = 2'-O-methyluridine-3'-phosphate
  modified_base 5: mod_base = OTHER; note = 2'-O-methylcytidine-3'-phosphate
  modified_base 6: mod_base = OTHER; note = 2'-deoxy-2'-fluorouridine-3'-phosphate
  modified_base 7: mod_base = OTHER; note = 2'-O-methyluridine-3'-phosphate
  modified_base 8: mod_base = OTHER; note = 2'-O-methyluridine-3'-phosphate
  modified_base 9: mod_base = OTHER; note = 2'-O-methylguanosine-3'-phosphate
  modified_base 10: mod_base = OTHER; note = 2'-O-methylguanosine-3'-phosphate
  modified_base 11: mod_base = OTHER; note = 2'-O-methyladenosine-3'-phosphate
  modified_base 12: mod_base = OTHER; note = 2'-O-methyladenosine-3'-phosphate
  modified_base 13: mod_base = OTHER; note = 2'-O-methylguanosine-3'-phosphate
  modified_base 14: mod_base = OTHER; note = 2'-deoxy-2'-fluorouridine-3'-phosphate
  modified_base 15: mod_base = OTHER; note = 2'-O-methylguanosine-3'-phosphate
  modified_base 16: mod_base = OTHER; note = 2'-deoxy-2'-fluorouridine-3'-phosphate
  modified_base 17: mod_base = OTHER; note = 2'-O-methyluridine-3'-phosphate
  modified_base 18: mod_base = OTHER; note = 2'-O-methylcytidine-3'-phosphate
  modified_base 19: mod_base = OTHER; note = 2'-O-methyladenosine-3'-phosphate
  modified_base 20: mod_base = OTHER; note = 2'-O-methylguanosine-3'-phosphate
  modified_base 21: mod_base = OTHER; note = 2'-O-methyladenosine-3'-phosphorothioate
  modified_base 22: mod_base = OTHER; note = 2'-O-methyladenosine-3'-phosphorothioate
  modified_base 23: mod_base = OTHER; note = 2'-O-methyladenosine
taatctttggaagtgttcagaaa

SEQ ID NO: 12529 - RNA, 23 nt, synthetic construct
  source 1..23: mol_type = other RNA
  modified_base 1: mod_base = OTHER; note = 2'-O-methyluridine-3'-phosphorothioate 5'-(E)-Vinylphosphonate
  modified_base 2: mod_base = OTHER; note = 2'-deoxy-2'-fluorouridine-3'-phosphorothioate
  modified_base 3: mod_base = OTHER; note = 2'-O-methyladenosine-3'-phosphate
  modified_base 4: mod_base = OTHER; note = 2'-O-methyladenosine-3'-phosphate
  modified_base 5: mod_base = OTHER; note = 2'-O-methyluridine-3'-phosphate
  modified_base 6: mod_base = OTHER; note = 2'-deoxy-2'-fluorocytidine-3'-phosphate
  modified_base 7: mod_base = OTHER; note = 2'-O-methyluridine-3'-phosphate
  modified_base 8: mod_base = OTHER; note = 2'-O-methyluridine-3'-phosphate
  modified_base 9: mod_base = OTHER; note = 2'-O-methyluridine-3'-phosphate
  modified_base 10: mod_base = OTHER; note = 2'-O-methylguanosine-3'-phosphate
  modified_base 11: mod_base = OTHER; note = 2'-O-methylguanosine-3'-phosphate
  modified_base 12: mod_base = OTHER; note = 2'-O-methyladenosine-3'-phosphate
  modified_base 13: mod_base = OTHER; note = 2'-O-methyladenosine-3'-phosphate
  modified_base 14: mod_base = OTHER; note = 2'-deoxy-2'-fluoroguanosine-3'-phosphate
  modified_base 15: mod_base = OTHER; note = 2'-O-methyluridine-3'-phosphate
  modified_base 16: mod_base = OTHER; note = 2'-deoxy-2'-fluoroguanosine-3'-phosphate
  modified_base 17: mod_base = OTHER; note = 2'-O-methyluridine-3'-phosphate
  modified_base 18: mod_base = OTHER; note = 2'-O-methyluridine-3'-phosphate
  modified_base 19: mod_base = OTHER; note = 2'-O-methylcytidine-3'-phosphate
  modified_base 20: mod_base = OTHER; note = 2'-O-methyladenosine-3'-phosphate
  modified_base 21: mod_base = OTHER; note = 2'-O-methylguanosine-3'-phosphorothioate
  modified_base 22: mod_base = OTHER; note = 2'-O-methyladenosine-3'-phosphorothioate
  modified_base 23: mod_base = OTHER; note = 2'-O-methyladenosine
ttaatctttggaagtgttcagaa

SEQ ID NO: 12530 - RNA, 23 nt, synthetic construct
  source 1..23: mol_type = other RNA
  modified_base 1: mod_base = OTHER; note = 2'-O-methyluridine-3'-phosphorothioate 5'-(E)-Vinylphosphonate
  modified_base 2: mod_base = OTHER; note = 2'-deoxy-2'-fluorouridine-3'-phosphorothioate
  modified_base 3: mod_base = OTHER; note = 2'-O-methyluridine-3'-phosphate
  modified_base 4: mod_base = OTHER; note = 2'-O-methyladenosine-3'-phosphate
  modified_base 5: mod_base = OTHER; note = 2'-O-methyladenosine-3'-phosphate
  modified_base 6: mod_base = OTHER; note = 2'-deoxy-2'-fluorouridine-3'-phosphate
  modified_base 7: mod_base = OTHER; note = 2'-O-methylcytidine-3'-phosphate
  modified_base 8: mod_base = OTHER; note = 2'-O-methyluridine-3'-phosphate
  modified_base 9: mod_base = OTHER; note = 2'-O-methyluridine-3'-phosphate
  modified_base 10: mod_base = OTHER; note = 2'-O-methyluridine-3'-phosphate
  modified_base 11: mod_base = OTHER; note = 2'-O-methylguanosine-3'-phosphate
  modified_base 12: mod_base = OTHER; note = 2'-O-methylguanosine-3'-phosphate
  modified_base 13: mod_base = OTHER; note = 2'-O-methyladenosine-3'-phosphate
  modified_base 14: mod_base = OTHER; note = 2'-deoxy-2'-fluoroadenosine-3'-phosphate
  modified_base 15: mod_base = OTHER; note = 2'-O-methylguanosine-3'-phosphate
  modified_base 16: mod_base = OTHER; note = 2'-deoxy-2'-fluorouridine-3'-phosphate
  modified_base 17: mod_base = OTHER; note = 2'-O-methylguanosine-3'-phosphate
  modified_base 18: mod_base = OTHER; note = 2'-O-methyluridine-3'-phosphate
  modified_base 19: mod_base = OTHER; note = 2'-O-methyluridine-3'-phosphate
  modified_base 20: mod_base = OTHER; note = 2'-O-methylcytidine-3'-phosphate
  modified_base 21: mod_base = OTHER; note = 2'-O-methyladenosine-3'-phosphorothioate
  modified_base 22: mod_base = OTHER; note = 2'-O-methylguanosine-3'-phosphorothioate
  modified_base 23: mod_base = OTHER; note = 2'-O-methyladenosine
tttaatctttggaagtgttcaga

SEQ ID NO: 12531 - RNA, 23 nt, synthetic construct
  source 1..23: mol_type = other RNA
  modified_base 1: mod_base = OTHER; note = 2'-O-methyluridine-3'-phosphorothioate 5'-(E)-Vinylphosphonate
  modified_base 2: mod_base = OTHER; note = 2'-deoxy-2'-fluoroguanosine-3'-phosphorothioate
  modified_base 3: mod_base = OTHER; note = 2'-O-methyladenosine-3'-phosphate
  modified_base 4: mod_base = OTHER; note = 2'-O-methyluridine-3'-phosphate
  modified_base 5: mod_base = OTHER; note = 2'-O-methyluridine-3'-phosphate
  modified_base 6: mod_base = OTHER; note = 2'-deoxy-2'-fluoroadenosine-3'-phosphate
  modified_base 7: mod_base = OTHER; note = 2'-O-methyladenosine-3'-phosphate
  modified_base 8: mod_base = OTHER; note = 2'-O-methyluridine-3'-phosphate
  modified_base 9: mod_base = OTHER; note = 2'-O-methylcytidine-3'-phosphate
  modified_base 10: mod_base = OTHER; note = 2'-O-methyluridine-3'-phosphate
  modified_base 11: mod_base = OTHER; note = 2'-O-methyluridine-3'-phosphate
  modified_base 12: mod_base = OTHER; note = 2'-O-methyluridine-3'-phosphate
  modified_base 13: mod_base = OTHER; note = 2'-O-methylguanosine-3'-phosphate
  modified_base 14: mod_base = OTHER; note = 2'-deoxy-2'-fluoroguanosine-3'-phosphate
  modified_base 15: mod_base = OTHER; note = 2'-O-methyladenosine-3'-phosphate
  modified_base 16: mod_base = OTHER; note = 2'-deoxy-2'-fluoroadenosine-3'-phosphate
  modified_base 17: mod_base = OTHER; note = 2'-O-methylguanosine-3'-phosphate
  modified_base 18: mod_base = OTHER; note = 2'-O-methyluridine-3'-phosphate
  modified_base 19: mod_base = OTHER; note = 2'-O-methylguanosine-3'-phosphate
  modified_base 20: mod_base = OTHER; note = 2'-O-methyluridine-3'-phosphate
  modified_base 21: mod_base = OTHER; note = 2'-O-methyluridine-3'-phosphorothioate
  modified_base 22: mod_base = OTHER; note = 2'-O-methylcytidine-3'-phosphorothioate
  modified_base 23: mod_base = OTHER; note = 2'-O-methyladenosine
tgattaatctttggaagtgttca

SEQ ID NO: 12532 - RNA, 23 nt, synthetic construct
  source 1..23: mol_type = other RNA
  modified_base 1: mod_base = OTHER; note = 2'-O-methyluridine-3'-phosphorothioate 5'-(E)-Vinylphosphonate
  modified_base 2: mod_base = OTHER; note = 2'-deoxy-2'-fluorouridine-3'-phosphorothioate
  modified_base 3: mod_base = OTHER; note = 2'-O-methylguanosine-3'-phosphate
  modified_base 4: mod_base = OTHER; note = 2'-O-methyladenosine-3'-phosphate
  modified_base 5: mod_base = OTHER; note = 2'-O-methyluridine-3'-phosphate
  modified_base 6: mod_base = OTHER; note = 2'-deoxy-2'-fluorouridine-3'-phosphate
  modified_base 7: mod_base = OTHER; note = 2'-O-methyladenosine-3'-phosphate
  modified_base 8: mod_base = OTHER; note = 2'-O-methyladenosine-3'-phosphate
  modified_base 9: mod_base = OTHER; note = 2'-O-methyluridine-3'-phosphate
  modified_base 10: mod_base = OTHER; note = 2'-O-methylcytidine-3'-phosphate
  modified_base 11: mod_base = OTHER; note = 2'-O-methyluridine-3'-phosphate
  modified_base 12: mod_base = OTHER; note = 2'-O-methyluridine-3'-phosphate
  modified_base 13: mod_base = OTHER; note = 2'-O-methyluridine-3'-phosphate
  modified_base 14: mod_base = OTHER; note = 2'-deoxy-2'-fluoroguanosine-3'-phosphate
  modified_base 15: mod_base = OTHER; note = 2'-O-methylguanosine-3'-phosphate
  modified_base 16: mod_base = OTHER; note = 2'-deoxy-2'-fluoroadenosine-3'-phosphate
  modified_base 17: mod_base = OTHER; note = 2'-O-methyladenosine-3'-phosphate
  modified_base 18: mod_base = OTHER; note = 2'-O-methylguanosine-3'-phosphate
  modified_base 19: mod_base = OTHER; note = 2'-O-methyluridine-3'-phosphate
  modified_base 20: mod_base = OTHER; note = 2'-O-methylguanosine-3'-phosphate
  modified_base 21: mod_base = OTHER; note = 2'-O-methyluridine-3'-phosphorothioate
  modified_base 22: mod_base = OTHER; note = 2'-O-methyluridine-3'-phosphorothioate
  modified_base 23: mod_base = OTHER; note = 2'-O-methylcytidine
ttgattaatctttggaagtgttc

SEQ ID NO: 12533 - RNA, 23 nt, synthetic construct
  source 1..23: mol_type = other RNA
  modified_base 1: mod_base = OTHER; note = 2'-O-methyluridine-3'-phosphorothioate 5'-(E)-Vinylphosphonate
  modified_base 2: mod_base = OTHER; note = 2'-deoxy-2'-fluorouridine-3'-phosphorothioate
  modified_base 3: mod_base = OTHER; note = 2'-O-methyluridine-3'-phosphate
  modified_base 4: mod_base = OTHER; note = 2'-O-methylguanosine-3'-phosphate
  modified_base 5: mod_base = OTHER; note = 2'-O-methyladenosine-3'-phosphate
  modified_base 6: mod_base = OTHER; note = 2'-deoxy-2'-fluorouridine-3'-phosphate
  modified_base 7: mod_base = OTHER; note = 2'-O-methyluridine-3'-phosphate
  modified_base 8: mod_base = OTHER; note = 2'-O-methyladenosine-3'-phosphate
  modified_base 9: mod_base = OTHER; note = 2'-O-methyladenosine-3'-phosphate
  modified_base 10: mod_base = OTHER; note = 2'-O-methyluridine-3'-phosphate
  modified_base 11: mod_base = OTHER; note = 2'-O-methylcytidine-3'-phosphate
  modified_base 12: mod_base = OTHER; note = 2'-O-methyluridine-3'-phosphate
  modified_base 13: mod_base = OTHER; note = 2'-O-methyluridine-3'-phosphate
  modified_base 14: mod_base = OTHER; note = 2'-deoxy-2'-fluorouridine-3'-phosphate
  modified_base 15: mod_base = OTHER; note = 2'-O-methylguanosine-3'-phosphate
  modified_base 16: mod_base = OTHER; note = 2'-deoxy-2'-fluoroguanosine-3'-phosphate
  modified_base 17: mod_base = OTHER; note = 2'-O-methyladenosine-3'-phosphate
  modified_base 18: mod_base = OTHER; note = 2'-O-methyladenosine-3'-phosphate
  modified_base 19: mod_base = OTHER; note = 2'-O-methylguanosine-3'-phosphate
  modified_base 20: mod_base = OTHER; note = 2'-O-methyluridine-3'-phosphate
  modified_base 21: mod_base = OTHER; note = 2'-O-methylguanosine-3'-phosphorothioate
  modified_base 22: mod_base = OTHER; note = 2'-O-methyluridine-3'-phosphorothioate
  modified_base 23: mod_base = OTHER; note = 2'-O-methyluridine
tttgattaatctttggaagtgtt

SEQ ID NO: 12534 - RNA, 23 nt, synthetic construct
  source 1..23: mol_type = other RNA
  modified_base 1: mod_base = OTHER; note = 2'-O-methyluridine-3'-phosphorothioate 5'-(E)-Vinylphosphonate
  modified_base 2: mod_base = OTHER; note = 2'-deoxy-2'-fluorouridine-3'-phosphorothioate
  modified_base 3: mod_base = OTHER; note = 2'-O-methyluridine-3'-phosphate
  modified_base 4: mod_base = OTHER; note = 2'-O-methyluridine-3'-phosphate
  modified_base 5: mod_base = OTHER; note = 2'-O-methylguanosine-3'-phosphate
  modified_base 6: mod_base = OTHER; note = 2'-deoxy-2'-fluoroadenosine-3'-phosphate
  modified_base 7: mod_base = OTHER; note = 2'-O-methyluridine-3'-phosphate
  modified_base 8: mod_base = OTHER; note = 2'-O-methyluridine-3'-phosphate
  modified_base 9: mod_base = OTHER; note = 2'-O-methyladenosine-3'-phosphate
  modified_base 10: mod_base = OTHER; note = 2'-O-methyladenosine-3'-phosphate
  modified_base 11: mod_base = OTHER; note = 2'-O-methyluridine-3'-phosphate
  modified_base 12: mod_base = OTHER; note = 2'-O-methylcytidine-3'-phosphate
  modified_base 13: mod_base = OTHER; note = 2'-O-methyluridine-3'-phosphate
  modified_base 14: mod_base = OTHER; note = 2'-deoxy-2'-fluorouridine-3'-phosphate
  modified_base 15: mod_base = OTHER; note = 2'-O-methyluridine-3'-phosphate
  modified_base 16: mod_base = OTHER; note = 2'-deoxy-2'-fluoroguanosine-3'-phosphate
  modified_base 17: mod_base = OTHER; note = 2'-O-methylguanosine-3'-phosphate
  modified_base 18: mod_base = OTHER; note = 2'-O-methyladenosine-3'-phosphate
  modified_base 19: mod_base = OTHER; note = 2'-O-methyladenosine-3'-phosphate
  modified_base 20: mod_base = OTHER; note = 2'-O-methylguanosine-3'-phosphate
  modified_base 21: mod_base = OTHER; note = 2'-O-methyluridine-3'-phosphorothioate
  modified_base 22: mod_base = OTHER; note = 2'-O-methylguanosine-3'-phosphorothioate
  modified_base 23: mod_base = OTHER; note = 2'-O-methyluridine
ttttgattaatctttggaagtgt

SEQ ID NO: 12535 - RNA, 23 nt, synthetic construct
  source 1..23: mol_type = other RNA
  modified_base 1: mod_base = OTHER; note = 2'-O-methyluridine-3'-phosphorothioate 5'-(E)-Vinylphosphonate
  modified_base 2: mod_base = OTHER; note = 2'-deoxy-2'-fluoroguanosine-3'-phosphorothioate
  modified_base 3: mod_base = OTHER; note = 2'-O-methyluridine-3'-phosphate
  modified_base 4: mod_base = OTHER; note = 2'-O-methyluridine-3'-phosphate
  modified_base 5: mod_base = OTHER; note = 2'-O-methyluridine-3'-phosphate
  modified_base 6: mod_base = OTHER; note = 2'-deoxy-2'-fluoroguanosine-3'-phosphate
  modified_base 7: mod_base = OTHER; note = 2'-O-methyladenosine-3'-phosphate
  modified_base 8: mod_base = OTHER; note = 2'-O-methyluridine-3'-phosphate
  modified_base 9: mod_base = OTHER; note = 2'-O-methyluridine-3'-phosphate
  modified_base 10: mod_base = OTHER; note = 2'-O-methyladenosine-3'-phosphate
  modified_base 11: mod_base = OTHER; note = 2'-O-methyladenosine-3'-phosphate
  modified_base 12: mod_base = OTHER; note = 2'-O-methyluridine-3'-phosphate
  modified_base 13: mod_base = OTHER; note = 2'-O-methylcytidine-3'-phosphate
  modified_base 14: mod_base = OTHER; note = 2'-deoxy-2'-fluorouridine-3'-phosphate
  modified_base 15: mod_base = OTHER; note = 2'-O-methyluridine-3'-phosphate
  modified_base 16: mod_base = OTHER; note = 2'-deoxy-2'-fluorouridine-3'-phosphate
  modified_base 17: mod_base = OTHER; note = 2'-O-methylguanosine-3'-phosphate
  modified_base 18: mod_base = OTHER; note = 2'-O-methylguanosine-3'-phosphate
  modified_base 19: mod_base = OTHER; note = 2'-O-methyladenosine-3'-phosphate
  modified_base 20: mod_base = OTHER; note = 2'-O-methyladenosine-3'-phosphate
  modified_base 21: mod_base = OTHER; note = 2'-O-methylguanosine-3'-phosphorothioate
  modified_base 22: mod_base = OTHER; note = 2'-O-methyluridine-3'-phosphorothioate
  modified_base 23: mod_base = OTHER; note = 2'-O-methylguanosine
tgtttgattaatctttggaagtg

SEQ ID NO: 12536 - RNA, 23 nt, synthetic construct
  source 1..23: mol_type = other RNA
  modified_base 1: mod_base = OTHER; note = 2'-O-methyluridine-3'-phosphorothioate 5'-(E)-Vinylphosphonate
  modified_base 2: mod_base = OTHER; note = 2'-deoxy-2'-fluorouridine-3'-phosphorothioate
  modified_base 3: mod_base = OTHER; note = 2'-O-methylguanosine-3'-phosphate
  modified_base 4: mod_base = OTHER; note = 2'-O-methyluridine-3'-phosphate
  modified_base 5: mod_base = OTHER; note = 2'-O-methyluridine-3'-phosphate
  modified_base 6: mod_base = OTHER; note = 2'-deoxy-2'-fluorouridine-3'-phosphate
  modified_base 7: mod_base = OTHER; note = 2'-O-methylguanosine-3'-phosphate
  modified_base 8: mod_base = OTHER; note = 2'-O-methyladenosine-3'-phosphate
  modified_base 9: mod_base = OTHER; note = 2'-O-methyluridine-3'-phosphate
  modified_base 10: mod_base = OTHER; note = 2'-O-methyluridine-3'-phosphate
  modified_base 11: mod_base = OTHER; note = 2'-O-methyladenosine-3'-phosphate
  modified_base 12: mod_base = OTHER; note = 2'-O-methyladenosine-3'-phosphate
  modified_base 13: mod_base = OTHER; note = 2'-O-methyluridine-3'-phosphate
  modified_base 14: mod_base = OTHER; note = 2'-deoxy-2'-fluorocytidine-3'-phosphate
  modified_base 15: mod_base = OTHER; note = 2'-O-methyluridine-3'-phosphate
  modified_base 16: mod_base = OTHER; note = 2'-deoxy-2'-fluorouridine-3'-phosphate
  modified_base 17: mod_base = OTHER; note = 2'-O-methyluridine-3'-phosphate
  modified_base 18: mod_base = OTHER; note = 2'-O-methylguanosine-3'-phosphate
  modified_base 19: mod_base = OTHER; note = 2'-O-methylguanosine-3'-phosphate
  modified_base 20: mod_base = OTHER; note = 2'-O-methyladenosine-3'-phosphate
  modified_base 21: mod_base = OTHER; note = 2'-O-methyladenosine-3'-phosphorothioate
  modified_base 22: mod_base = OTHER; note = 2'-O-methylguanosine-3'-phosphorothioate
  modified_base 23: mod_base = OTHER; note = 2'-O-methyluridine
ttgtttgattaatctttggaagt

SEQ ID NO: 12537 - RNA, 23 nt, synthetic construct
  source 1..23: mol_type = other RNA
  modified_base 1: mod_base = OTHER; note = 2'-O-methyluridine-3'-phosphorothioate 5'-(E)-Vinylphosphonate
  modified_base 2: mod_base = OTHER; note = 2'-deoxy-2'-fluoroadenosine-3'-phosphorothioate
  modified_base 3: mod_base = OTHER; note = 2'-O-methyluridine-3'-phosphate
  modified_base 4: mod_base = OTHER; note = 2'-O-methylguanosine-3'-phosphate
  modified_base 5: mod_base = OTHER; note = 2'-O-methyluridine-3'-phosphate
  modified_base 6: mod_base = OTHER; note = 2'-deoxy-2'-fluorouridine-3'-phosphate
  modified_base 7: mod_base = OTHER; note = 2'-O-methyluridine-3'-phosphate
  modified_base 8: mod_base = OTHER; note = 2'-O-methylguanosine-3'-phosphate
  modified_base 9: mod_base = OTHER; note = 2'-O-methyladenosine-3'-phosphate
  modified_base 10: mod_base = OTHER; note = 2'-O-methyluridine-3'-phosphate
  modified_base 11: mod_base = OTHER; note = 2'-O-methyluridine-3'-phosphate
  modified_base 12: mod_base = OTHER; note = 2'-O-methyladenosine-3'-phosphate
  modified_base 13: mod_base = OTHER; note = 2'-O-methyladenosine-3'-phosphate
  modified_base 14: mod_base = OTHER; note = 2'-deoxy-2'-fluorouridine-3'-phosphate
  modified_base 15: mod_base = OTHER; note = 2'-O-methylcytidine-3'-phosphate
  modified_base 16: mod_base = OTHER; note = 2'-deoxy-2'-fluorouridine-3'-phosphate
  modified_base 17: mod_base = OTHER; note = 2'-O-methyluridine-3'-phosphate
  modified_base 18: mod_base = OTHER; note = 2'-O-methyluridine-3'-phosphate
  modified_base 19: mod_base = OTHER; note = 2'-O-methylguanosine-3'-phosphate
  modified_base 20: mod_base = OTHER; note = 2'-O-methylguanosine-3'-phosphate
  modified_base 21: mod_base = OTHER; note = 2'-O-methyladenosine-3'-phosphorothioate
  modified_base 22: mod_base = OTHER; note = 2'-O-methyladenosine-3'-phosphorothioate
  modified_base 23: mod_base = OTHER; note = 2'-O-methylguanosine
tatgtttgattaatctttggaag

SEQ ID NO: 12538 - RNA, 23 nt, synthetic construct
  source 1..23: mol_type = other RNA
  modified_base 1: mod_base = OTHER; note = 2'-O-methyluridine-3'-phosphorothioate 5'-(E)-Vinylphosphonate
  modified_base 2: mod_base = OTHER; note = 2'-deoxy-2'-fluorouridine-3'-phosphorothioate
  modified_base 3: mod_base = OTHER; note = 2'-O-methyluridine-3'-phosphate
  modified_base 4: mod_base = OTHER; note = 2'-O-methyladenosine-3'-phosphate
  modified_base 5: mod_base = OTHER; note = 2'-O-methyladenosine-3'-phosphate
  modified_base 6: mod_base = OTHER; note = 2'-deoxy-2'-fluoroadenosine-3'-phosphate
  modified_base 7: mod_base = OTHER; note = 2'-O-methylguanosine-3'-phosphate
  modified_base 8: mod_base = OTHER; note = 2'-O-methyladenosine-3'-phosphate
  modified_base 9: mod_base = OTHER; note = 2'-O-methylcytidine-3'-phosphate
  modified_base 10: mod_base = OTHER; note = 2'-O-methyladenosine-3'-phosphate
  modified_base 11: mod_base = OTHER; note = 2'-O-methyluridine-3'-phosphate
  modified_base 12: mod_base = OTHER; note = 2'-O-methyluridine-3'-phosphate
  modified_base 13: mod_base = OTHER; note = 2'-O-methyluridine-3'-phosphate
  modified_base 14: mod_base = OTHER; note = 2'-deoxy-2'-fluorouridine-3'-phosphate
  modified_base 15: mod_base = OTHER; note = 2'-O-methylcytidine-3'-phosphate
  modified_base 16: mod_base = OTHER; note = 2'-deoxy-2'-fluoroadenosine-3'-phosphate
  modified_base 17: mod_base = OTHER; note = 2'-O-methylguanosine-3'-phosphate
  modified_base 18: mod_base = OTHER; note = 2'-O-methyladenosine-3'-phosphate
  modified_base 19: mod_base = OTHER; note = 2'-O-methylcytidine-3'-phosphate
  modified_base 20: mod_base = OTHER; note = 2'-O-methyladenosine-3'-phosphate
  modified_base 21: mod_base = OTHER; note = 2'-O-methyladenosine-3'-phosphorothioate
  modified_base 22: mod_base = OTHER; note = 2'-O-methyluridine-3'-phosphorothioate
  modified_base 23: mod_base = OTHER; note = 2'-O-methylguanosine
tttaaagacattttcagacaatg

SEQ ID NO: 12539 - RNA, 23 nt, synthetic construct
  source 1..23: mol_type = other RNA
  modified_base 1: mod_base = OTHER; note = 2'-O-methyluridine-3'-phosphorothioate 5'-(E)-Vinylphosphonate
  modified_base 2: mod_base = OTHER; note = 2'-deoxy-2'-fluoroguanosine-3'-phosphorothioate
  modified_base 3: mod_base = OTHER; note = 2'-O-methyladenosine-3'-phosphate
  modified_base 4: mod_base = OTHER; note = 2'-O-methylcytidine-3'-phosphate
  modified_base 5: mod_base = OTHER; note = 2'-O-methyladenosine-3'-phosphate
  modified_base 6: mod_base = OTHER; note = 2'-deoxy-2'-fluorouridine-3'-phosphate
  modified_base 7: mod_base = OTHER; note = 2'-O-methyluridine-3'-phosphate
  modified_base 8: mod_base = OTHER; note = 2'-O-methyluridine-3'-phosphate
  modified_base 9: mod_base = OTHER; note = 2'-O-methyluridine-3'-phosphate
  modified_base 10: mod_base = OTHER; note = 2'-O-methylcytidine-3'-phosphate
  modified_base 11: mod_base = OTHER; note = 2'-O-methyladenosine-3'-phosphate
  modified_base 12: mod_base = OTHER; note = 2'-O-methylguanosine-3'-phosphate
  modified_base 13: mod_base = OTHER; note = 2'-O-methyladenosine-3'-phosphate
  modified_base 14: mod_base = OTHER; note = 2'-deoxy-2'-fluorocytidine-3'-phosphate
  modified_base 15: mod_base = OTHER; note = 2'-O-methyladenosine-3'-phosphate
  modified_base 16: mod_base = OTHER; note = 2'-deoxy-2'-fluoroadenosine-3'-phosphate
  modified_base 17: mod_base = OTHER; note = 2'-O-methyluridine-3'-phosphate
  modified_base 18: mod_base = OTHER; note = 2'-O-methylguanosine-3'-phosphate
  modified_base 19: mod_base = OTHER; note = 2'-O-methyladenosine-3'-phosphate
  modified_base 20: mod_base = OTHER; note = 2'-O-methyladenosine-3'-phosphate
  modified_base 21: mod_base = OTHER; note = 2'-O-methyluridine-3'-phosphorothioate
  modified_base 22: mod_base = OTHER; note = 2'-O-methyladenosine-3'-phosphorothioate
  modified_base 23: mod_base = OTHER; note = 2'-O-methyluridine
tgacattttcagacaatgaatat

SEQ ID NO: 12540 - RNA, 23 nt, synthetic construct
  source 1..23: mol_type = other RNA
  modified_base 1: mod_base = OTHER; note = 2'-O-methyluridine-3'-phosphorothioate 5'-(E)-Vinylphosphonate
  modified_base 2: mod_base = OTHER; note = 2'-deoxy-2'-fluoroadenosine-3'-phosphorothioate
  modified_base 3: mod_base = OTHER; note = 2'-O-methyladenosine-3'-phosphate
  modified_base 4: mod_base = OTHER; note = 2'-O-methyladenosine-3'-phosphate
  modified_base 5: mod_base = OTHER; note = 2'-O-methylguanosine-3'-phosphate
  modified_base 6: mod_base = OTHER; note = 2'-deoxy-2'-fluoroadenosine-3'-phosphate
  modified_base 7: mod_base = OTHER; note = 2'-O-methylcytidine-3'-phosphate
  modified_base 8: mod_base = OTHER; note = 2'-O-methyladenosine-3'-phosphate
  modified_base 9: mod_base = OTHER; note = 2'-O-methyluridine-3'-phosphate
  modified_base 10: mod_base = OTHER; note = 2'-O-methyluridine-3'-phosphate
  modified_base 11: mod_base = OTHER; note = 2'-O-methyluridine-3'-phosphate
  modified_base 12: mod_base = OTHER; note = 2'-O-methyluridine-3'-phosphate
  modified_base 13: mod_base = OTHER; note = 2'-O-methylcytidine-3'-phosphate
  modified_base 14: mod_base = OTHER; note = 2'-deoxy-2'-fluoroadenosine-3'-phosphate
  modified_base 15: mod_base = OTHER; note = 2'-O-methylguanosine-3'-phosphate
  modified_base 16: mod_base = OTHER; note = 2'-deoxy-2'-fluoroadenosine-3'-phosphate
  modified_base 17: mod_base = OTHER; note = 2'-O-methylcytidine-3'-phosphate
  modified_base 18: mod_base = OTHER; note = 2'-O-methyladenosine-3'-phosphate
  modified_base 19: mod_base = OTHER; note = 2'-O-methyladenosine-3'-phosphate
  modified_base 20: mod_base = OTHER; note = 2'-O-methyluridine-3'-phosphate
  modified_base 21: mod_base = OTHER; note = 2'-O-methylguanosine-3'-phosphorothioate
  modified_base 22: mod_base = OTHER; note = 2'-O-methyladenosine-3'-phosphorothioate
  modified_base 23: mod_base = OTHER; note = 2'-O-methyladenosine
taaagacattttcagacaatgaa

SEQ ID NO: 12541 - RNA, 23 nt, synthetic construct
  source 1..23: mol_type = other RNA
  modified_base 1: mod_base = OTHER; note = 2'-O-methyluridine-3'-phosphorothioate 5'-(E)-Vinylphosphonate
  modified_base 2: mod_base = OTHER; note = 2'-deoxy-2'-fluorouridine-3'-phosphorothioate
  modified_base 3: mod_base = OTHER; note = 2'-O-methyladenosine-3'-phosphate
  modified_base 4: mod_base = OTHER; note = 2'-O-methyladenosine-3'-phosphate
  modified_base 5: mod_base = OTHER; note = 2'-O-methyladenosine-3'-phosphate
  modified_base 6: mod_base = OTHER; note = 2'-deoxy-2'-fluoroguanosine-3'-phosphate
  modified_base 7: mod_base = OTHER; note = 2'-O-methyladenosine-3'-phosphate
  modified_base 8: mod_base = OTHER; note = 2'-O-methylcytidine-3'-phosphate
  modified_base 9: mod_base = OTHER; note = 2'-O-methyladenosine-3'-phosphate
  modified_base 10: mod_base = OTHER; note = 2'-O-methyluridine-3'-phosphate
  modified_base 11: mod_base = OTHER; note = 2'-O-methyluridine-3'-phosphate
  modified_base 12: mod_base = OTHER; note = 2'-O-methyluridine-3'-phosphate
  modified_base 13: mod_base = OTHER; note = 2'-O-methyluridine-3'-phosphate
  modified_base 14: mod_base = OTHER; note = 2'-deoxy-2'-fluorocytidine-3'-phosphate
  modified_base 15: mod_base = OTHER; note = 2'-O-methyladenosine-3'-phosphate
  modified_base 16: mod_base = OTHER; note = 2'-deoxy-2'-fluoroguanosine-3'-phosphate
  modified_base 17: mod_base = OTHER; note = 2'-O-methyladenosine-3'-phosphate
  modified_base 18: mod_base = OTHER; note = 2'-O-methylcytidine-3'-phosphate
  modified_base 19: mod_base = OTHER; note = 2'-O-methyladenosine-3'-phosphate
  modified_base 20: mod_base = OTHER; note = 2'-O-methyladenosine-3'-phosphate
  modified_base 21: mod_base = OTHER; note = 2'-O-methyluridine-3'-phosphorothioate
  modified_base 22: mod_base = OTHER; note = 2'-O-methylguanosine-3'-phosphorothioate
  modified_base 23: mod_base = OTHER; note = 2'-O-methyladenosine
ttaaagacattttcagacaatga

SEQ ID NO: 12542 - RNA, 23 nt, synthetic construct
  source 1..23: mol_type = other RNA
  modified_base 1: mod_base = OTHER; note = 2'-O-methyluridine-3'-phosphorothioate 5'-(E)-Vinylphosphonate
  modified_base 2: mod_base = OTHER; note = 2'-deoxy-2'-fluorouridine-3'-phosphorothioate
  modified_base 3: mod_base = OTHER; note = 2'-O-methylcytidine-3'-phosphate
  modified_base 4: mod_base = OTHER; note = 2'-O-methyluridine-3'-phosphate
  modified_base 5: mod_base = OTHER; note = 2'-O-methyluridine-3'-phosphate
  modified_base 6: mod_base = OTHER; note = 2'-deoxy-2'-fluoroadenosine-3'-phosphate
  modified_base 7: mod_base = OTHER; note = 2'-O-methyladenosine-3'-phosphate
  modified_base 8: mod_base = OTHER; note = 2'-O-methyladenosine-3'-phosphate
  modified_base 9: mod_base = OTHER; note = 2'-O-methylguanosine-3'-phosphate
  modified_base 10: mod_base = OTHER; note = 2'-O-methyladenosine-3'-phosphate
  modified_base 11: mod_base = OTHER; note = 2'-O-methylcytidine-3'-phosphate
  modified_base 12: mod_base = OTHER; note = 2'-O-methyladenosine-3'-phosphate
  modified_base 13: mod_base = OTHER; note = 2'-O-methyluridine-3'-phosphate
  modified_base 14: mod_base = OTHER; note = 2'-deoxy-2'-fluorouridine-3'-phosphate
  modified_base 15: mod_base = OTHER; note = 2'-O-methyluridine-3'-phosphate
  modified_base 16: mod_base = OTHER; note = 2'-deoxy-2'-fluorouridine-3'-phosphate
  modified_base 17: mod_base = OTHER; note = 2'-O-methylcytidine-3'-phosphate
  modified_base 18: mod_base = OTHER; note = 2'-O-methyladenosine-3'-phosphate
  modified_base 19: mod_base = OTHER; note = 2'-O-methylguanosine-3'-phosphate
  modified_base 20: mod_base = OTHER; note = 2'-O-methyladenosine-3'-phosphate
  modified_base 21: mod_base = OTHER; note = 2'-O-methylcytidine-3'-phosphorothioate
  modified_base 22: mod_base = OTHER; note = 2'-O-methyladenosine-3'-phosphorothioate
  modified_base 23: mod_base = OTHER; note = 2'-O-methyladenosine
ttcttaaagacattttcagacaa

SEQ ID NO: 12543 - RNA, 23 nt, synthetic construct
  source 1..23: mol_type = other RNA
  modified_base 1: mod_base = OTHER; note = 2'-O-methyluridine-3'-phosphorothioate 5'-(E)-Vinylphosphonate
  modified_base 2: mod_base = OTHER; note = 2'-deoxy-2'-fluorouridine-3'-phosphorothioate
  modified_base 3: mod_base = OTHER; note = 2'-O-methyladenosine-3'-phosphate
  modified_base 4: mod_base = OTHER; note = 2'-O-methyluridine-3'-phosphate
  modified_base 5: mod_base = OTHER; note = 2'-O-methylcytidine-3'-phosphate
  modified_base 6: mod_base = OTHER; note = 2'-deoxy-2'-fluorouridine-3'-phosphate
  modified_base 7: mod_base = OTHER; note = 2'-O-methyluridine-3'-phosphate
  modified_base 8: mod_base = OTHER; note = 2'-O-methyladenosine-3'-phosphate
  modified_base 9: mod_base = OTHER; note = 2'-O-methyladenosine-3'-phosphate
  modified_base 10: mod_base = OTHER; note = 2'-O-methyladenosine-3'-phosphate
  modified_base 11: mod_base = OTHER; note = 2'-O-methylguanosine-3'-phosphate
  modified_base 12: mod_base = OTHER; note = 2'-O-methyladenosine-3'-phosphate
  modified_base 13: mod_base = OTHER; note = 2'-O-methylcytidine-3'-phosphate
  modified_base 14: mod_base = OTHER; note = 2'-deoxy-2'-fluoroadenosine-3'-phosphate
  modified_base 15: mod_base = OTHER; note = 2'-O-methyluridine-3'-phosphate
  modified_base 16: mod_base = OTHER; note = 2'-deoxy-2'-fluorouridine-3'-phosphate
  modified_base 17: mod_base = OTHER; note = 2'-O-methyluridine-3'-phosphate
  modified_base 18: mod_base = OTHER; note = 2'-O-methyluridine-3'-phosphate
  modified_base 19: mod_base = OTHER; note = 2'-O-methylcytidine-3'-phosphate
  modified_base 20: mod_base = OTHER; note = 2'-O-methyladenosine-3'-phosphate
  modified_base 21: mod_base = OTHER; note = 2'-O-methylguanosine-3'-phosphorothioate
  modified_base 22: mod_base = OTHER; note = 2'-O-methyladenosine-3'-phosphorothioate
  modified_base 23: mod_base = OTHER; note = 2'-O-methylcytidine
ttatcttaaagacattttcagac

SEQ ID NO: 12544 - RNA, 23 nt, synthetic construct
  source 1..23: mol_type = other RNA
  modified_base 1: mod_base = OTHER; note = 2'-O-methyluridine-3'-phosphorothioate 5'-(E)-Vinylphosphonate
  modified_base 2: mod_base = OTHER; note = 2'-deoxy-2'-fluorouridine-3'-phosphorothioate
  modified_base 3: mod_base = OTHER; note = 2'-O-methyladenosine-3'-phosphate
  modified_base 4: mod_base = OTHER; note = 2'-O-methylcytidine-3'-phosphate
  modified_base 5: mod_base = OTHER; note = 2'-O-methyladenosine-3'-phosphate
  modified_base 6: mod_base = OTHER; note = 2'-deoxy-2'-fluoroadenosine-3'-phosphate
  modified_base 7: mod_base = OTHER; note = 2'-O-methyladenosine-3'-phosphate
  modified_base 8: mod_base = OTHER; note = 2'-O-methylguanosine-3'-phosphate
  modified_base 9: mod_base = OTHER; note = 2'-O-methylguanosine-3'-phosphate
  modified_base 10: mod_base = OTHER; note = 2'-O-methyladenosine-3'-phosphate
  modified_base 11: mod_base = OTHER; note = 2'-O-methyladenosine-3'-phosphate
  modified_base 12: mod_base = OTHER; note = 2'-O-methyladenosine-3'-phosphate
  modified_base 13: mod_base = OTHER; note = 2'-O-methyluridine-3'-phosphate
  modified_base 14: mod_base = OTHER; note = 2'-deoxy-2'-fluoroadenosine-3'-phosphate
  modified_base 15: mod_base = OTHER; note = 2'-O-methylguanosine-3'-phosphate
  modified_base 16: mod_base = OTHER; note = 2'-deoxy-2'-fluoroguanosine-3'-phosphate
  modified_base 17: mod_base = OTHER; note = 2'-O-methylguanosine-3'-phosphate
  modified_base 18: mod_base = OTHER; note = 2'-O-methyladenosine-3'-phosphate
  modified_base 19: mod_base = OTHER; note = 2'-O-methylcytidine-3'-phosphate
  modified_base 20: mod_base = OTHER; note = 2'-O-methylcytidine-3'-phosphate
  modified_base 21: mod_base = OTHER; note = 2'-O-methyluridine-3'-phosphorothioate
  modified_base 22: mod_base = OTHER; note = 2'-O-methylcytidine-3'-phosphorothioate
  modified_base 23: mod_base = OTHER; note = 2'-O-methyluridine
ttacaaaggaaatagggacctct

SEQ ID NO: 12545 - RNA, 23 nt, synthetic construct
  source 1..23: mol_type = other RNA
  modified_base 1: mod_base = OTHER; note = 2'-O-methyluridine-3'-phosphorothioate 5'-(E)-Vinylphosphonate
  modified_base 2: mod_base = OTHER; note = 2'-deoxy-2'-fluoroguanosine-3'-phosphorothioate
  modified_base 3: mod_base = OTHER; note = 2'-O-methyluridine-3'-phosphate
  modified_base 4: mod_base = OTHER; note = 2'-O-methyladenosine-3'-phosphate
  modified_base 5: mod_base = OTHER; note = 2'-O-methylcytidine-3'-phosphate
  modified_base 6: mod_base = OTHER; note = 2'-deoxy-2'-fluoroadenosine-3'-phosphate
  modified_base 7: mod_base = OTHER; note = 2'-O-methyladenosine-3'-phosphate
  modified_base 8: mod_base = OTHER; note = 2'-O-methyladenosine-3'-phosphate
  modified_base 9: mod_base = OTHER; note = 2'-O-methylguanosine-3'-phosphate
  modified_base 10: mod_base = OTHER; note = 2'-O-methylguanosine-3'-phosphate
  modified_base 11: mod_base = OTHER; note = 2'-O-methyladenosine-3'-phosphate
  modified_base 12: mod_base = OTHER; note = 2'-O-methyladenosine-3'-phosphate
  modified_base 13: mod_base = OTHER; note = 2'-O-methyladenosine-3'-phosphate
  modified_base 14: mod_base = OTHER; note = 2'-deoxy-2'-fluorouridine-3'-phosphate
  modified_base 15: mod_base = OTHER; note = 2'-O-methyladenosine-3'-phosphate
  modified_base 16: mod_base = OTHER; note = 2'-deoxy-2'-fluoroguanosine-3'-phosphate
  modified_base 17: mod_base = OTHER; note = 2'-O-methylguanosine-3'-phosphate
  modified_base 18: mod_base = OTHER; note = 2'-O-methylguanosine-3'-phosphate
  modified_base 19: mod_base = OTHER; note = 2'-O-methyladenosine-3'-phosphate
  modified_base 20: mod_base = OTHER; note = 2'-O-methylcytidine-3'-phosphate
  modified_base 21: mod_base = OTHER; note = 2'-O-methylcytidine-3'-phosphorothioate
  modified_base 22: mod_base = OTHER; note = 2'-O-methyluridine-3'-phosphorothioate
  modified_base 23: mod_base = OTHER; note = 2'-O-methylcytidine
tgtacaaaggaaatagggacctc

SEQ ID NO: 12546 - RNA, 23 nt, synthetic construct
  source 1..23: mol_type = other RNA
  modified_base 1: mod_base = OTHER; note = 2'-O-methyluridine-3'-phosphorothioate 5'-(E)-Vinylphosphonate
  modified_base 2: mod_base = OTHER; note = 2'-deoxy-2'-fluorouridine-3'-phosphorothioate
  modified_base 3: mod_base = OTHER; note = 2'-O-methylguanosine-3'-phosphate
  modified_base 4: mod_base = OTHER; note = 2'-O-methyluridine-3'-phosphate
  modified_base 5: mod_base = OTHER; note = 2'-O-methyladenosine-3'-phosphate
  modified_base 6: mod_base = OTHER; note = 2'-deoxy-2'-fluorocytidine-3'-phosphate
  modified_base 7: mod_base = OTHER; note = 2'-O-methyladenosine-3'-phosphate
  modified_base 8: mod_base = OTHER; note = 2'-O-methyladenosine-3'-phosphate
  modified_base 9: mod_base = OTHER; note = 2'-O-methyladenosine-3'-phosphate
  modified_base 10: mod_base = OTHER; note = 2'-O-methylguanosine-3'-phosphate
  modified_base 11: mod_base = OTHER; note = 2'-O-methylguanosine-3'-phosphate
  modified_base 12: mod_base = OTHER; note = 2'-O-methyladenosine-3'-phosphate
  modified_base 13: mod_base = OTHER; note = 2'-O-methyladenosine-3'-phosphate
  modified_base 14: mod_base = OTHER; note = 2'-deoxy-2'-fluoroadenosine-3'-phosphate
  modified_base 15: mod_base = OTHER; note = 2'-O-methyluridine-3'-phosphate
  modified_base 16: mod_base = OTHER; note = 2'-deoxy-2'-fluoroadenosine-3'-phosphate
  modified_base 17: mod_base = OTHER; note = 2'-O-methylguanosine-3'-phosphate
  modified_base 18: mod_base = OTHER; note = 2'-O-methylguanosine-3'-phosphate
  modified_base 19: mod_base = OTHER; note = 2'-O-methylguanosine-3'-phosphate
  modified_base 20: mod_base = OTHER; note = 2'-O-methyladenosine-3'-phosphate
  modified_base 21: mod_base = OTHER; note = 2'-O-methylcytidine-3'-phosphorothioate
  modified_base 22: mod_base = OTHER; note = 2'-O-methylcytidine-3'-phosphorothioate
  modified_base 23: mod_base = OTHER; note = 2'-O-methyluridine
ttgtacaaaggaaatagggacct

SEQ ID NO: 12547 - RNA, 23 nt, synthetic construct
  source 1..23: mol_type = other RNA
  modified_base 1: mod_base = OTHER; note = 2'-O-methyluridine-3'-phosphorothioate 5'-(E)-Vinylphosphonate
  modified_base 2: mod_base = OTHER; note = 2'-deoxy-2'-fluoroadenosine-3'-phosphorothioate
  modified_base 3: mod_base = OTHER; note = 2'-O-methyluridine-3'-phosphate
  modified_base 4: mod_base = OTHER; note = 2'-O-methylguanosine-3'-phosphate
  modified_base 5: mod_base = OTHER; note = 2'-O-methyluridine-3'-phosphate
  modified_base 6: mod_base = OTHER; note = 2'-deoxy-2'-fluoroadenosine-3'-phosphate
  modified_base 7: mod_base = OTHER; note = 2'-O-methylcytidine-3'-phosphate
  modified_base 8: mod_base = OTHER; note = 2'-O-methyladenosine-3'-phosphate
  modified_base 9: mod_base = OTHER; note = 2'-O-methyladenosine-3'-phosphate
  modified_base 10: mod_base = OTHER; note = 2'-O-methyladenosine-3'-phosphate
  modified_base 11: mod_base = OTHER; note = 2'-O-methylguanosine-3'-phosphate
  modified_base 12: mod_base = OTHER; note = 2'-O-methylguanosine-3'-phosphate
  modified_base 13: mod_base = OTHER; note = 2'-O-methyladenosine-3'-phosphate
  modified_base 14: mod_base = OTHER; note = 2'-deoxy-2'-fluoroadenosine-3'-phosphate
  modified_base 15: mod_base = OTHER; note = 2'-O-methyladenosine-3'-phosphate
  modified_base 16: mod_base = OTHER; note = 2'-deoxy-2'-fluorouridine-3'-phosphate
  modified_base 17: mod_base = OTHER; note = 2'-O-methyladenosine-3'-phosphate
  modified_base 18: mod_base = OTHER; note = 2'-O-methylguanosine-3'-phosphate
  modified_base 19: mod_base = OTHER; note = 2'-O-methylguanosine-3'-phosphate
  modified_base 20: mod_base = OTHER; note = 2'-O-methylguanosine-3'-phosphate
  modified_base 21: mod_base = OTHER; note = 2'-O-methyladenosine-3'-phosphorothioate
  modified_base 22: mod_base = OTHER; note = 2'-O-methylcytidine-3'-phosphorothioate
  modified_base 23: mod_base = OTHER; note = 2'-O-methylcytidine
tatgtacaaaggaaatagggacc

SEQ ID NO: 12548 - RNA, 23 nt, synthetic construct
  source 1..23: mol_type = other RNA
  modified_base 1: mod_base = OTHER; note = 2'-O-methyluridine-3'-phosphorothioate 5'-(E)-Vinylphosphonate
  modified_base 2: mod_base = OTHER; note = 2'-deoxy-2'-fluorouridine-3'-phosphorothioate
  modified_base 3: mod_base = OTHER; note = 2'-O-methyladenosine-3'-phosphate
  modified_base 4: mod_base = OTHER; note = 2'-O-methyluridine-3'-phosphate
  modified_base 5: mod_base = OTHER; note = 2'-O-methylguanosine-3'-phosphate
  modified_base 6: mod_base = OTHER; note = 2'-deoxy-2'-fluorouridine-3'-phosphate
  modified_base 7: mod_base = OTHER; note = 2'-O-methyladenosine-3'-phosphate
  modified_base 8: mod_base = OTHER; note = 2'-O-methylcytidine-3'-phosphate
  modified_base 9: mod_base = OTHER; note = 2'-O-methyladenosine-3'-phosphate
  modified_base 10: mod_base = OTHER; note = 2'-O-methyladenosine-3'-phosphate
  modified_base 11: mod_base = OTHER; note = 2'-O-methyladenosine-3'-phosphate
  modified_base 12: mod_base = OTHER; note = 2'-O-methylguanosine-3'-phosphate
  modified_base 13: mod_base = OTHER; note = 2'-O-methylguanosine-3'-phosphate
  modified_base 14: mod_base = OTHER; note = 2'-deoxy-2'-fluoroadenosine-3'-phosphate
  modified_base 15: mod_base = OTHER; note = 2'-O-methyladenosine-3'-phosphate
  modified_base 16: mod_base = OTHER; note = 2'-deoxy-2'-fluoroadenosine-3'-phosphate
  modified_base 17: mod_base = OTHER; note = 2'-O-methyluridine-3'-phosphate
  modified_base 18: mod_base = OTHER; note = 2'-O-methyladenosine-3'-phosphate
  modified_base 19: mod_base = OTHER; note = 2'-O-methylguanosine-3'-phosphate
  modified_base 20: mod_base = OTHER; note = 2'-O-methylguanosine-3'-phosphate
  modified_base 21: mod_base = OTHER; note = 2'-O-methylguanosine-3'-phosphorothioate
  modified_base 22: mod_base = OTHER; note = 2'-O-methyladenosine-3'-phosphorothioate
  modified_base 23: mod_base = OTHER; note = 2'-O-methylcytidine
ttatgtacaaaggaaatagggac

SEQ ID NO: 12549 - RNA, 23 nt, synthetic construct
  source 1..23: mol_type = other RNA
  modified_base 1: mod_base = OTHER; note = 2'-O-methyluridine-3'-phosphorothioate 5'-(E)-Vinylphosphonate
  modified_base 2: mod_base = OTHER; note = 2'-deoxy-2'-fluoroguanosine-3'-phosphorothioate
  modified_base 3: mod_base = OTHER; note = 2'-O-methyluridine-3'-phosphate
  modified_base 4: mod_base = OTHER; note = 2'-O-methyladenosine-3'-phosphate
  modified_base 5: mod_base = OTHER; note = 2'-O-methyluridine-3'-phosphate
  modified_base 6: mod_base = OTHER; note = 2'-deoxy-2'-fluoroguanosine-3'-phosphate
  modified_base 7: mod_base = OTHER; note = 2'-O-methyluridine-3'-phosphate
  modified_base 8: mod_base = OTHER; note = 2'-O-methyladenosine-3'-phosphate
  modified_base 9: mod_base = OTHER; note = 2'-O-methylcytidine-3'-phosphate
  modified_base 10: mod_base = OTHER; note = 2'-O-methyladenosine-3'-phosphate
  modified_base 11: mod_base = OTHER; note = 2'-O-methyladenosine-3'-phosphate
  modified_base 12: mod_base = OTHER; note = 2'-O-methyladenosine-3'-phosphate
  modified_base 13: mod_base = OTHER; note = 2'-O-methylguanosine-3'-phosphate
  modified_base 14: mod_base = OTHER; note = 2'-deoxy-2'-fluoroguanosine-3'-phosphate
  modified_base 15: mod_base = OTHER; note = 2'-O-methyladenosine-3'-phosphate
  modified_base 16: mod_base = OTHER; note = 2'-deoxy-2'-fluoroadenosine-3'-phosphate
  modified_base 17: mod_base = OTHER; note = 2'-O-methyladenosine-3'-phosphate
  modified_base 18: mod_base = OTHER; note = 2'-O-methyluridine-3'-phosphate
  modified_base 19: mod_base = OTHER; note = 2'-O-methyladenosine-3'-phosphate
  modified_base 20: mod_base = OTHER; note = 2'-O-methylguanosine-3'-phosphate
  modified_base 21: mod_base = OTHER; note = 2'-O-methylguanosine-3'-phosphorothioate
  modified_base 22: mod_base = OTHER; note = 2'-O-methylguanosine-3'-phosphorothioate
  modified_base 23: mod_base = OTHER; note = 2'-O-methyladenosine
tgtatgtacaaaggaaataggga

SEQ ID NO: 12550 - RNA, 23 nt, synthetic construct
  source 1..23: mol_type = other RNA
  modified_base 1: mod_base = OTHER; note = 2'-O-methyluridine-3'-phosphorothioate 5'-(E)-Vinylphosphonate
  modified_base 2: mod_base = OTHER; note = 2'-deoxy-2'-fluorouridine-3'-phosphorothioate
  modified_base 3: mod_base = OTHER; note = 2'-O-methylguanosine-3'-phosphate
  modified_base 4: mod_base = OTHER; note = 2'-O-methyluridine-3'-phosphate
  modified_base 5: mod_base = OTHER; note = 2'-O-methyladenosine-3'-phosphate
  modified_base 6: mod_base = OTHER; note = 2'-deoxy-2'-fluorouridine-3'-phosphate
  modified_base 7: mod_base = OTHER; note = 2'-O-methylguanosine-3'-phosphate
  modified_base 8: mod_base = OTHER; note = 2'-O-methyluridine-3'-phosphate
  modified_base 9: mod_base = OTHER; note = 2'-O-methyladenosine-3'-phosphate
  modified_base 10: mod_base = OTHER; note = 2'-O-methylcytidine-3'-phosphate
  modified_base 11: mod_base = OTHER; note = 2'-O-methyladenosine-3'-phosphate
  modified_base 12: mod_base = OTHER; note = 2'-O-methyladenosine-3'-phosphate
  modified_base 13: mod_base = OTHER; note = 2'-O-methyladenosine-3'-phosphate
  modified_base 14: mod_base = OTHER; note = 2'-deoxy-2'-fluoroguanosine-3'-phosphate
  modified_base 15: mod_base = OTHER; note = 2'-O-methylguanosine-3'-phosphate
  modified_base 16: mod_base = OTHER; note = 2'-deoxy-2'-fluoroadenosine-3'-phosphate
  modified_base 17: mod_base = OTHER; note = 2'-O-methyladenosine-3'-phosphate
  modified_base 18: mod_base = OTHER; note = 2'-O-methyladenosine-3'-phosphate
  modified_base 19: mod_base = OTHER; note = 2'-O-methyluridine-3'-phosphate
  modified_base 20: mod_base = OTHER; note = 2'-O-methyladenosine-3'-phosphate
  modified_base 21: mod_base = OTHER; note = 2'-O-methylguanosine-3'-phosphorothioate
  modified_base 22: mod_base = OTHER; note = 2'-O-methylguanosine-3'-phosphorothioate
  modified_base 23: mod_base = OTHER; note = 2'-O-methylguanosine
ttgtatgtacaaaggaaataggg

SEQ ID NO: 12551 - RNA, 23 nt, synthetic construct
  source 1..23: mol_type = other RNA
  modified_base 1: mod_base = OTHER; note = 2'-O-methyluridine-3'-phosphorothioate 5'-(E)-Vinylphosphonate
  modified_base 2: mod_base = OTHER; note = 2'-deoxy-2'-fluoroguanosine-3'-phosphorothioate
  modified_base 3: mod_base = OTHER; note = 2'-O-methyluridine-3'-phosphate
  modified_base 4: mod_base = OTHER; note = 2'-O-methylguanosine-3'-phosphate
  modified_base 5: mod_base = OTHER; note = 2'-O-methyluridine-3'-phosphate
  modified_base 6: mod_base = OTHER; note = 2'-deoxy-2'-fluoroadenosine-3'-phosphate
  modified_base 7: mod_base = OTHER; note = 2'-O-methyluridine-3'-phosphate
  modified_base 8: mod_base = OTHER; note = 2'-O-methylguanosine-3'-phosphate
  modified_base 9: mod_base = OTHER; note = 2'-O-methyluridine-3'-phosphate
  modified_base 10: mod_base = OTHER; note = 2'-O-methyladenosine-3'-phosphate
  modified_base 11: mod_base = OTHER; note = 2'-O-methylcytidine-3'-phosphate
  modified_base 12: mod_base = OTHER; note = 2'-O-methyladenosine-3'-phosphate
  modified_base 13: mod_base = OTHER; note = 2'-O-methyladenosine-3'-phosphate
  modified_base 14: mod_base = OTHER; note = 2'-deoxy-2'-fluoroadenosine-3'-phosphate
  modified_base 15: mod_base = OTHER; note = 2'-O-methylguanosine-3'-phosphate
  modified_base 16: mod_base = OTHER; note = 2'-deoxy-2'-fluoroguanosine-3'-phosphate
  modified_base 17: mod_base = OTHER; note = 2'-O-methyladenosine-3'-phosphate
  modified_base 18: mod_base = OTHER; note = 2'-O-methyladenosine-3'-phosphate
  modified_base 19: mod_base = OTHER; note = 2'-O-methyladenosine-3'-phosphate
  modified_base 20: mod_base = OTHER; note = 2'-O-methyluridine-3'-phosphate
  modified_base 21: mod_base = OTHER; note = 2'-O-methyladenosine-3'-phosphorothioate
  modified_base 22: mod_base = OTHER; note = 2'-O-methylguanosine-3'-phosphorothioate
  modified_base 23: mod_base = OTHER; note = 2'-O-methylguanosine
tgtgtatgtacaaaggaaatagg

SEQ ID NO: 12552 - RNA, 23 nt, synthetic construct
  source 1..23: mol_type = other RNA
  modified_base 1: mod_base = OTHER; note = 2'-O-methyluridine-3'-phosphorothioate 5'-(E)-Vinylphosphonate
  modified_base 2: mod_base = OTHER; note = 2'-deoxy-2'-fluorocytidine-3'-phosphorothioate
  modified_base 3: mod_base = OTHER; note = 2'-O-methyluridine-3'-phosphate
  modified_base 4: mod_base = OTHER; note = 2'-O-methylguanosine-3'-phosphate
  modified_base 5: mod_base = OTHER; note = 2'-O-methyluridine-3'-phosphate
  modified_base 6: mod_base = OTHER; note = 2'-deoxy-2'-fluorocytidine-3'-phosphate
  modified_base 7: mod_base = OTHER; note = 2'-O-methyluridine-3'-phosphate
  modified_base 8: mod_base = OTHER; note = 2'-O-methyluridine-3'-phosphate
  modified_base 9: mod_base = OTHER; note = 2'-O-methyluridine-3'-phosphate
  modified_base 10: mod_base = OTHER; note = 2'-O-methyluridine-3'-phosphate
  modified_base 11: mod_base = OTHER; note = 2'-O-methylcytidine-3'-phosphate
  modified_base 12: mod_base = OTHER; note = 2'-O-methyluridine-3'-phosphate
  modified_base 13: mod_base = OTHER; note = 2'-O-methyluridine-3'-phosphate
  modified_base 14: mod_base = OTHER; note = 2'-deoxy-2'-fluorouridine-3'-phosphate
  modified_base 15: mod_base = OTHER; note = 2'-O-methylcytidine-3'-phosphate
  modified_base 16: mod_base = OTHER; note = 2'-deoxy-2'-fluorouridine-3'-phosphate
  modified_base 17: mod_base = OTHER; note = 2'-O-methyladenosine-3'-phosphate
  modified_base 18: mod_base = OTHER; note = 2'-O-methyladenosine-3'-phosphate
  modified_base 19: mod_base = OTHER; note = 2'-O-methylguanosine-3'-phosphate
  modified_base 20: mod_base = OTHER; note = 2'-O-methyluridine-3'-phosphate
  modified_base 21: mod_base = OTHER; note = 2'-O-methylguanosine-3'-phosphorothioate
  modified_base 22: mod_base = OTHER; note = 2'-O-methyluridine-3'-phosphorothioate
  modified_base 23: mod_base = OTHER; note = 2'-O-methylguanosine
tctgtcttttctttctaagtgtg

SEQ ID NO: 12553 - RNA, 23 nt, synthetic construct
  source 1..23: mol_type = other RNA
  modified_base 1: mod_base = OTHER; note = 2'-O-methyluridine-3'-phosphorothioate 5'-(E)-Vinylphosphonate
  modified_base 2: mod_base = OTHER; note = 2'-deoxy-2'-fluorouridine-3'-phosphorothioate
  modified_base 3: mod_base = OTHER; note = 2'-O-methylcytidine-3'-phosphate
  modified_base 4: mod_base = OTHER; note = 2'-O-methyluridine-3'-phosphate
  modified_base 5: mod_base = OTHER; note = 2'-O-methylguanosine-3'-phosphate
  modified_base 6: mod_base = OTHER; note = 2'-deoxy-2'-fluorouridine-3'-phosphate
  modified_base 7: mod_base = OTHER; note = 2'-O-methylcytidine-3'-phosphate
  modified_base 8: mod_base = OTHER; note = 2'-O-methyluridine-3'-phosphate
  modified_base 9: mod_base = OTHER; note = 2'-O-methyluridine-3'-phosphate
  modified_base 10: mod_base = OTHER; note = 2'-O-methyluridine-3'-phosphate
  modified_base 11: mod_base = OTHER; note = 2'-O-methyluridine-3'-phosphate
  modified_base 12: mod_base = OTHER; note = 2'-O-methylcytidine-3'-phosphate
  modified_base 13: mod_base = OTHER; note = 2'-O-methyluridine-3'-phosphate
  modified_base 14: mod_base = OTHER; note = 2'-deoxy-2'-fluorouridine-3'-phosphate
  modified_base 15: mod_base = OTHER; note = 2'-O-methyluridine-3'-phosphate
  modified_base 16: mod_base = OTHER; note = 2'-deoxy-2'-fluorocytidine-3'-phosphate
  modified_base 17: mod_base = OTHER; note = 2'-O-methyluridine-3'-phosphate
  modified_base 18: mod_base = OTHER; note = 2'-O-methyladenosine-3'-phosphate
  modified_base 19: mod_base = OTHER; note = 2'-O-methyladenosine-3'-phosphate
  modified_base 20: mod_base = OTHER; note = 2'-O-methylguanosine-3'-phosphate
  modified_base 21: mod_base = OTHER; note = 2'-O-methyluridine-3'-phosphorothioate
  modified_base 22: mod_base = OTHER; note = 2'-O-methylguanosine-3'-phosphorothioate
  modified_base 23: mod_base = OTHER; note = 2'-O-methyluridine
ttctgtcttttctttctaagtgt

SEQ ID NO: 12554 - RNA, 23 nt, synthetic construct
  source 1..23: mol_type = other RNA
  modified_base 1: mod_base = OTHER; note = 2'-O-methyluridine-3'-phosphorothioate 5'-(E)-Vinylphosphonate
  modified_base 2: mod_base = OTHER; note = 2'-deoxy-2'-fluorouridine-3'-phosphorothioate
  modified_base 3: mod_base = OTHER; note = 2'-O-methyluridine-3'-phosphate
  modified_base 4: mod_base = OTHER; note = 2'-O-methylcytidine-3'-phosphate
  modified_base 5: mod_base = OTHER; note = 2'-O-methyluridine-3'-phosphate
  modified_base 6: mod_base = OTHER; note = 2'-deoxy-2'-fluoroguanosine-3'-phosphate
  modified_base 7: mod_base = OTHER; note = 2'-O-methyluridine-3'-phosphate
  modified_base 8: mod_base = OTHER; note = 2'-O-methylcytidine-3'-phosphate
  modified_base 9: mod_base = OTHER; note = 2'-O-methyluridine-3'-phosphate
  modified_base 10: mod_base = OTHER; note = 2'-O-methyluridine-3'-phosphate
  modified_base 11: mod_base = OTHER; note = 2'-O-methyluridine-3'-phosphate
  modified_base 12: mod_base = OTHER; note = 2'-O-methyluridine-3'-phosphate
  modified_base 13: mod_base = OTHER; note = 2'-O-methylcytidine-3'-phosphate
  modified_base 14: mod_base = OTHER; note = 2'-deoxy-2'-fluorouridine-3'-phosphate
  modified_base 15: mod_base = OTHER; note = 2'-O-methyluridine-3'-phosphate
  modified_base 16: mod_base = OTHER; note = 2'-deoxy-2'-fluorouridine-3'-phosphate
  modified_base 17: mod_base = OTHER; note = 2'-O-methylcytidine-3'-phosphate
  modified_base 18: mod_base = OTHER; note = 2'-O-methyluridine-3'-phosphate
  modified_base 19: mod_base = OTHER; note = 2'-O-methyladenosine-3'-phosphate
  modified_base 20: mod_base = OTHER; note = 2'-O-methyladenosine-3'-phosphate
  modified_base 21: mod_base = OTHER; note = 2'-O-methylguanosine-3'-phosphorothioate
  modified_base 22: mod_base = OTHER; note = 2'-O-methyluridine-3'-phosphorothioate
  modified_base 23: mod_base = OTHER; note = 2'-O-methylguanosine
tttctgtcttttctttctaagtg

SEQ ID NO: 12555 - RNA, 23 nt, synthetic construct
  source 1..23: mol_type = other RNA
  modified_base 1: mod_base = OTHER; note = 2'-O-methyluridine-3'-phosphorothioate 5'-(E)-Vinylphosphonate
  modified_base 2: mod_base = OTHER; note = 2'-deoxy-2'-fluorouridine-3'-phosphorothioate
  modified_base 3: mod_base = OTHER; note = 2'-O-methyluridine-3'-phosphate
  modified_base 4: mod_base = OTHER; note = 2'-O-methyluridine-3'-phosphate
  modified_base 5: mod_base = OTHER; note = 2'-O-methylcytidine-3'-phosphate
  modified_base 6: mod_base = OTHER; note = 2'-deoxy-2'-fluorouridine-3'-phosphate
  modified_base 7: mod_base = OTHER; note = 2'-O-methylguanosine-3'-phosphate
  modified_base 8: mod_base = OTHER; note = 2'-O-methyluridine-3'-phosphate
  modified_base 9: mod_base = OTHER; note = 2'-O-methylcytidine-3'-phosphate
  modified_base 10: mod_base = OTHER; note = 2'-O-methyluridine-3'-phosphate
  modified_base 11: mod_base = OTHER; note = 2'-O-methyluridine-3'-phosphate
  modified_base 12: mod_base = OTHER; note = 2'-O-methyluridine-3'-phosphate
  modified_base 13: mod_base = OTHER; note = 2'-O-methyluridine-3'-phosphate
  modified_base 14: mod_base = OTHER; note = 2'-deoxy-2'-fluorocytidine-3'-phosphate
  modified_base 15: mod_base = OTHER; note = 2'-O-methyluridine-3'-phosphate
  modified_base 16: mod_base = OTHER; note = 2'-deoxy-2'-fluorouridine-3'-phosphate
  modified_base 17: mod_base = OTHER; note = 2'-O-methyluridine-3'-phosphate
  modified_base 18: mod_base = OTHER; note = 2'-O-methylcytidine-3'-phosphate
  modified_base 19: mod_base = OTHER; note = 2'-O-methyluridine-3'-phosphate
  modified_base 20: mod_base = OTHER; note = 2'-O-methyladenosine-3'-phosphate
  modified_base 21: mod_base = OTHER; note = 2'-O-methyladenosine-3'-phosphorothioate
  modified_base 22: mod_base = OTHER; note = 2'-O-methylguanosine-3'-phosphorothioate
  modified_base 23: mod_base = OTHER; note = 2'-O-methyluridine
ttttctgtcttttctttctaagt

SEQ ID NO: 12556 - RNA, 23 nt, synthetic construct
  source 1..23: mol_type = other RNA
  modified_base 1: mod_base = OTHER; note = 2'-O-methyluridine-3'-phosphorothioate 5'-(E)-Vinylphosphonate
  modified_base 2: mod_base = OTHER; note = 2'-deoxy-2'-fluorouridine-3'-phosphorothioate
  modified_base 3: mod_base = OTHER; note = 2'-O-methyluridine-3'-phosphate
  modified_base 4: mod_base = OTHER; note = 2'-O-methyluridine-3'-phosphate
  modified_base 5: mod_base = OTHER; note = 2'-O-methyluridine-3'-phosphate
  modified_base 6: mod_base = OTHER; note = 2'-deoxy-2'-fluorocytidine-3'-phosphate
  modified_base 7: mod_base = OTHER; note = 2'-O-methyluridine-3'-phosphate
  modified_base 8: mod_base = OTHER; note = 2'-O-methylguanosine-3'-phosphate
  modified_base 9: mod_base = OTHER; note = 2'-O-methyluridine-3'-phosphate
  modified_base 10: mod_base = OTHER; note = 2'-O-methylcytidine-3'-phosphate
  modified_base 11: mod_base = OTHER; note = 2'-O-methyluridine-3'-phosphate
  modified_base 12: mod_base = OTHER; note = 2'-O-methyluridine-3'-phosphate
  modified_base 13: mod_base = OTHER; note = 2'-O-methyluridine-3'-phosphate
  modified_base 14: mod_base = OTHER; note = 2'-deoxy-2'-fluorouridine-3'-phosphate
  modified_base 15: mod_base = OTHER; note = 2'-O-methylcytidine-3'-phosphate
  modified_base 16: mod_base = OTHER; note = 2'-deoxy-2'-fluorouridine-3'-phosphate
  modified_base 17: mod_base = OTHER; note = 2'-O-methyluridine-3'-phosphate
  modified_base 18: mod_base = OTHER; note = 2'-O-methyluridine-3'-phosphate
  modified_base 19: mod_base = OTHER; note = 2'-O-methylcytidine-3'-phosphate
  modified_base 20: mod_base = OTHER; note = 2'-O-methyluridine-3'-phosphate
  modified_base 21: mod_base = OTHER; note = 2'-O-methyladenosine-3'-phosphorothioate
  modified_base 22: mod_base = OTHER; note = 2'-O-methyladenosine-3'-phosphorothioate
  modified_base 23: mod_base = OTHER; note = 2'-O-methylguanosine
tttttctgtcttttctttctaag

SEQ ID NO: 12557 - RNA, 23 nt, synthetic construct
  source 1..23: mol_type = other RNA
  modified_base 1: mod_base = OTHER; note = 2'-O-methyluridine-3'-phosphorothioate 5'-(E)-Vinylphosphonate
  modified_base 2: mod_base = OTHER; note = 2'-deoxy-2'-fluoroadenosine-3'-phosphorothioate
  modified_base 3: mod_base = OTHER; note = 2'-O-methyladenosine-3'-phosphate
  modified_base 4: mod_base = OTHER; note = 2'-O-methyladenosine-3'-phosphate
  modified_base 5: mod_base = OTHER; note = 2'-O-methyluridine-3'-phosphate
  modified_base 6: mod_base = OTHER; note = 2'-deoxy-2'-fluoroadenosine-3'-phosphate
  modified_base 7: mod_base = OTHER; note = 2'-O-methyluridine-3'-phosphate
  modified_base 8: mod_base = OTHER; note = 2'-O-methyluridine-3'-phosphate
  modified_base 9: mod_base = OTHER; note = 2'-O-methyluridine-3'-phosphate
  modified_base 10: mod_base = OTHER; note = 2'-O-methylcytidine-3'-phosphate
  modified_base 11: mod_base = OTHER; note = 2'-O-methylcytidine-3'-phosphate
  modified_base 12: mod_base = OTHER; note = 2'-O-methyluridine-3'-phosphate
  modified_base 13: mod_base = OTHER; note = 2'-O-methyluridine-3'-phosphate
  modified_base 14: mod_base = OTHER; note = 2'-deoxy-2'-fluorocytidine-3'-phosphate
  modified_base 15: mod_base = OTHER; note = 2'-O-methylcytidine-3'-phosphate
  modified_base 16: mod_base = OTHER; note = 2'-deoxy-2'-fluorouridine-3'-phosphate
  modified_base 17: mod_base = OTHER; note = 2'-O-methyluridine-3'-phosphate
  modified_base 18: mod_base = OTHER; note = 2'-O-methylcytidine-3'-phosphate
  modified_base 19: mod_base = OTHER; note = 2'-O-methylcytidine-3'-phosphate
  modified_base 20: mod_base = OTHER; note = 2'-O-methyluridine-3'-phosphate
  modified_base 21: mod_base = OTHER; note = 2'-O-methylcytidine-3'-phosphorothioate
  modified_base 22: mod_base = OTHER; note = 2'-O-methyluridine-3'-phosphorothioate
  modified_base 23: mod_base = OTHER; note = 2'-O-methyluridine
taaatatttccttccttcctctt

SEQ ID NO: 12558 - RNA, 23 nt, synthetic construct
  source 1..23: mol_type = other RNA
  modified_base 1: mod_base = OTHER; note = 2'-O-methyluridine-3'-phosphorothioate 5'-(E)-Vinylphosphonate
  modified_base 2: mod_base = OTHER; note = 2'-deoxy-2'-fluoroadenosine-3'-phosphorothioate
  modified_base 3: mod_base = OTHER; note = 2'-O-methyladenosine-3'-phosphate
  modified_base 4: mod_base = OTHER; note = 2'-O-methyladenosine-3'-phosphate
  modified_base 5: mod_base = OTHER; note = 2'-O-methyladenosine-3'-phosphate
  modified_base 6: mod_base = OTHER; note = 2'-deoxy-2'-fluorouridine-3'-phosphate
  modified_base 7: mod_base = OTHER; note = 2'-O-methyladenosine-3'-phosphate
  modified_base 8: mod_base = OTHER; note = 2'-O-methyluridine-3'-phosphate
  modified_base 9: mod_base = OTHER; note = 2'-O-methyluridine-3'-phosphate
  modified_base 10: mod_base = OTHER; note = 2'-O-methyluridine-3'-phosphate
  modified_base 11: mod_base = OTHER; note = 2'-O-methylcytidine-3'-phosphate
  modified_base 12: mod_base = OTHER; note = 2'-O-methylcytidine-3'-phosphate
  modified_base 13: mod_base = OTHER; note = 2'-O-methyluridine-3'-phosphate
  modified_base 14: mod_base = OTHER; note = 2'-deoxy-2'-fluorouridine-3'-phosphate
  modified_base 15: mod_base = OTHER; note = 2'-O-methylcytidine-3'-phosphate
  modified_base 16: mod_base = OTHER; note = 2'-deoxy-2'-fluorocytidine-3'-phosphate
  modified_base 17: mod_base = OTHER; note = 2'-O-methyluridine-3'-phosphate
  modified_base 18: mod_base = OTHER; note = 2'-O-methyluridine-3'-phosphate
  modified_base 19: mod_base = OTHER; note = 2'-O-methylcytidine-3'-phosphate
  modified_base 20: mod_base = OTHER; note = 2'-O-methylcytidine-3'-phosphate
  modified_base 21: mod_base = OTHER; note = 2'-O-methyluridine-3'-phosphorothioate
  modified_base 22: mod_base = OTHER; note = 2'-O-methylcytidine-3'-phosphorothioate
  modified_base 23: mod_base = OTHER; note = 2'-O-methyluridine
taaaatatttccttccttcctct

SEQ ID NO: 12559 - RNA, 23 nt, synthetic construct
  source 1..23: mol_type = other RNA
  modified_base 1: mod_base = OTHER; note = 2'-O-methyluridine-3'-phosphorothioate 5'-(E)-Vinylphosphonate
  modified_base 2: mod_base = OTHER; note = 2'-deoxy-2'-fluorouridine-3'-phosphorothioate
  modified_base 3: mod_base = OTHER; note = 2'-O-methyluridine-3'-phosphate
  modified_base 4: mod_base = OTHER; note = 2'-O-methylcytidine-3'-phosphate
  modified_base 5: mod_base = OTHER; note = 2'-O-methyluridine-3'-phosphate
  modified_base 6: mod_base = OTHER; note = 2'-deoxy-2'-fluorocytidine-3'-phosphate
  modified_base 7: mod_base = OTHER; note = 2'-O-methyladenosine-3'-phosphate
  modified_base 8: mod_base = OTHER; note = 2'-O-methyladenosine-3'-phosphate
  modified_base 9: mod_base = OTHER; note = 2'-O-methyladenosine-3'-phosphate
  modified_base 10: mod_base = OTHER; note = 2'-O-methyladenosine-3'-phosphate
  modified_base 11: mod_base = OTHER; note = 2'-O-methyluridine-3'-phosphate
  modified_base 12: mod_base = OTHER; note = 2'-O-methyladenosine-3'-phosphate
  modified_base 13: mod_base = OTHER; note = 2'-O-methyluridine-3'-phosphate
  modified_base 14: mod_base = OTHER; note = 2'-deoxy-2'-fluorouridine-3'-phosphate
  modified_base 15: mod_base = OTHER; note = 2'-O-methyluridine-3'-phosphate
  modified_base 16: mod_base = OTHER; note = 2'-deoxy-2'-fluorocytidine-3'-phosphate
  modified_base 17: mod_base = OTHER; note = 2'-O-methylcytidine-3'-phosphate
  modified_base 18: mod_base = OTHER; note = 2'-O-methyluridine-3'-phosphate
  modified_base 19: mod_base = OTHER; note = 2'-O-methyluridine-3'-phosphate
  modified_base 20: mod_base = OTHER; note = 2'-O-methylcytidine-3'-phosphate
  modified_base 21: mod_base = OTHER; note = 2'-O-methylcytidine-3'-phosphorothioate
  modified_base 22: mod_base = OTHER; note = 2'-O-methyluridine-3'-phosphorothioate
  modified_base 23: mod_base = OTHER; note = 2'-O-methyluridine
tttctcaaaatatttccttcctt

SEQ ID NO: 12560 - RNA, 23 nt, synthetic construct
  source 1..23: mol_type = other RNA
  modified_base 1: mod_base = OTHER; note = 2'-O-methyluridine-3'-phosphorothioate 5'-(E)-Vinylphosphonate
  modified_base 2: mod_base = OTHER; note = 2'-deoxy-2'-fluorouridine-3'-phosphorothioate
  modified_base 3: mod_base = OTHER; note = 2'-O-methyluridine-3'-phosphate
  modified_base 4: mod_base = OTHER; note = 2'-O-methylguanosine-3'-phosphate
  modified_base 5: mod_base = OTHER; note = 2'-O-methyluridine-3'-phosphate
  modified_base 6: mod_base = OTHER; note = 2'-deoxy-2'-fluorouridine-3'-phosphate
  modified_base 7: mod_base = OTHER; note = 2'-O-methyladenosine-3'-phosphate
  modified_base 8: mod_base = OTHER; note = 2'-O-methyladenosine-3'-phosphate
  modified_base 9: mod_base = OTHER; note = 2'-O-methylcytidine-3'-phosphate
  modified_base 10: mod_base = OTHER; note = 2'-O-methyladenosine-3'-phosphate
  modified_base 11: mod_base = OTHER; note = 2'-O-methylcytidine-3'-phosphate
  modified_base 12: mod_base = OTHER; note = 2'-O-methyluridine-3'-phosphate
  modified_base 13: mod_base = OTHER; note = 2'-O-methyluridine-3'-phosphate
  modified_base 14: mod_base = OTHER; note = 2'-deoxy-2'-fluorocytidine-3'-phosphate
  modified_base 15: mod_base = OTHER; note = 2'-O-methyladenosine-3'-phosphate
  modified_base 16: mod_base = OTHER; note = 2'-deoxy-2'-fluorouridine-3'-phosphate
  modified_base 17: mod_base = OTHER; note = 2'-O-methyluridine-3'-phosphate
  modified_base 18: mod_base = OTHER; note = 2'-O-methylguanosine-3'-phosphate
  modified_base 19: mod_base = OTHER; note = 2'-O-methyladenosine-3'-phosphate
  modified_base 20: mod_base = OTHER; note = 2'-O-methyladenosine-3'-phosphate
  modified_base 21: mod_base = OTHER; note = 2'-O-methylguanosine-3'-phosphorothioate
  modified_base 22: mod_base = OTHER; note = 2'-O-methyladenosine-3'-phosphorothioate
  modified_base 23: mod_base = OTHER; note = 2'-O-methylguanosine
tttgttaacacttcattgaagag

SEQ ID NO: 12561 - RNA, 23 nt, synthetic construct
  source 1..23: mol_type = other RNA
  modified_base 1: mod_base = OTHER; note = 2'-O-methyluridine-3'-phosphorothioate 5'-(E)-Vinylphosphonate
  modified_base 2: mod_base = OTHER; note = 2'-deoxy-2'-fluoroadenosine-3'-phosphorothioate
  modified_base 3: mod_base = OTHER; note = 2'-O-methyladenosine-3'-phosphate
  modified_base 4: mod_base = OTHER; note = 2'-O-methylguanosine-3'-phosphate
  modified_base 5: mod_base = OTHER; note = 2'-O-methyladenosine-3'-phosphate
  modified_base 6: mod_base = OTHER; note = 2'-deoxy-2'-fluoroguanosine-3'-phosphate
  modified_base 7: mod_base = OTHER; note = 2'-O-methyluridine-3'-phosphate
  modified_base 8: mod_base = OTHER; note = 2'-O-methyluridine-3'-phosphate
  modified_base 9: mod_base = OTHER; note = 2'-O-methyluridine-3'-phosphate
  modified_base 10: mod_base = OTHER; note = 2'-O-methyluridine-3'-phosphate
  modified_base 11: mod_base = OTHER; note = 2'-O-methylcytidine-3'-phosphate
  modified_base 12: mod_base = OTHER; note = 2'-O-methyluridine-3'-phosphate
  modified_base 13: mod_base = OTHER; note = 2'-O-methyluridine-3'-phosphate
  modified_base 14: mod_base = OTHER; note = 2'-deoxy-2'-fluoroadenosine-3'-phosphate
  modified_base 15: mod_base = OTHER; note = 2'-O-methyladenosine-3'-phosphate
  modified_base 16: mod_base = OTHER; note = 2'-deoxy-2'-fluorouridine-3'-phosphate
  modified_base 17: mod_base = OTHER; note = 2'-O-methyluridine-3'-phosphate
  modified_base 18: mod_base = OTHER; note = 2'-O-methylcytidine-3'-phosphate
  modified_base 19: mod_base = OTHER; note = 2'-O-methyluridine-3'-phosphate
  modified_base 20: mod_base = OTHER; note = 2'-O-methyluridine-3'-phosphate
  modified_base 21: mod_base = OTHER; note = 2'-O-methylcytidine-3'-phosphorothioate
  modified_base 22: mod_base = OTHER; note = 2'-O-methyluridine-3'-phosphorothioate
  modified_base 23: mod_base = OTHER; note = 2'-O-methylcytidine
taagagttttcttaattcttctc

SEQ ID NO: 12562 - RNA, 23 nt, synthetic construct
  source 1..23: mol_type = other RNA
  modified_base 1: mod_base = OTHER; note = 2'-O-methyluridine-3'-phosphorothioate 5'-(E)-Vinylphosphonate
  modified_base 2: mod_base = OTHER; note = 2'-deoxy-2'-fluoroadenosine-3'-phosphorothioate
  modified_base 3: mod_base = OTHER; note = 2'-O-methyladenosine-3'-phosphate
  modified_base 4: mod_base = OTHER; note = 2'-O-methylcytidine-3'-phosphate
  modified_base 5: mod_base = OTHER; note = 2'-O-methyladenosine-3'-phosphate
  modified_base 6: mod_base = OTHER; note = 2'-deoxy-2'-fluorocytidine-3'-phosphate
  modified_base 7: mod_base = OTHER; note = 2'-O-methyluridine-3'-phosphate
  modified_base 8: mod_base = OTHER; note = 2'-O-methyluridine-3'-phosphate
  modified_base 9: mod_base = OTHER; note = 2'-O-methylcytidine-3'-phosphate
  modified_base 10: mod_base = OTHER; note = 2'-O-methyladenosine-3'-phosphate
  modified_base 11: mod_base = OTHER; note = 2'-O-methyluridine-3'-phosphate
  modified_base 12: mod_base = OTHER; note = 2'-O-methyluridine-3'-phosphate
  modified_base 13: mod_base = OTHER; note = 2'-O-methylguanosine-3'-phosphate
  modified_base 14: mod_base = OTHER; note = 2'-deoxy-2'-fluoroadenosine-3'-phosphate
  modified_base 15: mod_base = OTHER; note = 2'-O-methyladenosine-3'-phosphate
  modified_base 16: mod_base = OTHER; note = 2'-deoxy-2'-fluoroguanosine-3'-phosphate
  modified_base 17: mod_base = OTHER; note = 2'-O-methyladenosine-3'-phosphate
  modified_base 18: mod_base = OTHER; note = 2'-O-methylguanosine-3'-phosphate
  modified_base 19: mod_base = OTHER; note = 2'-O-methyluridine-3'-phosphate
  modified_base 20: mod_base = OTHER; note = 2'-O-methyluridine-3'-phosphate
  modified_base 21: mod_base = OTHER; note = 2'-O-methyluridine-3'-phosphorothioate
  modified_base 22: mod_base = OTHER; note = 2'-O-methyluridine-3'-phosphorothioate
  modified_base 23: mod_base = OTHER; note = 2'-O-methylcytidine
taacacttcattgaagagttttc

SEQ ID NO: 12563 - RNA, 23 nt, synthetic construct
  source 1..23: mol_type = other RNA
  modified_base 1: mod_base = OTHER; note = 2'-O-methyluridine-3'-phosphorothioate 5'-(E)-Vinylphosphonate
  modified_base 2: mod_base = OTHER; note = 2'-deoxy-2'-fluorouridine-3'-phosphorothioate
  modified_base 3: mod_base = OTHER; note = 2'-O-methyluridine-3'-phosphate
  modified_base 4: mod_base = OTHER; note = 2'-O-methylguanosine-3'-phosphate
  modified_base 5: mod_base = OTHER; note = 2'-O-methylguanosine-3'-phosphate
  modified_base 6: mod_base = OTHER; note = 2'-deoxy-2'-fluorouridine-3'-phosphate
  modified_base 7: mod_base = OTHER; note = 2'-O-methyluridine-3'-phosphate
  modified_base 8: mod_base = OTHER; note = 2'-O-methylguanosine-3'-phosphate
  modified_base 9: mod_base = OTHER; note = 2'-O-methyluridine-3'-phosphate
  modified_base 10: mod_base = OTHER; note = 2'-O-methyluridine-3'-phosphate
  modified_base 11: mod_base = OTHER; note = 2'-O-methyladenosine-3'-phosphate
  modified_base 12: mod_base = OTHER; note = 2'-O-methyladenosine-3'-phosphate
  modified_base 13: mod_base = OTHER; note = 2'-O-methylcytidine-3'-phosphate
  modified_base 14: mod_base = OTHER; note = 2'-deoxy-2'-fluoroadenosine-3'-phosphate
  modified_base 15: mod_base = OTHER; note = 2'-O-methylcytidine-3'-phosphate
  modified_base 16: mod_base = OTHER; note = 2'-deoxy-2'-fluorouridine-3'-phosphate
  modified_base 17: mod_base = OTHER; note = 2'-O-methyluridine-3'-phosphate
  modified_base 18: mod_base = OTHER; note = 2'-O-methylcytidine-3'-phosphate
  modified_base 19: mod_base = OTHER; note = 2'-O-methyladenosine-3'-phosphate
  modified_base 20: mod_base = OTHER; note = 2'-O-methyluridine-3'-phosphate
  modified_base 21: mod_base = OTHER; note = 2'-O-methyluridine-3'-phosphorothioate
  modified_base 22: mod_base = OTHER; note = 2'-O-methylguanosine-3'-phosphorothioate
  modified_base 23: mod_base = OTHER; note = 2'-O-methyladenosine
tttggttgttaacacttcattga

SEQ ID NO: 12564 - RNA, 23 nt, synthetic construct
  source 1..23: mol_type = other RNA
  modified_base 1: mod_base = OTHER; note = 2'-O-methyluridine-3'-phosphorothioate 5'-(E)-Vinylphosphonate
  modified_base 2: mod_base = OTHER; note = 2'-deoxy-2'-fluorouridine-3'-phosphorothioate
  modified_base 3: mod_base = OTHER; note = 2'-O-methyluridine-3'-phosphate
  modified_base 4: mod_base = OTHER; note = 2'-O-methyluridine-3'-phosphate
  modified_base 5: mod_base = OTHER; note = 2'-O-methylguanosine-3'-phosphate
  modified_base 6: mod_base = OTHER; note = 2'-deoxy-2'-fluoroguanosine-3'-phosphate
  modified_base 7: mod_base = OTHER; note = 2'-O-methyluridine-3'-phosphate
  modified_base 8: mod_base = OTHER; note = 2'-O-methyluridine-3'-phosphate
  modified_base 9: mod_base = OTHER; note = 2'-O-methylguanosine-3'-phosphate
  modified_base 10: mod_base = OTHER; note = 2'-O-methyluridine-3'-phosphate
  modified_base 11: mod_base = OTHER; note = 2'-O-methyluridine-3'-phosphate
  modified_base 12: mod_base = OTHER; note = 2'-O-methyladenosine-3'-phosphate
  modified_base 13: mod_base = OTHER; note = 2'-O-methyladenosine-3'-phosphate
  modified_base 14: mod_base = OTHER; note = 2'-deoxy-2'-fluorocytidine-3'-phosphate
  modified_base 15: mod_base = OTHER; note = 2'-O-methyladenosine-3'-phosphate
  modified_base 16: mod_base = OTHER; note = 2'-deoxy-2'-fluorocytidine-3'-phosphate
  modified_base 17: mod_base = OTHER; note = 2'-O-methyluridine-3'-phosphate
  modified_base 18: mod_base = OTHER; note = 2'-O-methyluridine-3'-phosphate
  modified_base 19: mod_base = OTHER; note = 2'-O-methylcytidine-3'-phosphate
  modified_base 20: mod_base = OTHER; note = 2'-O-methyladenosine-3'-phosphate
  modified_base 21: mod_base = OTHER; note = 2'-O-methyluridine-3'-phosphorothioate
  modified_base 22: mod_base = OTHER; note = 2'-O-methyluridine-3'-phosphorothioate
  modified_base 23: mod_base = OTHER; note = 2'-O-methylguanosine
ttttggttgttaacacttcattg

SEQ ID NO: 12565 - RNA, 23 nt, synthetic construct
  source 1..23: mol_type = other RNA
  modified_base 1: mod_base = OTHER; note = 2'-O-methyluridine-3'-phosphorothioate 5'-(E)-Vinylphosphonate
  modified_base 2: mod_base = OTHER; note = 2'-deoxy-2'-fluoroadenosine-3'-phosphorothioate
  modified_base 3: mod_base = OTHER; note = 2'-O-methyluridine-3'-phosphate
  modified_base 4: mod_base = OTHER; note = 2'-O-methyluridine-3'-phosphate
  modified_base 5: mod_base = OTHER; note = 2'-O-methyluridine-3'-phosphate
  modified_base 6: mod_base = OTHER; note = 2'-deoxy-2'-fluoroguanosine-3'-phosphate
  modified_base 7: mod_base = OTHER; note = 2'-O-methylcytidine-3'-phosphate
  modified_base 8: mod_base = OTHER; note = 2'-O-methyluridine-3'-phosphate
  modified_base 9: mod_base = OTHER; note = 2'-O-methylguanosine-3'-phosphate
  modified_base 10: mod_base = OTHER; note = 2'-O-methyluridine-3'-phosphate
  modified_base 11: mod_base = OTHER; note = 2'-O-methyluridine-3'-phosphate
  modified_base 12: mod_base = OTHER; note = 2'-O-methyluridine-3'-phosphate
  modified_base 13: mod_base = OTHER; note = 2'-O-methylcytidine-3'-phosphate
  modified_base 14: mod_base = OTHER; note = 2'-deoxy-2'-fluorouridine-3'-phosphate
  modified_base 15: mod_base = OTHER; note = 2'-O-methylguanosine-3'-phosphate
  modified_base 16: mod_base = OTHER; note = 2'-deoxy-2'-fluoroadenosine-3'-phosphate
  modified_base 17: mod_base = OTHER; note = 2'-O-methyluridine-3'-phosphate
  modified_base 18: mod_base = OTHER; note = 2'-O-methyladenosine-3'-phosphate
  modified_base 19: mod_base = OTHER; note = 2'-O-methylcytidine-3'-phosphate
  modified_base 20: mod_base = OTHER; note = 2'-O-methylcytidine-3'-phosphate
  modified_base 21: mod_base = OTHER; note = 2'-O-methylguanosine-3'-phosphorothioate
  modified_base 22: mod_base = OTHER; note = 2'-O-methyluridine-3'-phosphorothioate
  modified_base 23: mod_base = OTHER; note = 2'-O-methylcytidine
tatttgctgtttctgataccgtc

SEQ ID NO: 12566 - RNA, 23 nt, synthetic construct
  source 1..23: mol_type = other RNA
  modified_base 1: mod_base = OTHER; note = 2'-O-methyluridine-3'-phosphorothioate 5'-(E)-Vinylphosphonate
  modified_base 2: mod_base = OTHER; note = 2'-deoxy-2'-fluorouridine-3'-phosphorothioate
  modified_base 3: mod_base = OTHER; note = 2'-O-methylguanosine-3'-phosphate
  modified_base 4: mod_base = OTHER; note = 2'-O-methyluridine-3'-phosphate
  modified_base 5: mod_base = OTHER; note = 2'-O-methyluridine-3'-phosphate
  modified_base 6: mod_base = OTHER; note = 2'-deoxy-2'-fluorouridine-3'-phosphate
  modified_base 7: mod_base = OTHER; note = 2'-O-methylcytidine-3'-phosphate
  modified_base 8: mod_base = OTHER; note = 2'-O-methyluridine-3'-phosphate
  modified_base 9: mod_base = OTHER; note = 2'-O-methylguanosine-3'-phosphate
  modified_base 10: mod_base = OTHER; note = 2'-O-methyladenosine-3'-phosphate
  modified_base 11: mod_base = OTHER; note = 2'-O-methyluridine-3'-phosphate
  modified_base 12: mod_base = OTHER; note = 2'-O-methyladenosine-3'-phosphate
  modified_base 13: mod_base = OTHER; note = 2'-O-methylcytidine-3'-phosphate
  modified_base 14: mod_base = OTHER; note = 2'-deoxy-2'-fluorocytidine-3'-phosphate
  modified_base 15: mod_base = OTHER; note = 2'-O-methylguanosine-3'-phosphate
  modified_base 16: mod_base = OTHER; note = 2'-deoxy-2'-fluorouridine-3'-phosphate
  modified_base 17: mod_base = OTHER; note = 2'-O-methylcytidine-3'-phosphate
  modified_base 18: mod_base = OTHER; note = 2'-O-methyluridine-3'-phosphate
  modified_base 19: mod_base = OTHER; note = 2'-O-methylguanosine-3'-phosphate
  modified_base 20: mod_base = OTHER; note = 2'-O-methyluridine-3'-phosphate
  modified_base 21: mod_base = OTHER; note = 2'-O-methyladenosine-3'-phosphorothioate
  modified_base 22: mod_base = OTHER; note = 2'-O-methylguanosine-3'-phosphorothioate
  modified_base 23: mod_base = OTHER; note = 2'-O-methylguanosine
ttgtttctgataccgtctgtagg

SEQ ID NO: 12567 - RNA, 23 nt, synthetic construct
  source 1..23: mol_type = other RNA
  modified_base 1: mod_base = OTHER; note = 2'-O-methyluridine-3'-phosphorothioate 5'-(E)-Vinylphosphonate
  modified_base 2: mod_base = OTHER; note = 2'-deoxy-2'-fluoroadenosine-3'-phosphorothioate
  modified_base 3: mod_base = OTHER; note = 2'-O-methyluridine-3'-phosphate
  modified_base 4: mod_base = OTHER; note = 2'-O-methylcytidine-3'-phosphate
  modified_base 5: mod_base = OTHER; note = 2'-O-methyluridine-3'-phosphate
  modified_base 6: mod_base = OTHER; note = 2'-deoxy-2'-fluoroadenosine-3'-phosphate
  modified_base 7: mod_base = OTHER; note = 2'-O-methyluridine-3'-phosphate
  modified_base 8: mod_base = OTHER; note = 2'-O-methyluridine-3'-phosphate
  modified_base 9: mod_base = OTHER; note = 2'-O-methyluridine-3'-phosphate
  modified_base 10: mod_base = OTHER; note = 2'-O-methylguanosine-3'-phosphate
  modified_base 11: mod_base = OTHER; note = 2'-O-methylcytidine-3'-phosphate
  modified_base 12: mod_base = OTHER; note = 2'-O-methyluridine-3'-phosphate
  modified_base 13: mod_base = OTHER; note = 2'-O-methylguanosine-3'-phosphate
  modified_base 14: mod_base = OTHER; note = 2'-deoxy-2'-fluorouridine-3'-phosphate
  modified_base 15: mod_base = OTHER; note = 2'-O-methyluridine-3'-phosphate
  modified_base 16: mod_base = OTHER; note = 2'-deoxy-2'-fluorouridine-3'-phosphate
  modified_base 17: mod_base = OTHER; note = 2'-O-methylcytidine-3'-phosphate
  modified_base 18: mod_base = OTHER; note = 2'-O-methyluridine-3'-phosphate
  modified_base 19: mod_base = OTHER; note = 2'-O-methylguanosine-3'-phosphate
  modified_base 20: mod_base = OTHER; note = 2'-O-methyladenosine-3'-phosphate
  modified_base 21: mod_base = OTHER; note = 2'-O-methyluridine-3'-phosphorothioate
  modified_base 22: mod_base = OTHER; note = 2'-O-methyladenosine-3'-phosphorothioate
  modified_base 23: mod_base = OTHER; note = 2'-O-methylcytidine
tatctatttgctgtttctgatac

SEQ ID NO: 12568 - RNA, 23 nt, synthetic construct
  source 1..23: mol_type = other RNA
  modified_base 1: mod_base = OTHER; note = 2'-O-methyluridine-3'-phosphorothioate 5'-(E)-Vinylphosphonate
  modified_base 2: mod_base = OTHER; note = 2'-deoxy-2'-fluoroadenosine-3'-phosphorothioate
  modified_base 3: mod_base = OTHER; note = 2'-O-methyluridine-3'-phosphate
  modified_base 4: mod_base = OTHER; note = 2'-O-methyladenosine-3'-phosphate
  modified_base 5: mod_base = OTHER; note = 2'-O-methyluridine-3'-phosphate
  modified_base 6: mod_base = OTHER; note = 2'-deoxy-2'-fluorocytidine-3'-phosphate
  modified_base 7: mod_base = OTHER; note = 2'-O-methyluridine-3'-phosphate
  modified_base 8: mod_base = OTHER; note = 2'-O-methyladenosine-3'-phosphate
  modified_base 9: mod_base = OTHER; note = 2'-O-methyluridine-3'-phosphate
  modified_base 10: mod_base = OTHER; note = 2'-O-methyluridine-3'-phosphate
  modified_base 11: mod_base = OTHER; note = 2'-O-methyluridine-3'-phosphate
  modified_base 12: mod_base = OTHER; note = 2'-O-methylguanosine-3'-phosphate
  modified_base 13: mod_base = OTHER; note = 2'-O-methylcytidine-3'-phosphate
  modified_base 14: mod_base = OTHER; note = 2'-deoxy-2'-fluorouridine-3'-phosphate
  modified_base 15: mod_base = OTHER; note = 2'-O-methylguanosine-3'-phosphate
  modified_base 16: mod_base = OTHER; note = 2'-deoxy-2'-fluorouridine-3'-phosphate
  modified_base 17: mod_base = OTHER; note = 2'-O-methyluridine-3'-phosphate
  modified_base 18: mod_base = OTHER; note = 2'-O-methyluridine-3'-phosphate
  modified_base 19: mod_base = OTHER; note = 2'-O-methylcytidine-3'-phosphate
  modified_base 20: mod_base = OTHER; note = 2'-O-methyluridine-3'-phosphate
  modified_base 21: mod_base = OTHER; note = 2'-O-methylguanosine-3'-phosphorothioate
  modified_base 22: mod_base = OTHER; note = 2'-O-methyladenosine-3'-phosphorothioate
  modified_base 23: mod_base = OTHER; note = 2'-O-methyluridine
tatatctatttgctgtttctgat

SEQ ID NO: 12569 - RNA, 23 nt, synthetic construct
  source 1..23: mol_type = other RNA
  modified_base 1: mod_base = OTHER; note = 2'-O-methyluridine-3'-phosphorothioate 5'-(E)-Vinylphosphonate
  modified_base 2: mod_base = OTHER; note = 2'-deoxy-2'-fluoroadenosine-3'-phosphorothioate
  modified_base 3: mod_base = OTHER; note = 2'-O-methyladenosine-3'-phosphate
  modified_base 4: mod_base = OTHER; note = 2'-O-methyluridine-3'-phosphate
  modified_base 5: mod_base = OTHER; note = 2'-O-methyladenosine-3'-phosphate
  modified_base 6: mod_base = OTHER; note = 2'-deoxy-2'-fluorouridine-3'-phosphate
  modified_base 7: mod_base = OTHER; note = 2'-O-methylcytidine-3'-phosphate
  modified_base 8: mod_base = OTHER; note = 2'-O-methyluridine-3'-phosphate
  modified_base 9: mod_base = OTHER; note = 2'-O-methyladenosine-3'-phosphate
  modified_base 10: mod_base = OTHER; note = 2'-O-methyluridine-3'-phosphate
  modified_base 11: mod_base = OTHER; note = 2'-O-methyluridine-3'-phosphate
  modified_base 12: mod_base = OTHER; note = 2'-O-methyluridine-3'-phosphate
  modified_base 13: mod_base = OTHER; note = 2'-O-methylguanosine-3'-phosphate
  modified_base 14: mod_base = OTHER; note = 2'-deoxy-2'-fluorocytidine-3'-phosphate
  modified_base 15: mod_base = OTHER; note = 2'-O-methyluridine-3'-phosphate
  modified_base 16: mod_base = OTHER; note = 2'-deoxy-2'-fluoroguanosine-3'-phosphate
  modified_base 17: mod_base = OTHER; note = 2'-O-methyluridine-3'-phosphate
  modified_base 18: mod_base = OTHER; note = 2'-O-methyluridine-3'-phosphate
  modified_base 19: mod_base = OTHER; note = 2'-O-methyluridine-3'-phosphate
  modified_base 20: mod_base = OTHER; note = 2'-O-methylcytidine-3'-phosphate
  modified_base 21: mod_base = OTHER; note = 2'-O-methyluridine-3'-phosphorothioate
  modified_base 22: mod_base = OTHER; note = 2'-O-methylguanosine-3'-phosphorothioate
  modified_base 23: mod_base = OTHER; note = 2'-O-methyladenosine
taatatctatttgctgtttctga

SEQ ID NO: 12570 - RNA, 23 nt, synthetic construct
  source 1..23: mol_type = other RNA
  modified_base 1: mod_base = OTHER; note = 2'-O-methyluridine-3'-phosphorothioate 5'-(E)-Vinylphosphonate
  modified_base 2: mod_base = OTHER; note = 2'-deoxy-2'-fluoroguanosine-3'-phosphorothioate
  modified_base 3: mod_base = OTHER; note = 2'-O-methyladenosine-3'-phosphate
  modified_base 4: mod_base = OTHER; note = 2'-O-methyladenosine-3'-phosphate
  modified_base 5: mod_base = OTHER; note = 2'-O-methyluridine-3'-phosphate
  modified_base 6: mod_base = OTHER; note = 2'-deoxy-2'-fluoroadenosine-3'-phosphate
  modified_base 7: mod_base = OTHER; note = 2'-O-methyluridine-3'-phosphate
  modified_base 8: mod_base = OTHER; note = 2'-O-methylcytidine-3'-phosphate
  modified_base 9: mod_base = OTHER; note = 2'-O-methyluridine-3'-phosphate
  modified_base 10: mod_base = OTHER; note = 2'-O-methyladenosine-3'-phosphate
  modified_base 11: mod_base = OTHER; note = 2'-O-methyluridine-3'-phosphate
  modified_base 12: mod_base = OTHER; note = 2'-O-methyluridine-3'-phosphate
  modified_base 13: mod_base = OTHER; note = 2'-O-methyluridine-3'-phosphate
  modified_base 14: mod_base = OTHER; note = 2'-deoxy-2'-fluoroguanosine-3'-phosphate
  modified_base 15: mod_base = OTHER; note = 2'-O-methylcytidine-3'-phosphate
  modified_base 16: mod_base = OTHER; note = 2'-deoxy-2'-fluorouridine-3'-phosphate
  modified_base 17: mod_base = OTHER; note = 2'-O-methylguanosine-3'-phosphate
  modified_base 18: mod_base = OTHER; note = 2'-O-methyluridine-3'-phosphate
  modified_base 19: mod_base = OTHER; note = 2'-O-methyluridine-3'-phosphate
  modified_base 20: mod_base = OTHER; note = 2'-O-methyluridine-3'-phosphate
  modified_base 21: mod_base = OTHER; note = 2'-O-methylcytidine-3'-phosphorothioate
  modified_base 22: mod_base = OTHER; note = 2'-O-methyluridine-3'-phosphorothioate
  modified_base 23: mod_base = OTHER; note = 2'-O-methylguanosine
tgaatatctatttgctgtttctg

SEQ ID NO: 12571 - RNA, 23 nt, synthetic construct
  source 1..23: mol_type = other RNA
  modified_base 1: mod_base = OTHER; note = 2'-O-methyluridine-3'-phosphorothioate 5'-(E)-Vinylphosphonate
  modified_base 2: mod_base = OTHER; note = 2'-deoxy-2'-fluoroadenosine-3'-phosphorothioate
  modified_base 3: mod_base = OTHER; note = 2'-O-methylguanosine-3'-phosphate
  modified_base 4: mod_base = OTHER; note = 2'-O-methylguanosine-3'-phosphate
  modified_base 5: mod_base = OTHER; note = 2'-O-methyladenosine-3'-phosphate
  modified_base 6: mod_base = OTHER; note = 2'-deoxy-2'-fluoroadenosine-3'-phosphate
  modified_base 7: mod_base = OTHER; note = 2'-O-methyluridine-3'-phosphate
  modified_base 8: mod_base = OTHER; note = 2'-O-methyladenosine-3'-phosphate
  modified_base 9: mod_base = OTHER; note = 2'-O-methyluridine-3'-phosphate
  modified_base 10: mod_base = OTHER; note = 2'-O-methylcytidine-3'-phosphate
  modified_base 11: mod_base = OTHER; note = 2'-O-methyluridine-3'-phosphate
  modified_base 12: mod_base = OTHER; note = 2'-O-methyladenosine-3'-phosphate
  modified_base 13: mod_base = OTHER; note = 2'-O-methyluridine-3'-phosphate
  modified_base 14: mod_base = OTHER; note = 2'-deoxy-2'-fluorouridine-3'-phosphate
  modified_base 15: mod_base = OTHER; note = 2'-O-methyluridine-3'-phosphate
  modified_base 16: mod_base = OTHER; note = 2'-deoxy-2'-fluoroguanosine-3'-phosphate
  modified_base 17: mod_base = OTHER; note = 2'-O-methylcytidine-3'-phosphate
  modified_base 18: mod_base = OTHER; note = 2'-O-methyluridine-3'-phosphate
  modified_base 19: mod_base = OTHER; note = 2'-O-methylguanosine-3'-phosphate
  modified_base 20: mod_base = OTHER; note = 2'-O-methyluridine-3'-phosphate
  modified_base 21: mod_base = OTHER; note = 2'-O-methyluridine-3'-phosphorothioate
  modified_base 22: mod_base = OTHER; note = 2'-O-methyluridine-3'-phosphorothioate
  modified_base 23: mod_base = OTHER; note = 2'-O-methylcytidine
taggaatatctatttgctgtttc

SEQ ID NO: 12572 - RNA, 23 nt, synthetic construct
  source 1..23: mol_type = other RNA
  modified_base 1: mod_base = OTHER; note = 2'-O-methyluridine-3'-phosphorothioate 5'-(E)-Vinylphosphonate
  modified_base 2: mod_base = OTHER; note = 2'-deoxy-2'-fluoroadenosine-3'-phosphorothioate
  modified_base 3: mod_base = OTHER; note = 2'-O-methylguanosine-3'-phosphate
  modified_base 4: mod_base = OTHER; note = 2'-O-methyladenosine-3'-phosphate
  modified_base 5: mod_base = OTHER; note = 2'-O-methylguanosine-3'-phosphate
  modified_base 6: mod_base = OTHER; note = 2'-deoxy-2'-fluoroguanosine-3'-phosphate
  modified_base 7: mod_base = OTHER; note = 2'-O-methyladenosine-3'-phosphate
  modified_base 8: mod_base = OTHER; note = 2'-O-methyladenosine-3'-phosphate
  modified_base 9: mod_base = OTHER; note = 2'-O-methyluridine-3'-phosphate
  modified_base 10: mod_base = OTHER; note = 2'-O-methyladenosine-3'-phosphate
  modified_base 11: mod_base = OTHER; note = 2'-O-methyluridine-3'-phosphate
  modified_base 12: mod_base = OTHER; note = 2'-O-methylcytidine-3'-phosphate
  modified_base 13: mod_base = OTHER; note = 2'-O-methyluridine-3'-phosphate
  modified_base 14: mod_base = OTHER; note = 2'-deoxy-2'-fluoroadenosine-3'-phosphate
  modified_base 15: mod_base = OTHER; note = 2'-O-methyluridine-3'-phosphate
  modified_base 16: mod_base = OTHER; note = 2'-deoxy-2'-fluorouridine-3'-phosphate
  modified_base 17: mod_base = OTHER; note = 2'-O-methyluridine-3'-phosphate
  modified_base 18: mod_base = OTHER; note = 2'-O-methylguanosine-3'-phosphate
  modified_base 19: mod_base = OTHER; note = 2'-O-methylcytidine-3'-phosphate
  modified_base 20: mod_base = OTHER; note = 2'-O-methyluridine-3'-phosphate
  modified_base 21: mod_base = OTHER; note = 2'-O-methylguanosine-3'-phosphorothioate
  modified_base 22: mod_base = OTHER; note = 2'-O-methyluridine-3'-phosphorothioate
  modified_base 23: mod_base = OTHER; note = 2'-O-methyluridine
tagaggaatatctatttgctgtt

SEQ ID NO: 12573 - RNA, 23 nt, synthetic construct
  source 1..23: mol_type = other RNA
  modified_base 1: mod_base = OTHER; note = 2'-O-methyluridine-3'-phosphorothioate 5'-(E)-Vinylphosphonate
  modified_base 2: mod_base = OTHER; note = 2'-deoxy-2'-fluorouridine-3'-phosphorothioate
  modified_base 3: mod_base = OTHER; note = 2'-O-methyladenosine-3'-phosphate
  modified_base 4: mod_base = OTHER; note = 2'-O-methylguanosine-3'-phosphate
  modified_base 5: mod_base = OTHER; note = 2'-O-methyladenosine-3'-phosphate
  modified_base 6: mod_base = OTHER; note = 2'-deoxy-2'-fluoroguanosine-3'-phosphate
  modified_base 7: mod_base = OTHER; note = 2'-O-methylguanosine-3'-phosphate
  modified_base 8: mod_base = OTHER; note = 2'-O-methyladenosine-3'-phosphate
  modified_base 9: mod_base = OTHER; note = 2'-O-methyladenosine-3'-phosphate
  modified_base 10: mod_base = OTHER; note = 2'-O-methyluridine-3'-phosphate
  modified_base 11: mod_base = OTHER; note = 2'-O-methyladenosine-3'-phosphate
  modified_base 12: mod_base = OTHER; note = 2'-O-methyluridine-3'-phosphate
  modified_base 13: mod_base = OTHER; note = 2'-O-methylcytidine-3'-phosphate
  modified_base 14: mod_base = OTHER; note = 2'-deoxy-2'-fluorouridine-3'-phosphate
  modified_base 15: mod_base = OTHER; note = 2'-O-methyladenosine-3'-phosphate
  modified_base 16: mod_base = OTHER; note = 2'-deoxy-2'-fluorouridine-3'-phosphate
  modified_base 17: mod_base = OTHER; note = 2'-O-methyluridine-3'-phosphate
  modified_base 18: mod_base = OTHER; note = 2'-O-methyluridine-3'-phosphate
  modified_base 19: mod_base = OTHER; note = 2'-O-methylguanosine-3'-phosphate
  modified_base 20: mod_base = OTHER; note = 2'-O-methylcytidine-3'-phosphate
  modified_base 21: mod_base = OTHER; note = 2'-O-methyluridine-3'-phosphorothioate
  modified_base 22: mod_base = OTHER; note = 2'-O-methylguanosine-3'-phosphorothioate
  modified_base 23: mod_base = OTHER; note = 2'-O-methyluridine
ttagaggaatatctatttgctgt

SEQ ID NO: 12574 - RNA, 23 nt, synthetic construct
  source 1..23: mol_type = other RNA
  modified_base 1: mod_base = OTHER; note = 2'-O-methyluridine-3'-phosphorothioate 5'-(E)-Vinylphosphonate
  modified_base 2: mod_base = OTHER; note = 2'-deoxy-2'-fluoroguanosine-3'-phosphorothioate
  modified_base 3: mod_base = OTHER; note = 2'-O-methylguanosine-3'-phosphate
  modified_base 4: mod_base = OTHER; note = 2'-O-methyluridine-3'-phosphate
  modified_base 5: mod_base = OTHER; note = 2'-O-methyladenosine-3'-phosphate
  modified_base 6: mod_base = OTHER; note = 2'-deoxy-2'-fluoroguanosine-3'-phosphate
  modified_base 7: mod_base = OTHER; note = 2'-O-methyladenosine-3'-phosphate
  modified_base 8: mod_base = OTHER; note = 2'-O-methylguanosine-3'-phosphate
  modified_base 9: mod_base = OTHER; note = 2'-O-methylguanosine-3'-phosphate
  modified_base 10: mod_base = OTHER; note = 2'-O-methyladenosine-3'-phosphate
  modified_base 11: mod_base = OTHER; note = 2'-O-methyladenosine-3'-phosphate
  modified_base 12: mod_base = OTHER; note = 2'-O-methyluridine-3'-phosphate
  modified_base 13: mod_base = OTHER; note = 2'-O-methyladenosine-3'-phosphate
  modified_base 14: mod_base = OTHER; note = 2'-deoxy-2'-fluorouridine-3'-phosphate
  modified_base 15: mod_base = OTHER; note = 2'-O-methylcytidine-3'-phosphate
  modified_base 16: mod_base = OTHER; note = 2'-deoxy-2'-fluorouridine-3'-phosphate
  modified_base 17: mod_base = OTHER; note = 2'-O-methyladenosine-3'-phosphate
  modified_base 18: mod_base = OTHER; note = 2'-O-methyluridine-3'-phosphate
  modified_base 19: mod_base = OTHER; note = 2'-O-methyluridine-3'-phosphate
  modified_base 20: mod_base = OTHER; note = 2'-O-methyluridine-3'-phosphate
  modified_base 21: mod_base = OTHER; note = 2'-O-methylguanosine-3'-phosphorothioate
  modified_base 22: mod_base = OTHER; note = 2'-O-methylcytidine-3'-phosphorothioate
  modified_base 23: mod_base = OTHER; note = 2'-O-methyluridine
tggtagaggaatatctatttgct

SEQ ID NO: 12575 - RNA, 23 nt, synthetic construct
  source 1..23: mol_type = other RNA
  modified_base 1: mod_base = OTHER; note = 2'-O-methyluridine-3'-phosphorothioate 5'-(E)-Vinylphosphonate
  modified_base 2: mod_base = OTHER; note = 2'-deoxy-2'-fluorouridine-3'-phosphorothioate
  modified_base 3: mod_base = OTHER; note = 2'-O-methylguanosine-3'-phosphate
  modified_base 4: mod_base = OTHER; note = 2'-O-methyladenosine-3'-phosphate
  modified_base 5: mod_base = OTHER; note = 2'-O-methylguanosine-3'-phosphate
  modified_base 6: mod_base = OTHER; note = 2'-deoxy-2'-fluorocytidine-3'-phosphate
  modified_base 7: mod_base = OTHER; note = 2'-O-methyladenosine-3'-phosphate
  modified_base 8: mod_base = OTHER; note = 2'-O-methyluridine-3'-phosphate
  modified_base 9: mod_base = OTHER; note = 2'-O-methyluridine-3'-phosphate
  modified_base 10: mod_base = OTHER; note = 2'-O-methylcytidine-3'-phosphate
  modified_base 11: mod_base = OTHER; note = 2'-O-methyluridine-3'-phosphate
  modified_base 12: mod_base = OTHER; note = 2'-O-methyluridine-3'-phosphate
  modified_base 13: mod_base = OTHER; note = 2'-O-methylcytidine-3'-phosphate
  modified_base 14: mod_base = OTHER; note = 2'-deoxy-2'-fluorouridine-3'-phosphate
  modified_base 15: mod_base = OTHER; note = 2'-O-methylguanosine-3'-phosphate
  modified_base 16: mod_base = OTHER; note = 2'-deoxy-2'-fluorouridine-3'-phosphate
  modified_base 17: mod_base = OTHER; note = 2'-O-methyladenosine-3'-phosphate
  modified_base 18: mod_base = OTHER; note = 2'-O-methylcytidine-3'-phosphate
  modified_base 19: mod_base = OTHER; note = 2'-O-methyluridine-3'-phosphate
  modified_base 20: mod_base = OTHER; note = 2'-O-methylcytidine-3'-phosphate
  modified_base 21: mod_base = OTHER; note = 2'-O-methyladenosine-3'-phosphorothioate
  modified_base 22: mod_base = OTHER; note = 2'-O-methylcytidine-3'-phosphorothioate
  modified_base 23: mod_base = OTHER; note = 2'-O-methyluridine
ttgagcattcttctgtactcact

SEQ ID NO: 12576 - RNA, 23 nt, synthetic construct
  source 1..23: mol_type = other RNA
  modified_base 1: mod_base = OTHER; note = 2'-O-methyluridine-3'-phosphorothioate 5'-(E)-Vinylphosphonate
  modified_base 2: mod_base = OTHER; note = 2'-deoxy-2'-fluorouridine-3'-phosphorothioate
  modified_base 3: mod_base = OTHER; note = 2'-O-methylcytidine-3'-phosphate
  modified_base 4: mod_base = OTHER; note = 2'-O-methyladenosine-3'-phosphate
  modified_base 5: mod_base = OTHER; note = 2'-O-methyluridine-3'-phosphate
  modified_base 6: mod_base = OTHER; note = 2'-deoxy-2'-fluoroguanosine-3'-phosphate
  modified_base 7: mod_base = OTHER; note = 2'-O-methyladenosine-3'-phosphate
  modified_base 8: mod_base = OTHER; note = 2'-O-methylguanosine-3'-phosphate
  modified_base 9: mod_base = OTHER; note = 2'-O-methylcytidine-3'-phosphate
  modified_base 10: mod_base = OTHER; note = 2'-O-methyladenosine-3'-phosphate
  modified_base 11: mod_base = OTHER; note = 2'-O-methyluridine-3'-phosphate
  modified_base 12: mod_base = OTHER; note = 2'-O-methyluridine-3'-phosphate
  modified_base 13: mod_base = OTHER; note = 2'-O-methylcytidine-3'-phosphate
  modified_base 14: mod_base = OTHER; note = 2'-deoxy-2'-fluorouridine-3'-phosphate
  modified_base 15: mod_base = OTHER; note = 2'-O-methyluridine-3'-phosphate
  modified_base 16: mod_base = OTHER; note = 2'-deoxy-2'-fluorocytidine-3'-phosphate
  modified_base 17: mod_base = OTHER; note = 2'-O-methyluridine-3'-phosphate
  modified_base 18: mod_base = OTHER; note = 2'-O-methylguanosine-3'-phosphate
  modified_base 19: mod_base = OTHER; note = 2'-O-methyluridine-3'-phosphate
  modified_base 20: mod_base = OTHER; note = 2'-O-methyladenosine-3'-phosphate
  modified_base 21: mod_base = OTHER; note = 2'-O-methylcytidine-3'-phosphorothioate
  modified_base 22: mod_base = OTHER; note = 2'-O-methyluridine-3'-phosphorothioate
  modified_base 23: mod_base = OTHER; note = 2'-O-methylcytidine
ttcatgagcattcttctgtactc

SEQ ID NO: 12577 - RNA, 23 nt, synthetic construct
  source 1..23: mol_type = other RNA
  modified_base 1: mod_base = OTHER; note = 2'-O-methyluridine-3'-phosphorothioate 5'-(E)-Vinylphosphonate
  modified_base 2: mod_base = OTHER; note = 2'-deoxy-2'-fluoroadenosine-3'-phosphorothioate
  modified_base 3: mod_base = OTHER; note = 2'-O-methyluridine-3'-phosphate
  modified_base 4: mod_base = OTHER; note = 2'-O-methylcytidine-3'-phosphate
  modified_base 5: mod_base = OTHER; note = 2'-O-methyladenosine-3'-phosphate
  modified_base 6: mod_base = OTHER; note = 2'-deoxy-2'-fluorouridine-3'-phosphate
  modified_base 7: mod_base = OTHER; note = 2'-O-methylguanosine-3'-phosphate
  modified_base 8: mod_base = OTHER; note = 2'-O-methyladenosine-3'-phosphate
  modified_base 9: mod_base = OTHER; note = 2'-O-methylguanosine-3'-phosphate
  modified_base 10: mod_base = OTHER; note = 2'-O-methylcytidine-3'-phosphate
  modified_base 11: mod_base = OTHER; note = 2'-O-methyladenosine-3'-phosphate
  modified_base 12: mod_base = OTHER; note = 2'-O-methyluridine-3'-phosphate
  modified_base 13: mod_base = OTHER; note = 2'-O-methyluridine-3'-phosphate
  modified_base 14: mod_base = OTHER; note = 2'-deoxy-2'-fluorocytidine-3'-phosphate
  modified_base 15: mod_base = OTHER; note = 2'-O-methyluridine-3'-phosphate
  modified_base 16: mod_base = OTHER; note = 2'-deoxy-2'-fluorouridine-3'-phosphate
  modified_base 17: mod_base = OTHER; note = 2'-O-methylcytidine-3'-phosphate
  modified_base 18: mod_base = OTHER; note = 2'-O-methyluridine-3'-phosphate
  modified_base 19: mod_base = OTHER; note = 2'-O-methylguanosine-3'-phosphate
  modified_base 20: mod_base = OTHER; note = 2'-O-methyluridine-3'-phosphate
  modified_base 21: mod_base = OTHER; note = 2'-O-methyladenosine-3'-phosphorothioate
  modified_base 22: mod_base = OTHER; note = 2'-O-methylcytidine-3'-phosphorothioate
  modified_base 23: mod_base = OTHER; note = 2'-O-methyluridine
tatcatgagcattcttctgtact

SEQ ID NO: 12578 - RNA, 23 nt, synthetic construct
  source 1..23: mol_type = other RNA
  modified_base 1: mod_base = OTHER; note = 2'-O-methyluridine-3'-phosphorothioate 5'-(E)-Vinylphosphonate
  modified_base 2: mod_base = OTHER; note = 2'-deoxy-2'-fluorouridine-3'-phosphorothioate
  modified_base 3: mod_base = OTHER; note = 2'-O-methyladenosine-3'-phosphate
  modified_base 4: mod_base = OTHER; note = 2'-O-methyluridine-3'-phosphate
  modified_base 5: mod_base = OTHER; note = 2'-O-methylcytidine-3'-phosphate
  modified_base 6: mod_base = OTHER; note = 2'-deoxy-2'-fluoroadenosine-3'-phosphate
  modified_base 7: mod_base = OTHER; note = 2'-O-methyluridine-3'-phosphate
  modified_base 8: mod_base = OTHER; note = 2'-O-methylguanosine-3'-phosphate
  modified_base 9: mod_base = OTHER; note = 2'-O-methyladenosine-3'-phosphate
  modified_base 10: mod_base = OTHER; note = 2'-O-methylguanosine-3'-phosphate
  modified_base 11: mod_base = OTHER; note = 2'-O-methylcytidine-3'-phosphate
  modified_base 12: mod_base = OTHER; note = 2'-O-methyladenosine-3'-phosphate
  modified_base 13: mod_base = OTHER; note = 2'-O-methyluridine-3'-phosphate
  modified_base 14: mod_base = OTHER; note = 2'-deoxy-2'-fluorouridine-3'-phosphate
  modified_base 15: mod_base = OTHER; note = 2'-O-methylcytidine-3'-phosphate
  modified_base 16: mod_base = OTHER; note = 2'-deoxy-2'-fluorouridine-3'-phosphate
  modified_base 17: mod_base = OTHER; note = 2'-O-methyluridine-3'-phosphate
  modified_base 18: mod_base = OTHER; note = 2'-O-methylcytidine-3'-phosphate
  modified_base 19: mod_base = OTHER; note = 2'-O-methyluridine-3'-phosphate
  modified_base 20: mod_base = OTHER; note = 2'-O-methylguanosine-3'-phosphate
  modified_base 21: mod_base = OTHER; note = 2'-O-methyluridine-3'-phosphorothioate
  modified_base 22: mod_base = OTHER; note = 2'-O-methyladenosine-3'-phosphorothioate
  modified_base 23: mod_base = OTHER; note = 2'-O-methylcytidine
ttatcatgagcattcttctgtac

SEQ ID NO: 12579 - RNA, 23 nt, synthetic construct
  source 1..23: mol_type = other RNA
  modified_base 1: mod_base = OTHER; note = 2'-O-methyluridine-3'-phosphorothioate 5'-(E)-Vinylphosphonate
  modified_base 2: mod_base = OTHER; note = 2'-deoxy-2'-fluoroadenosine-3'-phosphorothioate
  modified_base 3: mod_base = OTHER; note = 2'-O-methyladenosine-3'-phosphate
  modified_base 4: mod_base = OTHER; note = 2'-O-methyladenosine-3'-phosphate
  modified_base 5: mod_base = OTHER; note = 2'-O-methylcytidine-3'-phosphate
  modified_base 6: mod_base = OTHER; note = 2'-deoxy-2'-fluorouridine-3'-phosphate
  modified_base 7: mod_base = OTHER; note = 2'-O-methyladenosine-3'-phosphate
  modified_base 8: mod_base = OTHER; note = 2'-O-methyluridine-3'-phosphate
  modified_base 9: mod_base = OTHER; note = 2'-O-methylcytidine-3'-phosphate
  modified_base 10: mod_base = OTHER; note = 2'-O-methyladenosine-3'-phosphate
  modified_base 11: mod_base = OTHER; note = 2'-O-methyluridine-3'-phosphate
  modified_base 12: mod_base = OTHER; note = 2'-O-methylguanosine-3'-phosphate
  modified_base 13: mod_base = OTHER; note = 2'-O-methyladenosine-3'-phosphate
  modified_base 14: mod_base = OTHER; note = 2'-deoxy-2'-fluoroguanosine-3'-phosphate
  modified_base 15: mod_base = OTHER; note = 2'-O-methylcytidine-3'-phosphate
  modified_base 16: mod_base = OTHER; note = 2'-deoxy-2'-fluoroadenosine-3'-phosphate
  modified_base 17: mod_base = OTHER; note = 2'-O-methyluridine-3'-phosphate
  modified_base 18: mod_base = OTHER; note = 2'-O-methyluridine-3'-phosphate
  modified_base 19: mod_base = OTHER; note = 2'-O-methylcytidine-3'-phosphate
  modified_base 20: mod_base = OTHER; note = 2'-O-methyluridine-3'-phosphate
  modified_base 21: mod_base = OTHER; note = 2'-O-methyluridine-3'-phosphorothioate
  modified_base 22: mod_base = OTHER; note = 2'-O-methylcytidine-3'-phosphorothioate
  modified_base 23: mod_base = OTHER; note = 2'-O-methyluridine
taaactatcatgagcattcttct

SEQ ID NO: 12580 - RNA, 23 nt, synthetic construct
  source 1..23: mol_type = other RNA
  modified_base 1: mod_base = OTHER; note = 2'-O-methyluridine-3'-phosphorothioate 5'-(E)-Vinylphosphonate
  modified_base 2: mod_base = OTHER; note = 2'-deoxy-2'-fluoroadenosine-3'-phosphorothioate
  modified_base 3: mod_base = OTHER; note = 2'-O-methyladenosine-3'-phosphate
  modified_base 4: mod_base = OTHER; note = 2'-O-methyladenosine-3'-phosphate
  modified_base 5: mod_base = OTHER; note = 2'-O-methyladenosine-3'-phosphate
  modified_base 6: mod_base = OTHER; note = 2'-deoxy-2'-fluorocytidine-3'-phosphate
  modified_base 7: mod_base = OTHER; note = 2'-O-methyluridine-3'-phosphate
  modified_base 8: mod_base = OTHER; note = 2'-O-methyladenosine-3'-phosphate
  modified_base 9: mod_base = OTHER; note = 2'-O-methyluridine-3'-phosphate
  modified_base 10: mod_base = OTHER; note = 2'-O-methylcytidine-3'-phosphate
  modified_base 11: mod_base = OTHER; note = 2'-O-methyladenosine-3'-phosphate
  modified_base 12: mod_base = OTHER; note = 2'-O-methyluridine-3'-phosphate
  modified_base 13: mod_base = OTHER; note = 2'-O-methylguanosine-3'-phosphate
  modified_base 14: mod_base = OTHER; note = 2'-deoxy-2'-fluoroadenosine-3'-phosphate
  modified_base 15: mod_base = OTHER; note = 2'-O-methylguanosine-3'-phosphate
  modified_base 16: mod_base = OTHER; note = 2'-deoxy-2'-fluorocytidine-3'-phosphate
  modified_base 17: mod_base = OTHER; note = 2'-O-methyladenosine-3'-phosphate
  modified_base 18: mod_base = OTHER; note = 2'-O-methyluridine-3'-phosphate
  modified_base 19: mod_base = OTHER; note = 2'-O-methyluridine-3'-phosphate
  modified_base 20: mod_base = OTHER; note = 2'-O-methylcytidine-3'-phosphate
  modified_base 21: mod_base = OTHER; note = 2'-O-methyluridine-3'-phosphorothioate
  modified_base 22: mod_base = OTHER; note = 2'-O-methyluridine-3'-phosphorothioate
  modified_base 23: mod_base = OTHER; note = 2'-O-methylcytidine
taaaactatcatgagcattcttc

SEQ ID NO: 12581 - RNA, 23 nt, synthetic construct
  source 1..23: mol_type = other RNA
  modified_base 1: mod_base = OTHER; note = 2'-O-methyluridine-3'-phosphorothioate 5'-(E)-Vinylphosphonate
  modified_base 2: mod_base = OTHER; note = 2'-deoxy-2'-fluoroguanosine-3'-phosphorothioate
  modified_base 3: mod_base = OTHER; note = 2'-O-methylcytidine-3'-phosphate
  modified_base 4: mod_base = OTHER; note = 2'-O-methyladenosine-3'-phosphate
  modified_base 5: mod_base = OTHER; note = 2'-O-methyladenosine-3'-phosphate
  modified_base 6: mod_base = OTHER; note = 2'-deoxy-2'-fluoroadenosine-3'-phosphate
  modified_base 7: mod_base = OTHER; note = 2'-O-methyladenosine-3'-phosphate
  modified_base 8: mod_base = OTHER; note = 2'-O-methylcytidine-3'-phosphate
  modified_base 9: mod_base = OTHER; note = 2'-O-methyluridine-3'-phosphate
  modified_base 10: mod_base = OTHER; note = 2'-O-methyladenosine-3'-phosphate
  modified_base 11: mod_base = OTHER; note = 2'-O-methyluridine-3'-phosphate
  modified_base 12: mod_base = OTHER; note = 2'-O-methylcytidine-3'-phosphate
  modified_base 13: mod_base = OTHER; note = 2'-O-methyladenosine-3'-phosphate
  modified_base 14: mod_base = OTHER; note = 2'-deoxy-2'-fluorouridine-3'-phosphate
  modified_base 15: mod_base = OTHER; note = 2'-O-methylguanosine-3'-phosphate
  modified_base 16: mod_base = OTHER; note = 2'-deoxy-2'-fluoroadenosine-3'-phosphate
  modified_base 17: mod_base = OTHER; note = 2'-O-methylguanosine-3'-phosphate
  modified_base 18: mod_base = OTHER; note = 2'-O-methylcytidine-3'-phosphate
  modified_base 19: mod_base = OTHER; note = 2'-O-methyladenosine-3'-phosphate
  modified_base 20: mod_base = OTHER; note = 2'-O-methyluridine-3'-phosphate
  modified_base 21: mod_base = OTHER; note = 2'-O-methyluridine-3'-phosphorothioate
  modified_base 22: mod_base = OTHER; note = 2'-O-methylcytidine-3'-phosphorothioate
  modified_base 23: mod_base = OTHER; note = 2'-O-methyluridine
tgcaaaactatcatgagcattct

SEQ ID NO: 12582 - RNA, 23 nt, synthetic construct
  source 1..23: mol_type = other RNA
  modified_base 1: mod_base = OTHER; note = 2'-O-methyluridine-3'-phosphorothioate 5'-(E)-Vinylphosphonate
  modified_base 2: mod_base = OTHER; note = 2'-deoxy-2'-fluoroadenosine-3'-phosphorothioate
  modified_base 3: mod_base = OTHER; note = 2'-O-methyladenosine-3'-phosphate
  modified_base 4: mod_base = OTHER; note = 2'-O-methylguanosine-3'-phosphate
  modified_base 5: mod_base = OTHER; note = 2'-O-methylguanosine-3'-phosphate
  modified_base 6: mod_base = OTHER; note = 2'-deoxy-2'-fluorocytidine-3'-phosphate
  modified_base 7: mod_base = OTHER; note = 2'-O-methyladenosine-3'-phosphate
  modified_base 8: mod_base = OTHER; note = 2'-O-methyladenosine-3'-phosphate
  modified_base 9: mod_base = OTHER; note = 2'-O-methyladenosine-3'-phosphate
  modified_base 10: mod_base = OTHER; note = 2'-O-methyladenosine-3'-phosphate
  modified_base 11: mod_base = OTHER; note = 2'-O-methylcytidine-3'-phosphate
  modified_base 12: mod_base = OTHER; note = 2'-O-methyluridine-3'-phosphate
  modified_base 13: mod_base = OTHER; note = 2'-O-methyladenosine-3'-phosphate
  modified_base 14: mod_base = OTHER; note = 2'-deoxy-2'-fluorouridine-3'-phosphate
  modified_base 15: mod_base = OTHER; note = 2'-O-methylcytidine-3'-phosphate
  modified_base 16: mod_base = OTHER; note = 2'-deoxy-2'-fluoroadenosine-3'-phosphate
  modified_base 17: mod_base = OTHER; note = 2'-O-methyluridine-3'-phosphate
  modified_base 18: mod_base = OTHER; note = 2'-O-methylguanosine-3'-phosphate
  modified_base 19: mod_base = OTHER; note = 2'-O-methyladenosine-3'-phosphate
  modified_base 20: mod_base = OTHER; note = 2'-O-methylguanosine-3'-phosphate
  modified_base 21: mod_base = OTHER; note = 2'-O-methylcytidine-3'-phosphorothioate
  modified_base 22: mod_base = OTHER; note = 2'-O-methyladenosine-3'-phosphorothioate
  modified_base 23: mod_base = OTHER; note = 2'-O-methyluridine
taaggcaaaactatcatgagcat

SEQ ID NO: 12583 - RNA, 23 nt, synthetic construct
  source 1..23: mol_type = other RNA
  modified_base 1: mod_base = OTHER; note = 2'-O-methyluridine-3'-phosphorothioate 5'-(E)-Vinylphosphonate
  modified_base 2: mod_base = OTHER; note = 2'-deoxy-2'-fluorouridine-3'-phosphorothioate
  modified_base 3: mod_base = OTHER; note = 2'-O-methylguanosine-3'-phosphate
  modified_base 4: mod_base = OTHER; note = 2'-O-methyladenosine-3'-phosphate
  modified_base 5: mod_base = OTHER; note = 2'-O-methyladenosine-3'-phosphate
  modified_base 6: mod_base = OTHER; note = 2'-deoxy-2'-fluoroguanosine-3'-phosphate
  modified_base 7: mod_base = OTHER; note = 2'-O-methylguanosine-3'-phosphate
  modified_base 8: mod_base = OTHER; note = 2'-O-methylcytidine-3'-phosphate
  modified_base 9: mod_base = OTHER; note = 2'-O-methyladenosine-3'-phosphate
  modified_base 10: mod_base = OTHER; note = 2'-O-methyladenosine-3'-phosphate
  modified_base 11: mod_base = OTHER; note = 2'-O-methyladenosine-3'-phosphate
  modified_base 12: mod_base = OTHER; note = 2'-O-methyladenosine-3'-phosphate
  modified_base 13: mod_base = OTHER; note = 2'-O-methylcytidine-3'-phosphate
  modified_base 14: mod_base = OTHER; note = 2'-deoxy-2'-fluorouridine-3'-phosphate
  modified_base 15: mod_base = OTHER; note = 2'-O-methyladenosine-3'-phosphate
  modified_base 16: mod_base = OTHER; note = 2'-deoxy-2'-fluorouridine-3'-phosphate
  modified_base 17: mod_base = OTHER; note = 2'-O-methylcytidine-3'-phosphate
  modified_base 18: mod_base = OTHER; note = 2'-O-methyladenosine-3'-phosphate
  modified_base 19: mod_base = OTHER; note = 2'-O-methyluridine-3'-phosphate
  modified_base 20: mod_base = OTHER; note = 2'-O-methylguanosine-3'-phosphate
  modified_base 21: mod_base = OTHER; note = 2'-O-methyladenosine-3'-phosphorothioate
  modified_base 22: mod_base = OTHER; note = 2'-O-methylguanosine-3'-phosphorothioate
  modified_base 23: mod_base = OTHER; note = 2'-O-methylcytidine
ttgaaggcaaaactatcatgagc

SEQ ID NO: 12584 - RNA, 23 nt, synthetic construct
  source 1..23: mol_type = other RNA
  modified_base 1: mod_base = OTHER; note = 2'-O-methyluridine-3'-phosphorothioate 5'-(E)-Vinylphosphonate
  modified_base 2: mod_base = OTHER; note = 2'-deoxy-2'-fluoroadenosine-3'-phosphorothioate
  modified_base 3: mod_base = OTHER; note = 2'-O-methyladenosine-3'-phosphate
  modified_base 4: mod_base = OTHER; note = 2'-O-methyluridine-3'-phosphate
  modified_base 5: mod_base = OTHER; note = 2'-O-methylguanosine-3'-phosphate
  modified_base 6: mod_base = OTHER; note = 2'-deoxy-2'-fluoroadenosine-3'-phosphate
  modified_base 7: mod_base = OTHER; note = 2'-O-methyladenosine-3'-phosphate
  modified_base 8: mod_base = OTHER; note = 2'-O-methylguanosine-3'-phosphate
  modified_base 9: mod_base = OTHER; note = 2'-O-methylguanosine-3'-phosphate
  modified_base 10: mod_base = OTHER; note = 2'-O-methylcytidine-3'-phosphate
  modified_base 11: mod_base = OTHER; note = 2'-O-methyladenosine-3'-phosphate
  modified_base 12: mod_base = OTHER; note = 2'-O-methyladenosine-3'-phosphate
  modified_base 13: mod_base = OTHER; note = 2'-O-methyladenosine-3'-phosphate
  modified_base 14: mod_base = OTHER; note = 2'-deoxy-2'-fluoroadenosine-3'-phosphate
  modified_base 15: mod_base = OTHER; note = 2'-O-methylcytidine-3'-phosphate
  modified_base 16: mod_base = OTHER; note = 2'-deoxy-2'-fluorouridine-3'-phosphate
  modified_base 17: mod_base = OTHER; note = 2'-O-methyladenosine-3'-phosphate
  modified_base 18: mod_base = OTHER; note = 2'-O-methyluridine-3'-phosphate
  modified_base 19: mod_base = OTHER; note = 2'-O-methylcytidine-3'-phosphate
  modified_base 20: mod_base = OTHER; note = 2'-O-methyladenosine-3'-phosphate
  modified_base 21: mod_base = OTHER; note = 2'-O-methyluridine-3'-phosphorothioate
  modified_base 22: mod_base = OTHER; note = 2'-O-methylguanosine-3'-phosphorothioate
  modified_base 23: mod_base = OTHER; note = 2'-O-methyladenosine
taatgaaggcaaaactatcatga

SEQ ID NO: 12585 - RNA, 23 nt, synthetic construct
  source 1..23: mol_type = other RNA
  modified_base 1: mod_base = OTHER; note = 2'-O-methyluridine-3'-phosphorothioate 5'-(E)-Vinylphosphonate
  modified_base 2: mod_base = OTHER; note = 2'-deoxy-2'-fluoroguanosine-3'-phosphorothioate
  modified_base 3: mod_base = OTHER; note = 2'-O-methyladenosine-3'-phosphate
  modified_base 4: mod_base = OTHER; note = 2'-O-methyladenosine-3'-phosphate
  modified_base 5: mod_base = OTHER; note = 2'-O-methyluridine-3'-phosphate
  modified_base 6: mod_base = OTHER; note = 2'-deoxy-2'-fluoroguanosine-3'-phosphate
  modified_base 7: mod_base = OTHER; note = 2'-O-methyladenosine-3'-phosphate
  modified_base 8: mod_base = OTHER; note = 2'-O-methyladenosine-3'-phosphate
  modified_base 9: mod_base = OTHER; note = 2'-O-methylguanosine-3'-phosphate
  modified_base 10: mod_base = OTHER; note = 2'-O-methylguanosine-3'-phosphate
  modified_base 11: mod_base = OTHER; note = 2'-O-methylcytidine-3'-phosphate
  modified_base 12: mod_base = OTHER; note = 2'-O-methyladenosine-3'-phosphate
  modified_base 13: mod_base = OTHER; note = 2'-O-methyladenosine-3'-phosphate
  modified_base 14: mod_base = OTHER; note = 2'-deoxy-2'-fluoroadenosine-3'-phosphate
  modified_base 15: mod_base = OTHER; note = 2'-O-methyladenosine-3'-phosphate
  modified_base 16: mod_base = OTHER; note = 2'-deoxy-2'-fluorocytidine-3'-phosphate
  modified_base 17: mod_base = OTHER; note = 2'-O-methyluridine-3'-phosphate
  modified_base 18: mod_base = OTHER; note = 2'-O-methyladenosine-3'-phosphate
  modified_base 19: mod_base = OTHER; note = 2'-O-methyluridine-3'-phosphate
  modified_base 20: mod_base = OTHER; note = 2'-O-methylcytidine-3'-phosphate
  modified_base 21: mod_base = OTHER; note = 2'-O-methyladenosine-3'-phosphorothioate
  modified_base 22: mod_base = OTHER; note = 2'-O-methyluridine-3'-phosphorothioate
  modified_base 23: mod_base = OTHER; note = 2'-O-methylguanosine
tgaatgaaggcaaaactatcatg

SEQ ID NO: 12586 - RNA, 23 nt, synthetic construct
  source 1..23: mol_type = other RNA
  modified_base 1: mod_base = OTHER; note = 2'-O-methyluridine-3'-phosphorothioate 5'-(E)-Vinylphosphonate
  modified_base 2: mod_base = OTHER; note = 2'-deoxy-2'-fluorouridine-3'-phosphorothioate
  modified_base 3: mod_base = OTHER; note = 2'-O-methyladenosine-3'-phosphate
  modified_base 4: mod_base = OTHER; note = 2'-O-methylguanosine-3'-phosphate
  modified_base 5: mod_base = OTHER; note = 2'-O-methyladenosine-3'-phosphate
  modified_base 6: mod_base = OTHER; note = 2'-deoxy-2'-fluoroadenosine-3'-phosphate
  modified_base 7: mod_base = OTHER; note = 2'-O-methyluridine-3'-phosphate
  modified_base 8: mod_base = OTHER; note = 2'-O-methylguanosine-3'-phosphate
  modified_base 9: mod_base = OTHER; note = 2'-O-methyladenosine-3'-phosphate
  modified_base 10: mod_base = OTHER; note = 2'-O-methyladenosine-3'-phosphate
  modified_base 11: mod_base = OTHER; note = 2'-O-methylguanosine-3'-phosphate
  modified_base 12: mod_base = OTHER; note = 2'-O-methylguanosine-3'-phosphate
  modified_base 13: mod_base = OTHER; note = 2'-O-methylcytidine-3'-phosphate
  modified_base 14: mod_base = OTHER; note = 2'-deoxy-2'-fluoroadenosine-3'-phosphate
  modified_base 15: mod_base = OTHER; note = 2'-O-methyladenosine-3'-phosphate
  modified_base 16: mod_base = OTHER; note = 2'-deoxy-2'-fluoroadenosine-3'-phosphate
  modified_base 17: mod_base = OTHER; note = 2'-O-methyladenosine-3'-phosphate
  modified_base 18: mod_base = OTHER; note = 2'-O-methylcytidine-3'-phosphate
  modified_base 19: mod_base = OTHER; note = 2'-O-methyluridine-3'-phosphate
  modified_base 20: mod_base = OTHER; note = 2'-O-methyladenosine-3'-phosphate
  modified_base 21: mod_base = OTHER; note = 2'-O-methyluridine-3'-phosphorothioate
  modified_base 22: mod_base = OTHER; note = 2'-O-methylcytidine-3'-phosphorothioate
  modified_base 23: mod_base = OTHER; note = 2'-O-methyladenosine
ttagaatgaaggcaaaactatca

SEQ ID NO: 12587 - RNA, 23 nt, synthetic construct
  source 1..23: mol_type = other RNA
  modified_base 1: mod_base = OTHER; note = 2'-O-methyluridine-3'-phosphorothioate 5'-(E)-Vinylphosphonate
  modified_base 2: mod_base = OTHER; note = 2'-deoxy-2'-fluorouridine-3'-phosphorothioate
  modified_base 3: mod_base = OTHER; note = 2'-O-methyladenosine-3'-phosphate
  modified_base 4: mod_base = OTHER; note = 2'-O-methyluridine-3'-phosphate
  modified_base 5: mod_base = OTHER; note = 2'-O-methyluridine-3'-phosphate
  modified_base 6: mod_base = OTHER; note = 2'-deoxy-2'-fluorocytidine-3'-phosphate
  modified_base 7: mod_base = OTHER; note = 2'-O-methyladenosine-3'-phosphate
  modified_base 8: mod_base = OTHER; note = 2'-O-methyluridine-3'-phosphate
  modified_base 9: mod_base = OTHER; note = 2'-O-methyluridine-3'-phosphate
  modified_base 10: mod_base = OTHER; note = 2'-O-methyladenosine-3'-phosphate
  modified_base 11: mod_base = OTHER; note = 2'-O-methylcytidine-3'-phosphate
  modified_base 12: mod_base = OTHER; note = 2'-O-methyluridine-3'-phosphate
  modified_base 13: mod_base = OTHER; note = 2'-O-methylcytidine-3'-phosphate
  modified_base 14: mod_base = OTHER; note = 2'-deoxy-2'-fluorouridine-3'-phosphate
  modified_base 15: mod_base = OTHER; note = 2'-O-methylguanosine-3'-phosphate
  modified_base 16: mod_base = OTHER; note = 2'-deoxy-2'-fluorouridine-3'-phosphate
  modified_base 17: mod_base = OTHER; note = 2'-O-methylguanosine-3'-phosphate
  modified_base 18: mod_base = OTHER; note = 2'-O-methyluridine-3'-phosphate
  modified_base 19: mod_base = OTHER; note = 2'-O-methylcytidine-3'-phosphate
  modified_base 20: mod_base = OTHER; note = 2'-O-methylcytidine-3'-phosphate
  modified_base 21: mod_base = OTHER; note = 2'-O-methyladenosine-3'-phosphorothioate
  modified_base 22: mod_base = OTHER; note = 2'-O-methylcytidine-3'-phosphorothioate
  modified_base 23: mod_base = OTHER; note = 2'-O-methyladenosine
ttattcattactctgtgtccaca

SEQ ID NO: 12588 - RNA, 23 nt, synthetic construct
  source 1..23: mol_type = other RNA
  modified_base 1: mod_base = OTHER; note = 2'-O-methyluridine-3'-phosphorothioate 5'-(E)-Vinylphosphonate
  modified_base 2: mod_base = OTHER; note = 2'-deoxy-2'-fluoroadenosine-3'-phosphorothioate
  modified_base 3: mod_base = OTHER; note = 2'-O-methyladenosine-3'-phosphate
  modified_base 4: mod_base = OTHER; note = 2'-O-methyladenosine-3'-phosphate
  modified_base 5: mod_base = OTHER; note = 2'-O-methyluridine-3'-phosphate
  modified_base 6: mod_base = OTHER; note = 2'-deoxy-2'-fluoroadenosine-3'-phosphate
  modified_base 7: mod_base = OTHER; note = 2'-O-methyluridine-3'-phosphate
  modified_base 8: mod_base = OTHER; note = 2'-O-methyluridine-3'-phosphate
  modified_base 9: mod_base = OTHER; note = 2'-O-methylcytidine-3'-phosphate
  modified_base 10: mod_base = OTHER; note = 2'-O-methyladenosine-3'-phosphate
  modified_base 11: mod_base = OTHER; note = 2'-O-methyluridine-3'-phosphate
  modified_base 12: mod_base = OTHER; note = 2'-O-methyluridine-3'-phosphate
  modified_base 13: mod_base = OTHER; note = 2'-O-methyladenosine-3'-phosphate
  modified_base 14: mod_base = OTHER; note = 2'-deoxy-2'-fluorocytidine-3'-phosphate
  modified_base 15: mod_base = OTHER; note = 2'-O-methyluridine-3'-phosphate
  modified_base 16: mod_base = OTHER; note = 2'-deoxy-2'-fluorocytidine-3'-phosphate
  modified_base 17: mod_base = OTHER; note = 2'-O-methyluridine-3'-phosphate
  modified_base 18: mod_base = OTHER; note = 2'-O-methylguanosine-3'-phosphate
  modified_base 19: mod_base = OTHER; note = 2'-O-methyluridine-3'-phosphate
  modified_base 20: mod_base = OTHER; note = 2'-O-methylguanosine-3'-phosphate
  modified_base 21: mod_base = OTHER; note = 2'-O-methyluridine-3'-phosphorothioate
  modified_base 22: mod_base = OTHER; note = 2'-O-methylcytidine-3'-phosphorothioate
  modified_base 23: mod_base = OTHER; note = 2'-O-methylcytidine
taaatattcattactctgtgtcc

SEQ ID NO: 12589 - RNA, 23 nt, synthetic construct
  source 1..23: mol_type = other RNA
  modified_base 1: mod_base = OTHER; note = 2'-O-methyluridine-3'-phosphorothioate 5'-(E)-Vinylphosphonate
  modified_base 2: mod_base = OTHER; note = 2'-deoxy-2'-fluorocytidine-3'-phosphorothioate
  modified_base 3: mod_base = OTHER; note = 2'-O-methylcytidine-3'-phosphate
  modified_base 4: mod_base = OTHER; note = 2'-O-methylcytidine-3'-phosphate
  modified_base 5: mod_base = OTHER; note = 2'-O-methyladenosine-3'-phosphate
  modified_base 6: mod_base = OTHER; note = 2'-deoxy-2'-fluorouridine-3'-phosphate
  modified_base 7: mod_base = OTHER; note = 2'-O-methyluridine-3'-phosphate
  modified_base 8: mod_base = OTHER; note = 2'-O-methyladenosine-3'-phosphate
  modified_base 9: mod_base = OTHER; note = 2'-O-methyladenosine-3'-phosphate
  modified_base 10: mod_base = OTHER; note = 2'-O-methyladenosine-3'-phosphate
  modified_base 11: mod_base = OTHER; note = 2'-O-methyluridine-3'-phosphate
  modified_base 12: mod_base = OTHER; note = 2'-O-methyladenosine-3'-phosphate
  modified_base 13: mod_base = OTHER; note = 2'-O-methyluridine-3'-phosphate
  modified_base 14: mod_base = OTHER; note = 2'-deoxy-2'-fluorouridine-3'-phosphate
  modified_base 15: mod_base = OTHER; note = 2'-O-methylcytidine-3'-phosphate
  modified_base 16: mod_base = OTHER; note = 2'-deoxy-2'-fluoroadenosine-3'-phosphate
  modified_base 17: mod_base = OTHER; note = 2'-O-methyluridine-3'-phosphate
  modified_base 18: mod_base = OTHER; note = 2'-O-methyluridine-3'-phosphate
  modified_base 19: mod_base = OTHER; note = 2'-O-methyladenosine-3'-phosphate
  modified_base 20: mod_base = OTHER; note = 2'-O-methylcytidine-3'-phosphate
  modified_base 21: mod_base = OTHER; note = 2'-O-methyluridine-3'-phosphorothioate
  modified_base 22: mod_base = OTHER; note = 2'-O-methylcytidine-3'-phosphorothioate
  modified_base 23: mod_base = OTHER; note = 2'-O-methyluridine
tcccattaaatattcattactct

SEQ ID NO: 12590 - RNA, 23 nt, synthetic construct
  source 1..23: mol_type = other RNA
  modified_base 1: mod_base = OTHER; note = 2'-O-methyluridine-3'-phosphorothioate 5'-(E)-Vinylphosphonate
  modified_base 2: mod_base = OTHER; note = 2'-deoxy-2'-fluoroguanosine-3'-phosphorothioate
  modified_base 3: mod_base = OTHER; note = 2'-O-methylguanosine-3'-phosphate
  modified_base 4: mod_base = OTHER; note = 2'-O-methylcytidine-3'-phosphate
  modified_base 5: mod_base = OTHER; note = 2'-O-methyladenosine-3'-phosphate
  modified_base 6: mod_base = OTHER; note = 2'-deoxy-2'-fluorouridine-3'-phosphate
  modified_base 7: mod_base = OTHER; note = 2'-O-methyladenosine-3'-phosphate
  modified_base 8: mod_base = OTHER; note = 2'-O-methyluridine-3'-phosphate
  modified_base 9: mod_base = OTHER; note = 2'-O-methyluridine-3'-phosphate
  modified_base 10: mod_base = OTHER; note = 2'-O-methyluridine-3'-phosphate
  modified_base 11: mod_base = OTHER; note = 2'-O-methyladenosine-3'-phosphate
  modified_base 12: mod_base = OTHER; note = 2'-O-methyladenosine-3'-phosphate
  modified_base 13: mod_base = OTHER; note = 2'-O-methyluridine-3'-phosphate
  modified_base 14: mod_base = OTHER; note = 2'-deoxy-2'-fluoroguanosine-3'-phosphate
  modified_base 15: mod_base = OTHER; note = 2'-O-methyluridine-3'-phosphate
  modified_base 16: mod_base = OTHER; note = 2'-deoxy-2'-fluorocytidine-3'-phosphate
  modified_base 17: mod_base = OTHER; note = 2'-O-methylcytidine-3'-phosphate
  modified_base 18: mod_base = OTHER; note = 2'-O-methylcytidine-3'-phosphate
  modified_base 19: mod_base = OTHER; note = 2'-O-methyladenosine-3'-phosphate
  modified_base 20: mod_base = OTHER; note = 2'-O-methyluridine-3'-phosphate
  modified_base 21: mod_base = OTHER; note = 2'-O-methyluridine-3'-phosphorothioate
  modified_base 22: mod_base = OTHER; note = 2'-O-methyladenosine-3'-phosphorothioate
  modified_base 23: mod_base = OTHER; note = 2'-O-methyladenosine
tggcatatttaatgtcccattaa

SEQ ID NO: 12591 - RNA, 23 nt, synthetic construct
  source 1..23: mol_type = other RNA
  modified_base 1: mod_base = OTHER; note = 2'-O-methyluridine-3'-phosphorothioate 5'-(E)-Vinylphosphonate
  modified_base 2: mod_base = OTHER; note = 2'-deoxy-2'-fluoroguanosine-3'-phosphorothioate
  modified_base 3: mod_base = OTHER; note = 2'-O-methylguanosine-3'-phosphate
  modified_base 4: mod_base = OTHER; note = 2'-O-methylguanosine-3'-phosphate
  modified_base 5: mod_base = OTHER; note = 2'-O-methylcytidine-3'-phosphate
  modified_base 6: mod_base = OTHER; note = 2'-deoxy-2'-fluoroadenosine-3'-phosphate
  modified_base 7: mod_base = OTHER; note = 2'-O-methyluridine-3'-phosphate
  modified_base 8: mod_base = OTHER; note = 2'-O-methyladenosine-3'-phosphate
  modified_base 9: mod_base = OTHER; note = 2'-O-methyluridine-3'-phosphate
  modified_base 10: mod_base = OTHER; note = 2'-O-methyluridine-3'-phosphate
  modified_base 11: mod_base = OTHER; note = 2'-O-methyluridine-3'-phosphate
  modified_base 12: mod_base = OTHER; note = 2'-O-methyladenosine-3'-phosphate
  modified_base 13: mod_base = OTHER; note = 2'-O-methyladenosine-3'-phosphate
  modified_base 14: mod_base = OTHER; note = 2'-deoxy-2'-fluorouridine-3'-phosphate
  modified_base 15: mod_base = OTHER; note = 2'-O-methylguanosine-3'-phosphate
  modified_base 16: mod_base = OTHER; note = 2'-deoxy-2'-fluorouridine-3'-phosphate
  modified_base 17: mod_base = OTHER; note = 2'-O-methylcytidine-3'-phosphate
  modified_base 18: mod_base = OTHER; note = 2'-O-methylcytidine-3'-phosphate
  modified_base 19: mod_base = OTHER; note = 2'-O-methylcytidine-3'-phosphate
  modified_base 20: mod_base = OTHER; note = 2'-O-methyladenosine-3'-phosphate
  modified_base 21: mod_base = OTHER; note = 2'-O-methyluridine-3'-phosphorothioate
  modified_base 22: mod_base = OTHER; note = 2'-O-methyluridine-3'-phosphorothioate
  modified_base 23: mod_base = OTHER; note = 2'-O-methyladenosine
tgggcatatttaatgtcccatta

SEQ ID NO: 12592 - RNA, 23 nt, synthetic construct
  source 1..23: mol_type = other RNA
  modified_base 1: mod_base = OTHER; note = 2'-O-methyluridine-3'-phosphorothioate 5'-(E)-Vinylphosphonate
  modified_base 2: mod_base = OTHER; note = 2'-deoxy-2'-fluoroadenosine-3'-phosphorothioate
  modified_base 3: mod_base = OTHER; note = 2'-O-methylguanosine-3'-phosphate
  modified_base 4: mod_base = OTHER; note = 2'-O-methylguanosine-3'-phosphate
  modified_base 5: mod_base = OTHER; note = 2'-O-methylguanosine-3'-phosphate
  modified_base 6: mod_base = OTHER; note = 2'-deoxy-2'-fluorocytidine-3'-phosphate
  modified_base 7: mod_base = OTHER; note = 2'-O-methyladenosine-3'-phosphate
  modified_base 8: mod_base = OTHER; note = 2'-O-methyluridine-3'-phosphate
  modified_base 9: mod_base = OTHER; note = 2'-O-methyladenosine-3'-phosphate
  modified_base 10: mod_base = OTHER; note = 2'-O-methyluridine-3'-phosphate
  modified_base 11: mod_base = OTHER; note = 2'-O-methyluridine-3'-phosphate
  modified_base 12: mod_base = OTHER; note = 2'-O-methyluridine-3'-phosphate
  modified_base 13: mod_base = OTHER; note = 2'-O-methyladenosine-3'-phosphate
  modified_base 14: mod_base = OTHER; note = 2'-deoxy-2'-fluoroadenosine-3'-phosphate
  modified_base 15: mod_base = OTHER; note = 2'-O-methyluridine-3'-phosphate
  modified_base 16: mod_base = OTHER; note = 2'-deoxy-2'-fluoroguanosine-3'-phosphate
  modified_base 17: mod_base = OTHER; note = 2'-O-methyluridine-3'-phosphate
  modified_base 18: mod_base = OTHER; note = 2'-O-methylcytidine-3'-phosphate
  modified_base 19: mod_base = OTHER; note = 2'-O-methylcytidine-3'-phosphate
  modified_base 20: mod_base = OTHER; note = 2'-O-methylcytidine-3'-phosphate
  modified_base 21: mod_base = OTHER; note = 2'-O-methyladenosine-3'-phosphorothioate
  modified_base 22: mod_base = OTHER; note = 2'-O-methyluridine-3'-phosphorothioate
  modified_base 23: mod_base = OTHER; note = 2'-O-methyluridine
tagggcatatttaatgtcccatt

SEQ ID NO: 12593 - RNA, 23 nt, synthetic construct
  source 1..23: mol_type = other RNA
  modified_base 1: mod_base = OTHER; note = 2'-O-methyluridine-3'-phosphorothioate 5'-(E)-Vinylphosphonate
  modified_base 2: mod_base = OTHER; note = 2'-deoxy-2'-fluoroadenosine-3'-phosphorothioate
  modified_base 3: mod_base = OTHER; note = 2'-O-methyladenosine-3'-phosphate
  modified_base 4: mod_base = OTHER; note = 2'-O-methylguanosine-3'-phosphate
  modified_base 5: mod_base = OTHER; note = 2'-O-methylguanosine-3'-phosphate
  modified_base 6: mod_base = OTHER; note = 2'-deoxy-2'-fluoroguanosine-3'-phosphate
  modified_base 7: mod_base = OTHER; note = 2'-O-methylcytidine-3'-phosphate
  modified_base 8: mod_base = OTHER; note = 2'-O-methyladenosine-3'-phosphate
  modified_base 9: mod_base = OTHER; note = 2'-O-methyluridine-3'-phosphate
  modified_base 10: mod_base = OTHER; note = 2'-O-methyladenosine-3'-phosphate
  modified_base 11: mod_base = OTHER; note = 2'-O-methyluridine-3'-phosphate
  modified_base 12: mod_base = OTHER; note = 2'-O-methyluridine-3'-phosphate
  modified_base 13: mod_base = OTHER; note = 2'-O-methyluridine-3'-phosphate
  modified_base 14: mod_base = OTHER; note = 2'-deoxy-2'-fluoroadenosine-3'-phosphate
  modified_base 15: mod_base = OTHER; note = 2'-O-methyladenosine-3'-phosphate
  modified_base 16: mod_base = OTHER; note = 2'-deoxy-2'-fluorouridine-3'-phosphate
  modified_base 17: mod_base = OTHER; note = 2'-O-methylguanosine-3'-phosphate
  modified_base 18: mod_base = OTHER; note = 2'-O-methyluridine-3'-phosphate
  modified_base 19: mod_base = OTHER; note = 2'-O-methylcytidine-3'-phosphate
  modified_base 20: mod_base = OTHER; note = 2'-O-methylcytidine-3'-phosphate
  modified_base 21: mod_base = OTHER; note = 2'-O-methylcytidine-3'-phosphorothioate
  modified_base 22: mod_base = OTHER; note = 2'-O-methyladenosine-3'-phosphorothioate
  modified_base 23: mod_base = OTHER; note = 2'-O-methyluridine
taagggcatatttaatgtcccat

SEQ ID NO: 12594 - RNA, 23 nt, synthetic construct
  source 1..23: mol_type = other RNA
  modified_base 1: mod_base = OTHER; note = 2'-O-methyluridine-3'-phosphorothioate 5'-(E)-Vinylphosphonate
  modified_base 2: mod_base = OTHER; note = 2'-deoxy-2'-fluorouridine-3'-phosphorothioate
  modified_base 3: mod_base = OTHER; note = 2'-O-methylguanosine-3'-phosphate
  modified_base 4: mod_base = OTHER; note = 2'-O-methyluridine-3'-phosphate
  modified_base 5: mod_base = OTHER; note = 2'-O-methyluridine-3'-phosphate
  modified_base 6: mod_base = OTHER; note = 2'-deoxy-2'-fluoroadenosine-3'-phosphate
  modified_base 7: mod_base = OTHER; note = 2'-O-methyladenosine-3'-phosphate
  modified_base 8: mod_base = OTHER; note = 2'-O-methyladenosine-3'-phosphate
  modified_base 9: mod_base = OTHER; note = 2'-O-methyluridine-3'-phosphate
  modified_base 10: mod_base = OTHER; note = 2'-O-methylcytidine-3'-phosphate
  modified_base 11: mod_base = OTHER; note = 2'-O-methyluridine-3'-phosphate
  modified_base 12: mod_base = OTHER; note = 2'-O-methylcytidine-3'-phosphate
  modified_base 13: mod_base = OTHER; note = 2'-O-methylguanosine-3'-phosphate
  modified_base 14: mod_base = OTHER; note = 2'-deoxy-2'-fluorouridine-3'-phosphate
  modified_base 15: mod_base = OTHER; note = 2'-O-methyluridine-3'-phosphate
  modified_base 16: mod_base = OTHER; note = 2'-deoxy-2'-fluorouridine-3'-phosphate
  modified_base 17: mod_base = OTHER; note = 2'-O-methyladenosine-3'-phosphate
  modified_base 18: mod_base = OTHER; note = 2'-O-methylcytidine-3'-phosphate
  modified_base 19: mod_base = OTHER; note = 2'-O-methylcytidine-3'-phosphate
  modified_base 20: mod_base = OTHER; note = 2'-O-methyladenosine-3'-phosphate
  modified_base 21: mod_base = OTHER; note = 2'-O-methyladenosine-3'-phosphorothioate
  modified_base 22: mod_base = OTHER; note = 2'-O-methyladenosine-3'-phosphorothioate
  modified_base 23: mod_base = OTHER; note = 2'-O-methylguanosine
ttgttaaatctcgtttaccaaag

SEQ ID NO: 12595 - RNA, 23 nt, synthetic construct
  source 1..23: mol_type = other RNA
  modified_base 1: mod_base = OTHER; note = 2'-O-methyluridine-3'-phosphorothioate 5'-(E)-Vinylphosphonate
  modified_base 2: mod_base = OTHER; note = 2'-deoxy-2'-fluoroguanosine-3'-phosphorothioate
  modified_base 3: mod_base = OTHER; note = 2'-O-methyladenosine-3'-phosphate
  modified_base 4: mod_base = OTHER; note = 2'-O-methyladenosine-3'-phosphate
  modified_base 5: mod_base = OTHER; note = 2'-O-methylguanosine-3'-phosphate
  modified_base 6: mod_base = OTHER; note = 2'-deoxy-2'-fluoroguanosine-3'-phosphate
  modified_base 7: mod_base = OTHER; note = 2'-O-methylguanosine-3'-phosphate
  modified_base 8: mod_base = OTHER; note = 2'-O-methylcytidine-3'-phosphate
  modified_base 9: mod_base = OTHER; note = 2'-O-methyladenosine-3'-phosphate
  modified_base 10: mod_base = OTHER; note = 2'-O-methyluridine-3'-phosphate
  modified_base 11: mod_base = OTHER; note = 2'-O-methyladenosine-3'-phosphate
  modified_base 12: mod_base = OTHER; note = 2'-O-methyluridine-3'-phosphate
  modified_base 13: mod_base = OTHER; note = 2'-O-methyluridine-3'-phosphate
  modified_base 14: mod_base = OTHER; note = 2'-deoxy-2'-fluorouridine-3'-phosphate
  modified_base 15: mod_base = OTHER; note = 2'-O-methyladenosine-3'-phosphate
  modified_base 16: mod_base = OTHER; note = 2'-deoxy-2'-fluoroadenosine-3'-phosphate
  modified_base 17: mod_base = OTHER; note = 2'-O-methyluridine-3'-phosphate
  modified_base 18: mod_base = OTHER; note = 2'-O-methylguanosine-3'-phosphate
  modified_base 19: mod_base = OTHER; note = 2'-O-methyluridine-3'-phosphate
  modified_base 20: mod_base = OTHER; note = 2'-O-methylcytidine-3'-phosphate
  modified_base 21: mod_base = OTHER; note = 2'-O-methylcytidine-3'-phosphorothioate
  modified_base 22: mod_base = OTHER; note = 2'-O-methylcytidine-3'-phosphorothioate
  modified_base 23: mod_base = OTHER; note = 2'-O-methyladenosine
tgaagggcatatttaatgtccca

SEQ ID NO: 12596 - RNA, 23 nt, synthetic construct
  source 1..23: mol_type = other RNA
  modified_base 1: mod_base = OTHER; note = 2'-O-methyluridine-3'-phosphorothioate 5'-(E)-Vinylphosphonate
  modified_base 2: mod_base = OTHER; note = 2'-deoxy-2'-fluorouridine-3'-phosphorothioate
  modified_base 3: mod_base = OTHER; note = 2'-O-methylguanosine-3'-phosphate
  modified_base 4: mod_base = OTHER; note = 2'-O-methyladenosine-3'-phosphate
  modified_base 5: mod_base = OTHER; note = 2'-O-methyladenosine-3'-phosphate
  modified_base 6: mod_base = OTHER; note = 2'-deoxy-2'-fluoroguanosine-3'-phosphate
  modified_base 7: mod_base = OTHER; note = 2'-O-methylguanosine-3'-phosphate
  modified_base 8: mod_base = OTHER; note = 2'-O-methylguanosine-3'-phosphate
  modified_base 9: mod_base = OTHER; note = 2'-O-methylcytidine-3'-phosphate
  modified_base 10: mod_base = OTHER; note = 2'-O-methyladenosine-3'-phosphate
  modified_base 11: mod_base = OTHER; note = 2'-O-methyluridine-3'-phosphate
  modified_base 12: mod_base = OTHER; note = 2'-O-methyladenosine-3'-phosphate
  modified_base 13: mod_base = OTHER; note = 2'-O-methyluridine-3'-phosphate
  modified_base 14: mod_base = OTHER; note = 2'-deoxy-2'-fluorouridine-3'-phosphate
  modified_base 15: mod_base = OTHER; note = 2'-O-methyluridine-3'-phosphate
  modified_base 16: mod_base = OTHER; note = 2'-deoxy-2'-fluoroadenosine-3'-phosphate
  modified_base 17: mod_base = OTHER; note = 2'-O-methyladenosine-3'-phosphate
  modified_base 18: mod_base = OTHER; note = 2'-O-methyluridine-3'-phosphate
  modified_base 19: mod_base = OTHER; note = 2'-O-methylguanosine-3'-phosphate
  modified_base 20: mod_base = OTHER; note = 2'-O-methyluridine-3'-phosphate
  modified_base 21: mod_base = OTHER; note = 2'-O-methylcytidine-3'-phosphorothioate
  modified_base 22: mod_base = OTHER; note = 2'-O-methylcytidine-3'-phosphorothioate
  modified_base 23: mod_base = OTHER; note = 2'-O-methylcytidine
ttgaagggcatatttaatgtccc

SEQ ID NO: 12597 - RNA, 23 nt, synthetic construct
  source 1..23: mol_type = other RNA
  modified_base 1: mod_base = OTHER; note = 2'-O-methyluridine-3'-phosphorothioate 5'-(E)-Vinylphosphonate
  modified_base 2: mod_base = OTHER; note = 2'-deoxy-2'-fluorouridine-3'-phosphorothioate
  modified_base 3: mod_base = OTHER; note = 2'-O-methyluridine-3'-phosphate
  modified_base 4: mod_base = OTHER; note = 2'-O-methylguanosine-3'-phosphate
  modified_base 5: mod_base = OTHER; note = 2'-O-methyladenosine-3'-phosphate
  modified_base 6: mod_base = OTHER; note = 2'-deoxy-2'-fluoroadenosine-3'-phosphate
  modified_base 7: mod_base = OTHER; note = 2'-O-methylguanosine-3'-phosphate
  modified_base 8: mod_base = OTHER; note = 2'-O-methylguanosine-3'-phosphate
  modified_base 9: mod_base = OTHER; note = 2'-O-methylguanosine-3'-phosphate
  modified_base 10: mod_base = OTHER; note = 2'-O-methylcytidine-3'-phosphate
  modified_base 11: mod_base = OTHER; note = 2'-O-methyladenosine-3'-phosphate
  modified_base 12: mod_base = OTHER; note = 2'-O-methyluridine-3'-phosphate
  modified_base 13: mod_base = OTHER; note = 2'-O-methyladenosine-3'-phosphate
  modified_base 14: mod_base = OTHER; note = 2'-deoxy-2'-fluorouridine-3'-phosphate
  modified_base 15: mod_base = OTHER; note = 2'-O-methyluridine-3'-phosphate
  modified_base 16: mod_base = OTHER; note = 2'-deoxy-2'-fluorouridine-3'-phosphate
  modified_base 17: mod_base = OTHER; note = 2'-O-methyladenosine-3'-phosphate
  modified_base 18: mod_base = OTHER; note = 2'-O-methyladenosine-3'-phosphate
  modified_base 19: mod_base = OTHER; note = 2'-O-methyluridine-3'-phosphate
  modified_base 20: mod_base = OTHER; note = 2'-O-methylguanosine-3'-phosphate
  modified_base 21: mod_base = OTHER; note = 2'-O-methyluridine-3'-phosphorothioate
  modified_base 22: mod_base = OTHER; note = 2'-O-methylcytidine-3'-phosphorothioate
  modified_base 23: mod_base = OTHER; note = 2'-O-methylcytidine
tttgaagggcatatttaatgtcc

SEQ ID NO: 12598 - RNA, 23 nt, synthetic construct
  source 1..23: mol_type = other RNA
  modified_base 1: mod_base = OTHER; note = 2'-O-methyluridine-3'-phosphorothioate 5'-(E)-Vinylphosphonate
  modified_base 2: mod_base = OTHER; note = 2'-deoxy-2'-fluorouridine-3'-phosphorothioate
  modified_base 3: mod_base = OTHER; note = 2'-O-methyluridine-3'-phosphate
  modified_base 4: mod_base = OTHER; note = 2'-O-methyluridine-3'-phosphate
  modified_base 5: mod_base = OTHER; note = 2'-O-methylguanosine-3'-phosphate
  modified_base 6: mod_base = OTHER; note = 2'-deoxy-2'-fluoroadenosine-3'-phosphate
  modified_base 7: mod_base = OTHER; note = 2'-O-methyladenosine-3'-phosphate
  modified_base 8: mod_base = OTHER; note = 2'-O-methylguanosine-3'-phosphate
  modified_base 9: mod_base = OTHER; note = 2'-O-methylguanosine-3'-phosphate
  modified_base 10: mod_base = OTHER; note = 2'-O-methylguanosine-3'-phosphate
  modified_base 11: mod_base = OTHER; note = 2'-O-methylcytidine-3'-phosphate
  modified_base 12: mod_base = OTHER; note = 2'-O-methyladenosine-3'-phosphate
  modified_base 13: mod_base = OTHER; note = 2'-O-methyluridine-3'-phosphate
  modified_base 14: mod_base = OTHER; note = 2'-deoxy-2'-fluoroadenosine-3'-phosphate
  modified_base 15: mod_base = OTHER; note = 2'-O-methyluridine-3'-phosphate
  modified_base 16: mod_base = OTHER; note = 2'-deoxy-2'-fluorouridine-3'-phosphate
  modified_base 17: mod_base = OTHER; note = 2'-O-methyluridine-3'-phosphate
  modified_base 18: mod_base = OTHER; note = 2'-O-methyladenosine-3'-phosphate
  modified_base 19: mod_base = OTHER; note = 2'-O-methyladenosine-3'-phosphate
  modified_base 20: mod_base = OTHER; note = 2'-O-methyluridine-3'-phosphate
  modified_base 21: mod_base = OTHER; note = 2'-O-methylguanosine-3'-phosphorothioate
  modified_base 22: mod_base = OTHER; note = 2'-O-methyluridine-3'-phosphorothioate
  modified_base 23: mod_base = OTHER; note = 2'-O-methylcytidine
ttttgaagggcatatttaatgtc

SEQ ID NO: 12599 - RNA, 23 nt, synthetic construct
  source 1..23: mol_type = other RNA
  modified_base 1: mod_base = OTHER; note = 2'-O-methyluridine-3'-phosphorothioate 5'-(E)-Vinylphosphonate
  modified_base 2: mod_base = OTHER; note = 2'-deoxy-2'-fluoroadenosine-3'-phosphorothioate
  modified_base 3: mod_base = OTHER; note = 2'-O-methyluridine-3'-phosphate
  modified_base 4: mod_base = OTHER; note = 2'-O-methyluridine-3'-phosphate
  modified_base 5: mod_base = OTHER; note = 2'-O-methyluridine-3'-phosphate
  modified_base 6: mod_base = OTHER; note = 2'-deoxy-2'-fluoroguanosine-3'-phosphate
  modified_base 7: mod_base = OTHER; note = 2'-O-methyladenosine-3'-phosphate
  modified_base 8: mod_base = OTHER; note = 2'-O-methyladenosine-3'-phosphate
  modified_base 9: mod_base = OTHER; note = 2'-O-methylguanosine-3'-phosphate
  modified_base 10: mod_base = OTHER; note = 2'-O-methylguanosine-3'-phosphate
  modified_base 11: mod_base = OTHER; note = 2'-O-methylguanosine-3'-phosphate
  modified_base 12: mod_base = OTHER; note = 2'-O-methylcytidine-3'-phosphate
  modified_base 13: mod_base = OTHER; note = 2'-O-methyladenosine-3'-phosphate
  modified_base 14: mod_base = OTHER; note = 2'-deoxy-2'-fluorouridine-3'-phosphate
  modified_base 15: mod_base = OTHER; note = 2'-O-methyladenosine-3'-phosphate
  modified_base 16: mod_base = OTHER; note = 2'-deoxy-2'-fluorouridine-3'-phosphate
  modified_base 17: mod_base = OTHER; note = 2'-O-methyluridine-3'-phosphate
  modified_base 18: mod_base = OTHER; note = 2'-O-methyluridine-3'-phosphate
  modified_base 19: mod_base = OTHER; note = 2'-O-methyladenosine-3'-phosphate
  modified_base 20: mod_base = OTHER; note = 2'-O-methyladenosine-3'-phosphate
  modified_base 21: mod_base = OTHER; note = 2'-O-methyluridine-3'-phosphorothioate
  modified_base 22: mod_base = OTHER; note = 2'-O-methylguanosine-3'-phosphorothioate
  modified_base 23: mod_base = OTHER; note = 2'-O-methyluridine
tatttgaagggcatatttaatgt

SEQ ID NO: 12600 - RNA, 23 nt, synthetic construct
  source 1..23: mol_type = other RNA
  modified_base 1: mod_base = OTHER; note = 2'-O-methyluridine-3'-phosphorothioate 5'-(E)-Vinylphosphonate
  modified_base 2: mod_base = OTHER; note = 2'-deoxy-2'-fluoroguanosine-3'-phosphorothioate
  modified_base 3: mod_base = OTHER; note = 2'-O-methyladenosine-3'-phosphate
  modified_base 4: mod_base = OTHER; note = 2'-O-methyluridine-3'-phosphate
  modified_base 5: mod_base = OTHER; note = 2'-O-methyluridine-3'-phosphate
  modified_base 6: mod_base = OTHER; note = 2'-deoxy-2'-fluorouridine-3'-phosphate
  modified_base 7: mod_base = OTHER; note = 2'-O-methylguanosine-3'-phosphate
  modified_base 8: mod_base = OTHER; note = 2'-O-methyladenosine-3'-phosphate
  modified_base 9: mod_base = OTHER; note = 2'-O-methyladenosine-3'-phosphate
  modified_base 10: mod_base = OTHER; note = 2'-O-methylguanosine-3'-phosphate
  modified_base 11: mod_base = OTHER; note = 2'-O-methylguanosine-3'-phosphate
  modified_base 12: mod_base = OTHER; note = 2'-O-methylguanosine-3'-phosphate
  modified_base 13: mod_base = OTHER; note = 2'-O-methylcytidine-3'-phosphate
  modified_base 14: mod_base = OTHER; note = 2'-deoxy-2'-fluoroadenosine-3'-phosphate
  modified_base 15: mod_base = OTHER; note = 2'-O-methyluridine-3'-phosphate
  modified_base 16: mod_base = OTHER; note = 2'-deoxy-2'-fluoroadenosine-3'-phosphate
  modified_base 17: mod_base = OTHER; note = 2'-O-methyluridine-3'-phosphate
  modified_base 18: mod_base = OTHER; note = 2'-O-methyluridine-3'-phosphate
  modified_base 19: mod_base = OTHER; note = 2'-O-methyluridine-3'-phosphate
  modified_base 20: mod_base = OTHER; note = 2'-O-methyladenosine-3'-phosphate
  modified_base 21: mod_base = OTHER; note = 2'-O-methyladenosine-3'-phosphorothioate
  modified_base 22: mod_base = OTHER; note = 2'-O-methyluridine-3'-phosphorothioate
  modified_base 23: mod_base = OTHER; note = 2'-O-methylguanosine
tgatttgaagggcatatttaatg

SEQ ID NO: 12601 - RNA, 23 nt, synthetic construct
  source 1..23: mol_type = other RNA
  modified_base 1: mod_base = OTHER; note = 2'-O-methyluridine-3'-phosphorothioate 5'-(E)-Vinylphosphonate
  modified_base 2: mod_base = OTHER; note = 2'-deoxy-2'-fluoroadenosine-3'-phosphorothioate
  modified_base 3: mod_base = OTHER; note = 2'-O-methylguanosine-3'-phosphate
  modified_base 4: mod_base = OTHER; note = 2'-O-methyladenosine-3'-phosphate
  modified_base 5: mod_base = OTHER; note = 2'-O-methyluridine-3'-phosphate
  modified_base 6: mod_base = OTHER; note = 2'-deoxy-2'-fluorouridine-3'-phosphate
  modified_base 7: mod_base = OTHER; note = 2'-O-methyluridine-3'-phosphate
  modified_base 8: mod_base = OTHER; note = 2'-O-methylguanosine-3'-phosphate
  modified_base 9: mod_base = OTHER; note = 2'-O-methyladenosine-3'-phosphate
  modified_base 10: mod_base = OTHER; note = 2'-O-methyladenosine-3'-phosphate
  modified_base 11: mod_base = OTHER; note = 2'-O-methylguanosine-3'-phosphate
  modified_base 12: mod_base = OTHER; note = 2'-O-methylguanosine-3'-phosphate
  modified_base 13: mod_base = OTHER; note = 2'-O-methylguanosine-3'-phosphate
  modified_base 14: mod_base = OTHER; note = 2'-deoxy-2'-fluorocytidine-3'-phosphate
  modified_base 15: mod_base = OTHER; note = 2'-O-methyladenosine-3'-phosphate
  modified_base 16: mod_base = OTHER; note = 2'-deoxy-2'-fluorouridine-3'-phosphate
  modified_base 17: mod_base = OTHER; note = 2'-O-methyladenosine-3'-phosphate
  modified_base 18: mod_base = OTHER; note = 2'-O-methyluridine-3'-phosphate
  modified_base 19: mod_base = OTHER; note = 2'-O-methyluridine-3'-phosphate
  modified_base 20: mod_base = OTHER; note = 2'-O-methyluridine-3'-phosphate
  modified_base 21: mod_base = OTHER; note = 2'-O-methyladenosine-3'-phosphorothioate
  modified_base 22: mod_base = OTHER; note = 2'-O-methyladenosine-3'-phosphorothioate
  modified_base 23: mod_base = OTHER; note = 2'-O-methyluridine
tagatttgaagggcatatttaat

SEQ ID NO: 12602 - RNA, 23 nt, synthetic construct
  source 1..23: mol_type = other RNA
  modified_base 1: mod_base = OTHER; note = 2'-O-methyluridine-3'-phosphorothioate 5'-(E)-Vinylphosphonate
  modified_base 2: mod_base = OTHER; note = 2'-deoxy-2'-fluoroadenosine-3'-phosphorothioate
  modified_base 3: mod_base = OTHER; note = 2'-O-methyladenosine-3'-phosphate
  modified_base 4: mod_base = OTHER; note = 2'-O-methyladenosine-3'-phosphate
  modified_base 5: mod_base = OTHER; note = 2'-O-methyluridine-3'-phosphate
  modified_base 6: mod_base = OTHER; note = 2'-deoxy-2'-fluorouridine-3'-phosphate
  modified_base 7: mod_base = OTHER; note = 2'-O-methyladenosine-3'-phosphate
  modified_base 8: mod_base = OTHER; note = 2'-O-methyluridine-3'-phosphate
  modified_base 9: mod_base = OTHER; note = 2'-O-methyladenosine-3'-phosphate
  modified_base 10: mod_base = OTHER; note = 2'-O-methylguanosine-3'-phosphate
  modified_base 11: mod_base = OTHER; note = 2'-O-methyladenosine-3'-phosphate
  modified_base 12: mod_base = OTHER; note = 2'-O-methyluridine-3'-phosphate
  modified_base 13: mod_base = OTHER; note = 2'-O-methyluridine-3'-phosphate
  modified_base 14: mod_base = OTHER; note = 2'-deoxy-2'-fluorouridine-3'-phosphate
  modified_base 15: mod_base = OTHER; note = 2'-O-methylguanosine-3'-phosphate
  modified_base 16: mod_base = OTHER; note = 2'-deoxy-2'-fluoroadenosine-3'-phosphate
  modified_base 17: mod_base = OTHER; note = 2'-O-methyladenosine-3'-phosphate
  modified_base 18: mod_base = OTHER; note = 2'-O-methylguanosine-3'-phosphate
  modified_base 19: mod_base = OTHER; note = 2'-O-methylguanosine-3'-phosphate
  modified_base 20: mod_base = OTHER; note = 2'-O-methylguanosine-3'-phosphate
  modified_base 21: mod_base = OTHER; note = 2'-O-methylcytidine-3'-phosphorothioate
  modified_base 22: mod_base = OTHER; note = 2'-O-methyladenosine-3'-phosphorothioate
  modified_base 23: mod_base = OTHER; note = 2'-O-methyluridine
taaattatagatttgaagggcat

SEQ ID NO: 12603 - RNA, 23 nt, synthetic construct
  source 1..23: mol_type = other RNA
  modified_base 1: mod_base = OTHER; note = 2'-O-methyluridine-3'-phosphorothioate 5'-(E)-Vinylphosphonate
  modified_base 2: mod_base = OTHER; note = 2'-deoxy-2'-fluoroadenosine-3'-phosphorothioate
  modified_base 3: mod_base = OTHER; note = 2'-O-methyladenosine-3'-phosphate
  modified_base 4: mod_base = OTHER; note = 2'-O-methyladenosine-3'-phosphate
  modified_base 5: mod_base = OTHER; note = 2'-O-methyladenosine-3'-phosphate
  modified_base 6: mod_base = OTHER; note = 2'-deoxy-2'-fluorouridine-3'-phosphate
  modified_base 7: mod_base = OTHER; note = 2'-O-methyluridine-3'-phosphate
  modified_base 8: mod_base = OTHER; note = 2'-O-methyladenosine-3'-phosphate
  modified_base 9: mod_base = OTHER; note = 2'-O-methyluridine-3'-phosphate
  modified_base 10: mod_base = OTHER; note = 2'-O-methyladenosine-3'-phosphate
  modified_base 11: mod_base = OTHER; note = 2'-O-methylguanosine-3'-phosphate
  modified_base 12: mod_base = OTHER; note = 2'-O-methyladenosine-3'-phosphate
  modified_base 13: mod_base = OTHER; note = 2'-O-methyluridine-3'-phosphate
  modified_base 14: mod_base = OTHER; note = 2'-deoxy-2'-fluorouridine-3'-phosphate
  modified_base 15: mod_base = OTHER; note = 2'-O-methyluridine-3'-phosphate
  modified_base 16: mod_base = OTHER; note = 2'-deoxy-2'-fluoroguanosine-3'-phosphate
  modified_base 17: mod_base = OTHER; note = 2'-O-methyladenosine-3'-phosphate
  modified_base 18: mod_base = OTHER; note = 2'-O-methyladenosine-3'-phosphate
  modified_base 19: mod_base = OTHER; note = 2'-O-methylguanosine-3'-phosphate
  modified_base 20: mod_base = OTHER; note = 2'-O-methylguanosine-3'-phosphate
  modified_base 21: mod_base = OTHER; note = 2'-O-methylguanosine-3'-phosphorothioate
  modified_base 22: mod_base = OTHER; note = 2'-O-methylcytidine-3'-phosphorothioate
  modified_base 23: mod_base = OTHER; note = 2'-O-methyladenosine
taaaattatagatttgaagggca

SEQ ID NO: 12604 - RNA, 23 nt, synthetic construct
  source 1..23: mol_type = other RNA
  modified_base 1: mod_base = OTHER; note = 2'-O-methyluridine-3'-phosphorothioate 5'-(E)-Vinylphosphonate
  modified_base 2: mod_base = OTHER; note = 2'-deoxy-2'-fluorocytidine-3'-phosphorothioate
  modified_base 3: mod_base = OTHER; note = 2'-O-methyluridine-3'-phosphate
  modified_base 4: mod_base = OTHER; note = 2'-O-methylcytidine-3'-phosphate
  modified_base 5: mod_base = OTHER; note = 2'-O-methylguanosine-3'-phosphate
  modified_base 6: mod_base = OTHER; note = 2'-deoxy-2'-fluorouridine-3'-phosphate
  modified_base 7: mod_base = OTHER; note = 2'-O-methyluridine-3'-phosphate
  modified_base 8: mod_base = OTHER; note = 2'-O-methyluridine-3'-phosphate
  modified_base 9: mod_base = OTHER; note = 2'-O-methyladenosine-3'-phosphate
  modified_base 10: mod_base = OTHER; note = 2'-O-methylcytidine-3'-phosphate
  modified_base 11: mod_base = OTHER; note = 2'-O-methylcytidine-3'-phosphate
  modified_base 12: mod_base = OTHER; note = 2'-O-methyladenosine-3'-phosphate
  modified_base 13: mod_base = OTHER; note = 2'-O-methyladenosine-3'-phosphate
  modified_base 14: mod_base = OTHER; note = 2'-deoxy-2'-fluoroadenosine-3'-phosphate
  modified_base 15: mod_base = OTHER; note = 2'-O-methylguanosine-3'-phosphate
  modified_base 16: mod_base = OTHER; note = 2'-deoxy-2'-fluorouridine-3'-phosphate
  modified_base 17: mod_base = OTHER; note = 2'-O-methyladenosine-3'-phosphate
  modified_base 18: mod_base = OTHER; note = 2'-O-methyladenosine-3'-phosphate
  modified_base 19: mod_base = OTHER; note = 2'-O-methyladenosine-3'-phosphate
  modified_base 20: mod_base = OTHER; note = 2'-O-methyladenosine-3'-phosphate
  modified_base 21: mod_base = OTHER; note = 2'-O-methyluridine-3'-phosphorothioate
  modified_base 22: mod_base = OTHER; note = 2'-O-methyluridine-3'-phosphorothioate
  modified_base 23: mod_base = OTHER; note = 2'-O-methyladenosine
tctcgtttaccaaagtaaaatta

SEQ ID NO: 12605 - RNA, 23 nt, synthetic construct
  source 1..23: mol_type = other RNA
  modified_base 1: mod_base = OTHER; note = 2'-O-methyluridine-3'-phosphorothioate 5'-(E)-Vinylphosphonate
  modified_base 2: mod_base = OTHER; note = 2'-deoxy-2'-fluorouridine-3'-phosphorothioate
  modified_base 3: mod_base = OTHER; note = 2'-O-methylcytidine-3'-phosphate
  modified_base 4: mod_base = OTHER; note = 2'-O-methyluridine-3'-phosphate
  modified_base 5: mod_base = OTHER; note = 2'-O-methylcytidine-3'-phosphate
  modified_base 6: mod_base = OTHER; note = 2'-deoxy-2'-fluoroguanosine-3'-phosphate
  modified_base 7: mod_base = OTHER; note = 2'-O-methyluridine-3'-phosphate
  modified_base 8: mod_base = OTHER; note = 2'-O-methyluridine-3'-phosphate
  modified_base 9: mod_base = OTHER; note = 2'-O-methyluridine-3'-phosphate
  modified_base 10: mod_base = OTHER; note = 2'-O-methyladenosine-3'-phosphate
  modified_base 11: mod_base = OTHER; note = 2'-O-methylcytidine-3'-phosphate
  modified_base 12: mod_base = OTHER; note = 2'-O-methylcytidine-3'-phosphate
  modified_base 13: mod_base = OTHER; note = 2'-O-methyladenosine-3'-phosphate
  modified_base 14: mod_base = OTHER; note = 2'-deoxy-2'-fluoroadenosine-3'-phosphate
  modified_base 15: mod_base = OTHER; note = 2'-O-methyladenosine-3'-phosphate
  modified_base 16: mod_base = OTHER; note = 2'-deoxy-2'-fluoroguanosine-3'-phosphate
  modified_base 17: mod_base = OTHER; note = 2'-O-methyluridine-3'-phosphate
  modified_base 18: mod_base = OTHER; note = 2'-O-methyladenosine-3'-phosphate
  modified_base 19: mod_base = OTHER; note = 2'-O-methyladenosine-3'-phosphate
  modified_base 20: mod_base = OTHER; note = 2'-O-methyladenosine-3'-phosphate
  modified_base 21: mod_base = OTHER; note = 2'-O-methyladenosine-3'-phosphorothioate
  modified_base 22: mod_base = OTHER; note = 2'-O-methyluridine-3'-phosphorothioate
  modified_base 23: mod_base = OTHER; note = 2'-O-methyluridine
ttctcgtttaccaaagtaaaatt

SEQ ID NO: 12606 - RNA, 23 nt, synthetic construct
  source 1..23: mol_type = other RNA
  modified_base 1: mod_base = OTHER; note = 2'-O-methyluridine-3'-phosphorothioate 5'-(E)-Vinylphosphonate
  modified_base 2: mod_base = OTHER; note = 2'-deoxy-2'-fluoroadenosine-3'-phosphorothioate
  modified_base 3: mod_base = OTHER; note = 2'-O-methyluridine-3'-phosphate
  modified_base 4: mod_base = OTHER; note = 2'-O-methylcytidine-3'-phosphate
  modified_base 5: mod_base = OTHER; note = 2'-O-methyluridine-3'-phosphate
  modified_base 6: mod_base = OTHER; note = 2'-deoxy-2'-fluorocytidine-3'-phosphate
  modified_base 7: mod_base = OTHER; note = 2'-O-methylguanosine-3'-phosphate
  modified_base 8: mod_base = OTHER; note = 2'-O-methyluridine-3'-phosphate
  modified_base 9: mod_base = OTHER; note = 2'-O-methyluridine-3'-phosphate
  modified_base 10: mod_base = OTHER; note = 2'-O-methyluridine-3'-phosphate
  modified_base 11: mod_base = OTHER; note = 2'-O-methyladenosine-3'-phosphate
  modified_base 12: mod_base = OTHER; note = 2'-O-methylcytidine-3'-phosphate
  modified_base 13: mod_base = OTHER; note = 2'-O-methylcytidine-3'-phosphate
  modified_base 14: mod_base = OTHER; note = 2'-deoxy-2'-fluoroadenosine-3'-phosphate
  modified_base 15: mod_base = OTHER; note = 2'-O-methyladenosine-3'-phosphate
  modified_base 16: mod_base = OTHER; note = 2'-deoxy-2'-fluoroadenosine-3'-phosphate
  modified_base 17: mod_base = OTHER; note = 2'-O-methylguanosine-3'-phosphate
  modified_base 18: mod_base = OTHER; note = 2'-O-methyluridine-3'-phosphate
  modified_base 19: mod_base = OTHER; note = 2'-O-methyladenosine-3'-phosphate
  modified_base 20: mod_base = OTHER; note = 2'-O-methyladenosine-3'-phosphate
  modified_base 21: mod_base = OTHER; note = 2'-O-methyladenosine-3'-phosphorothioate
  modified_base 22: mod_base = OTHER; note = 2'-O-methyladenosine-3'-phosphorothioate
  modified_base 23: mod_base = OTHER; note = 2'-O-methyluridine
tatctcgtttaccaaagtaaaat

SEQ ID NO: 12607 - RNA, 23 nt, synthetic construct
  source 1..23: mol_type = other RNA
  modified_base 1: mod_base = OTHER; note = 2'-O-methyluridine-3'-phosphorothioate 5'-(E)-Vinylphosphonate
  modified_base 2: mod_base = OTHER; note = 2'-deoxy-2'-fluoroadenosine-3'-phosphorothioate
  modified_base 3: mod_base = OTHER; note = 2'-O-methyladenosine-3'-phosphate
  modified_base 4: mod_base = OTHER; note = 2'-O-methyluridine-3'-phosphate
  modified_base 5: mod_base = OTHER; note = 2'-O-methylcytidine-3'-phosphate
  modified_base 6: mod_base = OTHER; note = 2'-deoxy-2'-fluorouridine-3'-phosphate
  modified_base 7: mod_base = OTHER; note = 2'-O-methylcytidine-3'-phosphate
  modified_base 8: mod_base = OTHER; note = 2'-O-methylguanosine-3'-phosphate
  modified_base 9: mod_base = OTHER; note = 2'-O-methyluridine-3'-phosphate
  modified_base 10: mod_base = OTHER; note = 2'-O-methyluridine-3'-phosphate
  modified_base 11: mod_base = OTHER; note = 2'-O-methyluridine-3'-phosphate
  modified_base 12: mod_base = OTHER; note = 2'-O-methyladenosine-3'-phosphate
  modified_base 13: mod_base = OTHER; note = 2'-O-methylcytidine-3'-phosphate
  modified_base 14: mod_base = OTHER; note = 2'-deoxy-2'-fluorocytidine-3'-phosphate
  modified_base 15: mod_base = OTHER; note = 2'-O-methyladenosine-3'-phosphate
  modified_base 16: mod_base = OTHER; note = 2'-deoxy-2'-fluoroadenosine-3'-phosphate
  modified_base 17: mod_base = OTHER; note = 2'-O-methyladenosine-3'-phosphate
  modified_base 18: mod_base = OTHER; note = 2'-O-methylguanosine-3'-phosphate
  modified_base 19: mod_base = OTHER; note = 2'-O-methyluridine-3'-phosphate
  modified_base 20: mod_base = OTHER; note = 2'-O-methyladenosine-3'-phosphate
  modified_base 21: mod_base = OTHER; note = 2'-O-methyladenosine-3'-phosphorothioate
  modified_base 22: mod_base = OTHER; note = 2'-O-methyladenosine-3'-phosphorothioate
  modified_base 23: mod_base = OTHER; note = 2'-O-methyladenosine
taatctcgtttaccaaagtaaaa

SEQ ID NO: 12608 - RNA, 23 nt, synthetic construct
  source 1..23: mol_type = other RNA
  modified_base 1: mod_base = OTHER; note = 2'-O-methyluridine-3'-phosphorothioate 5'-(E)-Vinylphosphonate
  modified_base 2: mod_base = OTHER; note = 2'-deoxy-2'-fluoroadenosine-3'-phosphorothioate
  modified_base 3: mod_base = OTHER; note = 2'-O-methyladenosine-3'-phosphate
  modified_base 4: mod_base = OTHER; note = 2'-O-methyladenosine-3'-phosphate
  modified_base 5: mod_base = OTHER; note = 2'-O-methyluridine-3'-phosphate
  modified_base 6: mod_base = OTHER; note = 2'-deoxy-2'-fluorocytidine-3'-phosphate
  modified_base 7: mod_base = OTHER; note = 2'-O-methyluridine-3'-phosphate
  modified_base 8: mod_base = OTHER; note = 2'-O-methylcytidine-3'-phosphate
  modified_base 9: mod_base = OTHER; note = 2'-O-methylguanosine-3'-phosphate
  modified_base 10: mod_base = OTHER; note = 2'-O-methyluridine-3'-phosphate
  modified_base 11: mod_base = OTHER; note = 2'-O-methyluridine-3'-phosphate
  modified_base 12: mod_base = OTHER; note = 2'-O-methyluridine-3'-phosphate
  modified_base 13: mod_base = OTHER; note = 2'-O-methyladenosine-3'-phosphate
  modified_base 14: mod_base = OTHER; note = 2'-deoxy-2'-fluorocytidine-3'-phosphate
  modified_base 15: mod_base = OTHER; note = 2'-O-methylcytidine-3'-phosphate
  modified_base 16: mod_base = OTHER; note = 2'-deoxy-2'-fluoroadenosine-3'-phosphate
  modified_base 17: mod_base = OTHER; note = 2'-O-methyladenosine-3'-phosphate
  modified_base 18: mod_base = OTHER; note = 2'-O-methyladenosine-3'-phosphate
  modified_base 19: mod_base = OTHER; note = 2'-O-methylguanosine-3'-phosphate
  modified_base 20: mod_base = OTHER; note = 2'-O-methyluridine-3'-phosphate
  modified_base 21: mod_base = OTHER; note = 2'-O-methyladenosine-3'-phosphorothioate
  modified_base 22: mod_base = OTHER; note = 2'-O-methyladenosine-3'-phosphorothioate
  modified_base 23: mod_base = OTHER; note = 2'-O-methyladenosine
taaatctcgtttaccaaagtaaa

SEQ ID NO: 12609 - RNA, 23 nt, synthetic construct
  source 1..23: mol_type = other RNA
  modified_base 1: mod_base = OTHER; note = 2'-O-methyluridine-3'-phosphorothioate 5'-(E)-Vinylphosphonate
  modified_base 2: mod_base = OTHER; note = 2'-deoxy-2'-fluorouridine-3'-phosphorothioate
  modified_base 3: mod_base = OTHER; note = 2'-O-methyluridine-3'-phosphate
  modified_base 4: mod_base = OTHER; note = 2'-O-methyladenosine-3'-phosphate
  modified_base 5: mod_base = OTHER; note = 2'-O-methyladenosine-3'-phosphate
  modified_base 6: mod_base = OTHER; note = 2'-deoxy-2'-fluoroadenosine-3'-phosphate
  modified_base 7: mod_base = OTHER; note = 2'-O-methyluridine-3'-phosphate
  modified_base 8: mod_base = OTHER; note = 2'-O-methylcytidine-3'-phosphate
  modified_base 9: mod_base = OTHER; note = 2'-O-methyluridine-3'-phosphate
  modified_base 10: mod_base = OTHER; note = 2'-O-methylcytidine-3'-phosphate
  modified_base 11: mod_base = OTHER; note = 2'-O-methylguanosine-3'-phosphate
  modified_base 12: mod_base = OTHER; note = 2'-O-methyluridine-3'-phosphate
  modified_base 13: mod_base = OTHER; note = 2'-O-methyluridine-3'-phosphate
  modified_base 14: mod_base = OTHER; note = 2'-deoxy-2'-fluorouridine-3'-phosphate
  modified_base 15: mod_base = OTHER; note = 2'-O-methyladenosine-3'-phosphate
  modified_base 16: mod_base = OTHER; note = 2'-deoxy-2'-fluorocytidine-3'-phosphate
  modified_base 17: mod_base = OTHER; note = 2'-O-methylcytidine-3'-phosphate
  modified_base 18: mod_base = OTHER; note = 2'-O-methyladenosine-3'-phosphate
  modified_base 19: mod_base = OTHER; note = 2'-O-methyladenosine-3'-phosphate
  modified_base 20: mod_base = OTHER; note = 2'-O-methyladenosine-3'-phosphate
  modified_base 21: mod_base = OTHER; note = 2'-O-methylguanosine-3'-phosphorothioate
  modified_base 22: mod_base = OTHER; note = 2'-O-methyluridine-3'-phosphorothioate
  modified_base 23: mod_base = OTHER; note = 2'-O-methyladenosine
tttaaatctcgtttaccaaagta

SEQ ID NO: 12610 - RNA, 23 nt, synthetic construct
  source 1..23: mol_type = other RNA
  modified_base 1: mod_base = OTHER; note = 2'-O-methyluridine-3'-phosphorothioate 5'-(E)-Vinylphosphonate
  modified_base 2: mod_base = OTHER; note = 2'-deoxy-2'-fluorocytidine-3'-phosphorothioate
  modified_base 3: mod_base = OTHER; note = 2'-O-methyladenosine-3'-phosphate
  modified_base 4: mod_base = OTHER; note = 2'-O-methyluridine-3'-phosphate
  modified_base 5: mod_base = OTHER; note = 2'-O-methylguanosine-3'-phosphate
  modified_base 6: mod_base = OTHER; note = 2'-deoxy-2'-fluorouridine-3'-phosphate
  modified_base 7: mod_base = OTHER; note = 2'-O-methyluridine-3'-phosphate
  modified_base 8: mod_base = OTHER; note = 2'-O-methyladenosine-3'-phosphate
  modified_base 9: mod_base = OTHER; note = 2'-O-methyladenosine-3'-phosphate
  modified_base 10: mod_base = OTHER; note = 2'-O-methyladenosine-3'-phosphate
  modified_base 11: mod_base = OTHER; note = 2'-O-methyluridine-3'-phosphate
  modified_base 12: mod_base = OTHER; note = 2'-O-methylcytidine-3'-phosphate
  modified_base 13: mod_base = OTHER; note = 2'-O-methyluridine-3'-phosphate
  modified_base 14: mod_base = OTHER; note = 2'-deoxy-2'-fluorocytidine-3'-phosphate
  modified_base 15: mod_base = OTHER; note = 2'-O-methylguanosine-3'-phosphate
  modified_base 16: mod_base = OTHER; note = 2'-deoxy-2'-fluorouridine-3'-phosphate
  modified_base 17: mod_base = OTHER; note = 2'-O-methyluridine-3'-phosphate
  modified_base 18: mod_base = OTHER; note = 2'-O-methyluridine-3'-phosphate
  modified_base 19: mod_base = OTHER; note = 2'-O-methyladenosine-3'-phosphate
  modified_base 20: mod_base = OTHER; note = 2'-O-methylcytidine-3'-phosphate
  modified_base 21: mod_base = OTHER; note = 2'-O-methylcytidine-3'-phosphorothioate
  modified_base 22: mod_base = OTHER; note = 2'-O-methyladenosine-3'-phosphorothioate
  modified_base 23: mod_base = OTHER; note = 2'-O-methyladenosine
tcatgttaaatctcgtttaccaa

SEQ ID NO: 12611 - RNA, 23 nt, synthetic construct
  source 1..23: mol_type = other RNA
  modified_base 1: mod_base = OTHER; note = 2'-O-methyluridine-3'-phosphorothioate 5'-(E)-Vinylphosphonate
  modified_base 2: mod_base = OTHER; note = 2'-deoxy-2'-fluoroadenosine-3'-phosphorothioate
  modified_base 3: mod_base = OTHER; note = 2'-O-methyladenosine-3'-phosphate
  modified_base 4: mod_base = OTHER; note = 2'-O-methylguanosine-3'-phosphate
  modified_base 5: mod_base = OTHER; note = 2'-O-methyladenosine-3'-phosphate
  modified_base 6: mod_base = OTHER; note = 2'-deoxy-2'-fluorocytidine-3'-phosphate
  modified_base 7: mod_base = OTHER; note = 2'-O-methyladenosine-3'-phosphate
  modified_base 8: mod_base = OTHER; note = 2'-O-methyluridine-3'-phosphate
  modified_base 9: mod_base = OTHER; note = 2'-O-methylcytidine-3'-phosphate
  modified_base 10: mod_base = OTHER; note = 2'-O-methyladenosine-3'-phosphate
  modified_base 11: mod_base = OTHER; note = 2'-O-methyluridine-3'-phosphate
  modified_base 12: mod_base = OTHER; note = 2'-O-methylguanosine-3'-phosphate
  modified_base 13: mod_base = OTHER; note = 2'-O-methyluridine-3'-phosphate
  modified_base 14: mod_base = OTHER; note = 2'-deoxy-2'-fluorouridine-3'-phosphate
  modified_base 15: mod_base = OTHER; note = 2'-O-methyladenosine-3'-phosphate
  modified_base 16: mod_base = OTHER; note = 2'-deoxy-2'-fluoroadenosine-3'-phosphate
  modified_base 17: mod_base = OTHER; note = 2'-O-methyladenosine-3'-phosphate
  modified_base 18: mod_base = OTHER; note = 2'-O-methyluridine-3'-phosphate
  modified_base 19: mod_base = OTHER; note = 2'-O-methylcytidine-3'-phosphate
  modified_base 20: mod_base = OTHER; note = 2'-O-methyluridine-3'-phosphate
  modified_base 21: mod_base = OTHER; note = 2'-O-methylcytidine-3'-phosphorothioate
  modified_base 22: mod_base = OTHER; note = 2'-O-methylguanosine-3'-phosphorothioate
  modified_base 23: mod_base = OTHER; note = 2'-O-methyluridine
taagacatcatgttaaatctcgt

SEQ ID NO: 12612 - RNA, 23 nt, synthetic construct
  source 1..23: mol_type = other RNA
  modified_base 1: mod_base = OTHER; note = 2'-O-methyluridine-3'-phosphorothioate 5'-(E)-Vinylphosphonate
  modified_base 2: mod_base = OTHER; note = 2'-deoxy-2'-fluoroadenosine-3'-phosphorothioate
  modified_base 3: mod_base = OTHER; note = 2'-O-methylguanosine-3'-phosphate
  modified_base 4: mod_base = OTHER; note = 2'-O-methylguanosine-3'-phosphate
  modified_base 5: mod_base = OTHER; note = 2'-O-methyladenosine-3'-phosphate
  modified_base 6: mod_base = OTHER; note = 2'-deoxy-2'-fluoroadenosine-3'-phosphate
  modified_base 7: mod_base = OTHER; note = 2'-O-methyluridine-3'-phosphate
  modified_base 8: mod_base = OTHER; note = 2'-O-methylguanosine-3'-phosphate
  modified_base 9: mod_base = OTHER; note = 2'-O-methylguanosine-3'-phosphate
  modified_base 10: mod_base = OTHER; note = 2'-O-methyladenosine-3'-phosphate
  modified_base 11: mod_base = OTHER; note = 2'-O-methylguanosine-3'-phosphate
  modified_base 12: mod_base = OTHER; note = 2'-O-methyluridine-3'-phosphate
  modified_base 13: mod_base = OTHER; note = 2'-O-methyluridine-3'-phosphate
  modified_base 14: mod_base = OTHER; note = 2'-deoxy-2'-fluorouridine-3'-phosphate
  modified_base 15: mod_base = OTHER; note = 2'-O-methylguanosine-3'-phosphate
  modified_base 16: mod_base = OTHER; note = 2'-deoxy-2'-fluoroadenosine-3'-phosphate
  modified_base 17: mod_base = OTHER; note = 2'-O-methyladenosine-3'-phosphate
  modified_base 18: mod_base = OTHER; note = 2'-O-methyladenosine-3'-phosphate
  modified_base 19: mod_base = OTHER; note = 2'-O-methyladenosine-3'-phosphate
  modified_base 20: mod_base = OTHER; note = 2'-O-methyladenosine-3'-phosphate
  modified_base 21: mod_base = OTHER; note = 2'-O-methyladenosine-3'-phosphorothioate
  modified_base 22: mod_base = OTHER; note = 2'-O-methylguanosine-3'-phosphorothioate
  modified_base 23: mod_base = OTHER; note = 2'-O-methyladenosine
taggaatggagtttgaaaaaaga

SEQ ID NO: 12613 - RNA, 23 nt, synthetic construct
  source 1..23: mol_type = other RNA
  modified_base 1: mod_base = OTHER; note = 2'-O-methyluridine-3'-phosphorothioate 5'-(E)-Vinylphosphonate
  modified_base 2: mod_base = OTHER; note = 2'-deoxy-2'-fluoroguanosine-3'-phosphorothioate
  modified_base 3: mod_base = OTHER; note = 2'-O-methyluridine-3'-phosphate
  modified_base 4: mod_base = OTHER; note = 2'-O-methyluridine-3'-phosphate
  modified_base 5: mod_base = OTHER; note = 2'-O-methyluridine-3'-phosphate
  modified_base 6: mod_base = OTHER; note = 2'-deoxy-2'-fluorouridine-3'-phosphate
  modified_base 7: mod_base = OTHER; note = 2'-O-methyladenosine-3'-phosphate
  modified_base 8: mod_base = OTHER; note = 2'-O-methylguanosine-3'-phosphate
  modified_base 9: mod_base = OTHER; note = 2'-O-methylguanosine-3'-phosphate
  modified_base 10: mod_base = OTHER; note = 2'-O-methyladenosine-3'-phosphate
  modified_base 11: mod_base = OTHER; note = 2'-O-methylguanosine-3'-phosphate
  modified_base 12: mod_base = OTHER; note = 2'-O-methylcytidine-3'-phosphate
  modified_base 13: mod_base = OTHER; note = 2'-O-methyladenosine-3'-phosphate
  modified_base 14: mod_base = OTHER; note = 2'-deoxy-2'-fluorouridine-3'-phosphate
  modified_base 15: mod_base = OTHER; note = 2'-O-methyladenosine-3'-phosphate
  modified_base 16: mod_base = OTHER; note = 2'-deoxy-2'-fluoroadenosine-3'-phosphate
  modified_base 17: mod_base = OTHER; note = 2'-O-methyladenosine-3'-phosphate
  modified_base 18: mod_base = OTHER; note = 2'-O-methyladenosine-3'-phosphate
  modified_base 19: mod_base = OTHER; note = 2'-O-methylguanosine-3'-phosphate
  modified_base 20: mod_base = OTHER; note = 2'-O-methyladenosine-3'-phosphate
  modified_base 21: mod_base = OTHER; note = 2'-O-methylcytidine-3'-phosphorothioate
  modified_base 22: mod_base = OTHER; note = 2'-O-methyladenosine-3'-phosphorothioate
  modified_base 23: mod_base = OTHER; note = 2'-O-methyluridine
tgttttaggagcataaaagacat

SEQ ID NO: 12614 - RNA, 23 nt, synthetic construct
  source 1..23: mol_type = other RNA
  modified_base 1: mod_base = OTHER; note = 2'-O-methyluridine-3'-phosphorothioate 5'-(E)-Vinylphosphonate
  modified_base 2: mod_base = OTHER; note = 2'-deoxy-2'-fluoroguanosine-3'-phosphorothioate
  modified_base 3: mod_base = OTHER; note = 2'-O-methyladenosine-3'-phosphate
  modified_base 4: mod_base = OTHER; note = 2'-O-methyladenosine-3'-phosphate
  modified_base 5: mod_base = OTHER; note = 2'-O-methyluridine-3'-phosphate
  modified_base 6: mod_base = OTHER; note = 2'-deoxy-2'-fluoroguanosine-3'-phosphate
  modified_base 7: mod_base = OTHER; note = 2'-O-methylguanosine-3'-phosphate
  modified_base 8: mod_base = OTHER; note = 2'-O-methyladenosine-3'-phosphate
  modified_base 9: mod_base = OTHER; note = 2'-O-methylguanosine-3'-phosphate
  modified_base 10: mod_base = OTHER; note = 2'-O-methyluridine-3'-phosphate
  modified_base 11: mod_base = OTHER; note = 2'-O-methyluridine-3'-phosphate
  modified_base 12: mod_base = OTHER; note = 2'-O-methyluridine-3'-phosphate
  modified_base 13: mod_base = OTHER; note = 2'-O-methylguanosine-3'-phosphate
  modified_base 14: mod_base = OTHER; note = 2'-deoxy-2'-fluoroadenosine-3'-phosphate
  modified_base 15: mod_base = OTHER; note = 2'-O-methyladenosine-3'-phosphate
  modified_base 16: mod_base = OTHER; note = 2'-deoxy-2'-fluoroadenosine-3'-phosphate
  modified_base 17: mod_base = OTHER; note = 2'-O-methyladenosine-3'-phosphate
  modified_base 18: mod_base = OTHER; note = 2'-O-methyladenosine-3'-phosphate
  modified_base 19: mod_base = OTHER; note = 2'-O-methyladenosine-3'-phosphate
  modified_base 20: mod_base = OTHER; note = 2'-O-methylguanosine-3'-phosphate
  modified_base 21: mod_base = OTHER; note = 2'-O-methyladenosine-3'-phosphorothioate
  modified_base 22: mod_base = OTHER; note = 2'-O-methyluridine-3'-phosphorothioate
  modified_base 23: mod_base = OTHER; note = 2'-O-methylguanosine
tgaatggagtttgaaaaaagatg

SEQ ID NO: 12615 - RNA, 23 nt, synthetic construct
  source 1..23: mol_type = other RNA
  modified_base 1: mod_base = OTHER; note = 2'-O-methyluridine-3'-phosphorothioate 5'-(E)-Vinylphosphonate
  modified_base 2: mod_base = OTHER; note = 2'-deoxy-2'-fluoroguanosine-3'-phosphorothioate
  modified_base 3: mod_base = OTHER; note = 2'-O-methylguanosine-3'-phosphate
  modified_base 4: mod_base = OTHER; note = 2'-O-methyladenosine-3'-phosphate
  modified_base 5: mod_base = OTHER; note = 2'-O-methyladenosine-3'-phosphate
  modified_base 6: mod_base = OTHER; note = 2'-deoxy-2'-fluorouridine-3'-phosphate
  modified_base 7: mod_base = OTHER; note = 2'-O-methylguanosine-3'-phosphate
  modified_base 8: mod_base = OTHER; note = 2'-O-methylguanosine-3'-phosphate
  modified_base 9: mod_base = OTHER; note = 2'-O-methyladenosine-3'-phosphate
  modified_base 10: mod_base = OTHER; note = 2'-O-methylguanosine-3'-phosphate
  modified_base 11: mod_base = OTHER; note = 2'-O-methyluridine-3'-phosphate
  modified_base 12: mod_base = OTHER; note = 2'-O-methyluridine-3'-phosphate
  modified_base 13: mod_base = OTHER; note = 2'-O-methyluridine-3'-phosphate
  modified_base 14: mod_base = OTHER; note = 2'-deoxy-2'-fluoroguanosine-3'-phosphate
  modified_base 15: mod_base = OTHER; note = 2'-O-methyladenosine-3'-phosphate
  modified_base 16: mod_base = OTHER; note = 2'-deoxy-2'-fluoroadenosine-3'-phosphate
  modified_base 17: mod_base = OTHER; note = 2'-O-methyladenosine-3'-phosphate
  modified_base 18: mod_base = OTHER; note = 2'-O-methyladenosine-3'-phosphate
  modified_base 19: mod_base = OTHER; note = 2'-O-methyladenosine-3'-phosphate
  modified_base 20: mod_base = OTHER; note = 2'-O-methyladenosine-3'-phosphate
  modified_base 21: mod_base = OTHER; note = 2'-O-methylguanosine-3'-phosphorothioate
  modified_base 22: mod_base = OTHER; note = 2'-O-methyladenosine-3'-phosphorothioate
  modified_base 23: mod_base = OTHER; note = 2'-O-methyluridine
tggaatggagtttgaaaaaagat

SEQ ID NO: 12616 - RNA, 23 nt, synthetic construct
  source 1..23: mol_type = other RNA
  modified_base 1: mod_base = OTHER; note = 2'-O-methyluridine-3'-phosphorothioate 5'-(E)-Vinylphosphonate
  modified_base 2: mod_base = OTHER; note = 2'-deoxy-2'-fluoroadenosine-3'-phosphorothioate
  modified_base 3: mod_base = OTHER; note = 2'-O-methyladenosine-3'-phosphate
  modified_base 4: mod_base = OTHER; note = 2'-O-methylguanosine-3'-phosphate
  modified_base 5: mod_base = OTHER; note = 2'-O-methylguanosine-3'-phosphate
  modified_base 6: mod_base = OTHER; note = 2'-deoxy-2'-fluoroadenosine-3'-phosphate
  modified_base 7: mod_base = OTHER; note = 2'-O-methyladenosine-3'-phosphate
  modified_base 8: mod_base = OTHER; note = 2'-O-methyluridine-3'-phosphate
  modified_base 9: mod_base = OTHER; note = 2'-O-methylguanosine-3'-phosphate
  modified_base 10: mod_base = OTHER; note = 2'-O-methylguanosine-3'-phosphate
  modified_base 11: mod_base = OTHER; note = 2'-O-methyladenosine-3'-phosphate
  modified_base 12: mod_base = OTHER; note = 2'-O-methylguanosine-3'-phosphate
  modified_base 13: mod_base = OTHER; note = 2'-O-methyluridine-3'-phosphate
  modified_base 14: mod_base = OTHER; note = 2'-deoxy-2'-fluorouridine-3'-phosphate
  modified_base 15: mod_base = OTHER; note = 2'-O-methyluridine-3'-phosphate
  modified_base 16: mod_base = OTHER; note = 2'-deoxy-2'-fluoroguanosine-3'-phosphate
  modified_base 17: mod_base = OTHER; note = 2'-O-methyladenosine-3'-phosphate
  modified_base 18: mod_base = OTHER; note = 2'-O-methyladenosine-3'-phosphate
  modified_base 19: mod_base = OTHER; note = 2'-O-methyladenosine-3'-phosphate
  modified_base 20: mod_base = OTHER; note = 2'-O-methyladenosine-3'-phosphate
  modified_base 21: mod_base = OTHER; note = 2'-O-methyladenosine-3'-phosphorothioate
  modified_base 22: mod_base = OTHER; note = 2'-O-methyladenosine-3'-phosphorothioate
  modified_base 23: mod_base = OTHER; note = 2'-O-methylguanosine
taaggaatggagtttgaaaaaag

SEQ ID NO: 12617 - RNA, 23 nt, synthetic construct
  source 1..23: mol_type = other RNA
  modified_base 1: mod_base = OTHER; note = 2'-O-methyluridine-3'-phosphorothioate 5'-(E)-Vinylphosphonate
  modified_base 2: mod_base = OTHER; note = 2'-deoxy-2'-fluorouridine-3'-phosphorothioate
  modified_base 3: mod_base = OTHER; note = 2'-O-methyladenosine-3'-phosphate
  modified_base 4: mod_base = OTHER; note = 2'-O-methyladenosine-3'-phosphate
  modified_base 5: mod_base = OTHER; note = 2'-O-methylguanosine-3'-phosphate
  modified_base 6: mod_base = OTHER; note = 2'-deoxy-2'-fluoroguanosine-3'-phosphate
  modified_base 7: mod_base = OTHER; note = 2'-O-methyladenosine-3'-phosphate
  modified_base 8: mod_base = OTHER; note = 2'-O-methyladenosine-3'-phosphate
  modified_base 9: mod_base = OTHER; note = 2'-O-methyluridine-3'-phosphate
  modified_base 10: mod_base = OTHER; note = 2'-O-methylguanosine-3'-phosphate
  modified_base 11: mod_base = OTHER; note = 2'-O-methylguanosine-3'-phosphate
  modified_base 12: mod_base = OTHER; note = 2'-O-methyladenosine-3'-phosphate
  modified_base 13: mod_base = OTHER; note = 2'-O-methylguanosine-3'-phosphate
  modified_base 14: mod_base = OTHER; note = 2'-deoxy-2'-fluorouridine-3'-phosphate
  modified_base 15: mod_base = OTHER; note = 2'-O-methyluridine-3'-phosphate
  modified_base 16: mod_base = OTHER; note = 2'-deoxy-2'-fluorouridine-3'-phosphate
  modified_base 17: mod_base = OTHER; note = 2'-O-methylguanosine-3'-phosphate
  modified_base 18: mod_base = OTHER; note = 2'-O-methyladenosine-3'-phosphate
  modified_base 19: mod_base = OTHER; note = 2'-O-methyladenosine-3'-phosphate
  modified_base 20: mod_base = OTHER; note = 2'-O-methyladenosine-3'-phosphate
  modified_base 21: mod_base = OTHER; note = 2'-O-methyladenosine-3'-phosphorothioate
  modified_base 22: mod_base = OTHER; note = 2'-O-methyladenosine-3'-phosphorothioate
  modified_base 23: mod_base = OTHER; note = 2'-O-methyladenosine
ttaaggaatggagtttgaaaaaa

SEQ ID NO: 12618 - RNA, 23 nt, synthetic construct
  source 1..23: mol_type = other RNA
  modified_base 1: mod_base = OTHER; note = 2'-O-methyluridine-3'-phosphorothioate 5'-(E)-Vinylphosphonate
  modified_base 2: mod_base = OTHER; note = 2'-deoxy-2'-fluorocytidine-3'-phosphorothioate
  modified_base 3: mod_base = OTHER; note = 2'-O-methyluridine-3'-phosphate
  modified_base 4: mod_base = OTHER; note = 2'-O-methyladenosine-3'-phosphate
  modified_base 5: mod_base = OTHER; note = 2'-O-methyladenosine-3'-phosphate
  modified_base 6: mod_base = OTHER; note = 2'-deoxy-2'-fluoroguanosine-3'-phosphate
  modified_base 7: mod_base = OTHER; note = 2'-O-methylguanosine-3'-phosphate
  modified_base 8: mod_base = OTHER; note = 2'-O-methyladenosine-3'-phosphate
  modified_base 9: mod_base = OTHER; note = 2'-O-methyladenosine-3'-phosphate
  modified_base 10: mod_base = OTHER; note = 2'-O-methyluridine-3'-phosphate
  modified_base 11: mod_base = OTHER; note = 2'-O-methylguanosine-3'-phosphate
  modified_base 12: mod_base = OTHER; note = 2'-O-methylguanosine-3'-phosphate
  modified_base 13: mod_base = OTHER; note = 2'-O-methyladenosine-3'-phosphate
  modified_base 14: mod_base = OTHER; note = 2'-deoxy-2'-fluoroguanosine-3'-phosphate
  modified_base 15: mod_base = OTHER; note = 2'-O-methyluridine-3'-phosphate
  modified_base 16: mod_base = OTHER; note = 2'-deoxy-2'-fluorouridine-3'-phosphate
  modified_base 17: mod_base = OTHER; note = 2'-O-methyluridine-3'-phosphate
  modified_base 18: mod_base = OTHER; note = 2'-O-methylguanosine-3'-phosphate
  modified_base 19: mod_base = OTHER; note = 2'-O-methyladenosine-3'-phosphate
  modified_base 20: mod_base = OTHER; note = 2'-O-methyladenosine-3'-phosphate
  modified_base 21: mod_base = OTHER; note = 2'-O-methyladenosine-3'-phosphorothioate
  modified_base 22: mod_base = OTHER; note = 2'-O-methyladenosine-3'-phosphorothioate
  modified_base 23: mod_base = OTHER; note = 2'-O-methyladenosine
tctaaggaatggagtttgaaaaa

SEQ ID NO: 12619 - RNA, 23 nt, synthetic construct
  source 1..23: mol_type = other RNA
  modified_base 1: mod_base = OTHER; note = 2'-O-methyluridine-3'-phosphorothioate 5'-(E)-Vinylphosphonate
  modified_base 2: mod_base = OTHER; note = 2'-deoxy-2'-fluorouridine-3'-phosphorothioate
  modified_base 3: mod_base = OTHER; note = 2'-O-methylcytidine-3'-phosphate
  modified_base 4: mod_base = OTHER; note = 2'-O-methyluridine-3'-phosphate
  modified_base 5: mod_base = OTHER; note = 2'-O-methyladenosine-3'-phosphate
  modified_base 6: mod_base = OTHER; note = 2'-deoxy-2'-fluoroadenosine-3'-phosphate
  modified_base 7: mod_base = OTHER; note = 2'-O-methylguanosine-3'-phosphate
  modified_base 8: mod_base = OTHER; note = 2'-O-methylguanosine-3'-phosphate
  modified_base 9: mod_base = OTHER; note = 2'-O-methyladenosine-3'-phosphate
  modified_base 10: mod_base = OTHER; note = 2'-O-methyladenosine-3'-phosphate
  modified_base 11: mod_base = OTHER; note = 2'-O-methyluridine-3'-phosphate
  modified_base 12: mod_base = OTHER; note = 2'-O-methylguanosine-3'-phosphate
  modified_base 13: mod_base = OTHER; note = 2'-O-methylguanosine-3'-phosphate
  modified_base 14: mod_base = OTHER; note = 2'-deoxy-2'-fluoroadenosine-3'-phosphate
  modified_base 15: mod_base = OTHER; note = 2'-O-methylguanosine-3'-phosphate
  modified_base 16: mod_base = OTHER; note = 2'-deoxy-2'-fluorouridine-3'-phosphate
  modified_base 17: mod_base = OTHER; note = 2'-O-methyluridine-3'-phosphate
  modified_base 18: mod_base = OTHER; note = 2'-O-methyluridine-3'-phosphate
  modified_base 19: mod_base = OTHER; note = 2'-O-methylguanosine-3'-phosphate
  modified_base 20: mod_base = OTHER; note = 2'-O-methyladenosine-3'-phosphate
  modified_base 21: mod_base = OTHER; note = 2'-O-methyladenosine-3'-phosphorothioate
  modified_base 22: mod_base = OTHER; note = 2'-O-methyladenosine-3'-phosphorothioate
  modified_base 23: mod_base = OTHER; note = 2'-O-methyladenosine
ttctaaggaatggagtttgaaaa

SEQ ID NO: 12620 - RNA, 23 nt, synthetic construct
  source 1..23: mol_type = other RNA
  modified_base 1: mod_base = OTHER; note = 2'-O-methyluridine-3'-phosphorothioate 5'-(E)-Vinylphosphonate
  modified_base 2: mod_base = OTHER; note = 2'-deoxy-2'-fluorouridine-3'-phosphorothioate
  modified_base 3: mod_base = OTHER; note = 2'-O-methyluridine-3'-phosphate
  modified_base 4: mod_base = OTHER; note = 2'-O-methylcytidine-3'-phosphate
  modified_base 5: mod_base = OTHER; note = 2'-O-methyluridine-3'-phosphate
  modified_base 6: mod_base = OTHER; note = 2'-deoxy-2'-fluoroadenosine-3'-phosphate
  modified_base 7: mod_base = OTHER; note = 2'-O-methyladenosine-3'-phosphate
  modified_base 8: mod_base = OTHER; note = 2'-O-methylguanosine-3'-phosphate
  modified_base 9: mod_base = OTHER; note = 2'-O-methylguanosine-3'-phosphate
  modified_base 10: mod_base = OTHER; note = 2'-O-methyladenosine-3'-phosphate
  modified_base 11: mod_base = OTHER; note = 2'-O-methyladenosine-3'-phosphate
  modified_base 12: mod_base = OTHER; note = 2'-O-methyluridine-3'-phosphate
  modified_base 13: mod_base = OTHER; note = 2'-O-methylguanosine-3'-phosphate
  modified_base 14: mod_base = OTHER; note = 2'-deoxy-2'-fluoroguanosine-3'-phosphate
  modified_base 15: mod_base = OTHER; note = 2'-O-methyladenosine-3'-phosphate
  modified_base 16: mod_base = OTHER; note = 2'-deoxy-2'-fluoroguanosine-3'-phosphate
  modified_base 17: mod_base = OTHER; note = 2'-O-methyluridine-3'-phosphate
  modified_base 18: mod_base = OTHER; note = 2'-O-methyluridine-3'-phosphate
  modified_base 19: mod_base = OTHER; note = 2'-O-methyluridine-3'-phosphate
  modified_base 20: mod_base = OTHER; note = 2'-O-methylguanosine-3'-phosphate
  modified_base 21: mod_base = OTHER; note = 2'-O-methyladenosine-3'-phosphorothioate
  modified_base 22: mod_base = OTHER; note = 2'-O-methyladenosine-3'-phosphorothioate
  modified_base 23: mod_base = OTHER; note = 2'-O-methyladenosine
tttctaaggaatggagtttgaaa

SEQ ID NO: 12621 - RNA, 23 nt, synthetic construct
  source 1..23: mol_type = other RNA
  modified_base 1: mod_base = OTHER; note = 2'-O-methyluridine-3'-phosphorothioate 5'-(E)-Vinylphosphonate
  modified_base 2: mod_base = OTHER; note = 2'-deoxy-2'-fluoroguanosine-3'-phosphorothioate
  modified_base 3: mod_base = OTHER; note = 2'-O-methyluridine-3'-phosphate
  modified_base 4: mod_base = OTHER; note = 2'-O-methyluridine-3'-phosphate
  modified_base 5: mod_base = OTHER; note = 2'-O-methylcytidine-3'-phosphate
  modified_base 6: mod_base = OTHER; note = 2'-deoxy-2'-fluorouridine-3'-phosphate
  modified_base 7: mod_base = OTHER; note = 2'-O-methyladenosine-3'-phosphate
  modified_base 8: mod_base = OTHER; note = 2'-O-methyladenosine-3'-phosphate
  modified_base 9: mod_base = OTHER; note = 2'-O-methylguanosine-3'-phosphate
  modified_base 10: mod_base = OTHER; note = 2'-O-methylguanosine-3'-phosphate
  modified_base 11: mod_base = OTHER; note = 2'-O-methyladenosine-3'-phosphate
  modified_base 12: mod_base = OTHER; note = 2'-O-methyladenosine-3'-phosphate
  modified_base 13: mod_base = OTHER; note = 2'-O-methyluridine-3'-phosphate
  modified_base 14: mod_base = OTHER; note = 2'-deoxy-2'-fluoroguanosine-3'-phosphate
  modified_base 15: mod_base = OTHER; note = 2'-O-methylguanosine-3'-phosphate
  modified_base 16: mod_base = OTHER; note = 2'-deoxy-2'-fluoroadenosine-3'-phosphate
  modified_base 17: mod_base = OTHER; note = 2'-O-methylguanosine-3'-phosphate
  modified_base 18: mod_base = OTHER; note = 2'-O-methyluridine-3'-phosphate
  modified_base 19: mod_base = OTHER; note = 2'-O-methyluridine-3'-phosphate
  modified_base 20: mod_base = OTHER; note = 2'-O-methyluridine-3'-phosphate
  modified_base 21: mod_base = OTHER; note = 2'-O-methylguanosine-3'-phosphorothioate
  modified_base 22: mod_base = OTHER; note = 2'-O-methyladenosine-3'-phosphorothioate
  modified_base 23: mod_base = OTHER; note = 2'-O-methyladenosine
tgttctaaggaatggagtttgaa

SEQ ID NO: 12622 - RNA, 23 nt, synthetic construct
  source 1..23: mol_type = other RNA
  modified_base 1: mod_base = OTHER; note = 2'-O-methyluridine-3'-phosphorothioate 5'-(E)-Vinylphosphonate
  modified_base 2: mod_base = OTHER; note = 2'-deoxy-2'-fluorouridine-3'-phosphorothioate
  modified_base 3: mod_base = OTHER; note = 2'-O-methylguanosine-3'-phosphate
  modified_base 4: mod_base = OTHER; note = 2'-O-methyluridine-3'-phosphate
  modified_base 5: mod_base = OTHER; note = 2'-O-methyluridine-3'-phosphate
  modified_base 6: mod_base = OTHER; note = 2'-deoxy-2'-fluorocytidine-3'-phosphate
  modified_base 7: mod_base = OTHER; note = 2'-O-methyluridine-3'-phosphate
  modified_base 8: mod_base = OTHER; note = 2'-O-methyladenosine-3'-phosphate
  modified_base 9: mod_base = OTHER; note = 2'-O-methyladenosine-3'-phosphate
  modified_base 10: mod_base = OTHER; note = 2'-O-methylguanosine-3'-phosphate
  modified_base 11: mod_base = OTHER; note = 2'-O-methylguanosine-3'-phosphate
  modified_base 12: mod_base = OTHER; note = 2'-O-methyladenosine-3'-phosphate
  modified_base 13: mod_base = OTHER; note = 2'-O-methyladenosine-3'-phosphate
  modified_base 14: mod_base = OTHER; note = 2'-deoxy-2'-fluorouridine-3'-phosphate
  modified_base 15: mod_base = OTHER; note = 2'-O-methylguanosine-3'-phosphate
  modified_base 16: mod_base = OTHER; note = 2'-deoxy-2'-fluoroguanosine-3'-phosphate
  modified_base 17: mod_base = OTHER; note = 2'-O-methyladenosine-3'-phosphate
  modified_base 18: mod_base = OTHER; note = 2'-O-methylguanosine-3'-phosphate
  modified_base 19: mod_base = OTHER; note = 2'-O-methyluridine-3'-phosphate
  modified_base 20: mod_base = OTHER; note = 2'-O-methyluridine-3'-phosphate
  modified_base 21: mod_base = OTHER; note = 2'-O-methyluridine-3'-phosphorothioate
  modified_base 22: mod_base = OTHER; note = 2'-O-methylguanosine-3'-phosphorothioate
  modified_base 23: mod_base = OTHER; note = 2'-O-methyladenosine
ttgttctaaggaatggagtttga

SEQ ID NO: 12623 - RNA, 23 nt, synthetic construct
  source 1..23: mol_type = other RNA
  modified_base 1: mod_base = OTHER; note = 2'-O-methyluridine-3'-phosphorothioate 5'-(E)-Vinylphosphonate
  modified_base 2: mod_base = OTHER; note = 2'-deoxy-2'-fluoroadenosine-3'-phosphorothioate
  modified_base 3: mod_base = OTHER; note = 2'-O-methyluridine-3'-phosphate
  modified_base 4: mod_base = OTHER; note = 2'-O-methylguanosine-3'-phosphate
  modified_base 5: mod_base = OTHER; note = 2'-O-methyluridine-3'-phosphate
  modified_base 6: mod_base = OTHER; note = 2'-deoxy-2'-fluorouridine-3'-phosphate
  modified_base 7: mod_base = OTHER; note = 2'-O-methylcytidine-3'-phosphate
  modified_base 8: mod_base = OTHER; note = 2'-O-methyluridine-3'-phosphate
  modified_base 9: mod_base = OTHER; note = 2'-O-methyladenosine-3'-phosphate
  modified_base 10: mod_base = OTHER; note = 2'-O-methyladenosine-3'-phosphate
  modified_base 11: mod_base = OTHER; note = 2'-O-methylguanosine-3'-phosphate
  modified_base 12: mod_base = OTHER; note = 2'-O-methylguanosine-3'-phosphate
  modified_base 13: mod_base = OTHER; note = 2'-O-methyladenosine-3'-phosphate
  modified_base 14: mod_base = OTHER; note = 2'-deoxy-2'-fluoroadenosine-3'-phosphate
  modified_base 15: mod_base = OTHER; note = 2'-O-methyluridine-3'-phosphate
  modified_base 16: mod_base = OTHER; note = 2'-deoxy-2'-fluoroguanosine-3'-phosphate
  modified_base 17: mod_base = OTHER; note = 2'-O-methylguanosine-3'-phosphate
  modified_base 18: mod_base = OTHER; note = 2'-O-methyladenosine-3'-phosphate
  modified_base 19: mod_base = OTHER; note = 2'-O-methylguanosine-3'-phosphate
  modified_base 20: mod_base = OTHER; note = 2'-O-methyluridine-3'-phosphate
  modified_base 21: mod_base = OTHER; note = 2'-O-methyluridine-3'-phosphorothioate
  modified_base 22: mod_base = OTHER; note = 2'-O-methyluridine-3'-phosphorothioate
  modified_base 23: mod_base = OTHER; note = 2'-O-methylguanosine
tatgttctaaggaatggagtttg

SEQ ID NO: 12624 - RNA, 23 nt, synthetic construct
  source 1..23: mol_type = other RNA
  modified_base 1: mod_base = OTHER; note = 2'-O-methyluridine-3'-phosphorothioate 5'-(E)-Vinylphosphonate
  modified_base 2: mod_base = OTHER; note = 2'-deoxy-2'-fluoroadenosine-3'-phosphorothioate
  modified_base 3: mod_base = OTHER; note = 2'-O-methyladenosine-3'-phosphate
  modified_base 4: mod_base = OTHER; note = 2'-O-methyluridine-3'-phosphate
  modified_base 5: mod_base = OTHER; note = 2'-O-methylguanosine-3'-phosphate
  modified_base 6: mod_base = OTHER; note = 2'-deoxy-2'-fluorouridine-3'-phosphate
  modified_base 7: mod_base = OTHER; note = 2'-O-methyluridine-3'-phosphate
  modified_base 8: mod_base = OTHER; note = 2'-O-methylcytidine-3'-phosphate
  modified_base 9: mod_base = OTHER; note = 2'-O-methyluridine-3'-phosphate
  modified_base 10: mod_base = OTHER; note = 2'-O-methyladenosine-3'-phosphate
  modified_base 11: mod_base = OTHER; note = 2'-O-methyladenosine-3'-phosphate
  modified_base 12: mod_base = OTHER; note = 2'-O-methylguanosine-3'-phosphate
  modified_base 13: mod_base = OTHER; note = 2'-O-methylguanosine-3'-phosphate
  modified_base 14: mod_base = OTHER; note = 2'-deoxy-2'-fluoroadenosine-3'-phosphate
  modified_base 15: mod_base = OTHER; note = 2'-O-methyladenosine-3'-phosphate
  modified_base 16: mod_base = OTHER; note = 2'-deoxy-2'-fluorouridine-3'-phosphate
  modified_base 17: mod_base = OTHER; note = 2'-O-methylguanosine-3'-phosphate
  modified_base 18: mod_base = OTHER; note = 2'-O-methylguanosine-3'-phosphate
  modified_base 19: mod_base = OTHER; note = 2'-O-methyladenosine-3'-phosphate
  modified_base 20: mod_base = OTHER; note = 2'-O-methylguanosine-3'-phosphate
  modified_base 21: mod_base = OTHER; note = 2'-O-methyluridine-3'-phosphorothioate
  modified_base 22: mod_base = OTHER; note = 2'-O-methyluridine-3'-phosphorothioate
  modified_base 23: mod_base = OTHER; note = 2'-O-methyluridine
taatgttctaaggaatggagttt

SEQ ID NO: 12625 - RNA, 23 nt, synthetic construct
  source 1..23: mol_type = other RNA
  modified_base 1: mod_base = OTHER; note = 2'-O-methyluridine-3'-phosphorothioate 5'-(E)-Vinylphosphonate
  modified_base 2: mod_base = OTHER; note = 2'-deoxy-2'-fluoroguanosine-3'-phosphorothioate
  modified_base 3: mod_base = OTHER; note = 2'-O-methyladenosine-3'-phosphate
  modified_base 4: mod_base = OTHER; note = 2'-O-methyladenosine-3'-phosphate
  modified_base 5: mod_base = OTHER; note = 2'-O-methyluridine-3'-phosphate
  modified_base 6: mod_base = OTHER; note = 2'-deoxy-2'-fluoroguanosine-3'-phosphate
  modified_base 7: mod_base = OTHER; note = 2'-O-methyluridine-3'-phosphate
  modified_base 8: mod_base = OTHER; note = 2'-O-methyluridine-3'-phosphate
  modified_base 9: mod_base = OTHER; note = 2'-O-methylcytidine-3'-phosphate
  modified_base 10: mod_base = OTHER; note = 2'-O-methyluridine-3'-phosphate
  modified_base 11: mod_base = OTHER; note = 2'-O-methyladenosine-3'-phosphate
  modified_base 12: mod_base = OTHER; note = 2'-O-methyladenosine-3'-phosphate
  modified_base 13: mod_base = OTHER; note = 2'-O-methylguanosine-3'-phosphate
  modified_base 14: mod_base = OTHER; note = 2'-deoxy-2'-fluoroguanosine-3'-phosphate
  modified_base 15: mod_base = OTHER; note = 2'-O-methyladenosine-3'-phosphate
  modified_base 16: mod_base = OTHER; note = 2'-deoxy-2'-fluoroadenosine-3'-phosphate
  modified_base 17: mod_base = OTHER; note = 2'-O-methyluridine-3'-phosphate
  modified_base 18: mod_base = OTHER; note = 2'-O-methylguanosine-3'-phosphate
  modified_base 19: mod_base = OTHER; note = 2'-O-methylguanosine-3'-phosphate
  modified_base 20: mod_base = OTHER; note = 2'-O-methyladenosine-3'-phosphate
  modified_base 21: mod_base = OTHER; note = 2'-O-methylguanosine-3'-phosphorothioate
  modified_base 22: mod_base = OTHER; note = 2'-O-methyluridine-3'-phosphorothioate
  modified_base 23: mod_base = OTHER; note = 2'-O-methyluridine
tgaatgttctaaggaatggagtt

SEQ ID NO: 12626 - RNA, 23 nt, synthetic construct
  source 1..23: mol_type = other RNA
  modified_base 1: mod_base = OTHER; note = 2'-O-methyluridine-3'-phosphorothioate 5'-(E)-Vinylphosphonate
  modified_base 2: mod_base = OTHER; note = 2'-deoxy-2'-fluoroadenosine-3'-phosphorothioate
  modified_base 3: mod_base = OTHER; note = 2'-O-methylguanosine-3'-phosphate
  modified_base 4: mod_base = OTHER; note = 2'-O-methyladenosine-3'-phosphate
  modified_base 5: mod_base = OTHER; note = 2'-O-methyladenosine-3'-phosphate
  modified_base 6: mod_base = OTHER; note = 2'-deoxy-2'-fluorouridine-3'-phosphate
  modified_base 7: mod_base = OTHER; note = 2'-O-methylguanosine-3'-phosphate
  modified_base 8: mod_base = OTHER; note = 2'-O-methyluridine-3'-phosphate
  modified_base 9: mod_base = OTHER; note = 2'-O-methyluridine-3'-phosphate
  modified_base 10: mod_base = OTHER; note = 2'-O-methylcytidine-3'-phosphate
  modified_base 11: mod_base = OTHER; note = 2'-O-methyluridine-3'-phosphate
  modified_base 12: mod_base = OTHER; note = 2'-O-methyladenosine-3'-phosphate
  modified_base 13: mod_base = OTHER; note = 2'-O-methyladenosine-3'-phosphate
  modified_base 14: mod_base = OTHER; note = 2'-deoxy-2'-fluoroguanosine-3'-phosphate
  modified_base 15: mod_base = OTHER; note = 2'-O-methylguanosine-3'-phosphate
  modified_base 16: mod_base = OTHER; note = 2'-deoxy-2'-fluoroadenosine-3'-phosphate
  modified_base 17: mod_base = OTHER; note = 2'-O-methyladenosine-3'-phosphate
  modified_base 18: mod_base = OTHER; note = 2'-O-methyluridine-3'-phosphate
  modified_base 19: mod_base = OTHER; note = 2'-O-methylguanosine-3'-phosphate
  modified_base 20: mod_base = OTHER; note = 2'-O-methylguanosine-3'-phosphate
  modified_base 21: mod_base = OTHER; note = 2'-O-methyladenosine-3'-phosphorothioate
  modified_base 22: mod_base = OTHER; note = 2'-O-methylguanosine-3'-phosphorothioate
  modified_base 23: mod_base = OTHER; note = 2'-O-methyluridine
tagaatgttctaaggaatggagt

SEQ ID NO: 12627 - RNA, 23 nt, synthetic construct
  source 1..23: mol_type = other RNA
  modified_base 1: mod_base = OTHER; note = 2'-O-methyluridine-3'-phosphorothioate 5'-(E)-Vinylphosphonate
  modified_base 2: mod_base = OTHER; note = 2'-deoxy-2'-fluoroadenosine-3'-phosphorothioate
  modified_base 3: mod_base = OTHER; note = 2'-O-methyladenosine-3'-phosphate
  modified_base 4: mod_base = OTHER; note = 2'-O-methylguanosine-3'-phosphate
  modified_base 5: mod_base = OTHER; note = 2'-O-methyladenosine-3'-phosphate
  modified_base 6: mod_base = OTHER; note = 2'-deoxy-2'-fluoroadenosine-3'-phosphate
  modified_base 7: mod_base = OTHER; note = 2'-O-methyluridine-3'-phosphate
  modified_base 8: mod_base = OTHER; note = 2'-O-methylguanosine-3'-phosphate
  modified_base 9: mod_base = OTHER; note = 2'-O-methyluridine-3'-phosphate
  modified_base 10: mod_base = OTHER; note = 2'-O-methyluridine-3'-phosphate
  modified_base 11: mod_base = OTHER; note = 2'-O-methylcytidine-3'-phosphate
  modified_base 12: mod_base = OTHER; note = 2'-O-methyluridine-3'-phosphate
  modified_base 13: mod_base = OTHER; note = 2'-O-methyladenosine-3'-phosphate
  modified_base 14: mod_base = OTHER; note = 2'-deoxy-2'-fluoroadenosine-3'-phosphate
  modified_base 15: mod_base = OTHER; note = 2'-O-methylguanosine-3'-phosphate
  modified_base 16: mod_base = OTHER; note = 2'-deoxy-2'-fluoroguanosine-3'-phosphate
  modified_base 17: mod_base = OTHER; note = 2'-O-methyladenosine-3'-phosphate
  modified_base 18: mod_base = OTHER; note = 2'-O-methyladenosine-3'-phosphate
  modified_base 19: mod_base = OTHER; note = 2'-O-methyluridine-3'-phosphate
  modified_base 20: mod_base = OTHER; note = 2'-O-methylguanosine-3'-phosphate
  modified_base 21: mod_base = OTHER; note = 2'-O-methylguanosine-3'-phosphorothioate
  modified_base 22: mod_base = OTHER; note = 2'-O-methyladenosine-3'-phosphorothioate
  modified_base 23: mod_base = OTHER; note = 2'-O-methylguanosine
taagaatgttctaaggaatggag

SEQ ID NO: 12628 - RNA, 23 nt, synthetic construct
  source 1..23: mol_type = other RNA
  modified_base 1: mod_base = OTHER; note = 2'-O-methyluridine-3'-phosphorothioate 5'-(E)-Vinylphosphonate
  modified_base 2: mod_base = OTHER; note = 2'-deoxy-2'-fluoroguanosine-3'-phosphorothioate
  modified_base 3: mod_base = OTHER; note = 2'-O-methyladenosine-3'-phosphate
  modified_base 4: mod_base = OTHER; note = 2'-O-methyladenosine-3'-phosphate
  modified_base 5: mod_base = OTHER; note = 2'-O-methylguanosine-3'-phosphate
  modified_base 6: mod_base = OTHER; note = 2'-deoxy-2'-fluoroadenosine-3'-phosphate
  modified_base 7: mod_base = OTHER; note = 2'-O-methyladenosine-3'-phosphate
  modified_base 8: mod_base = OTHER; note = 2'-O-methyluridine-3'-phosphate
  modified_base 9: mod_base = OTHER; note = 2'-O-methylguanosine-3'-phosphate
  modified_base 10: mod_base = OTHER; note = 2'-O-methyluridine-3'-phosphate
  modified_base 11: mod_base = OTHER; note = 2'-O-methyluridine-3'-phosphate
  modified_base 12: mod_base = OTHER; note = 2'-O-methylcytidine-3'-phosphate
  modified_base 13: mod_base = OTHER; note = 2'-O-methyluridine-3'-phosphate
  modified_base 14: mod_base = OTHER; note = 2'-deoxy-2'-fluoroadenosine-3'-phosphate
  modified_base 15: mod_base = OTHER; note = 2'-O-methyladenosine-3'-phosphate
  modified_base 16: mod_base = OTHER; note = 2'-deoxy-2'-fluoroguanosine-3'-phosphate
  modified_base 17: mod_base = OTHER; note = 2'-O-methylguanosine-3'-phosphate
  modified_base 18: mod_base = OTHER; note = 2'-O-methyladenosine-3'-phosphate
  modified_base 19: mod_base = OTHER; note = 2'-O-methyladenosine-3'-phosphate
  modified_base 20: mod_base = OTHER; note = 2'-O-methyluridine-3'-phosphate
  modified_base 21: mod_base = OTHER; note = 2'-O-methylguanosine-3'-phosphorothioate
  modified_base 22: mod_base = OTHER; note = 2'-O-methylguanosine-3'-phosphorothioate
  modified_base 23: mod_base = OTHER; note = 2'-O-methyladenosine
tgaagaatgttctaaggaatgga

SEQ ID NO: 12629 - RNA, 23 nt, synthetic construct
  source 1..23: mol_type = other RNA
  modified_base 1: mod_base = OTHER; note = 2'-O-methyluridine-3'-phosphorothioate 5'-(E)-Vinylphosphonate
  modified_base 2: mod_base = OTHER; note = 2'-deoxy-2'-fluoroadenosine-3'-phosphorothioate
  modified_base 3: mod_base = OTHER; note = 2'-O-methylguanosine-3'-phosphate
  modified_base 4: mod_base = OTHER; note = 2'-O-methyladenosine-3'-phosphate
  modified_base 5: mod_base = OTHER; note = 2'-O-methyladenosine-3'-phosphate
  modified_base 6: mod_base = OTHER; note = 2'-deoxy-2'-fluoroguanosine-3'-phosphate
  modified_base 7: mod_base = OTHER; note = 2'-O-methyladenosine-3'-phosphate
  modified_base 8: mod_base = OTHER; note = 2'-O-methyladenosine-3'-phosphate
  modified_base 9: mod_base = OTHER; note = 2'-O-methyluridine-3'-phosphate
  modified_base 10: mod_base = OTHER; note = 2'-O-methylguanosine-3'-phosphate
  modified_base 11: mod_base = OTHER; note = 2'-O-methyluridine-3'-phosphate
  modified_base 12: mod_base = OTHER; note = 2'-O-methyluridine-3'-phosphate
  modified_base 13: mod_base = OTHER; note = 2'-O-methylcytidine-3'-phosphate
  modified_base 14: mod_base = OTHER; note = 2'-deoxy-2'-fluorouridine-3'-phosphate
  modified_base 15: mod_base = OTHER; note = 2'-O-methyladenosine-3'-phosphate
  modified_base 16: mod_base = OTHER; note = 2'-deoxy-2'-fluoroadenosine-3'-phosphate
  modified_base 17: mod_base = OTHER; note = 2'-O-methylguanosine-3'-phosphate
  modified_base 18: mod_base = OTHER; note = 2'-O-methylguanosine-3'-phosphate
  modified_base 19: mod_base = OTHER; note = 2'-O-methyladenosine-3'-phosphate
  modified_base 20: mod_base = OTHER; note = 2'-O-methyladenosine-3'-phosphate
  modified_base 21: mod_base = OTHER; note = 2'-O-methyluridine-3'-phosphorothioate
  modified_base 22: mod_base = OTHER; note = 2'-O-methylguanosine-3'-phosphorothioate
  modified_base 23: mod_base = OTHER; note = 2'-O-methylguanosine
tagaagaatgttctaaggaatgg

SEQ ID NO: 12630 - RNA, 23 nt, synthetic construct
  source 1..23: mol_type = other RNA
  modified_base 1: mod_base = OTHER; note = 2'-O-methyluridine-3'-phosphorothioate 5'-(E)-Vinylphosphonate
  modified_base 2: mod_base = OTHER; note = 2'-deoxy-2'-fluorouridine-3'-phosphorothioate
  modified_base 3: mod_base = OTHER; note = 2'-O-methyladenosine-3'-phosphate
  modified_base 4: mod_base = OTHER; note = 2'-O-methylguanosine-3'-phosphate
  modified_base 5: mod_base = OTHER; note = 2'-O-methyladenosine-3'-phosphate
  modified_base 6: mod_base = OTHER; note = 2'-deoxy-2'-fluoroadenosine-3'-phosphate
  modified_base 7: mod_base = OTHER; note = 2'-O-methylguanosine-3'-phosphate
  modified_base 8: mod_base = OTHER; note = 2'-O-methyladenosine-3'-phosphate
  modified_base 9: mod_base = OTHER; note = 2'-O-methyladenosine-3'-phosphate
  modified_base 10: mod_base = OTHER; note = 2'-O-methyluridine-3'-phosphate
  modified_base 11: mod_base = OTHER; note = 2'-O-methylguanosine-3'-phosphate
  modified_base 12: mod_base = OTHER; note = 2'-O-methyluridine-3'-phosphate
  modified_base 13: mod_base = OTHER; note = 2'-O-methyluridine-3'-phosphate
  modified_base 14: mod_base = OTHER; note = 2'-deoxy-2'-fluorocytidine-3'-phosphate
  modified_base 15: mod_base = OTHER; note = 2'-O-methyluridine-3'-phosphate
  modified_base 16: mod_base = OTHER; note = 2'-deoxy-2'-fluoroadenosine-3'-phosphate
  modified_base 17: mod_base = OTHER; note = 2'-O-methyladenosine-3'-phosphate
  modified_base 18: mod_base = OTHER; note = 2'-O-methylguanosine-3'-phosphate
  modified_base 19: mod_base = OTHER; note = 2'-O-methylguanosine-3'-phosphate
  modified_base 20: mod_base = OTHER; note = 2'-O-methyladenosine-3'-phosphate
  modified_base 21: mod_base = OTHER; note = 2'-O-methyladenosine-3'-phosphorothioate
  modified_base 22: mod_base = OTHER; note = 2'-O-methyluridine-3'-phosphorothioate
  modified_base 23: mod_base = OTHER; note = 2'-O-methylguanosine
ttagaagaatgttctaaggaatg

SEQ ID NO: 12631 - RNA, 23 nt, synthetic construct
  source 1..23: mol_type = other RNA
  modified_base 1: mod_base = OTHER; note = 2'-O-methyluridine-3'-phosphorothioate 5'-(E)-Vinylphosphonate
  modified_base 2: mod_base = OTHER; note = 2'-deoxy-2'-fluoroguanosine-3'-phosphorothioate
  modified_base 3: mod_base = OTHER; note = 2'-O-methyluridine-3'-phosphate
  modified_base 4: mod_base = OTHER; note = 2'-O-methyladenosine-3'-phosphate
  modified_base 5: mod_base = OTHER; note = 2'-O-methylguanosine-3'-phosphate
  modified_base 6: mod_base = OTHER; note = 2'-deoxy-2'-fluoroadenosine-3'-phosphate
  modified_base 7: mod_base = OTHER; note = 2'-O-methyladenosine-3'-phosphate
  modified_base 8: mod_base = OTHER; note = 2'-O-methylguanosine-3'-phosphate
  modified_base 9: mod_base = OTHER; note = 2'-O-methyladenosine-3'-phosphate
  modified_base 10: mod_base = OTHER; note = 2'-O-methyladenosine-3'-phosphate
  modified_base 11: mod_base = OTHER; note = 2'-O-methyluridine-3'-phosphate
  modified_base 12: mod_base = OTHER; note = 2'-O-methylguanosine-3'-phosphate
  modified_base 13: mod_base = OTHER; note = 2'-O-methyluridine-3'-phosphate
  modified_base 14: mod_base = OTHER; note = 2'-deoxy-2'-fluorouridine-3'-phosphate
  modified_base 15: mod_base = OTHER; note = 2'-O-methylcytidine-3'-phosphate
  modified_base 16: mod_base = OTHER; note = 2'-deoxy-2'-fluorouridine-3'-phosphate
  modified_base 17: mod_base = OTHER; note = 2'-O-methyladenosine-3'-phosphate
  modified_base 18: mod_base = OTHER; note = 2'-O-methyladenosine-3'-phosphate
  modified_base 19: mod_base = OTHER; note = 2'-O-methylguanosine-3'-phosphate
  modified_base 20: mod_base = OTHER; note = 2'-O-methylguanosine-3'-phosphate
  modified_base 21: mod_base = OTHER; note = 2'-O-methyladenosine-3'-phosphorothioate
  modified_base 22: mod_base = OTHER; note = 2'-O-methyladenosine-3'-phosphorothioate
  modified_base 23: mod_base = OTHER; note = 2'-O-methyluridine
tgtagaagaatgttctaaggaat

SEQ ID NO: 12632 - RNA, 23 nt, synthetic construct
  source 1..23: mol_type = other RNA
  modified_base 1: mod_base = OTHER; note = 2'-O-methyluridine-3'-phosphorothioate 5'-(E)-Vinylphosphonate
  modified_base 2: mod_base = OTHER; note = 2'-deoxy-2'-fluoroadenosine-3'-phosphorothioate
  modified_base 3: mod_base = OTHER; note = 2'-O-methylguanosine-3'-phosphate
  modified_base 4: mod_base = OTHER; note = 2'-O-methyluridine-3'-phosphate
  modified_base 5: mod_base = OTHER; note = 2'-O-methyladenosine-3'-phosphate
  modified_base 6: mod_base = OTHER; note = 2'-deoxy-2'-fluoroguanosine-3'-phosphate
  modified_base 7: mod_base = OTHER; note = 2'-O-methyladenosine-3'-phosphate
  modified_base 8: mod_base = OTHER; note = 2'-O-methyladenosine-3'-phosphate
  modified_base 9: mod_base = OTHER; note = 2'-O-methylguanosine-3'-phosphate
  modified_base 10: mod_base = OTHER; note = 2'-O-methyladenosine-3'-phosphate
  modified_base 11: mod_base = OTHER; note = 2'-O-methyladenosine-3'-phosphate
  modified_base 12: mod_base = OTHER; note = 2'-O-methyluridine-3'-phosphate
  modified_base 13: mod_base = OTHER; note = 2'-O-methylguanosine-3'-phosphate
  modified_base 14: mod_base = OTHER; note = 2'-deoxy-2'-fluorouridine-3'-phosphate
  modified_base 15: mod_base = OTHER; note = 2'-O-methyluridine-3'-phosphate
  modified_base 16: mod_base = OTHER; note = 2'-deoxy-2'-fluorocytidine-3'-phosphate
  modified_base 17: mod_base = OTHER; note = 2'-O-methyluridine-3'-phosphate
  modified_base 18: mod_base = OTHER; note = 2'-O-methyladenosine-3'-phosphate
  modified_base 19: mod_base = OTHER; note = 2'-O-methyladenosine-3'-phosphate
  modified_base 20: mod_base = OTHER; note = 2'-O-methylguanosine-3'-phosphate
  modified_base 21: mod_base = OTHER; note = 2'-O-methylguanosine-3'-phosphorothioate
  modified_base 22: mod_base = OTHER; note = 2'-O-methyladenosine-3'-phosphorothioate
  modified_base 23: mod_base = OTHER; note = 2'-O-methyladenosine
tagtagaagaatgttctaaggaa

SEQ ID NO: 12633 - RNA, 23 nt, synthetic construct
  source 1..23: mol_type = other RNA
  modified_base 1: mod_base = OTHER; note = 2'-O-methyluridine-3'-phosphorothioate 5'-(E)-Vinylphosphonate
  modified_base 2: mod_base = OTHER; note = 2'-deoxy-2'-fluorocytidine-3'-phosphorothioate
  modified_base 3: mod_base = OTHER; note = 2'-O-methyladenosine-3'-phosphate
  modified_base 4: mod_base = OTHER; note = 2'-O-methylguanosine-3'-phosphate
  modified_base 5: mod_base = OTHER; note = 2'-O-methyluridine-3'-phosphate
  modified_base 6: mod_base = OTHER; note = 2'-deoxy-2'-fluoroadenosine-3'-phosphate
  modified_base 7: mod_base = OTHER; note = 2'-O-methylguanosine-3'-phosphate
  modified_base 8: mod_base = OTHER; note = 2'-O-methyladenosine-3'-phosphate
  modified_base 9: mod_base = OTHER; note = 2'-O-methyladenosine-3'-phosphate
  modified_base 10: mod_base = OTHER; note = 2'-O-methylguanosine-3'-phosphate
  modified_base 11: mod_base = OTHER; note = 2'-O-methyladenosine-3'-phosphate
  modified_base 12: mod_base = OTHER; note = 2'-O-methyladenosine-3'-phosphate
  modified_base 13: mod_base = OTHER; note = 2'-O-methyluridine-3'-phosphate
  modified_base 14: mod_base = OTHER; note = 2'-deoxy-2'-fluoroguanosine-3'-phosphate
  modified_base 15: mod_base = OTHER; note = 2'-O-methyluridine-3'-phosphate
  modified_base 16: mod_base = OTHER; note = 2'-deoxy-2'-fluorouridine-3'-phosphate
  modified_base 17: mod_base = OTHER; note = 2'-O-methylcytidine-3'-phosphate
  modified_base 18: mod_base = OTHER; note = 2'-O-methyluridine-3'-phosphate
  modified_base 19: mod_base = OTHER; note = 2'-O-methyladenosine-3'-phosphate
  modified_base 20: mod_base = OTHER; note = 2'-O-methyladenosine-3'-phosphate
  modified_base 21: mod_base = OTHER; note = 2'-O-methylguanosine-3'-phosphorothioate
  modified_base 22: mod_base = OTHER; note = 2'-O-methylguanosine-3'-phosphorothioate
  modified_base 23: mod_base = OTHER; note = 2'-O-methyladenosine
tcagtagaagaatgttctaagga

SEQ ID NO: 12634 - RNA, 23 nt, synthetic construct
  source 1..23: mol_type = other RNA
  modified_base 1: mod_base = OTHER; note = 2'-O-methyluridine-3'-phosphorothioate 5'-(E)-Vinylphosphonate
  modified_base 2: mod_base = OTHER; note = 2'-deoxy-2'-fluorouridine-3'-phosphorothioate
  modified_base 3: mod_base = OTHER; note = 2'-O-methylcytidine-3'-phosphate
  modified_base 4: mod_base = OTHER; note = 2'-O-methyladenosine-3'-phosphate
  modified_base 5: mod_base = OTHER; note = 2'-O-methylguanosine-3'-phosphate
  modified_base 6: mod_base = OTHER; note = 2'-deoxy-2'-fluorouridine-3'-phosphate
  modified_base 7: mod_base = OTHER; note = 2'-O-methyladenosine-3'-phosphate
  modified_base 8: mod_base = OTHER; note = 2'-O-methylguanosine-3'-phosphate
  modified_base 9: mod_base = OTHER; note = 2'-O-methyladenosine-3'-phosphate
  modified_base 10: mod_base = OTHER; note = 2'-O-methyladenosine-3'-phosphate
  modified_base 11: mod_base = OTHER; note = 2'-O-methylguanosine-3'-phosphate
  modified_base 12: mod_base = OTHER; note = 2'-O-methyladenosine-3'-phosphate
  modified_base 13: mod_base = OTHER; note = 2'-O-methyladenosine-3'-phosphate
  modified_base 14: mod_base = OTHER; note = 2'-deoxy-2'-fluorouridine-3'-phosphate
  modified_base 15: mod_base = OTHER; note = 2'-O-methylguanosine-3'-phosphate
  modified_base 16: mod_base = OTHER; note = 2'-deoxy-2'-fluorouridine-3'-phosphate
  modified_base 17: mod_base = OTHER; note = 2'-O-methyluridine-3'-phosphate
  modified_base 18: mod_base = OTHER; note = 2'-O-methylcytidine-3'-phosphate
  modified_base 19: mod_base = OTHER; note = 2'-O-methyluridine-3'-phosphate
  modified_base 20: mod_base = OTHER; note = 2'-O-methyladenosine-3'-phosphate
  modified_base 21: mod_base = OTHER; note = 2'-O-methyladenosine-3'-phosphorothioate
  modified_base 22: mod_base = OTHER; note = 2'-O-methylguanosine-3'-phosphorothioate
  modified_base 23: mod_base = OTHER; note = 2'-O-methylguanosine
ttcagtagaagaatgttctaagg

SEQ ID NO: 12635 - RNA, 23 nt, synthetic construct
  source 1..23: mol_type = other RNA
  modified_base 1: mod_base = OTHER; note = 2'-O-methyluridine-3'-phosphorothioate 5'-(E)-Vinylphosphonate
  modified_base 2: mod_base = OTHER; note = 2'-deoxy-2'-fluorouridine-3'-phosphorothioate
  modified_base 3: mod_base = OTHER; note = 2'-O-methyluridine-3'-phosphate
  modified_base 4: mod_base = OTHER; note = 2'-O-methylguanosine-3'-phosphate
  modified_base 5: mod_base = OTHER; note = 2'-O-methylguanosine-3'-phosphate
  modified_base 6: mod_base = OTHER; note = 2'-deoxy-2'-fluoroadenosine-3'-phosphate
  modified_base 7: mod_base = OTHER; note = 2'-O-methyluridine-3'-phosphate
  modified_base 8: mod_base = OTHER; note = 2'-O-methylcytidine-3'-phosphate
  modified_base 9: mod_base = OTHER; note = 2'-O-methyladenosine-3'-phosphate
  modified_base 10: mod_base = OTHER; note = 2'-O-methyluridine-3'-phosphate
  modified_base 11: mod_base = OTHER; note = 2'-O-methylcytidine-3'-phosphate
  modified_base 12: mod_base = OTHER; note = 2'-O-methyluridine-3'-phosphate
  modified_base 13: mod_base = OTHER; note = 2'-O-methylcytidine-3'-phosphate
  modified_base 14: mod_base = OTHER; note = 2'-deoxy-2'-fluoroadenosine-3'-phosphate
  modified_base 15: mod_base = OTHER; note = 2'-O-methylguanosine-3'-phosphate
  modified_base 16: mod_base = OTHER; note = 2'-deoxy-2'-fluorouridine-3'-phosphate
  modified_base 17: mod_base = OTHER; note = 2'-O-methyladenosine-3'-phosphate
  modified_base 18: mod_base = OTHER; note = 2'-O-methylguanosine-3'-phosphate
  modified_base 19: mod_base = OTHER; note = 2'-O-methyladenosine-3'-phosphate
  modified_base 20: mod_base = OTHER; note = 2'-O-methyladenosine-3'-phosphate
  modified_base 21: mod_base = OTHER; note = 2'-O-methylguanosine-3'-phosphorothioate
  modified_base 22: mod_base = OTHER; note = 2'-O-methyladenosine-3'-phosphorothioate
  modified_base 23: mod_base = OTHER; note = 2'-O-methyladenosine
tttggatcatctcagtagaagaa

SEQ ID NO: 12636 - RNA, 23 nt, synthetic construct
  source 1..23: mol_type = other RNA
  modified_base 1: mod_base = OTHER; note = 2'-O-methyluridine-3'-phosphorothioate 5'-(E)-Vinylphosphonate
  modified_base 2: mod_base = OTHER; note = 2'-deoxy-2'-fluorouridine-3'-phosphorothioate
  modified_base 3: mod_base = OTHER; note = 2'-O-methyladenosine-3'-phosphate
  modified_base 4: mod_base = OTHER; note = 2'-O-methyluridine-3'-phosphate
  modified_base 5: mod_base = OTHER; note = 2'-O-methylcytidine-3'-phosphate
  modified_base 6: mod_base = OTHER; note = 2'-deoxy-2'-fluoroadenosine-3'-phosphate
  modified_base 7: mod_base = OTHER; note = 2'-O-methylcytidine-3'-phosphate
  modified_base 8: mod_base = OTHER; note = 2'-O-methyluridine-3'-phosphate
  modified_base 9: mod_base = OTHER; note = 2'-O-methyluridine-3'-phosphate
  modified_base 10: mod_base = OTHER; note = 2'-O-methyluridine-3'-phosphate
  modified_base 11: mod_base = OTHER; note = 2'-O-methyladenosine-3'-phosphate
  modified_base 12: mod_base = OTHER; note = 2'-O-methyluridine-3'-phosphate
  modified_base 13: mod_base = OTHER; note = 2'-O-methyladenosine-3'-phosphate
  modified_base 14: mod_base = OTHER; note = 2'-deoxy-2'-fluoroadenosine-3'-phosphate
  modified_base 15: mod_base = OTHER; note = 2'-O-methylguanosine-3'-phosphate
  modified_base 16: mod_base = OTHER; note = 2'-deoxy-2'-fluorocytidine-3'-phosphate
  modified_base 17: mod_base = OTHER; note = 2'-O-methyladenosine-3'-phosphate
  modified_base 18: mod_base = OTHER; note = 2'-O-methyladenosine-3'-phosphate
  modified_base 19: mod_base = OTHER; note = 2'-O-methylguanosine-3'-phosphate
  modified_base 20: mod_base = OTHER; note = 2'-O-methyluridine-3'-phosphate
  modified_base 21: mod_base = OTHER; note = 2'-O-methyladenosine-3'-phosphorothioate
  modified_base 22: mod_base = OTHER; note = 2'-O-methylcytidine-3'-phosphorothioate
  modified_base 23: mod_base = OTHER; note = 2'-O-methylcytidine
ttatcactttataagcaagtacc

SEQ ID NO: 12637 - RNA, 23 nt, synthetic construct
  source 1..23: mol_type = other RNA
  modified_base 1: mod_base = OTHER; note = 2'-O-methyluridine-3'-phosphorothioate 5'-(E)-Vinylphosphonate
  modified_base 2: mod_base = OTHER; note = 2'-deoxy-2'-fluorocytidine-3'-phosphorothioate
  modified_base 3: mod_base = OTHER; note = 2'-O-methyluridine-3'-phosphate
  modified_base 4: mod_base = OTHER; note = 2'-O-methylcytidine-3'-phosphate
  modified_base 5: mod_base = OTHER; note = 2'-O-methyladenosine-3'-phosphate
  modified_base 6: mod_base = OTHER; note = 2'-deoxy-2'-fluoroguanosine-3'-phosphate
  modified_base 7: mod_base = OTHER; note = 2'-O-methyluridine-3'-phosphate
  modified_base 8: mod_base = OTHER; note = 2'-O-methyladenosine-3'-phosphate
  modified_base 9: mod_base = OTHER; note = 2'-O-methylguanosine-3'-phosphate
  modified_base 10: mod_base = OTHER; note = 2'-O-methyladenosine-3'-phosphate
  modified_base 11: mod_base = OTHER; note = 2'-O-methyladenosine-3'-phosphate
  modified_base 12: mod_base = OTHER; note = 2'-O-methylguanosine-3'-phosphate
  modified_base 13: mod_base = OTHER; note = 2'-O-methyladenosine-3'-phosphate
  modified_base 14: mod_base = OTHER; note = 2'-deoxy-2'-fluoroadenosine-3'-phosphate
  modified_base 15: mod_base = OTHER; note = 2'-O-methyluridine-3'-phosphate
  modified_base 16: mod_base = OTHER; note = 2'-deoxy-2'-fluoroguanosine-3'-phosphate
  modified_base 17: mod_base = OTHER; note = 2'-O-methyluridine-3'-phosphate
  modified_base 18: mod_base = OTHER; note = 2'-O-methyluridine-3'-phosphate
  modified_base 19: mod_base = OTHER; note = 2'-O-methylcytidine-3'-phosphate
  modified_base 20: mod_base = OTHER; note = 2'-O-methyluridine-3'-phosphate
  modified_base 21: mod_base = OTHER; note = 2'-O-methyladenosine-3'-phosphorothioate
  modified_base 22: mod_base = OTHER; note = 2'-O-methyladenosine-3'-phosphorothioate
  modified_base 23: mod_base = OTHER; note = 2'-O-methylguanosine
tctcagtagaagaatgttctaag

SEQ ID NO: 12638 - RNA, 23 nt, synthetic construct
  source 1..23: mol_type = other RNA
  modified_base 1: mod_base = OTHER; note = 2'-O-methyluridine-3'-phosphorothioate 5'-(E)-Vinylphosphonate
  modified_base 2: mod_base = OTHER; note = 2'-deoxy-2'-fluorouridine-3'-phosphorothioate
  modified_base 3: mod_base = OTHER; note = 2'-O-methylcytidine-3'-phosphate
  modified_base 4: mod_base = OTHER; note = 2'-O-methyluridine-3'-phosphate
  modified_base 5: mod_base = OTHER; note = 2'-O-methylcytidine-3'-phosphate
  modified_base 6: mod_base = OTHER; note = 2'-deoxy-2'-fluoroadenosine-3'-phosphate
  modified_base 7: mod_base = OTHER; note = 2'-O-methylguanosine-3'-phosphate
  modified_base 8: mod_base = OTHER; note = 2'-O-methyluridine-3'-phosphate
  modified_base 9: mod_base = OTHER; note = 2'-O-methyladenosine-3'-phosphate
  modified_base 10: mod_base = OTHER; note = 2'-O-methylguanosine-3'-phosphate
  modified_base 11: mod_base = OTHER; note = 2'-O-methyladenosine-3'-phosphate
  modified_base 12: mod_base = OTHER; note = 2'-O-methyladenosine-3'-phosphate
  modified_base 13: mod_base = OTHER; note = 2'-O-methylguanosine-3'-phosphate
  modified_base 14: mod_base = OTHER; note = 2'-deoxy-2'-fluoroadenosine-3'-phosphate
  modified_base 15: mod_base = OTHER; note = 2'-O-methyladenosine-3'-phosphate
  modified_base 16: mod_base = OTHER; note = 2'-deoxy-2'-fluorouridine-3'-phosphate
  modified_base 17: mod_base = OTHER; note = 2'-O-methylguanosine-3'-phosphate
  modified_base 18: mod_base = OTHER; note = 2'-O-methyluridine-3'-phosphate
  modified_base 19: mod_base = OTHER; note = 2'-O-methyluridine-3'-phosphate
  modified_base 20: mod_base = OTHER; note = 2'-O-methylcytidine-3'-phosphate
  modified_base 21: mod_base = OTHER; note = 2'-O-methyluridine-3'-phosphorothioate
  modified_base 22: mod_base = OTHER; note = 2'-O-methyladenosine-3'-phosphorothioate
  modified_base 23: mod_base = OTHER; note = 2'-O-methyladenosine
ttctcagtagaagaatgttctaa

SEQ ID NO: 12639 - RNA, 23 nt, synthetic construct
  source 1..23: mol_type = other RNA
  modified_base 1: mod_base = OTHER; note = 2'-O-methyluridine-3'-phosphorothioate 5'-(E)-Vinylphosphonate
  modified_base 2: mod_base = OTHER; note = 2'-deoxy-2'-fluoroadenosine-3'-phosphorothioate
  modified_base 3: mod_base = OTHER; note = 2'-O-methyluridine-3'-phosphate
  modified_base 4: mod_base = OTHER; note = 2'-O-methylcytidine-3'-phosphate
  modified_base 5: mod_base = OTHER; note = 2'-O-methyluridine-3'-phosphate
  modified_base 6: mod_base = OTHER; note = 2'-deoxy-2'-fluorocytidine-3'-phosphate
  modified_base 7: mod_base = OTHER; note = 2'-O-methyladenosine-3'-phosphate
  modified_base 8: mod_base = OTHER; note = 2'-O-methylguanosine-3'-phosphate
  modified_base 9: mod_base = OTHER; note = 2'-O-methyluridine-3'-phosphate
  modified_base 10: mod_base = OTHER; note = 2'-O-methyladenosine-3'-phosphate
  modified_base 11: mod_base = OTHER; note = 2'-O-methylguanosine-3'-phosphate
  modified_base 12: mod_base = OTHER; note = 2'-O-methyladenosine-3'-phosphate
  modified_base 13: mod_base = OTHER; note = 2'-O-methyladenosine-3'-phosphate
  modified_base 14: mod_base = OTHER; note = 2'-deoxy-2'-fluoroguanosine-3'-phosphate
  modified_base 15: mod_base = OTHER; note = 2'-O-methyladenosine-3'-phosphate
  modified_base 16: mod_base = OTHER; note = 2'-deoxy-2'-fluoroadenosine-3'-phosphate
  modified_base 17: mod_base = OTHER; note = 2'-O-methyluridine-3'-phosphate
  modified_base 18: mod_base = OTHER; note = 2'-O-methylguanosine-3'-phosphate
  modified_base 19: mod_base = OTHER; note = 2'-O-methyluridine-3'-phosphate
  modified_base 20: mod_base = OTHER; note = 2'-O-methyluridine-3'-phosphate
  modified_base 21: mod_base = OTHER; note = 2'-O-methylcytidine-3'-phosphorothioate
  modified_base 22: mod_base = OTHER; note = 2'-O-methyluridine-3'-phosphorothioate
  modified_base 23: mod_base = OTHER; note = 2'-O-methyladenosine
tatctcagtagaagaatgttcta

SEQ ID NO: 12640 - RNA, 23 nt, synthetic construct
  source 1..23: mol_type = other RNA
  modified_base 1: mod_base = OTHER; note = 2'-O-methyluridine-3'-phosphorothioate 5'-(E)-Vinylphosphonate
  modified_base 2: mod_base = OTHER; note = 2'-deoxy-2'-fluoroadenosine-3'-phosphorothioate
  modified_base 3: mod_base = OTHER; note = 2'-O-methyluridine-3'-phosphate
  modified_base 4: mod_base = OTHER; note = 2'-O-methylcytidine-3'-phosphate
  modified_base 5: mod_base = OTHER; note = 2'-O-methyladenosine-3'-phosphate
  modified_base 6: mod_base = OTHER; note = 2'-deoxy-2'-fluorouridine-3'-phosphate
  modified_base 7: mod_base = OTHER; note = 2'-O-methylcytidine-3'-phosphate
  modified_base 8: mod_base = OTHER; note = 2'-O-methyluridine-3'-phosphate
  modified_base 9: mod_base = OTHER; note = 2'-O-methylcytidine-3'-phosphate
  modified_base 10: mod_base = OTHER; note = 2'-O-methyladenosine-3'-phosphate
  modified_base 11: mod_base = OTHER; note = 2'-O-methylguanosine-3'-phosphate
  modified_base 12: mod_base = OTHER; note = 2'-O-methyluridine-3'-phosphate
  modified_base 13: mod_base = OTHER; note = 2'-O-methyladenosine-3'-phosphate
  modified_base 14: mod_base = OTHER; note = 2'-deoxy-2'-fluoroguanosine-3'-phosphate
  modified_base 15: mod_base = OTHER; note = 2'-O-methyladenosine-3'-phosphate
  modified_base 16: mod_base = OTHER; note = 2'-deoxy-2'-fluoroadenosine-3'-phosphate
  modified_base 17: mod_base = OTHER; note = 2'-O-methylguanosine-3'-phosphate
  modified_base 18: mod_base = OTHER; note = 2'-O-methyladenosine-3'-phosphate
  modified_base 19: mod_base = OTHER; note = 2'-O-methyladenosine-3'-phosphate
  modified_base 20: mod_base = OTHER; note = 2'-O-methyluridine-3'-phosphate
  modified_base 21: mod_base = OTHER; note = 2'-O-methylguanosine-3'-phosphorothioate
  modified_base 22: mod_base = OTHER; note = 2'-O-methyluridine-3'-phosphorothioate
  modified_base 23: mod_base = OTHER; note = 2'-O-methyluridine
tatcatctcagtagaagaatgtt

SEQ ID NO: 12641 - RNA, 23 nt, synthetic construct
  source 1..23: mol_type = other RNA
  modified_base 1: mod_base = OTHER; note = 2'-O-methyluridine-3'-phosphorothioate 5'-(E)-Vinylphosphonate
  modified_base 2: mod_base = OTHER; note = 2'-deoxy-2'-fluoroguanosine-3'-phosphorothioate
  modified_base 3: mod_base = OTHER; note = 2'-O-methyladenosine-3'-phosphate
  modified_base 4: mod_base = OTHER; note = 2'-O-methyluridine-3'-phosphate
  modified_base 5: mod_base = OTHER; note = 2'-O-methylcytidine-3'-phosphate
  modified_base 6: mod_base = OTHER; note = 2'-deoxy-2'-fluoroadenosine-3'-phosphate
  modified_base 7: mod_base = OTHER; note = 2'-O-methyluridine-3'-phosphate
  modified_base 8: mod_base = OTHER; note = 2'-O-methylcytidine-3'-phosphate
  modified_base 9: mod_base = OTHER; note = 2'-O-methyluridine-3'-phosphate
  modified_base 10: mod_base = OTHER; note = 2'-O-methylcytidine-3'-phosphate
  modified_base 11: mod_base = OTHER; note = 2'-O-methyladenosine-3'-phosphate
  modified_base 12: mod_base = OTHER; note = 2'-O-methylguanosine-3'-phosphate
  modified_base 13: mod_base = OTHER; note = 2'-O-methyluridine-3'-phosphate
  modified_base 14: mod_base = OTHER; note = 2'-deoxy-2'-fluoroadenosine-3'-phosphate
  modified_base 15: mod_base = OTHER; note = 2'-O-methylguanosine-3'-phosphate
  modified_base 16: mod_base = OTHER; note = 2'-deoxy-2'-fluoroadenosine-3'-phosphate
  modified_base 17: mod_base = OTHER; note = 2'-O-methyladenosine-3'-phosphate
  modified_base 18: mod_base = OTHER; note = 2'-O-methylguanosine-3'-phosphate
  modified_base 19: mod_base = OTHER; note = 2'-O-methyladenosine-3'-phosphate
  modified_base 20: mod_base = OTHER; note = 2'-O-methyladenosine-3'-phosphate
  modified_base 21: mod_base = OTHER; note = 2'-O-methyluridine-3'-phosphorothioate
  modified_base 22: mod_base = OTHER; note = 2'-O-methylguanosine-3'-phosphorothioate
  modified_base 23: mod_base = OTHER; note = 2'-O-methyluridine
tgatcatctcagtagaagaatgt

SEQ ID NO: 12642 - RNA, 23 nt, synthetic construct
  source 1..23: mol_type = other RNA
  modified_base 1: mod_base = OTHER; note = 2'-O-methyluridine-3'-phosphorothioate 5'-(E)-Vinylphosphonate
  modified_base 2: mod_base = OTHER; note = 2'-deoxy-2'-fluoroguanosine-3'-phosphorothioate
  modified_base 3: mod_base = OTHER; note = 2'-O-methylguanosine-3'-phosphate
  modified_base 4: mod_base = OTHER; note = 2'-O-methyladenosine-3'-phosphate
  modified_base 5: mod_base = OTHER; note = 2'-O-methyluridine-3'-phosphate
  modified_base 6: mod_base = OTHER; note = 2'-deoxy-2'-fluorocytidine-3'-phosphate
  modified_base 7: mod_base = OTHER; note = 2'-O-methyladenosine-3'-phosphate
  modified_base 8: mod_base = OTHER; note = 2'-O-methyluridine-3'-phosphate
  modified_base 9: mod_base = OTHER; note = 2'-O-methylcytidine-3'-phosphate
  modified_base 10: mod_base = OTHER; note = 2'-O-methyluridine-3'-phosphate
  modified_base 11: mod_base = OTHER; note = 2'-O-methylcytidine-3'-phosphate
  modified_base 12: mod_base = OTHER; note = 2'-O-methyladenosine-3'-phosphate
  modified_base 13: mod_base = OTHER; note = 2'-O-methylguanosine-3'-phosphate
  modified_base 14: mod_base = OTHER; note = 2'-deoxy-2'-fluorouridine-3'-phosphate
  modified_base 15: mod_base = OTHER; note = 2'-O-methyladenosine-3'-phosphate
  modified_base 16: mod_base = OTHER; note = 2'-deoxy-2'-fluoroguanosine-3'-phosphate
  modified_base 17: mod_base = OTHER; note = 2'-O-methyladenosine-3'-phosphate
  modified_base 18: mod_base = OTHER; note = 2'-O-methyladenosine-3'-phosphate
  modified_base 19: mod_base = OTHER; note = 2'-O-methylguanosine-3'-phosphate
  modified_base 20: mod_base = OTHER; note = 2'-O-methyladenosine-3'-phosphate
  modified_base 21: mod_base = OTHER; note = 2'-O-methyladenosine-3'-phosphorothioate
  modified_base 22: mod_base = OTHER; note = 2'-O-methyluridine-3'-phosphorothioate
  modified_base 23: mod_base = OTHER; note = 2'-O-methylguanosine
tggatcatctcagtagaagaatg

SEQ ID NO: 12643 - RNA, 23 nt, synthetic construct
  source 1..23: mol_type = other RNA
  modified_base 1: mod_base = OTHER; note = 2'-O-methyluridine-3'-phosphorothioate 5'-(E)-Vinylphosphonate
  modified_base 2: mod_base = OTHER; note = 2'-deoxy-2'-fluorouridine-3'-phosphorothioate
  modified_base 3: mod_base = OTHER; note = 2'-O-methylguanosine-3'-phosphate
  modified_base 4: mod_base = OTHER; note = 2'-O-methylguanosine-3'-phosphate
  modified_base 5: mod_base = OTHER; note = 2'-O-methyladenosine-3'-phosphate
  modified_base 6: mod_base = OTHER; note = 2'-deoxy-2'-fluorouridine-3'-phosphate
  modified_base 7: mod_base = OTHER; note = 2'-O-methylcytidine-3'-phosphate
  modified_base 8: mod_base = OTHER; note = 2'-O-methyladenosine-3'-phosphate
  modified_base 9: mod_base = OTHER; note = 2'-O-methyluridine-3'-phosphate
  modified_base 10: mod_base = OTHER; note = 2'-O-methylcytidine-3'-phosphate
  modified_base 11: mod_base = OTHER; note = 2'-O-methyluridine-3'-phosphate
  modified_base 12: mod_base = OTHER; note = 2'-O-methylcytidine-3'-phosphate
  modified_base 13: mod_base = OTHER; note = 2'-O-methyladenosine-3'-phosphate
  modified_base 14: mod_base = OTHER; note = 2'-deoxy-2'-fluoroguanosine-3'-phosphate
  modified_base 15: mod_base = OTHER; note = 2'-O-methyluridine-3'-phosphate
  modified_base 16: mod_base = OTHER; note = 2'-deoxy-2'-fluoroadenosine-3'-phosphate
  modified_base 17: mod_base = OTHER; note = 2'-O-methylguanosine-3'-phosphate
  modified_base 18: mod_base = OTHER; note = 2'-O-methyladenosine-3'-phosphate
  modified_base 19: mod_base = OTHER; note = 2'-O-methyladenosine-3'-phosphate
  modified_base 20: mod_base = OTHER; note = 2'-O-methylguanosine-3'-phosphate
  modified_base 21: mod_base = OTHER; note = 2'-O-methyladenosine-3'-phosphorothioate
  modified_base 22: mod_base = OTHER; note = 2'-O-methyladenosine-3'-phosphorothioate
  modified_base 23: mod_base = OTHER; note = 2'-O-methyluridine
ttggatcatctcagtagaagaat

SEQ ID NO: 12644 - RNA, 23 nt, synthetic construct
  source 1..23: mol_type = other RNA
  modified_base 1: mod_base = OTHER; note = 2'-O-methyluridine-3'-phosphorothioate 5'-(E)-Vinylphosphonate
  modified_base 2: mod_base = OTHER; note = 2'-deoxy-2'-fluorocytidine-3'-phosphorothioate
  modified_base 3: mod_base = OTHER; note = 2'-O-methyluridine-3'-phosphate
  modified_base 4: mod_base = OTHER; note = 2'-O-methyluridine-3'-phosphate
  modified_base 5: mod_base = OTHER; note = 2'-O-methylguanosine-3'-phosphate
  modified_base 6: mod_base = OTHER; note = 2'-deoxy-2'-fluoroguanosine-3'-phosphate
  modified_base 7: mod_base = OTHER; note = 2'-O-methyladenosine-3'-phosphate
  modified_base 8: mod_base = OTHER; note = 2'-O-methyluridine-3'-phosphate
  modified_base 9: mod_base = OTHER; note = 2'-O-methylcytidine-3'-phosphate
  modified_base 10: mod_base = OTHER; note = 2'-O-methyladenosine-3'-phosphate
  modified_base 11: mod_base = OTHER; note = 2'-O-methyluridine-3'-phosphate
  modified_base 12: mod_base = OTHER; note = 2'-O-methylcytidine-3'-phosphate
  modified_base 13: mod_base = OTHER; note = 2'-O-methyluridine-3'-phosphate
  modified_base 14: mod_base = OTHER; note = 2'-deoxy-2'-fluorocytidine-3'-phosphate
  modified_base 15: mod_base = OTHER; note = 2'-O-methyladenosine-3'-phosphate
  modified_base 16: mod_base = OTHER; note = 2'-deoxy-2'-fluoroguanosine-3'-phosphate
  modified_base 17: mod_base = OTHER; note = 2'-O-methyluridine-3'-phosphate
  modified_base 18: mod_base = OTHER; note = 2'-O-methyladenosine-3'-phosphate
  modified_base 19: mod_base = OTHER; note = 2'-O-methylguanosine-3'-phosphate
  modified_base 20: mod_base = OTHER; note = 2'-O-methyladenosine-3'-phosphate
  modified_base 21: mod_base = OTHER; note = 2'-O-methyladenosine-3'-phosphorothioate
  modified_base 22: mod_base = OTHER; note = 2'-O-methylguanosine-3'-phosphorothioate
  modified_base 23: mod_base = OTHER; note = 2'-O-methyladenosine
tcttggatcatctcagtagaaga

SEQ ID NO: 12645 - RNA, 23 nt, synthetic construct
  source 1..23: mol_type = other RNA
  modified_base 1: mod_base = OTHER; note = 2'-O-methyluridine-3'-phosphorothioate 5'-(E)-Vinylphosphonate
  modified_base 2: mod_base = OTHER; note = 2'-deoxy-2'-fluorouridine-3'-phosphorothioate
  modified_base 3: mod_base = OTHER; note = 2'-O-methylcytidine-3'-phosphate
  modified_base 4: mod_base = OTHER; note = 2'-O-methyluridine-3'-phosphate
  modified_base 5: mod_base = OTHER; note = 2'-O-methyluridine-3'-phosphate
  modified_base 6: mod_base = OTHER; note = 2'-deoxy-2'-fluoroguanosine-3'-phosphate
  modified_base 7: mod_base = OTHER; note = 2'-O-methylguanosine-3'-phosphate
  modified_base 8: mod_base = OTHER; note = 2'-O-methyladenosine-3'-phosphate
  modified_base 9: mod_base = OTHER; note = 2'-O-methyluridine-3'-phosphate
  modified_base 10: mod_base = OTHER; note = 2'-O-methylcytidine-3'-phosphate
  modified_base 11: mod_base = OTHER; note = 2'-O-methyladenosine-3'-phosphate
  modified_base 12: mod_base = OTHER; note = 2'-O-methyluridine-3'-phosphate
  modified_base 13: mod_base = OTHER; note = 2'-O-methylcytidine-3'-phosphate
  modified_base 14: mod_base = OTHER; note = 2'-deoxy-2'-fluorouridine-3'-phosphate
  modified_base 15: mod_base = OTHER; note = 2'-O-methylcytidine-3'-phosphate
  modified_base 16: mod_base = OTHER; note = 2'-deoxy-2'-fluoroadenosine-3'-phosphate
  modified_base 17: mod_base = OTHER; note = 2'-O-methylguanosine-3'-phosphate
  modified_base 18: mod_base = OTHER; note = 2'-O-methyluridine-3'-phosphate
  modified_base 19: mod_base = OTHER; note = 2'-O-methyladenosine-3'-phosphate
  modified_base 20: mod_base = OTHER; note = 2'-O-methylguanosine-3'-phosphate
  modified_base 21: mod_base = OTHER; note = 2'-O-methyladenosine-3'-phosphorothioate
  modified_base 22: mod_base = OTHER; note = 2'-O-methyladenosine-3'-phosphorothioate
  modified_base 23: mod_base = OTHER; note = 2'-O-methylguanosine
ttcttggatcatctcagtagaag

SEQ ID NO: 12646 - RNA, 23 nt, synthetic construct
  source 1..23: mol_type = other RNA
  modified_base 1: mod_base = OTHER; note = 2'-O-methyluridine-3'-phosphorothioate 5'-(E)-Vinylphosphonate
  modified_base 2: mod_base = OTHER; note = 2'-deoxy-2'-fluoroguanosine-3'-phosphorothioate
  modified_base 3: mod_base = OTHER; note = 2'-O-methyluridine-3'-phosphate
  modified_base 4: mod_base = OTHER; note = 2'-O-methylcytidine-3'-phosphate
  modified_base 5: mod_base = OTHER; note = 2'-O-methyluridine-3'-phosphate
  modified_base 6: mod_base = OTHER; note = 2'-deoxy-2'-fluorouridine-3'-phosphate
  modified_base 7: mod_base = OTHER; note = 2'-O-methylguanosine-3'-phosphate
  modified_base 8: mod_base = OTHER; note = 2'-O-methylguanosine-3'-phosphate
  modified_base 9: mod_base = OTHER; note = 2'-O-methyladenosine-3'-phosphate
  modified_base 10: mod_base = OTHER; note = 2'-O-methyluridine-3'-phosphate
  modified_base 11: mod_base = OTHER; note = 2'-O-methylcytidine-3'-phosphate
  modified_base 12: mod_base = OTHER; note = 2'-O-methyladenosine-3'-phosphate
  modified_base 13: mod_base = OTHER; note = 2'-O-methyluridine-3'-phosphate
  modified_base 14: mod_base = OTHER; note = 2'-deoxy-2'-fluorocytidine-3'-phosphate
  modified_base 15: mod_base = OTHER; note = 2'-O-methyluridine-3'-phosphate
  modified_base 16: mod_base = OTHER; note = 2'-deoxy-2'-fluorocytidine-3'-phosphate
  modified_base 17: mod_base = OTHER; note = 2'-O-methyladenosine-3'-phosphate
  modified_base 18: mod_base = OTHER; note = 2'-O-methylguanosine-3'-phosphate
  modified_base 19: mod_base = OTHER; note = 2'-O-methyluridine-3'-phosphate
  modified_base 20: mod_base = OTHER; note = 2'-O-methyladenosine-3'-phosphate
  modified_base 21: mod_base = OTHER; note = 2'-O-methylguanosine-3'-phosphorothioate
  modified_base 22: mod_base = OTHER; note = 2'-O-methyladenosine-3'-phosphorothioate
  modified_base 23: mod_base = OTHER; note = 2'-O-methyladenosine
tgtcttggatcatctcagtagaa

SEQ ID NO: 12647 - RNA, 23 nt, synthetic construct
  source 1..23: mol_type = other RNA
  modified_base 1: mod_base = OTHER; note = 2'-O-methyluridine-3'-phosphorothioate 5'-(E)-Vinylphosphonate
  modified_base 2: mod_base = OTHER; note = 2'-deoxy-2'-fluoroguanosine-3'-phosphorothioate
  modified_base 3: mod_base = OTHER; note = 2'-O-methylguanosine-3'-phosphate
  modified_base 4: mod_base = OTHER; note = 2'-O-methyluridine-3'-phosphate
  modified_base 5: mod_base = OTHER; note = 2'-O-methylcytidine-3'-phosphate
  modified_base 6: mod_base = OTHER; note = 2'-deoxy-2'-fluorouridine-3'-phosphate
  modified_base 7: mod_base = OTHER; note = 2'-O-methyluridine-3'-phosphate
  modified_base 8: mod_base = OTHER; note = 2'-O-methylguanosine-3'-phosphate
  modified_base 9: mod_base = OTHER; note = 2'-O-methylguanosine-3'-phosphate
  modified_base 10: mod_base = OTHER; note = 2'-O-methyladenosine-3'-phosphate
  modified_base 11: mod_base = OTHER; note = 2'-O-methyluridine-3'-phosphate
  modified_base 12: mod_base = OTHER; note = 2'-O-methylcytidine-3'-phosphate
  modified_base 13: mod_base = OTHER; note = 2'-O-methyladenosine-3'-phosphate
  modified_base 14: mod_base = OTHER; note = 2'-deoxy-2'-fluorouridine-3'-phosphate
  modified_base 15: mod_base = OTHER; note = 2'-O-methylcytidine-3'-phosphate
  modified_base 16: mod_base = OTHER; note = 2'-deoxy-2'-fluorouridine-3'-phosphate
  modified_base 17: mod_base = OTHER; note = 2'-O-methylcytidine-3'-phosphate
  modified_base 18: mod_base = OTHER; note = 2'-O-methyladenosine-3'-phosphate
  modified_base 19: mod_base = OTHER; note = 2'-O-methylguanosine-3'-phosphate
  modified_base 20: mod_base = OTHER; note = 2'-O-methyluridine-3'-phosphate
  modified_base 21: mod_base = OTHER; note = 2'-O-methyladenosine-3'-phosphorothioate
  modified_base 22: mod_base = OTHER; note = 2'-O-methylguanosine-3'-phosphorothioate
  modified_base 23: mod_base = OTHER; note = 2'-O-methyladenosine
tggtcttggatcatctcagtaga

SEQ ID NO: 12648 - RNA, 23 nt, synthetic construct
  source 1..23: mol_type = other RNA
  modified_base 1: mod_base = OTHER; note = 2'-O-methyluridine-3'-phosphorothioate 5'-(E)-Vinylphosphonate
  modified_base 2: mod_base = OTHER; note = 2'-deoxy-2'-fluorouridine-3'-phosphorothioate
  modified_base 3: mod_base = OTHER; note = 2'-O-methylguanosine-3'-phosphate
  modified_base 4: mod_base = OTHER; note = 2'-O-methylguanosine-3'-phosphate
  modified_base 5: mod_base = OTHER; note = 2'-O-methyluridine-3'-phosphate
  modified_base 6: mod_base = OTHER; note = 2'-deoxy-2'-fluorocytidine-3'-phosphate
  modified_base 7: mod_base = OTHER; note = 2'-O-methyluridine-3'-phosphate
  modified_base 8: mod_base = OTHER; note = 2'-O-methyluridine-3'-phosphate
  modified_base 9: mod_base = OTHER; note = 2'-O-methylguanosine-3'-phosphate
  modified_base 10: mod_base = OTHER; note = 2'-O-methylguanosine-3'-phosphate
  modified_base 11: mod_base = OTHER; note = 2'-O-methyladenosine-3'-phosphate
  modified_base 12: mod_base = OTHER; note = 2'-O-methyluridine-3'-phosphate
  modified_base 13: mod_base = OTHER; note = 2'-O-methylcytidine-3'-phosphate
  modified_base 14: mod_base = OTHER; note = 2'-deoxy-2'-fluoroadenosine-3'-phosphate
  modified_base 15: mod_base = OTHER; note = 2'-O-methyluridine-3'-phosphate
  modified_base 16: mod_base = OTHER; note = 2'-deoxy-2'-fluorocytidine-3'-phosphate
  modified_base 17: mod_base = OTHER; note = 2'-O-methyluridine-3'-phosphate
  modified_base 18: mod_base = OTHER; note = 2'-O-methylcytidine-3'-phosphate
  modified_base 19: mod_base = OTHER; note = 2'-O-methyladenosine-3'-phosphate
  modified_base 20: mod_base = OTHER; note = 2'-O-methylguanosine-3'-phosphate
  modified_base 21: mod_base = OTHER; note = 2'-O-methyluridine-3'-phosphorothioate
  modified_base 22: mod_base = OTHER; note = 2'-O-methyladenosine-3'-phosphorothioate
  modified_base 23: mod_base = OTHER; note = 2'-O-methylguanosine
ttggtcttggatcatctcagtag

SEQ ID NO: 12649 - RNA, 23 nt, synthetic construct
  source 1..23: mol_type = other RNA
  modified_base 1: mod_base = OTHER; note = 2'-O-methyluridine-3'-phosphorothioate 5'-(E)-Vinylphosphonate
  modified_base 2: mod_base = OTHER; note = 2'-deoxy-2'-fluorouridine-3'-phosphorothioate
  modified_base 3: mod_base = OTHER; note = 2'-O-methyluridine-3'-phosphate
  modified_base 4: mod_base = OTHER; note = 2'-O-methylguanosine-3'-phosphate
  modified_base 5: mod_base = OTHER; note = 2'-O-methylguanosine-3'-phosphate
  modified_base 6: mod_base = OTHER; note = 2'-deoxy-2'-fluorouridine-3'-phosphate
  modified_base 7: mod_base = OTHER; note = 2'-O-methylcytidine-3'-phosphate
  modified_base 8: mod_base = OTHER; note = 2'-O-methyluridine-3'-phosphate
  modified_base 9: mod_base = OTHER; note = 2'-O-methyluridine-3'-phosphate
  modified_base 10: mod_base = OTHER; note = 2'-O-methylguanosine-3'-phosphate
  modified_base 11: mod_base = OTHER; note = 2'-O-methylguanosine-3'-phosphate
  modified_base 12: mod_base = OTHER; note = 2'-O-methyladenosine-3'-phosphate
  modified_base 13: mod_base = OTHER; note = 2'-O-methyluridine-3'-phosphate
  modified_base 14: mod_base = OTHER; note = 2'-deoxy-2'-fluorocytidine-3'-phosphate
  modified_base 15: mod_base = OTHER; note = 2'-O-methyladenosine-3'-phosphate
  modified_base 16: mod_base = OTHER; note = 2'-deoxy-2'-fluorouridine-3'-phosphate
  modified_base 17: mod_base = OTHER; note = 2'-O-methylcytidine-3'-phosphate
  modified_base 18: mod_base = OTHER; note = 2'-O-methyluridine-3'-phosphate
  modified_base 19: mod_base = OTHER; note = 2'-O-methylcytidine-3'-phosphate
  modified_base 20: mod_base = OTHER; note = 2'-O-methyladenosine-3'-phosphate
  modified_base 21: mod_base = OTHER; note = 2'-O-methylguanosine-3'-phosphorothioate
  modified_base 22: mod_base = OTHER; note = 2'-O-methyluridine-3'-phosphorothioate
  modified_base 23: mod_base = OTHER; note = 2'-O-methyladenosine
tttggtcttggatcatctcagta

SEQ ID NO: 12650 - RNA, 23 nt, synthetic construct
  source 1..23: mol_type = other RNA
  modified_base 1: mod_base = OTHER; note = 2'-O-methyluridine-3'-phosphorothioate 5'-(E)-Vinylphosphonate
  modified_base 2: mod_base = OTHER; note = 2'-deoxy-2'-fluoroadenosine-3'-phosphorothioate
  modified_base 3: mod_base = OTHER; note = 2'-O-methyladenosine-3'-phosphate
  modified_base 4: mod_base = OTHER; note = 2'-O-methylguanosine-3'-phosphate
  modified_base 5: mod_base = OTHER; note = 2'-O-methyladenosine-3'-phosphate
  modified_base 6: mod_base = OTHER; note = 2'-deoxy-2'-fluoroadenosine-3'-phosphate
  modified_base 7: mod_base = OTHER; note = 2'-O-methylcytidine-3'-phosphate
  modified_base 8: mod_base = OTHER; note = 2'-O-methyladenosine-3'-phosphate
  modified_base 9: mod_base = OTHER; note = 2'-O-methylcytidine-3'-phosphate
  modified_base 10: mod_base = OTHER; note = 2'-O-methyluridine-3'-phosphate
  modified_base 11: mod_base = OTHER; note = 2'-O-methyluridine-3'-phosphate
  modified_base 12: mod_base = OTHER; note = 2'-O-methyluridine-3'-phosphate
  modified_base 13: mod_base = OTHER; note = 2'-O-methyluridine-3'-phosphate
  modified_base 14: mod_base = OTHER; note = 2'-deoxy-2'-fluoroguanosine-3'-phosphate
  modified_base 15: mod_base = OTHER; note = 2'-O-methylguanosine-3'-phosphate
  modified_base 16: mod_base = OTHER; note = 2'-deoxy-2'-fluorouridine-3'-phosphate
  modified_base 17: mod_base = OTHER; note = 2'-O-methylcytidine-3'-phosphate
  modified_base 18: mod_base = OTHER; note = 2'-O-methyluridine-3'-phosphate
  modified_base 19: mod_base = OTHER; note = 2'-O-methyluridine-3'-phosphate
  modified_base 20: mod_base = OTHER; note = 2'-O-methylguanosine-3'-phosphate
  modified_base 21: mod_base = OTHER; note = 2'-O-methylguanosine-3'-phosphorothioate
  modified_base 22: mod_base = OTHER; note = 2'-O-methyladenosine-3'-phosphorothioate
  modified_base 23: mod_base = OTHER; note = 2'-O-methyluridine
taagaacacttttggtcttggat

SEQ ID NO: 12651 - RNA, 23 nt, synthetic construct
  source 1..23: mol_type = other RNA
  modified_base 1: mod_base = OTHER; note = 2'-O-methyluridine-3'-phosphorothioate 5'-(E)-Vinylphosphonate
  modified_base 2: mod_base = OTHER; note = 2'-deoxy-2'-fluoroadenosine-3'-phosphorothioate
  modified_base 3: mod_base = OTHER; note = 2'-O-methyladenosine-3'-phosphate
  modified_base 4: mod_base = OTHER; note = 2'-O-methyladenosine-3'-phosphate
  modified_base 5: mod_base = OTHER; note = 2'-O-methylguanosine-3'-phosphate
  modified_base 6: mod_base = OTHER; note = 2'-deoxy-2'-fluoroadenosine-3'-phosphate
  modified_base 7: mod_base = OTHER; note = 2'-O-methyladenosine-3'-phosphate
  modified_base 8: mod_base = OTHER; note = 2'-O-methylcytidine-3'-phosphate
  modified_base 9: mod_base = OTHER; note = 2'-O-methyladenosine-3'-phosphate
  modified_base 10: mod_base = OTHER; note = 2'-O-methylcytidine-3'-phosphate
  modified_base 11: mod_base = OTHER; note = 2'-O-methyluridine-3'-phosphate
  modified_base 12: mod_base = OTHER; note = 2'-O-methyluridine-3'-phosphate
  modified_base 13: mod_base = OTHER; note = 2'-O-methyluridine-3'-phosphate
  modified_base 14: mod_base = OTHER; note = 2'-deoxy-2'-fluorouridine-3'-phosphate
  modified_base 15: mod_base = OTHER; note = 2'-O-methylguanosine-3'-phosphate
  modified_base 16: mod_base = OTHER; note = 2'-deoxy-2'-fluoroguanosine-3'-phosphate
  modified_base 17: mod_base = OTHER; note = 2'-O-methyluridine-3'-phosphate
  modified_base 18: mod_base = OTHER; note = 2'-O-methylcytidine-3'-phosphate
  modified_base 19: mod_base = OTHER; note = 2'-O-methyluridine-3'-phosphate
  modified_base 20: mod_base = OTHER; note = 2'-O-methyluridine-3'-phosphate
  modified_base 21: mod_base = OTHER; note = 2'-O-methylguanosine-3'-phosphorothioate
  modified_base 22: mod_base = OTHER; note = 2'-O-methylguanosine-3'-phosphorothioate
  modified_base 23: mod_base = OTHER; note = 2'-O-methyladenosine
taaagaacacttttggtcttgga

SEQ ID NO: 12652 - RNA, 23 nt, synthetic construct
  source 1..23: mol_type = other RNA
  modified_base 1: mod_base = OTHER; note = 2'-O-methyluridine-3'-phosphorothioate 5'-(E)-Vinylphosphonate
  modified_base 2: mod_base = OTHER; note = 2'-deoxy-2'-fluorocytidine-3'-phosphorothioate
  modified_base 3: mod_base = OTHER; note = 2'-O-methyladenosine-3'-phosphate
  modified_base 4: mod_base = OTHER; note = 2'-O-methyladenosine-3'-phosphate
  modified_base 5: mod_base = OTHER; note = 2'-O-methyladenosine-3'-phosphate
  modified_base 6: mod_base = OTHER; note = 2'-deoxy-2'-fluoroguanosine-3'-phosphate
  modified_base 7: mod_base = OTHER; note = 2'-O-methyladenosine-3'-phosphate
  modified_base 8: mod_base = OTHER; note = 2'-O-methyladenosine-3'-phosphate
  modified_base 9: mod_base = OTHER; note = 2'-O-methylcytidine-3'-phosphate
  modified_base 10: mod_base = OTHER; note = 2'-O-methyladenosine-3'-phosphate
  modified_base 11: mod_base = OTHER; note = 2'-O-methylcytidine-3'-phosphate
  modified_base 12: mod_base = OTHER; note = 2'-O-methyluridine-3'-phosphate
  modified_base 13: mod_base = OTHER; note = 2'-O-methyluridine-3'-phosphate
  modified_base 14: mod_base = OTHER; note = 2'-deoxy-2'-fluorouridine-3'-phosphate
  modified_base 15: mod_base = OTHER; note = 2'-O-methyluridine-3'-phosphate
  modified_base 16: mod_base = OTHER; note = 2'-deoxy-2'-fluoroguanosine-3'-phosphate
  modified_base 17: mod_base = OTHER; note = 2'-O-methylguanosine-3'-phosphate
  modified_base 18: mod_base = OTHER; note = 2'-O-methyluridine-3'-phosphate
  modified_base 19: mod_base = OTHER; note = 2'-O-methylcytidine-3'-phosphate
  modified_base 20: mod_base = OTHER; note = 2'-O-methyluridine-3'-phosphate
  modified_base 21: mod_base = OTHER; note = 2'-O-methyluridine-3'-phosphorothioate
  modified_base 22: mod_base = OTHER; note = 2'-O-methylguanosine-3'-phosphorothioate
  modified_base 23: mod_base = OTHER; note = 2'-O-methylguanosine
tcaaagaacacttttggtcttgg

SEQ ID NO: 12653 - RNA, 23 nt, synthetic construct
  source 1..23: mol_type = other RNA
  modified_base 1: mod_base = OTHER; note = 2'-O-methyluridine-3'-phosphorothioate 5'-(E)-Vinylphosphonate
  modified_base 2: mod_base = OTHER; note = 2'-deoxy-2'-fluorocytidine-3'-phosphorothioate
  modified_base 3: mod_base = OTHER; note = 2'-O-methylcytidine-3'-phosphate
  modified_base 4: mod_base = OTHER; note = 2'-O-methyladenosine-3'-phosphate
  modified_base 5: mod_base = OTHER; note = 2'-O-methyladenosine-3'-phosphate
  modified_base 6: mod_base = OTHER; note = 2'-deoxy-2'-fluoroadenosine-3'-phosphate
  modified_base 7: mod_base = OTHER; note = 2'-O-methylguanosine-3'-phosphate
  modified_base 8: mod_base = OTHER; note = 2'-O-methyladenosine-3'-phosphate
  modified_base 9: mod_base = OTHER; note = 2'-O-methyladenosine-3'-phosphate
  modified_base 10: mod_base = OTHER; note = 2'-O-methylcytidine-3'-phosphate
  modified_base 11: mod_base = OTHER; note = 2'-O-methyladenosine-3'-phosphate
  modified_base 12: mod_base = OTHER; note = 2'-O-methylcytidine-3'-phosphate
  modified_base 13: mod_base = OTHER; note = 2'-O-methyluridine-3'-phosphate
  modified_base 14: mod_base = OTHER; note = 2'-deoxy-2'-fluorouridine-3'-phosphate
  modified_base 15: mod_base = OTHER; note = 2'-O-methyluridine-3'-phosphate
  modified_base 16: mod_base = OTHER; note = 2'-deoxy-2'-fluorouridine-3'-phosphate
  modified_base 17: mod_base = OTHER; note = 2'-O-methylguanosine-3'-phosphate
  modified_base 18: mod_base = OTHER; note = 2'-O-methylguanosine-3'-phosphate
  modified_base 19: mod_base = OTHER; note = 2'-O-methyluridine-3'-phosphate
  modified_base 20: mod_base = OTHER; note = 2'-O-methylcytidine-3'-phosphate
  modified_base 21: mod_base = OTHER; note = 2'-O-methyluridine-3'-phosphorothioate
  modified_base 22: mod_base = OTHER; note = 2'-O-methyluridine-3'-phosphorothioate
  modified_base 23: mod_base = OTHER; note = 2'-O-methylguanosine
tccaaagaacacttttggtcttg

SEQ ID NO: 12654 - RNA, 23 nt, synthetic construct
  source 1..23: mol_type = other RNA
  modified_base 1: mod_base = OTHER; note = 2'-O-methyluridine-3'-phosphorothioate 5'-(E)-Vinylphosphonate
  modified_base 2: mod_base = OTHER; note = 2'-deoxy-2'-fluoroadenosine-3'-phosphorothioate
  modified_base 3: mod_base = OTHER; note = 2'-O-methylcytidine-3'-phosphate
  modified_base 4: mod_base = OTHER; note = 2'-O-methylcytidine-3'-phosphate
  modified_base 5: mod_base = OTHER; note = 2'-O-methyladenosine-3'-phosphate
  modified_base 6: mod_base = OTHER; note = 2'-deoxy-2'-fluoroadenosine-3'-phosphate
  modified_base 7: mod_base = OTHER; note = 2'-O-methyladenosine-3'-phosphate
  modified_base 8: mod_base = OTHER; note = 2'-O-methylguanosine-3'-phosphate
  modified_base 9: mod_base = OTHER; note = 2'-O-methyladenosine-3'-phosphate
  modified_base 10: mod_base = OTHER; note = 2'-O-methyladenosine-3'-phosphate
  modified_base 11: mod_base = OTHER; note = 2'-O-methylcytidine-3'-phosphate
  modified_base 12: mod_base = OTHER; note = 2'-O-methyladenosine-3'-phosphate
  modified_base 13: mod_base = OTHER; note = 2'-O-methylcytidine-3'-phosphate
  modified_base 14: mod_base = OTHER; note = 2'-deoxy-2'-fluorouridine-3'-phosphate
  modified_base 15: mod_base = OTHER; note = 2'-O-methyluridine-3'-phosphate
  modified_base 16: mod_base = OTHER; note = 2'-deoxy-2'-fluorouridine-3'-phosphate
  modified_base 17: mod_base = OTHER; note = 2'-O-methyluridine-3'-phosphate
  modified_base 18: mod_base = OTHER; note = 2'-O-methylguanosine-3'-phosphate
  modified_base 19: mod_base = OTHER; note = 2'-O-methylguanosine-3'-phosphate
  modified_base 20: mod_base = OTHER; note = 2'-O-methyluridine-3'-phosphate
  modified_base 21: mod_base = OTHER; note = 2'-O-methylcytidine-3'-phosphorothioate
  modified_base 22: mod_base = OTHER; note = 2'-O-methyluridine-3'-phosphorothioate
  modified_base 23: mod_base = OTHER; note = 2'-O-methyluridine
taccaaagaacacttttggtctt

SEQ ID NO: 12655 - RNA, 23 nt, synthetic construct
  source 1..23: mol_type = other RNA
  modified_base 1: mod_base = OTHER; note = 2'-O-methyluridine-3'-phosphorothioate 5'-(E)-Vinylphosphonate
  modified_base 2: mod_base = OTHER; note = 2'-deoxy-2'-fluorouridine-3'-phosphorothioate
  modified_base 3: mod_base = OTHER; note = 2'-O-methyladenosine-3'-phosphate
  modified_base 4: mod_base = OTHER; note = 2'-O-methylcytidine-3'-phosphate
  modified_base 5: mod_base = OTHER; note = 2'-O-methylcytidine-3'-phosphate
  modified_base 6: mod_base = OTHER; note = 2'-deoxy-2'-fluoroadenosine-3'-phosphate
  modified_base 7: mod_base = OTHER; note = 2'-O-methyladenosine-3'-phosphate
  modified_base 8: mod_base = OTHER; note = 2'-O-methyladenosine-3'-phosphate
  modified_base 9: mod_base = OTHER; note = 2'-O-methylguanosine-3'-phosphate
  modified_base 10: mod_base = OTHER; note = 2'-O-methyladenosine-3'-phosphate
  modified_base 11: mod_base = OTHER; note = 2'-O-methyladenosine-3'-phosphate
  modified_base 12: mod_base = OTHER; note = 2'-O-methylcytidine-3'-phosphate
  modified_base 13: mod_base = OTHER; note = 2'-O-methyladenosine-3'-phosphate
  modified_base 14: mod_base = OTHER; note = 2'-deoxy-2'-fluorocytidine-3'-phosphate
  modified_base 15: mod_base = OTHER; note = 2'-O-methyluridine-3'-phosphate
  modified_base 16: mod_base = OTHER; note = 2'-deoxy-2'-fluorouridine-3'-phosphate
  modified_base 17: mod_base = OTHER; note = 2'-O-methyluridine-3'-phosphate
  modified_base 18: mod_base = OTHER; note = 2'-O-methyluridine-3'-phosphate
  modified_base 19: mod_base = OTHER; note = 2'-O-methylguanosine-3'-phosphate
  modified_base 20: mod_base = OTHER; note = 2'-O-methylguanosine-3'-phosphate
  modified_base 21: mod_base = OTHER; note = 2'-O-methyluridine-3'-phosphorothioate
  modified_base 22: mod_base = OTHER; note = 2'-O-methylcytidine-3'-phosphorothioate
  modified_base 23: mod_base = OTHER; note = 2'-O-methyluridine
ttaccaaagaacacttttggtct

SEQ ID NO: 12656 - RNA, 23 nt, synthetic construct
  source 1..23: mol_type = other RNA
  modified_base 1: mod_base = OTHER; note = 2'-O-methyluridine-3'-phosphorothioate 5'-(E)-Vinylphosphonate
  modified_base 2: mod_base = OTHER; note = 2'-deoxy-2'-fluoroguanosine-3'-phosphorothioate
  modified_base 3: mod_base = OTHER; note = 2'-O-methyluridine-3'-phosphate
  modified_base 4: mod_base = OTHER; note = 2'-O-methyladenosine-3'-phosphate
  modified_base 5: mod_base = OTHER; note = 2'-O-methylcytidine-3'-phosphate
  modified_base 6: mod_base = OTHER; note = 2'-deoxy-2'-fluorocytidine-3'-phosphate
  modified_base 7: mod_base = OTHER; note = 2'-O-methyladenosine-3'-phosphate
  modified_base 8: mod_base = OTHER; note = 2'-O-methyladenosine-3'-phosphate
  modified_base 9: mod_base = OTHER; note = 2'-O-methyladenosine-3'-phosphate
  modified_base 10: mod_base = OTHER; note = 2'-O-methylguanosine-3'-phosphate
  modified_base 11: mod_base = OTHER; note = 2'-O-methyladenosine-3'-phosphate
  modified_base 12: mod_base = OTHER; note = 2'-O-methyladenosine-3'-phosphate
  modified_base 13: mod_base = OTHER; note = 2'-O-methylcytidine-3'-phosphate
  modified_base 14: mod_base = OTHER; note = 2'-deoxy-2'-fluoroadenosine-3'-phosphate
  modified_base 15: mod_base = OTHER; note = 2'-O-methylcytidine-3'-phosphate
  modified_base 16: mod_base = OTHER; note = 2'-deoxy-2'-fluorouridine-3'-phosphate
  modified_base 17: mod_base = OTHER; note = 2'-O-methyluridine-3'-phosphate
  modified_base 18: mod_base = OTHER; note = 2'-O-methyluridine-3'-phosphate
  modified_base 19: mod_base = OTHER; note = 2'-O-methyluridine-3'-phosphate
  modified_base 20: mod_base = OTHER; note = 2'-O-methylguanosine-3'-phosphate
  modified_base 21: mod_base = OTHER; note = 2'-O-methylguanosine-3'-phosphorothioate
  modified_base 22: mod_base = OTHER; note = 2'-O-methyluridine-3'-phosphorothioate
  modified_base 23: mod_base = OTHER; note = 2'-O-methylcytidine
tgtaccaaagaacacttttggtc

SEQ ID NO: 12657 - RNA, 23 nt, synthetic construct
  source 1..23: mol_type = other RNA
  modified_base 1: mod_base = OTHER; note = 2'-O-methyluridine-3'-phosphorothioate 5'-(E)-Vinylphosphonate
  modified_base 2: mod_base = OTHER; note = 2'-deoxy-2'-fluoroadenosine-3'-phosphorothioate
  modified_base 3: mod_base = OTHER; note = 2'-O-methylguanosine-3'-phosphate
  modified_base 4: mod_base = OTHER; note = 2'-O-methyluridine-3'-phosphate
  modified_base 5: mod_base = OTHER; note = 2'-O-methyladenosine-3'-phosphate
  modified_base 6: mod_base = OTHER; note = 2'-deoxy-2'-fluorocytidine-3'-phosphate
  modified_base 7: mod_base = OTHER; note = 2'-O-methylcytidine-3'-phosphate
  modified_base 8: mod_base = OTHER; note = 2'-O-methyladenosine-3'-phosphate
  modified_base 9: mod_base = OTHER; note = 2'-O-methyladenosine-3'-phosphate
  modified_base 10: mod_base = OTHER; note = 2'-O-methyladenosine-3'-phosphate
  modified_base 11: mod_base = OTHER; note = 2'-O-methylguanosine-3'-phosphate
  modified_base 12: mod_base = OTHER; note = 2'-O-methyladenosine-3'-phosphate
  modified_base 13: mod_base = OTHER; note = 2'-O-methyladenosine-3'-phosphate
  modified_base 14: mod_base = OTHER; note = 2'-deoxy-2'-fluorocytidine-3'-phosphate
  modified_base 15: mod_base = OTHER; note = 2'-O-methyladenosine-3'-phosphate
  modified_base 16: mod_base = OTHER; note = 2'-deoxy-2'-fluorocytidine-3'-phosphate
  modified_base 17: mod_base = OTHER; note = 2'-O-methyluridine-3'-phosphate
  modified_base 18: mod_base = OTHER; note = 2'-O-methyluridine-3'-phosphate
  modified_base 19: mod_base = OTHER; note = 2'-O-methyluridine-3'-phosphate
  modified_base 20: mod_base = OTHER; note = 2'-O-methyluridine-3'-phosphate
  modified_base 21: mod_base = OTHER; note = 2'-O-methylguanosine-3'-phosphorothioate
  modified_base 22: mod_base = OTHER; note = 2'-O-methylguanosine-3'-phosphorothioate
  modified_base 23: mod_base = OTHER; note = 2'-O-methyluridine
tagtaccaaagaacacttttggt

SEQ ID NO: 12658 - RNA, 23 nt, synthetic construct
  source 1..23: mol_type = other RNA
  modified_base 1: mod_base = OTHER; note = 2'-O-methyluridine-3'-phosphorothioate 5'-(E)-Vinylphosphonate
  modified_base 2: mod_base = OTHER; note = 2'-deoxy-2'-fluoroadenosine-3'-phosphorothioate
  modified_base 3: mod_base = OTHER; note = 2'-O-methyladenosine-3'-phosphate
  modified_base 4: mod_base = OTHER; note = 2'-O-methylguanosine-3'-phosphate
  modified_base 5: mod_base = OTHER; note = 2'-O-methyluridine-3'-phosphate
  modified_base 6: mod_base = OTHER; note = 2'-deoxy-2'-fluoroadenosine-3'-phosphate
  modified_base 7: mod_base = OTHER; note = 2'-O-methylcytidine-3'-phosphate
  modified_base 8: mod_base = OTHER; note = 2'-O-methylcytidine-3'-phosphate
  modified_base 9: mod_base = OTHER; note = 2'-O-methyladenosine-3'-phosphate
  modified_base 10: mod_base = OTHER; note = 2'-O-methyladenosine-3'-phosphate
  modified_base 11: mod_base = OTHER; note = 2'-O-methyladenosine-3'-phosphate
  modified_base 12: mod_base = OTHER; note = 2'-O-methylguanosine-3'-phosphate
  modified_base 13: mod_base = OTHER; note = 2'-O-methyladenosine-3'-phosphate
  modified_base 14: mod_base = OTHER; note = 2'-deoxy-2'-fluoroadenosine-3'-phosphate
  modified_base 15: mod_base = OTHER; note = 2'-O-methylcytidine-3'-phosphate
  modified_base 16: mod_base = OTHER; note = 2'-deoxy-2'-fluoroadenosine-3'-phosphate
  modified_base 17: mod_base = OTHER; note = 2'-O-methylcytidine-3'-phosphate
  modified_base 18: mod_base = OTHER; note = 2'-O-methyluridine-3'-phosphate
  modified_base 19: mod_base = OTHER; note = 2'-O-methyluridine-3'-phosphate
  modified_base 20: mod_base = OTHER; note = 2'-O-methyluridine-3'-phosphate
  modified_base 21: mod_base = OTHER; note = 2'-O-methyluridine-3'-phosphorothioate
  modified_base 22: mod_base = OTHER; note = 2'-O-methylguanosine-3'-phosphorothioate
  modified_base 23: mod_base = OTHER; note = 2'-O-methylguanosine
taagtaccaaagaacacttttgg

SEQ ID NO: 12659 - RNA, 23 nt, synthetic construct
  source 1..23: mol_type = other RNA
  modified_base 1: mod_base = OTHER; note = 2'-O-methyluridine-3'-phosphorothioate 5'-(E)-Vinylphosphonate
  modified_base 2: mod_base = OTHER; note = 2'-deoxy-2'-fluorocytidine-3'-phosphorothioate
  modified_base 3: mod_base = OTHER; note = 2'-O-methyladenosine-3'-phosphate
  modified_base 4: mod_base = OTHER; note = 2'-O-methyladenosine-3'-phosphate
  modified_base 5: mod_base = OTHER; note = 2'-O-methylguanosine-3'-phosphate
  modified_base 6: mod_base = OTHER; note = 2'-deoxy-2'-fluorouridine-3'-phosphate
  modified_base 7: mod_base = OTHER; note = 2'-O-methyladenosine-3'-phosphate
  modified_base 8: mod_base = OTHER; note = 2'-O-methylcytidine-3'-phosphate
  modified_base 9: mod_base = OTHER; note = 2'-O-methylcytidine-3'-phosphate
  modified_base 10: mod_base = OTHER; note = 2'-O-methyladenosine-3'-phosphate
  modified_base 11: mod_base = OTHER; note = 2'-O-methyladenosine-3'-phosphate
  modified_base 12: mod_base = OTHER; note = 2'-O-methyladenosine-3'-phosphate
  modified_base 13: mod_base = OTHER; note = 2'-O-methylguanosine-3'-phosphate
  modified_base 14: mod_base = OTHER; note = 2'-deoxy-2'-fluoroadenosine-3'-phosphate
  modified_base 15: mod_base = OTHER; note = 2'-O-methyladenosine-3'-phosphate
  modified_base 16: mod_base = OTHER; note = 2'-deoxy-2'-fluorocytidine-3'-phosphate
  modified_base 17: mod_base = OTHER; note = 2'-O-methyladenosine-3'-phosphate
  modified_base 18: mod_base = OTHER; note = 2'-O-methylcytidine-3'-phosphate
  modified_base 19: mod_base = OTHER; note = 2'-O-methyluridine-3'-phosphate
  modified_base 20: mod_base = OTHER; note = 2'-O-methyluridine-3'-phosphate
  modified_base 21: mod_base = OTHER; note = 2'-O-methyluridine-3'-phosphorothioate
  modified_base 22: mod_base = OTHER; note = 2'-O-methyluridine-3'-phosphorothioate
  modified_base 23: mod_base = OTHER; note = 2'-O-methylguanosine
tcaagtaccaaagaacacttttg

SEQ ID NO: 12660 - RNA, 23 nt, synthetic construct
  source 1..23: mol_type = other RNA
  modified_base 1: mod_base = OTHER; note = 2'-O-methyluridine-3'-phosphorothioate 5'-(E)-Vinylphosphonate
  modified_base 2: mod_base = OTHER; note = 2'-deoxy-2'-fluoroguanosine-3'-phosphorothioate
  modified_base 3: mod_base = OTHER; note = 2'-O-methylcytidine-3'-phosphate
  modified_base 4: mod_base = OTHER; note = 2'-O-methyladenosine-3'-phosphate
  modified_base 5: mod_base = OTHER; note = 2'-O-methyladenosine-3'-phosphate
  modified_base 6: mod_base = OTHER; note = 2'-deoxy-2'-fluoroguanosine-3'-phosphate
  modified_base 7: mod_base = OTHER; note = 2'-O-methyluridine-3'-phosphate
  modified_base 8: mod_base = OTHER; note = 2'-O-methyladenosine-3'-phosphate
  modified_base 9: mod_base = OTHER; note = 2'-O-methylcytidine-3'-phosphate
  modified_base 10: mod_base = OTHER; note = 2'-O-methylcytidine-3'-phosphate
  modified_base 11: mod_base = OTHER; note = 2'-O-methyladenosine-3'-phosphate
  modified_base 12: mod_base = OTHER; note = 2'-O-methyladenosine-3'-phosphate
  modified_base 13: mod_base = OTHER; note = 2'-O-methyladenosine-3'-phosphate
  modified_base 14: mod_base = OTHER; note = 2'-deoxy-2'-fluoroguanosine-3'-phosphate
  modified_base 15: mod_base = OTHER; note = 2'-O-methyladenosine-3'-phosphate
  modified_base 16: mod_base = OTHER; note = 2'-deoxy-2'-fluoroadenosine-3'-phosphate
  modified_base 17: mod_base = OTHER; note = 2'-O-methylcytidine-3'-phosphate
  modified_base 18: mod_base = OTHER; note = 2'-O-methyladenosine-3'-phosphate
  modified_base 19: mod_base = OTHER; note = 2'-O-methylcytidine-3'-phosphate
  modified_base 20: mod_base = OTHER; note = 2'-O-methyluridine-3'-phosphate
  modified_base 21: mod_base = OTHER; note = 2'-O-methyluridine-3'-phosphorothioate
  modified_base 22: mod_base = OTHER; note = 2'-O-methyluridine-3'-phosphorothioate
  modified_base 23: mod_base = OTHER; note = 2'-O-methyluridine
tgcaagtaccaaagaacactttt

SEQ ID NO: 12661 - RNA, 23 nt, synthetic construct
  source 1..23: mol_type = other RNA
  modified_base 1: mod_base = OTHER; note = 2'-O-methyluridine-3'-phosphorothioate 5'-(E)-Vinylphosphonate
  modified_base 2: mod_base = OTHER; note = 2'-deoxy-2'-fluorouridine-3'-phosphorothioate
  modified_base 3: mod_base = OTHER; note = 2'-O-methyluridine-3'-phosphate
  modified_base 4: mod_base = OTHER; note = 2'-O-methyladenosine-3'-phosphate
  modified_base 5: mod_base = OTHER; note = 2'-O-methyluridine-3'-phosphate
  modified_base 6: mod_base = OTHER; note = 2'-deoxy-2'-fluoroadenosine-3'-phosphate
  modified_base 7: mod_base = OTHER; note = 2'-O-methyladenosine-3'-phosphate
  modified_base 8: mod_base = OTHER; note = 2'-O-methylguanosine-3'-phosphate
  modified_base 9: mod_base = OTHER; note = 2'-O-methylcytidine-3'-phosphate
  modified_base 10: mod_base = OTHER; note = 2'-O-methyladenosine-3'-phosphate
  modified_base 11: mod_base = OTHER; note = 2'-O-methyladenosine-3'-phosphate
  modified_base 12: mod_base = OTHER; note = 2'-O-methylguanosine-3'-phosphate
  modified_base 13: mod_base = OTHER; note = 2'-O-methyluridine-3'-phosphate
  modified_base 14: mod_base = OTHER; note = 2'-deoxy-2'-fluoroadenosine-3'-phosphate
  modified_base 15: mod_base = OTHER; note = 2'-O-methylcytidine-3'-phosphate
  modified_base 16: mod_base = OTHER; note = 2'-deoxy-2'-fluorocytidine-3'-phosphate
  modified_base 17: mod_base = OTHER; note = 2'-O-methyladenosine-3'-phosphate
  modified_base 18: mod_base = OTHER; note = 2'-O-methyladenosine-3'-phosphate
  modified_base 19: mod_base = OTHER; note = 2'-O-methyladenosine-3'-phosphate
  modified_base 20: mod_base = OTHER; note = 2'-O-methylguanosine-3'-phosphate
  modified_base 21: mod_base = OTHER; note = 2'-O-methyladenosine-3'-phosphorothioate
  modified_base 22: mod_base = OTHER; note = 2'-O-methyladenosine-3'-phosphorothioate
  modified_base 23: mod_base = OTHER; note = 2'-O-methylcytidine
tttataagcaagtaccaaagaac

SEQ ID NO: 12662 - RNA, 23 nt, synthetic construct
  source 1..23: mol_type = other RNA
  modified_base 1: mod_base = OTHER; note = 2'-O-methyluridine-3'-phosphorothioate 5'-(E)-Vinylphosphonate
  modified_base 2: mod_base = OTHER; note = 2'-deoxy-2'-fluorouridine-3'-phosphorothioate
  modified_base 3: mod_base = OTHER; note = 2'-O-methyluridine-3'-phosphate
  modified_base 4: mod_base = OTHER; note = 2'-O-methyluridine-3'-phosphate
  modified_base 5: mod_base = OTHER; note = 2'-O-methyladenosine-3'-phosphate
  modified_base 6: mod_base = OTHER; note = 2'-deoxy-2'-fluorouridine-3'-phosphate
  modified_base 7: mod_base = OTHER; note = 2'-O-methyladenosine-3'-phosphate
  modified_base 8: mod_base = OTHER; note = 2'-O-methyladenosine-3'-phosphate
  modified_base 9: mod_base = OTHER; note = 2'-O-methylguanosine-3'-phosphate
  modified_base 10: mod_base = OTHER; note = 2'-O-methylcytidine-3'-phosphate
  modified_base 11: mod_base = OTHER; note = 2'-O-methyladenosine-3'-phosphate
  modified_base 12: mod_base = OTHER; note = 2'-O-methyladenosine-3'-phosphate
  modified_base 13: mod_base = OTHER; note = 2'-O-methylguanosine-3'-phosphate
  modified_base 14: mod_base = OTHER; note = 2'-deoxy-2'-fluorouridine-3'-phosphate
  modified_base 15: mod_base = OTHER; note = 2'-O-methyladenosine-3'-phosphate
  modified_base 16: mod_base = OTHER; note = 2'-deoxy-2'-fluorocytidine-3'-phosphate
  modified_base 17: mod_base = OTHER; note = 2'-O-methylcytidine-3'-phosphate
  modified_base 18: mod_base = OTHER; note = 2'-O-methyladenosine-3'-phosphate
  modified_base 19: mod_base = OTHER; note = 2'-O-methyladenosine-3'-phosphate
  modified_base 20: mod_base = OTHER; note = 2'-O-methyladenosine-3'-phosphate
  modified_base 21: mod_base = OTHER; note = 2'-O-methylguanosine-3'-phosphorothioate
  modified_base 22: mod_base = OTHER; note = 2'-O-methyladenosine-3'-phosphorothioate
  modified_base 23: mod_base = OTHER; note = 2'-O-methyladenosine
ttttataagcaagtaccaaagaa

SEQ ID NO: 12663 - RNA, 23 nt, synthetic construct
  source 1..23: mol_type = other RNA
  modified_base 1: mod_base = OTHER; note = 2'-O-methyluridine-3'-phosphorothioate 5'-(E)-Vinylphosphonate
  modified_base 2: mod_base = OTHER; note = 2'-deoxy-2'-fluoroadenosine-3'-phosphorothioate
  modified_base 3: mod_base = OTHER; note = 2'-O-methylcytidine-3'-phosphate
  modified_base 4: mod_base = OTHER; note = 2'-O-methyluridine-3'-phosphate
  modified_base 5: mod_base = OTHER; note = 2'-O-methyluridine-3'-phosphate
  modified_base 6: mod_base = OTHER; note = 2'-deoxy-2'-fluorouridine-3'-phosphate
  modified_base 7: mod_base = OTHER; note = 2'-O-methyladenosine-3'-phosphate
  modified_base 8: mod_base = OTHER; note = 2'-O-methyluridine-3'-phosphate
  modified_base 9: mod_base = OTHER; note = 2'-O-methyladenosine-3'-phosphate
  modified_base 10: mod_base = OTHER; note = 2'-O-methyladenosine-3'-phosphate
  modified_base 11: mod_base = OTHER; note = 2'-O-methylguanosine-3'-phosphate
  modified_base 12: mod_base = OTHER; note = 2'-O-methylcytidine-3'-phosphate
  modified_base 13: mod_base = OTHER; note = 2'-O-methyladenosine-3'-phosphate
  modified_base 14: mod_base = OTHER; note = 2'-deoxy-2'-fluoroadenosine-3'-phosphate
  modified_base 15: mod_base = OTHER; note = 2'-O-methylguanosine-3'-phosphate
  modified_base 16: mod_base = OTHER; note = 2'-deoxy-2'-fluorouridine-3'-phosphate
  modified_base 17: mod_base = OTHER; note = 2'-O-methyladenosine-3'-phosphate
  modified_base 18: mod_base = OTHER; note = 2'-O-methylcytidine-3'-phosphate
  modified_base 19: mod_base = OTHER; note = 2'-O-methylcytidine-3'-phosphate
  modified_base 20: mod_base = OTHER; note = 2'-O-methyladenosine-3'-phosphate
  modified_base 21: mod_base = OTHER; note = 2'-O-methyladenosine-3'-phosphorothioate
  modified_base 22: mod_base = OTHER; note = 2'-O-methyladenosine-3'-phosphorothioate
  modified_base 23: mod_base = OTHER; note = 2'-O-methylguanosine
tactttataagcaagtaccaaag

SEQ ID NO: 12664 - RNA, 23 nt, synthetic construct
  source 1..23: mol_type = other RNA
  modified_base 1: mod_base = OTHER; note = 2'-O-methyluridine-3'-phosphorothioate 5'-(E)-Vinylphosphonate
  modified_base 2: mod_base = OTHER; note = 2'-deoxy-2'-fluorocytidine-3'-phosphorothioate
  modified_base 3: mod_base = OTHER; note = 2'-O-methyladenosine-3'-phosphate
  modified_base 4: mod_base = OTHER; note = 2'-O-methylcytidine-3'-phosphate
  modified_base 5: mod_base = OTHER; note = 2'-O-methyluridine-3'-phosphate
  modified_base 6: mod_base = OTHER; note = 2'-deoxy-2'-fluorouridine-3'-phosphate
  modified_base 7: mod_base = OTHER; note = 2'-O-methyluridine-3'-phosphate
  modified_base 8: mod_base = OTHER; note = 2'-O-methyladenosine-3'-phosphate
  modified_base 9: mod_base = OTHER; note = 2'-O-methyluridine-3'-phosphate
  modified_base 10: mod_base = OTHER; note = 2'-O-methyladenosine-3'-phosphate
  modified_base 11: mod_base = OTHER; note = 2'-O-methyladenosine-3'-phosphate
  modified_base 12: mod_base = OTHER; note = 2'-O-methylguanosine-3'-phosphate
  modified_base 13: mod_base = OTHER; note = 2'-O-methylcytidine-3'-phosphate
  modified_base 14: mod_base = OTHER; note = 2'-deoxy-2'-fluoroadenosine-3'-phosphate
  modified_base 15: mod_base = OTHER; note = 2'-O-methyladenosine-3'-phosphate
  modified_base 16: mod_base = OTHER; note = 2'-deoxy-2'-fluoroguanosine-3'-phosphate
  modified_base 17: mod_base = OTHER; note = 2'-O-methyluridine-3'-phosphate
  modified_base 18: mod_base = OTHER; note = 2'-O-methyladenosine-3'-phosphate
  modified_base 19: mod_base = OTHER; note = 2'-O-methylcytidine-3'-phosphate
  modified_base 20: mod_base = OTHER; note = 2'-O-methylcytidine-3'-phosphate
  modified_base 21: mod_base = OTHER; note = 2'-O-methyladenosine-3'-phosphorothioate
  modified_base 22: mod_base = OTHER; note = 2'-O-methyladenosine-3'-phosphorothioate
  modified_base 23: mod_base = OTHER; note = 2'-O-methyladenosine
tcactttataagcaagtaccaaa

SEQ ID NO: 12665 - RNA, 23 nt, synthetic construct
  source 1..23: mol_type = other RNA
  modified_base 1: mod_base = OTHER; note = 2'-O-methyluridine-3'-phosphorothioate 5'-(E)-Vinylphosphonate
  modified_base 2: mod_base = OTHER; note = 2'-deoxy-2'-fluorouridine-3'-phosphorothioate
  modified_base 3: mod_base = OTHER; note = 2'-O-methyladenosine-3'-phosphate
  modified_base 4: mod_base = OTHER; note = 2'-O-methylcytidine-3'-phosphate
  modified_base 5: mod_base = OTHER; note = 2'-O-methyluridine-3'-phosphate
  modified_base 6: mod_base = OTHER; note = 2'-deoxy-2'-fluoroadenosine-3'-phosphate
  modified_base 7: mod_base = OTHER; note = 2'-O-methyluridine-3'-phosphate
  modified_base 8: mod_base = OTHER; note = 2'-O-methylcytidine-3'-phosphate
  modified_base 9: mod_base = OTHER; note = 2'-O-methyladenosine-3'-phosphate
  modified_base 10: mod_base = OTHER; note = 2'-O-methylcytidine-3'-phosphate
  modified_base 11: mod_base = OTHER; note = 2'-O-methyluridine-3'-phosphate
  modified_base 12: mod_base = OTHER; note = 2'-O-methyluridine-3'-phosphate
  modified_base 13: mod_base = OTHER; note = 2'-O-methyluridine-3'-phosphate
  modified_base 14: mod_base = OTHER; note = 2'-deoxy-2'-fluoroadenosine-3'-phosphate
  modified_base 15: mod_base = OTHER; note = 2'-O-methyluridine-3'-phosphate
  modified_base 16: mod_base = OTHER; note = 2'-deoxy-2'-fluoroadenosine-3'-phosphate
  modified_base 17: mod_base = OTHER; note = 2'-O-methyladenosine-3'-phosphate
  modified_base 18: mod_base = OTHER; note = 2'-O-methylguanosine-3'-phosphate
  modified_base 19: mod_base = OTHER; note = 2'-O-methylcytidine-3'-phosphate
  modified_base 20: mod_base = OTHER; note = 2'-O-methyladenosine-3'-phosphate
  modified_base 21: mod_base = OTHER; note = 2'-O-methyladenosine-3'-phosphorothioate
  modified_base 22: mod_base = OTHER; note = 2'-O-methylguanosine-3'-phosphorothioate
  modified_base 23: mod_base = OTHER; note = 2'-O-methyluridine
ttactatcactttataagcaagt

SEQ ID NO: 12666 - RNA, 23 nt, synthetic construct
  source 1..23: mol_type = other RNA
  modified_base 1: mod_base = OTHER; note = 2'-O-methyluridine-3'-phosphorothioate 5'-(E)-Vinylphosphonate
  modified_base 2: mod_base = OTHER; note = 2'-deoxy-2'-fluorouridine-3'-phosphorothioate
  modified_base 3: mod_base = OTHER; note = 2'-O-methyladenosine-3'-phosphate
  modified_base 4: mod_base = OTHER; note = 2'-O-methylcytidine-3'-phosphate
  modified_base 5: mod_base = OTHER; note = 2'-O-methyladenosine-3'-phosphate
  modified_base 6: mod_base = OTHER; note = 2'-deoxy-2'-fluorouridine-3'-phosphate
  modified_base 7: mod_base = OTHER; note = 2'-O-methyluridine-3'-phosphate
  modified_base 8: mod_base = OTHER; note = 2'-O-methyladenosine-3'-phosphate
  modified_base 9: mod_base = OTHER; note = 2'-O-methyluridine-3'-phosphate
  modified_base 10: mod_base = OTHER; note = 2'-O-methyladenosine-3'-phosphate
  modified_base 11: mod_base = OTHER; note = 2'-O-methyluridine-3'-phosphate
  modified_base 12: mod_base = OTHER; note = 2'-O-methylguanosine-3'-phosphate
  modified_base 13: mod_base = OTHER; note = 2'-O-methylcytidine-3'-phosphate
  modified_base 14: mod_base = OTHER; note = 2'-deoxy-2'-fluorouridine-3'-phosphate
  modified_base 15: mod_base = OTHER; note = 2'-O-methyladenosine-3'-phosphate
  modified_base 16: mod_base = OTHER; note = 2'-deoxy-2'-fluoroadenosine-3'-phosphate
  modified_base 17: mod_base = OTHER; note = 2'-O-methylcytidine-3'-phosphate
  modified_base 18: mod_base = OTHER; note = 2'-O-methyladenosine-3'-phosphate
  modified_base 19: mod_base = OTHER; note = 2'-O-methyluridine-3'-phosphate
  modified_base 20: mod_base = OTHER; note = 2'-O-methylguanosine-3'-phosphate
  modified_base 21: mod_base = OTHER; note = 2'-O-methyluridine-3'-phosphorothioate
  modified_base 22: mod_base = OTHER; note = 2'-O-methyladenosine-3'-phosphorothioate
  modified_base 23: mod_base = OTHER; note = 2'-O-methylcytidine
ttacattatatgctaacatgtac

SEQ ID NO: 12667 - RNA, 23 nt, synthetic construct
  source 1..23: mol_type = other RNA
  modified_base 1: mod_base = OTHER; note = 2'-O-methyluridine-3'-phosphorothioate 5'-(E)-Vinylphosphonate
  modified_base 2: mod_base = OTHER; note = 2'-deoxy-2'-fluoroadenosine-3'-phosphorothioate
  modified_base 3: mod_base = OTHER; note = 2'-O-methyluridine-3'-phosphate
  modified_base 4: mod_base = OTHER; note = 2'-O-methylguanosine-3'-phosphate
  modified_base 5: mod_base = OTHER; note = 2'-O-methyluridine-3'-phosphate
  modified_base 6: mod_base = OTHER; note = 2'-deoxy-2'-fluoroadenosine-3'-phosphate
  modified_base 7: mod_base = OTHER; note = 2'-O-methylcytidine-3'-phosphate
  modified_base 8: mod_base = OTHER; note = 2'-O-methyluridine-3'-phosphate
  modified_base 9: mod_base = OTHER; note = 2'-O-methyladenosine-3'-phosphate
  modified_base 10: mod_base = OTHER; note = 2'-O-methyluridine-3'-phosphate
  modified_base 11: mod_base = OTHER; note = 2'-O-methylcytidine-3'-phosphate
  modified_base 12: mod_base = OTHER; note = 2'-O-methyladenosine-3'-phosphate
  modified_base 13: mod_base = OTHER; note = 2'-O-methylcytidine-3'-phosphate
  modified_base 14: mod_base = OTHER; note = 2'-deoxy-2'-fluorouridine-3'-phosphate
  modified_base 15: mod_base = OTHER; note = 2'-O-methyluridine-3'-phosphate
  modified_base 16: mod_base = OTHER; note = 2'-deoxy-2'-fluorouridine-3'-phosphate
  modified_base 17: mod_base = OTHER; note = 2'-O-methyladenosine-3'-phosphate
  modified_base 18: mod_base = OTHER; note = 2'-O-methyluridine-3'-phosphate
  modified_base 19: mod_base = OTHER; note = 2'-O-methyladenosine-3'-phosphate
  modified_base 20: mod_base = OTHER; note = 2'-O-methyladenosine-3'-phosphate
  modified_base 21: mod_base = OTHER; note = 2'-O-methylguanosine-3'-phosphorothioate
  modified_base 22: mod_base = OTHER; note = 2'-O-methylcytidine-3'-phosphorothioate
  modified_base 23: mod_base = OTHER; note = 2'-O-methyladenosine
tatgtactatcactttataagca

SEQ ID NO: 12668 - RNA, 23 nt, synthetic construct
  source 1..23: mol_type = other RNA
  modified_base 1: mod_base = OTHER; note = 2'-O-methyluridine-3'-phosphorothioate 5'-(E)-Vinylphosphonate
  modified_base 2: mod_base = OTHER; note = 2'-deoxy-2'-fluorocytidine-3'-phosphorothioate
  modified_base 3: mod_base = OTHER; note = 2'-O-methyladenosine-3'-phosphate
  modified_base 4: mod_base = OTHER; note = 2'-O-methyluridine-3'-phosphate
  modified_base 5: mod_base = OTHER; note = 2'-O-methylguanosine-3'-phosphate
  modified_base 6: mod_base = OTHER; note = 2'-deoxy-2'-fluorouridine-3'-phosphate
  modified_base 7: mod_base = OTHER; note = 2'-O-methyladenosine-3'-phosphate
  modified_base 8: mod_base = OTHER; note = 2'-O-methylcytidine-3'-phosphate
  modified_base 9: mod_base = OTHER; note = 2'-O-methyluridine-3'-phosphate
  modified_base 10: mod_base = OTHER; note = 2'-O-methyladenosine-3'-phosphate
  modified_base 11: mod_base = OTHER; note = 2'-O-methyluridine-3'-phosphate
  modified_base 12: mod_base = OTHER; note = 2'-O-methylcytidine-3'-phosphate
  modified_base 13: mod_base = OTHER; note = 2'-O-methyladenosine-3'-phosphate
  modified_base 14: mod_base = OTHER; note = 2'-deoxy-2'-fluorocytidine-3'-phosphate
  modified_base 15: mod_base = OTHER; note = 2'-O-methyluridine-3'-phosphate
  modified_base 16: mod_base = OTHER; note = 2'-deoxy-2'-fluorouridine-3'-phosphate
  modified_base 17: mod_base = OTHER; note = 2'-O-methyluridine-3'-phosphate
  modified_base 18: mod_base = OTHER; note = 2'-O-methyladenosine-3'-phosphate
  modified_base 19: mod_base = OTHER; note = 2'-O-methyluridine-3'-phosphate
  modified_base 20: mod_base = OTHER; note = 2'-O-methyladenosine-3'-phosphate
  modified_base 21: mod_base = OTHER; note = 2'-O-methyladenosine-3'-phosphorothioate
  modified_base 22: mod_base = OTHER; note = 2'-O-methylguanosine-3'-phosphorothioate
  modified_base 23: mod_base = OTHER; note = 2'-O-methylcytidine
tcatgtactatcactttataagc

SEQ ID NO: 12669 - RNA, 23 nt, synthetic construct
  source 1..23: mol_type = other RNA
  modified_base 1: mod_base = OTHER; note = 2'-O-methyluridine-3'-phosphorothioate 5'-(E)-Vinylphosphonate
  modified_base 2: mod_base = OTHER; note = 2'-deoxy-2'-fluoroadenosine-3'-phosphorothioate
  modified_base 3: mod_base = OTHER; note = 2'-O-methylcytidine-3'-phosphate
  modified_base 4: mod_base = OTHER; note = 2'-O-methyladenosine-3'-phosphate
  modified_base 5: mod_base = OTHER; note = 2'-O-methyluridine-3'-phosphate
  modified_base 6: mod_base = OTHER; note = 2'-deoxy-2'-fluoroguanosine-3'-phosphate
  modified_base 7: mod_base = OTHER; note = 2'-O-methyluridine-3'-phosphate
  modified_base 8: mod_base = OTHER; note = 2'-O-methyladenosine-3'-phosphate
  modified_base 9: mod_base = OTHER; note = 2'-O-methylcytidine-3'-phosphate
  modified_base 10: mod_base = OTHER; note = 2'-O-methyluridine-3'-phosphate
  modified_base 11: mod_base = OTHER; note = 2'-O-methyladenosine-3'-phosphate
  modified_base 12: mod_base = OTHER; note = 2'-O-methyluridine-3'-phosphate
  modified_base 13: mod_base = OTHER; note = 2'-O-methylcytidine-3'-phosphate
  modified_base 14: mod_base = OTHER; note = 2'-deoxy-2'-fluoroadenosine-3'-phosphate
  modified_base 15: mod_base = OTHER; note = 2'-O-methylcytidine-3'-phosphate
  modified_base 16: mod_base = OTHER; note = 2'-deoxy-2'-fluorouridine-3'-phosphate
  modified_base 17: mod_base = OTHER; note = 2'-O-methyluridine-3'-phosphate
  modified_base 18: mod_base = OTHER; note = 2'-O-methyluridine-3'-phosphate
  modified_base 19: mod_base = OTHER; note = 2'-O-methyladenosine-3'-phosphate
  modified_base 20: mod_base = OTHER; note = 2'-O-methyluridine-3'-phosphate
  modified_base 21: mod_base = OTHER; note = 2'-O-methyladenosine-3'-phosphorothioate
  modified_base 22: mod_base = OTHER; note = 2'-O-methyladenosine-3'-phosphorothioate
  modified_base 23: mod_base = OTHER; note = 2'-O-methylguanosine
tacatgtactatcactttataag

SEQ ID NO: 12670 - RNA, 23 nt, synthetic construct
  source 1..23: mol_type = other RNA
  modified_base 1: mod_base = OTHER; note = 2'-O-methyluridine-3'-phosphorothioate 5'-(E)-Vinylphosphonate
  modified_base 2: mod_base = OTHER; note = 2'-deoxy-2'-fluorocytidine-3'-phosphorothioate
  modified_base 3: mod_base = OTHER; note = 2'-O-methyluridine-3'-phosphate
  modified_base 4: mod_base = OTHER; note = 2'-O-methyladenosine-3'-phosphate
  modified_base 5: mod_base = OTHER; note = 2'-O-methyladenosine-3'-phosphate
  modified_base 6: mod_base = OTHER; note = 2'-deoxy-2'-fluorocytidine-3'-phosphate
  modified_base 7: mod_base = OTHER; note = 2'-O-methyladenosine-3'-phosphate
  modified_base 8: mod_base = OTHER; note = 2'-O-methyluridine-3'-phosphate
  modified_base 9: mod_base = OTHER; note = 2'-O-methylguanosine-3'-phosphate
  modified_base 10: mod_base = OTHER; note = 2'-O-methyluridine-3'-phosphate
  modified_base 11: mod_base = OTHER; note = 2'-O-methyladenosine-3'-phosphate
  modified_base 12: mod_base = OTHER; note = 2'-O-methylcytidine-3'-phosphate
  modified_base 13: mod_base = OTHER; note = 2'-O-methyluridine-3'-phosphate
  modified_base 14: mod_base = OTHER; note = 2'-deoxy-2'-fluoroadenosine-3'-phosphate
  modified_base 15: mod_base = OTHER; note = 2'-O-methyluridine-3'-phosphate
  modified_base 16: mod_base = OTHER; note = 2'-deoxy-2'-fluorocytidine-3'-phosphate
  modified_base 17: mod_base = OTHER; note = 2'-O-methyladenosine-3'-phosphate
  modified_base 18: mod_base = OTHER; note = 2'-O-methylcytidine-3'-phosphate
  modified_base 19: mod_base = OTHER; note = 2'-O-methyluridine-3'-phosphate
  modified_base 20: mod_base = OTHER; note = 2'-O-methyluridine-3'-phosphate
  modified_base 21: mod_base = OTHER; note = 2'-O-methyluridine-3'-phosphorothioate
  modified_base 22: mod_base = OTHER; note = 2'-O-methyladenosine-3'-phosphorothioate
  modified_base 23: mod_base = OTHER; note = 2'-O-methyluridine
tctaacatgtactatcactttat

SEQ ID NO: 12671 - RNA, 23 nt, synthetic construct
  source 1..23: mol_type = other RNA
  modified_base 1: mod_base = OTHER; note = 2'-O-methyluridine-3'-phosphorothioate 5'-(E)-Vinylphosphonate
  modified_base 2: mod_base = OTHER; note = 2'-deoxy-2'-fluoroguanosine-3'-phosphorothioate
  modified_base 3: mod_base = OTHER; note = 2'-O-methylcytidine-3'-phosphate
  modified_base 4: mod_base = OTHER; note = 2'-O-methyluridine-3'-phosphate
  modified_base 5: mod_base = OTHER; note = 2'-O-methyladenosine-3'-phosphate
  modified_base 6: mod_base = OTHER; note = 2'-deoxy-2'-fluoroadenosine-3'-phosphate
  modified_base 7: mod_base = OTHER; note = 2'-O-methylcytidine-3'-phosphate
  modified_base 8: mod_base = OTHER; note = 2'-O-methyladenosine-3'-phosphate
  modified_base 9: mod_base = OTHER; note = 2'-O-methyluridine-3'-phosphate
  modified_base 10: mod_base = OTHER; note = 2'-O-methylguanosine-3'-phosphate
  modified_base 11: mod_base = OTHER; note = 2'-O-methyluridine-3'-phosphate
  modified_base 12: mod_base = OTHER; note = 2'-O-methyladenosine-3'-phosphate
  modified_base 13: mod_base = OTHER; note = 2'-O-methylcytidine-3'-phosphate
  modified_base 14: mod_base = OTHER; note = 2'-deoxy-2'-fluorouridine-3'-phosphate
  modified_base 15: mod_base = OTHER; note = 2'-O-methyladenosine-3'-phosphate
  modified_base 16: mod_base = OTHER; note = 2'-deoxy-2'-fluorouridine-3'-phosphate
  modified_base 17: mod_base = OTHER; note = 2'-O-methylcytidine-3'-phosphate
  modified_base 18: mod_base = OTHER; note = 2'-O-methyladenosine-3'-phosphate
  modified_base 19: mod_base = OTHER; note = 2'-O-methylcytidine-3'-phosphate
  modified_base 20: mod_base = OTHER; note = 2'-O-methyluridine-3'-phosphate
  modified_base 21: mod_base = OTHER; note = 2'-O-methyluridine-3'-phosphorothioate
  modified_base 22: mod_base = OTHER; note = 2'-O-methyluridine-3'-phosphorothioate
  modified_base 23: mod_base = OTHER; note = 2'-O-methyladenosine
tgctaacatgtactatcacttta

SEQ ID NO: 12672 - RNA, 23 nt, synthetic construct
  source 1..23: mol_type = other RNA
  modified_base 1: mod_base = OTHER; note = 2'-O-methyluridine-3'-phosphorothioate 5'-(E)-Vinylphosphonate
  modified_base 2: mod_base = OTHER; note = 2'-deoxy-2'-fluorouridine-3'-phosphorothioate
  modified_base 3: mod_base = OTHER; note = 2'-O-methylguanosine-3'-phosphate
  modified_base 4: mod_base = OTHER; note = 2'-O-methylcytidine-3'-phosphate
  modified_base 5: mod_base = OTHER; note = 2'-O-methyluridine-3'-phosphate
  modified_base 6: mod_base = OTHER; note = 2'-deoxy-2'-fluoroadenosine-3'-phosphate
  modified_base 7: mod_base = OTHER; note = 2'-O-methyladenosine-3'-phosphate
  modified_base 8: mod_base = OTHER; note = 2'-O-methylcytidine-3'-phosphate
  modified_base 9: mod_base = OTHER; note = 2'-O-methyladenosine-3'-phosphate
  modified_base 10: mod_base = OTHER; note = 2'-O-methyluridine-3'-phosphate
  modified_base 11: mod_base = OTHER; note = 2'-O-methylguanosine-3'-phosphate
  modified_base 12: mod_base = OTHER; note = 2'-O-methyluridine-3'-phosphate
  modified_base 13: mod_base = OTHER; note = 2'-O-methyladenosine-3'-phosphate
  modified_base 14: mod_base = OTHER; note = 2'-deoxy-2'-fluorocytidine-3'-phosphate
  modified_base 15: mod_base = OTHER; note = 2'-O-methyluridine-3'-phosphate
  modified_base 16: mod_base = OTHER; note = 2'-deoxy-2'-fluoroadenosine-3'-phosphate
  modified_base 17: mod_base = OTHER; note = 2'-O-methyluridine-3'-phosphate
  modified_base 18: mod_base = OTHER; note = 2'-O-methylcytidine-3'-phosphate
  modified_base 19: mod_base = OTHER; note = 2'-O-methyladenosine-3'-phosphate
  modified_base 20: mod_base = OTHER; note = 2'-O-methylcytidine-3'-phosphate
  modified_base 21: mod_base = OTHER; note = 2'-O-methyluridine-3'-phosphorothioate
  modified_base 22: mod_base = OTHER; note = 2'-O-methyluridine-3'-phosphorothioate
  modified_base 23: mod_base = OTHER; note = 2'-O-methyluridine
ttgctaacatgtactatcacttt

SEQ ID NO: 12673 - RNA, 23 nt, synthetic construct
  source 1..23: mol_type = other RNA
  modified_base 1: mod_base = OTHER; note = 2'-O-methyluridine-3'-phosphorothioate 5'-(E)-Vinylphosphonate
  modified_base 2: mod_base = OTHER; note = 2'-deoxy-2'-fluoroadenosine-3'-phosphorothioate
  modified_base 3: mod_base = OTHER; note = 2'-O-methyluridine-3'-phosphate
  modified_base 4: mod_base = OTHER; note = 2'-O-methylguanosine-3'-phosphate
  modified_base 5: mod_base = OTHER; note = 2'-O-methylcytidine-3'-phosphate
  modified_base 6: mod_base = OTHER; note = 2'-deoxy-2'-fluorouridine-3'-phosphate
  modified_base 7: mod_base = OTHER; note = 2'-O-methyladenosine-3'-phosphate
  modified_base 8: mod_base = OTHER; note = 2'-O-methyladenosine-3'-phosphate
  modified_base 9: mod_base = OTHER; note = 2'-O-methylcytidine-3'-phosphate
  modified_base 10: mod_base = OTHER; note = 2'-O-methyladenosine-3'-phosphate
  modified_base 11: mod_base = OTHER; note = 2'-O-methyluridine-3'-phosphate
  modified_base 12: mod_base = OTHER; note = 2'-O-methylguanosine-3'-phosphate
  modified_base 13: mod_base = OTHER; note = 2'-O-methyluridine-3'-phosphate
  modified_base 14: mod_base = OTHER; note = 2'-deoxy-2'-fluoroadenosine-3'-phosphate
  modified_base 15: mod_base = OTHER; note = 2'-O-methylcytidine-3'-phosphate
  modified_base 16: mod_base = OTHER; note = 2'-deoxy-2'-fluorouridine-3'-phosphate
  modified_base 17: mod_base = OTHER; note = 2'-O-methyladenosine-3'-phosphate
  modified_base 18: mod_base = OTHER; note = 2'-O-methyluridine-3'-phosphate
  modified_base 19: mod_base = OTHER; note = 2'-O-methylcytidine-3'-phosphate
  modified_base 20: mod_base = OTHER; note = 2'-O-methyladenosine-3'-phosphate
  modified_base 21: mod_base = OTHER; note = 2'-O-methylcytidine-3'-phosphorothioate
  modified_base 22: mod_base = OTHER; note = 2'-O-methyluridine-3'-phosphorothioate
  modified_base 23: mod_base = OTHER; note = 2'-O-methyluridine
tatgctaacatgtactatcactt

SEQ ID NO: 12674 - RNA, 23 nt, synthetic construct
  source 1..23: mol_type = other RNA
  modified_base 1: mod_base = OTHER; note = 2'-O-methyluridine-3'-phosphorothioate 5'-(E)-Vinylphosphonate
  modified_base 2: mod_base = OTHER; note = 2'-deoxy-2'-fluorouridine-3'-phosphorothioate
  modified_base 3: mod_base = OTHER; note = 2'-O-methyladenosine-3'-phosphate
  modified_base 4: mod_base = OTHER; note = 2'-O-methyluridine-3'-phosphate
  modified_base 5: mod_base = OTHER; note = 2'-O-methylguanosine-3'-phosphate
  modified_base 6: mod_base = OTHER; note = 2'-deoxy-2'-fluorocytidine-3'-phosphate
  modified_base 7: mod_base = OTHER; note = 2'-O-methyluridine-3'-phosphate
  modified_base 8: mod_base = OTHER; note = 2'-O-methyladenosine-3'-phosphate
  modified_base 9: mod_base = OTHER; note = 2'-O-methyladenosine-3'-phosphate
  modified_base 10: mod_base = OTHER; note = 2'-O-methylcytidine-3'-phosphate
  modified_base 11: mod_base = OTHER; note = 2'-O-methyladenosine-3'-phosphate
  modified_base 12: mod_base = OTHER; note = 2'-O-methyluridine-3'-phosphate
  modified_base 13: mod_base = OTHER; note = 2'-O-methylguanosine-3'-phosphate
  modified_base 14: mod_base = OTHER; note = 2'-deoxy-2'-fluorouridine-3'-phosphate
  modified_base 15: mod_base = OTHER; note = 2'-O-methyladenosine-3'-phosphate
  modified_base 16: mod_base = OTHER; note = 2'-deoxy-2'-fluorocytidine-3'-phosphate
  modified_base 17: mod_base = OTHER; note = 2'-O-methyluridine-3'-phosphate
  modified_base 18: mod_base = OTHER; note = 2'-O-methyladenosine-3'-phosphate
  modified_base 19: mod_base = OTHER; note = 2'-O-methyluridine-3'-phosphate
  modified_base 20: mod_base = OTHER; note = 2'-O-methylcytidine-3'-phosphate
  modified_base 21: mod_base = OTHER; note = 2'-O-methyladenosine-3'-phosphorothioate
  modified_base 22: mod_base = OTHER; note = 2'-O-methylcytidine-3'-phosphorothioate
  modified_base 23: mod_base = OTHER; note = 2'-O-methyluridine
ttatgctaacatgtactatcact

SEQ ID NO: 12675 - RNA, 23 nt, synthetic construct
  source 1..23: mol_type = other RNA
  modified_base 1: mod_base = OTHER; note = 2'-O-methyluridine-3'-phosphorothioate 5'-(E)-Vinylphosphonate
  modified_base 2: mod_base = OTHER; note = 2'-deoxy-2'-fluoroadenosine-3'-phosphorothioate
  modified_base 3: mod_base = OTHER; note = 2'-O-methyluridine-3'-phosphate
  modified_base 4: mod_base = OTHER; note = 2'-O-methyladenosine-3'-phosphate
  modified_base 5: mod_base = OTHER; note = 2'-O-methyluridine-3'-phosphate
  modified_base 6: mod_base = OTHER; note = 2'-deoxy-2'-fluoroguanosine-3'-phosphate
  modified_base 7: mod_base = OTHER; note = 2'-O-methylcytidine-3'-phosphate
  modified_base 8: mod_base = OTHER; note = 2'-O-methyluridine-3'-phosphate
  modified_base 9: mod_base = OTHER; note = 2'-O-methyladenosine-3'-phosphate
  modified_base 10: mod_base = OTHER; note = 2'-O-methyladenosine-3'-phosphate
  modified_base 11: mod_base = OTHER; note = 2'-O-methylcytidine-3'-phosphate
  modified_base 12: mod_base = OTHER; note = 2'-O-methyladenosine-3'-phosphate
  modified_base 13: mod_base = OTHER; note = 2'-O-methyluridine-3'-phosphate
  modified_base 14: mod_base = OTHER; note = 2'-deoxy-2'-fluoroguanosine-3'-phosphate
  modified_base 15: mod_base = OTHER; note = 2'-O-methyluridine-3'-phosphate
  modified_base 16: mod_base = OTHER; note = 2'-deoxy-2'-fluoroadenosine-3'-phosphate
  modified_base 17: mod_base = OTHER; note = 2'-O-methylcytidine-3'-phosphate
  modified_base 18: mod_base = OTHER; note = 2'-O-methyluridine-3'-phosphate
  modified_base 19: mod_base = OTHER; note = 2'-O-methyladenosine-3'-phosphate
  modified_base 20: mod_base = OTHER; note = 2'-O-methyluridine-3'-phosphate
  modified_base 21: mod_base = OTHER; note = 2'-O-methylcytidine-3'-phosphorothioate
  modified_base 22: mod_base = OTHER; note = 2'-O-methyladenosine-3'-phosphorothioate
  modified_base 23: mod_base = OTHER; note = 2'-O-methylcytidine
tatatgctaacatgtactatcac

SEQ ID NO: 12676 - RNA, 23 nt, synthetic construct
  source 1..23: mol_type = other RNA
  modified_base 1: mod_base = OTHER; note = 2'-O-methyluridine-3'-phosphorothioate 5'-(E)-Vinylphosphonate
  modified_base 2: mod_base = OTHER; note = 2'-deoxy-2'-fluorouridine-3'-phosphorothioate
  modified_base 3: mod_base = OTHER; note = 2'-O-methyladenosine-3'-phosphate
  modified_base 4: mod_base = OTHER; note = 2'-O-methyluridine-3'-phosphate
  modified_base 5: mod_base = OTHER; note = 2'-O-methyladenosine-3'-phosphate
  modified_base 6: mod_base = OTHER; note = 2'-deoxy-2'-fluorouridine-3'-phosphate
  modified_base 7: mod_base = OTHER; note = 2'-O-methylguanosine-3'-phosphate
  modified_base 8: mod_base = OTHER; note = 2'-O-methylcytidine-3'-phosphate
  modified_base 9: mod_base = OTHER; note = 2'-O-methyluridine-3'-phosphate
  modified_base 10: mod_base = OTHER; note = 2'-O-methyladenosine-3'-phosphate
  modified_base 11: mod_base = OTHER; note = 2'-O-methyladenosine-3'-phosphate
  modified_base 12: mod_base = OTHER; note = 2'-O-methylcytidine-3'-phosphate
  modified_base 13: mod_base = OTHER; note = 2'-O-methyladenosine-3'-phosphate
  modified_base 14: mod_base = OTHER; note = 2'-deoxy-2'-fluorouridine-3'-phosphate
  modified_base 15: mod_base = OTHER; note = 2'-O-methylguanosine-3'-phosphate
  modified_base 16: mod_base = OTHER; note = 2'-deoxy-2'-fluorouridine-3'-phosphate
  modified_base 17: mod_base = OTHER; note = 2'-O-methyladenosine-3'-phosphate
  modified_base 18: mod_base = OTHER; note = 2'-O-methylcytidine-3'-phosphate
  modified_base 19: mod_base = OTHER; note = 2'-O-methyluridine-3'-phosphate
  modified_base 20: mod_base = OTHER; note = 2'-O-methyladenosine-3'-phosphate
  modified_base 21: mod_base = OTHER; note = 2'-O-methyluridine-3'-phosphorothioate
  modified_base 22: mod_base = OTHER; note = 2'-O-methylcytidine-3'-phosphorothioate
  modified_base 23: mod_base = OTHER; note = 2'-O-methyladenosine
ttatatgctaacatgtactatca

SEQ ID NO: 12677 - RNA, 23 nt, synthetic construct
  source 1..23: mol_type = other RNA
  modified_base 1: mod_base = OTHER; note = 2'-O-methyluridine-3'-phosphorothioate 5'-(E)-Vinylphosphonate
  modified_base 2: mod_base = OTHER; note = 2'-deoxy-2'-fluorouridine-3'-phosphorothioate
  modified_base 3: mod_base = OTHER; note = 2'-O-methyluridine-3'-phosphate
  modified_base 4: mod_base = OTHER; note = 2'-O-methyladenosine-3'-phosphate
  modified_base 5: mod_base = OTHER; note = 2'-O-methyluridine-3'-phosphate
  modified_base 6: mod_base = OTHER; note = 2'-deoxy-2'-fluoroadenosine-3'-phosphate
  modified_base 7: mod_base = OTHER; note = 2'-O-methyluridine-3'-phosphate
  modified_base 8: mod_base = OTHER; note = 2'-O-methylguanosine-3'-phosphate
  modified_base 9: mod_base = OTHER; note = 2'-O-methylcytidine-3'-phosphate
  modified_base 10: mod_base = OTHER; note = 2'-O-methyluridine-3'-phosphate
  modified_base 11: mod_base = OTHER; note = 2'-O-methyladenosine-3'-phosphate
  modified_base 12: mod_base = OTHER; note = 2'-O-methyladenosine-3'-phosphate
  modified_base 13: mod_base = OTHER; note = 2'-O-methylcytidine-3'-phosphate
  modified_base 14: mod_base = OTHER; note = 2'-deoxy-2'-fluoroadenosine-3'-phosphate
  modified_base 15: mod_base = OTHER; note = 2'-O-methyluridine-3'-phosphate
  modified_base 16: mod_base = OTHER; note = 2'-deoxy-2'-fluoroguanosine-3'-phosphate
  modified_base 17: mod_base = OTHER; note = 2'-O-methyluridine-3'-phosphate
  modified_base 18: mod_base = OTHER; note = 2'-O-methyladenosine-3'-phosphate
  modified_base 19: mod_base = OTHER; note = 2'-O-methylcytidine-3'-phosphate
  modified_base 20: mod_base = OTHER; note = 2'-O-methyluridine-3'-phosphate
  modified_base 21: mod_base = OTHER; note = 2'-O-methyladenosine-3'-phosphorothioate
  modified_base 22: mod_base = OTHER; note = 2'-O-methyluridine-3'-phosphorothioate
  modified_base 23: mod_base = OTHER; note = 2'-O-methylcytidine
tttatatgctaacatgtactatc

SEQ ID NO: 12678 - RNA, 23 nt, synthetic construct
  source 1..23: mol_type = other RNA
  modified_base 1: mod_base = OTHER; note = 2'-O-methyluridine-3'-phosphorothioate 5'-(E)-Vinylphosphonate
  modified_base 2: mod_base = OTHER; note = 2'-deoxy-2'-fluorocytidine-3'-phosphorothioate
  modified_base 3: mod_base = OTHER; note = 2'-O-methyladenosine-3'-phosphate
  modified_base 4: mod_base = OTHER; note = 2'-O-methyluridine-3'-phosphate
  modified_base 5: mod_base = OTHER; note = 2'-O-methyluridine-3'-phosphate
  modified_base 6: mod_base = OTHER; note = 2'-deoxy-2'-fluoroadenosine-3'-phosphate
  modified_base 7: mod_base = OTHER; note = 2'-O-methyluridine-3'-phosphate
  modified_base 8: mod_base = OTHER; note = 2'-O-methyladenosine-3'-phosphate
  modified_base 9: mod_base = OTHER; note = 2'-O-methyluridine-3'-phosphate
  modified_base 10: mod_base = OTHER; note = 2'-O-methylguanosine-3'-phosphate
  modified_base 11: mod_base = OTHER; note = 2'-O-methylcytidine-3'-phosphate
  modified_base 12: mod_base = OTHER; note = 2'-O-methyluridine-3'-phosphate
  modified_base 13: mod_base = OTHER; note = 2'-O-methyladenosine-3'-phosphate
  modified_base 14: mod_base = OTHER; note = 2'-deoxy-2'-fluoroadenosine-3'-phosphate
  modified_base 15: mod_base = OTHER; note = 2'-O-methylcytidine-3'-phosphate
  modified_base 16: mod_base = OTHER; note = 2'-deoxy-2'-fluoroadenosine-3'-phosphate
  modified_base 17: mod_base = OTHER; note = 2'-O-methyluridine-3'-phosphate
  modified_base 18: mod_base = OTHER; note = 2'-O-methylguanosine-3'-phosphate
  modified_base 19: mod_base = OTHER; note = 2'-O-methyluridine-3'-phosphate
  modified_base 20: mod_base = OTHER; note = 2'-O-methyladenosine-3'-phosphate
  modified_base 21: mod_base = OTHER; note = 2'-O-methylcytidine-3'-phosphorothioate
  modified_base 22: mod_base = OTHER; note = 2'-O-methyluridine-3'-phosphorothioate
  modified_base 23: mod_base = OTHER; note = 2'-O-methyladenosine
tcattatatgctaacatgtacta

SEQ ID NO: 12679 - RNA, 23 nt, synthetic construct
  source 1..23: mol_type = other RNA
  modified_base 1: mod_base = OTHER; note = 2'-O-methyluridine-3'-phosphorothioate 5'-(E)-Vinylphosphonate
  modified_base 2: mod_base = OTHER; note = 2'-deoxy-2'-fluoroadenosine-3'-phosphorothioate
  modified_base 3: mod_base = OTHER; note = 2'-O-methylcytidine-3'-phosphate
  modified_base 4: mod_base = OTHER; note = 2'-O-methyladenosine-3'-phosphate
  modified_base 5: mod_base = OTHER; note = 2'-O-methyluridine-3'-phosphate
  modified_base 6: mod_base = OTHER; note = 2'-deoxy-2'-fluorouridine-3'-phosphate
  modified_base 7: mod_base = OTHER; note = 2'-O-methyladenosine-3'-phosphate
  modified_base 8: mod_base = OTHER; note = 2'-O-methyluridine-3'-phosphate
  modified_base 9: mod_base = OTHER; note = 2'-O-methyladenosine-3'-phosphate
  modified_base 10: mod_base = OTHER; note = 2'-O-methyluridine-3'-phosphate
  modified_base 11: mod_base = OTHER; note = 2'-O-methylguanosine-3'-phosphate
  modified_base 12: mod_base = OTHER; note = 2'-O-methylcytidine-3'-phosphate
  modified_base 13: mod_base = OTHER; note = 2'-O-methyluridine-3'-phosphate
  modified_base 14: mod_base = OTHER; note = 2'-deoxy-2'-fluoroadenosine-3'-phosphate
  modified_base 15: mod_base = OTHER; note = 2'-O-methyladenosine-3'-phosphate
  modified_base 16: mod_base = OTHER; note = 2'-deoxy-2'-fluorocytidine-3'-phosphate
  modified_base 17: mod_base = OTHER; note = 2'-O-methyladenosine-3'-phosphate
  modified_base 18: mod_base = OTHER; note = 2'-O-methyluridine-3'-phosphate
  modified_base 19: mod_base = OTHER; note = 2'-O-methylguanosine-3'-phosphate
  modified_base 20: mod_base = OTHER; note = 2'-O-methyluridine-3'-phosphate
  modified_base 21: mod_base = OTHER; note = 2'-O-methyladenosine-3'-phosphorothioate
  modified_base 22: mod_base = OTHER; note = 2'-O-methylcytidine-3'-phosphorothioate
  modified_base 23: mod_base = OTHER; note = 2'-O-methyluridine
tacattatatgctaacatgtact

SEQ ID NO: 12680 - RNA, 23 nt, synthetic construct
  source 1..23: mol_type = other RNA
  modified_base 1: mod_base = OTHER; note = 2'-O-methyluridine-3'-phosphorothioate 5'-(E)-Vinylphosphonate
  modified_base 2: mod_base = OTHER; note = 2'-deoxy-2'-fluorocytidine-3'-phosphorothioate
  modified_base 3: mod_base = OTHER; note = 2'-O-methyluridine-3'-phosphate
  modified_base 4: mod_base = OTHER; note = 2'-O-methylcytidine-3'-phosphate
  modified_base 5: mod_base = OTHER; note = 2'-O-methyluridine-3'-phosphate
  modified_base 6: mod_base = OTHER; note = 2'-deoxy-2'-fluorouridine-3'-phosphate
  modified_base 7: mod_base = OTHER; note = 2'-O-methylcytidine-3'-phosphate
  modified_base 8: mod_base = OTHER; note = 2'-O-methyladenosine-3'-phosphate
  modified_base 9: mod_base = OTHER; note = 2'-O-methyladenosine-3'-phosphate
  modified_base 10: mod_base = OTHER; note = 2'-O-methyladenosine-3'-phosphate
  modified_base 11: mod_base = OTHER; note = 2'-O-methyladenosine-3'-phosphate
  modified_base 12: mod_base = OTHER; note = 2'-O-methyluridine-3'-phosphate
  modified_base 13: mod_base = OTHER; note = 2'-O-methyladenosine-3'-phosphate
  modified_base 14: mod_base = OTHER; note = 2'-deoxy-2'-fluorocytidine-3'-phosphate
  modified_base 15: mod_base = OTHER; note = 2'-O-methyladenosine-3'-phosphate
  modified_base 16: mod_base = OTHER; note = 2'-deoxy-2'-fluorouridine-3'-phosphate
  modified_base 17: mod_base = OTHER; note = 2'-O-methyluridine-3'-phosphate
  modified_base 18: mod_base = OTHER; note = 2'-O-methyladenosine-3'-phosphate
  modified_base 19: mod_base = OTHER; note = 2'-O-methyluridine-3'-phosphate
  modified_base 20: mod_base = OTHER; note = 2'-O-methyladenosine-3'-phosphate
  modified_base 21: mod_base = OTHER; note = 2'-O-methyluridine-3'-phosphorothioate
  modified_base 22: mod_base = OTHER; note = 2'-O-methylguanosine-3'-phosphorothioate
  modified_base 23: mod_base = OTHER; note = 2'-O-methylcytidine
tctcttcaaaatacattatatgc

SEQ ID NO: 12681 - RNA, 23 nt, synthetic construct
  source 1..23: mol_type = other RNA
  modified_base 1: mod_base = OTHER; note = 2'-O-methyluridine-3'-phosphorothioate 5'-(E)-Vinylphosphonate
  modified_base 2: mod_base = OTHER; note = 2'-deoxy-2'-fluorouridine-3'-phosphorothioate
  modified_base 3: mod_base = OTHER; note = 2'-O-methyluridine-3'-phosphate
  modified_base 4: mod_base = OTHER; note = 2'-O-methyluridine-3'-phosphate
  modified_base 5: mod_base = OTHER; note = 2'-O-methyladenosine-3'-phosphate
  modified_base 6: mod_base = OTHER; note = 2'-deoxy-2'-fluorocytidine-3'-phosphate
  modified_base 7: mod_base = OTHER; note = 2'-O-methyluridine-3'-phosphate
  modified_base 8: mod_base = OTHER; note = 2'-O-methyluridine-3'-phosphate
  modified_base 9: mod_base = OTHER; note = 2'-O-methylcytidine-3'-phosphate
  modified_base 10: mod_base = OTHER; note = 2'-O-methyladenosine-3'-phosphate
  modified_base 11: mod_base = OTHER; note = 2'-O-methylcytidine-3'-phosphate
  modified_base 12: mod_base = OTHER; note = 2'-O-methyluridine-3'-phosphate
  modified_base 13: mod_base = OTHER; note = 2'-O-methylcytidine-3'-phosphate
  modified_base 14: mod_base = OTHER; note = 2'-deoxy-2'-fluorouridine-3'-phosphate
  modified_base 15: mod_base = OTHER; note = 2'-O-methyluridine-3'-phosphate
  modified_base 16: mod_base = OTHER; note = 2'-deoxy-2'-fluorocytidine-3'-phosphate
  modified_base 17: mod_base = OTHER; note = 2'-O-methyladenosine-3'-phosphate
  modified_base 18: mod_base = OTHER; note = 2'-O-methyladenosine-3'-phosphate
  modified_base 19: mod_base = OTHER; note = 2'-O-methyladenosine-3'-phosphate
  modified_base 20: mod_base = OTHER; note = 2'-O-methyladenosine-3'-phosphate
  modified_base 21: mod_base = OTHER; note = 2'-O-methyluridine-3'-phosphorothioate
  modified_base 22: mod_base = OTHER; note = 2'-O-methyladenosine-3'-phosphorothioate
  modified_base 23: mod_base = OTHER; note = 2'-O-methylcytidine
ttttacttcactcttcaaaatac

SEQ ID NO: 12682 - RNA, 23 nt, synthetic construct
  source 1..23: mol_type = other RNA
  modified_base 1: mod_base = OTHER; note = 2'-O-methyluridine-3'-phosphorothioate 5'-(E)-Vinylphosphonate
  modified_base 2: mod_base = OTHER; note = 2'-deoxy-2'-fluorocytidine-3'-phosphorothioate
  modified_base 3: mod_base = OTHER; note = 2'-O-methyladenosine-3'-phosphate
  modified_base 4: mod_base = OTHER; note = 2'-O-methyluridine-3'-phosphate
  modified_base 5: mod_base = OTHER; note = 2'-O-methyluridine-3'-phosphate
  modified_base 6: mod_base = OTHER; note = 2'-deoxy-2'-fluorouridine-3'-phosphate
  modified_base 7: mod_base = OTHER; note = 2'-O-methyladenosine-3'-phosphate
  modified_base 8: mod_base = OTHER; note = 2'-O-methylcytidine-3'-phosphate
  modified_base 9: mod_base = OTHER; note = 2'-O-methyluridine-3'-phosphate
  modified_base 10: mod_base = OTHER; note = 2'-O-methyluridine-3'-phosphate
  modified_base 11: mod_base = OTHER; note = 2'-O-methylcytidine-3'-phosphate
  modified_base 12: mod_base = OTHER; note = 2'-O-methyladenosine-3'-phosphate
  modified_base 13: mod_base = OTHER; note = 2'-O-methylcytidine-3'-phosphate
  modified_base 14: mod_base = OTHER; note = 2'-deoxy-2'-fluorouridine-3'-phosphate
  modified_base 15: mod_base = OTHER; note = 2'-O-methylcytidine-3'-phosphate
  modified_base 16: mod_base = OTHER; note = 2'-deoxy-2'-fluorouridine-3'-phosphate
  modified_base 17: mod_base = OTHER; note = 2'-O-methyluridine-3'-phosphate
  modified_base 18: mod_base = OTHER; note = 2'-O-methylcytidine-3'-phosphate
  modified_base 19: mod_base = OTHER; note = 2'-O-methyladenosine-3'-phosphate
  modified_base 20: mod_base = OTHER; note = 2'-O-methyladenosine-3'-phosphate
  modified_base 21: mod_base = OTHER; note = 2'-O-methyladenosine-3'-phosphorothioate
  modified_base 22: mod_base = OTHER; note = 2'-O-methyladenosine-3'-phosphorothioate
  modified_base 23: mod_base = OTHER; note = 2'-O-methyluridine
tcatttacttcactcttcaaaat

SEQ ID NO: 12683 - RNA, 23 nt, synthetic construct
  source 1..23: mol_type = other RNA
  modified_base 1: mod_base = OTHER; note = 2'-O-methyluridine-3'-phosphorothioate 5'-(E)-Vinylphosphonate
  modified_base 2: mod_base = OTHER; note = 2'-deoxy-2'-fluoroguanosine-3'-phosphorothioate
  modified_base 3: mod_base = OTHER; note = 2'-O-methylcytidine-3'-phosphate
  modified_base 4: mod_base = OTHER; note = 2'-O-methyladenosine-3'-phosphate
  modified_base 5: mod_base = OTHER; note = 2'-O-methyluridine-3'-phosphate
  modified_base 6: mod_base = OTHER; note = 2'-deoxy-2'-fluorouridine-3'-phosphate
  modified_base 7: mod_base = OTHER; note = 2'-O-methyluridine-3'-phosphate
  modified_base 8: mod_base = OTHER; note = 2'-O-methyladenosine-3'-phosphate
  modified_base 9: mod_base = OTHER; note = 2'-O-methylcytidine-3'-phosphate
  modified_base 10: mod_base = OTHER; note = 2'-O-methyluridine-3'-phosphate
  modified_base 11: mod_base = OTHER; note = 2'-O-methyluridine-3'-phosphate
  modified_base 12: mod_base = OTHER; note = 2'-O-methylcytidine-3'-phosphate
  modified_base 13: mod_base = OTHER; note = 2'-O-methyladenosine-3'-phosphate
  modified_base 14: mod_base = OTHER; note = 2'-deoxy-2'-fluorocytidine-3'-phosphate
  modified_base 15: mod_base = OTHER; note = 2'-O-methyluridine-3'-phosphate
  modified_base 16: mod_base = OTHER; note = 2'-deoxy-2'-fluorocytidine-3'-phosphate
  modified_base 17: mod_base = OTHER; note = 2'-O-methyluridine-3'-phosphate
  modified_base 18: mod_base = OTHER; note = 2'-O-methyluridine-3'-phosphate
  modified_base 19: mod_base = OTHER; note = 2'-O-methylcytidine-3'-phosphate
  modified_base 20: mod_base = OTHER; note = 2'-O-methyladenosine-3'-phosphate
  modified_base 21: mod_base = OTHER; note = 2'-O-methyladenosine-3'-phosphorothioate
  modified_base 22: mod_base = OTHER; note = 2'-O-methyladenosine-3'-phosphorothioate
  modified_base 23: mod_base = OTHER; note = 2'-O-methyladenosine
tgcatttacttcactcttcaaaa

SEQ ID NO: 12684 - RNA, 23 nt, synthetic construct
  source 1..23: mol_type = other RNA
  modified_base 1: mod_base = OTHER; note = 2'-O-methyluridine-3'-phosphorothioate 5'-(E)-Vinylphosphonate
  modified_base 2: mod_base = OTHER; note = 2'-deoxy-2'-fluoroadenosine-3'-phosphorothioate
  modified_base 3: mod_base = OTHER; note = 2'-O-methylguanosine-3'-phosphate
  modified_base 4: mod_base = OTHER; note = 2'-O-methylcytidine-3'-phosphate
  modified_base 5: mod_base = OTHER; note = 2'-O-methyladenosine-3'-phosphate
  modified_base 6: mod_base = OTHER; note = 2'-deoxy-2'-fluorouridine-3'-phosphate
  modified_base 7: mod_base = OTHER; note = 2'-O-methyluridine-3'-phosphate
  modified_base 8: mod_base = OTHER; note = 2'-O-methyluridine-3'-phosphate
  modified_base 9: mod_base = OTHER; note = 2'-O-methyladenosine-3'-phosphate
  modified_base 10: mod_base = OTHER; note = 2'-O-methylcytidine-3'-phosphate
  modified_base 11: mod_base = OTHER; note = 2'-O-methyluridine-3'-phosphate
  modified_base 12: mod_base = OTHER; note = 2'-O-methyluridine-3'-phosphate
  modified_base 13: mod_base = OTHER; note = 2'-O-methylcytidine-3'-phosphate
  modified_base 14: mod_base = OTHER; note = 2'-deoxy-2'-fluoroadenosine-3'-phosphate
  modified_base 15: mod_base = OTHER; note = 2'-O-methylcytidine-3'-phosphate
  modified_base 16: mod_base = OTHER; note = 2'-deoxy-2'-fluorouridine-3'-phosphate
  modified_base 17: mod_base = OTHER; note = 2'-O-methylcytidine-3'-phosphate
  modified_base 18: mod_base = OTHER; note = 2'-O-methyluridine-3'-phosphate
  modified_base 19: mod_base = OTHER; note = 2'-O-methyluridine-3'-phosphate
  modified_base 20: mod_base = OTHER; note = 2'-O-methylcytidine-3'-phosphate
  modified_base 21: mod_base = OTHER; note = 2'-O-methyladenosine-3'-phosphorothioate
  modified_base 22: mod_base = OTHER; note = 2'-O-methyladenosine-3'-phosphorothioate
  modified_base 23: mod_base = OTHER; note = 2'-O-methyladenosine
tagcatttacttcactcttcaaa

SEQ ID NO: 12685 - RNA, 23 nt, synthetic construct
  source 1..23: mol_type = other RNA
  modified_base 1: mod_base = OTHER; note = 2'-O-methyluridine-3'-phosphorothioate 5'-(E)-Vinylphosphonate
  modified_base 2: mod_base = OTHER; note = 2'-deoxy-2'-fluorouridine-3'-phosphorothioate
  modified_base 3: mod_base = OTHER; note = 2'-O-methyladenosine-3'-phosphate
  modified_base 4: mod_base = OTHER; note = 2'-O-methylguanosine-3'-phosphate
  modified_base 5: mod_base = OTHER; note = 2'-O-methylcytidine-3'-phosphate
  modified_base 6: mod_base = OTHER; note = 2'-deoxy-2'-fluoroadenosine-3'-phosphate
  modified_base 7: mod_base = OTHER; note = 2'-O-methyluridine-3'-phosphate
  modified_base 8: mod_base = OTHER; note = 2'-O-methyluridine-3'-phosphate
  modified_base 9: mod_base = OTHER; note = 2'-O-methyluridine-3'-phosphate
  modified_base 10: mod_base = OTHER; note = 2'-O-methyladenosine-3'-phosphate
  modified_base 11: mod_base = OTHER; note = 2'-O-methylcytidine-3'-phosphate
  modified_base 12: mod_base = OTHER; note = 2'-O-methyluridine-3'-phosphate
  modified_base 13: mod_base = OTHER; note = 2'-O-methyluridine-3'-phosphate
  modified_base 14: mod_base = OTHER; note = 2'-deoxy-2'-fluorocytidine-3'-phosphate
  modified_base 15: mod_base = OTHER; note = 2'-O-methyladenosine-3'-phosphate
  modified_base 16: mod_base = OTHER; note = 2'-deoxy-2'-fluorocytidine-3'-phosphate
  modified_base 17: mod_base = OTHER; note = 2'-O-methyluridine-3'-phosphate
  modified_base 18: mod_base = OTHER; note = 2'-O-methylcytidine-3'-phosphate
  modified_base 19: mod_base = OTHER; note = 2'-O-methyluridine-3'-phosphate
  modified_base 20: mod_base = OTHER; note = 2'-O-methyluridine-3'-phosphate
  modified_base 21: mod_base = OTHER; note = 2'-O-methylcytidine-3'-phosphorothioate
  modified_base 22: mod_base = OTHER; note = 2'-O-methyladenosine-3'-phosphorothioate
  modified_base 23: mod_base = OTHER; note = 2'-O-methyladenosine
ttagcatttacttcactcttcaa

SEQ ID NO: 12686 - RNA, 23 nt, synthetic construct
  source 1..23: mol_type = other RNA
  modified_base 1: mod_base = OTHER; note = 2'-O-methyluridine-3'-phosphorothioate 5'-(E)-Vinylphosphonate
  modified_base 2: mod_base = OTHER; note = 2'-deoxy-2'-fluoroadenosine-3'-phosphorothioate
  modified_base 3: mod_base = OTHER; note = 2'-O-methyluridine-3'-phosphate
  modified_base 4: mod_base = OTHER; note = 2'-O-methyladenosine-3'-phosphate
  modified_base 5: mod_base = OTHER; note = 2'-O-methylguanosine-3'-phosphate
  modified_base 6: mod_base = OTHER; note = 2'-deoxy-2'-fluorocytidine-3'-phosphate
  modified_base 7: mod_base = OTHER; note = 2'-O-methyladenosine-3'-phosphate
  modified_base 8: mod_base = OTHER; note = 2'-O-methyluridine-3'-phosphate
  modified_base 9: mod_base = OTHER; note = 2'-O-methyluridine-3'-phosphate
  modified_base 10: mod_base = OTHER; note = 2'-O-methyluridine-3'-phosphate
  modified_base 11: mod_base = OTHER; note = 2'-O-methyladenosine-3'-phosphate
  modified_base 12: mod_base = OTHER; note = 2'-O-methylcytidine-3'-phosphate
  modified_base 13: mod_base = OTHER; note = 2'-O-methyluridine-3'-phosphate
  modified_base 14: mod_base = OTHER; note = 2'-deoxy-2'-fluorouridine-3'-phosphate
  modified_base 15: mod_base = OTHER; note = 2'-O-methylcytidine-3'-phosphate
  modified_base 16: mod_base = OTHER; note = 2'-deoxy-2'-fluoroadenosine-3'-phosphate
  modified_base 17: mod_base = OTHER; note = 2'-O-methylcytidine-3'-phosphate
  modified_base 18: mod_base = OTHER; note = 2'-O-methyluridine-3'-phosphate
  modified_base 19: mod_base = OTHER; note = 2'-O-methylcytidine-3'-phosphate
  modified_base 20: mod_base = OTHER; note = 2'-O-methyluridine-3'-phosphate
  modified_base 21: mod_base = OTHER; note = 2'-O-methyluridine-3'-phosphorothioate
  modified_base 22: mod_base = OTHER; note = 2'-O-methylcytidine-3'-phosphorothioate
  modified_base 23: mod_base = OTHER; note = 2'-O-methyladenosine
tatagcatttacttcactcttca

SEQ ID NO: 12687 - RNA, 23 nt, synthetic construct
  source 1..23: mol_type = other RNA
  modified_base 1: mod_base = OTHER; note = 2'-O-methyluridine-3'-phosphorothioate 5'-(E)-Vinylphosphonate
  modified_base 2: mod_base = OTHER; note = 2'-deoxy-2'-fluoroadenosine-3'-phosphorothioate
  modified_base 3: mod_base = OTHER; note = 2'-O-methyladenosine-3'-phosphate
  modified_base 4: mod_base = OTHER; note = 2'-O-methyluridine-3'-phosphate
  modified_base 5: mod_base = OTHER; note = 2'-O-methyladenosine-3'-phosphate
  modified_base 6: mod_base = OTHER; note = 2'-deoxy-2'-fluoroguanosine-3'-phosphate
  modified_base 7: mod_base = OTHER; note = 2'-O-methylcytidine-3'-phosphate
  modified_base 8: mod_base = OTHER; note = 2'-O-methyladenosine-3'-phosphate
  modified_base 9: mod_base = OTHER; note = 2'-O-methyluridine-3'-phosphate
  modified_base 10: mod_base = OTHER; note = 2'-O-methyluridine-3'-phosphate
  modified_base 11: mod_base = OTHER; note = 2'-O-methyluridine-3'-phosphate
  modified_base 12: mod_base = OTHER; note = 2'-O-methyladenosine-3'-phosphate
  modified_base 13: mod_base = OTHER; note = 2'-O-methylcytidine-3'-phosphate
  modified_base 14: mod_base = OTHER; note = 2'-deoxy-2'-fluorouridine-3'-phosphate
  modified_base 15: mod_base = OTHER; note = 2'-O-methyluridine-3'-phosphate
  modified_base 16: mod_base = OTHER; note = 2'-deoxy-2'-fluorocytidine-3'-phosphate
  modified_base 17: mod_base = OTHER; note = 2'-O-methyladenosine-3'-phosphate
  modified_base 18: mod_base = OTHER; note = 2'-O-methylcytidine-3'-phosphate
  modified_base 19: mod_base = OTHER; note = 2'-O-methyluridine-3'-phosphate
  modified_base 20: mod_base = OTHER; note = 2'-O-methylcytidine-3'-phosphate
  modified_base 21: mod_base = OTHER; note = 2'-O-methyluridine-3'-phosphorothioate
  modified_base 22: mod_base = OTHER; note = 2'-O-methyluridine-3'-phosphorothioate
  modified_base 23: mod_base = OTHER; note = 2'-O-methylcytidine
taatagcatttacttcactcttc

SEQ ID NO: 12688 - RNA, 23 nt, synthetic construct
  source 1..23: mol_type = other RNA
  modified_base 1: mod_base = OTHER; note = 2'-O-methyluridine-3'-phosphorothioate 5'-(E)-Vinylphosphonate
  modified_base 2: mod_base = OTHER; note = 2'-deoxy-2'-fluorocytidine-3'-phosphorothioate
  modified_base 3: mod_base = OTHER; note = 2'-O-methyladenosine-3'-phosphate
  modified_base 4: mod_base = OTHER; note = 2'-O-methyladenosine-3'-phosphate
  modified_base 5: mod_base = OTHER; note = 2'-O-methyluridine-3'-phosphate
  modified_base 6: mod_base = OTHER; note = 2'-deoxy-2'-fluoroadenosine-3'-phosphate
  modified_base 7: mod_base = OTHER; note = 2'-O-methylguanosine-3'-phosphate
  modified_base 8: mod_base = OTHER; note = 2'-O-methylcytidine-3'-phosphate
  modified_base 9: mod_base = OTHER; note = 2'-O-methyladenosine-3'-phosphate
  modified_base 10: mod_base = OTHER; note = 2'-O-methyluridine-3'-phosphate
  modified_base 11: mod_base = OTHER; note = 2'-O-methyluridine-3'-phosphate
  modified_base 12: mod_base = OTHER; note = 2'-O-methyluridine-3'-phosphate
  modified_base 13: mod_base = OTHER; note = 2'-O-methyladenosine-3'-phosphate
  modified_base 14: mod_base = OTHER; note = 2'-deoxy-2'-fluorocytidine-3'-phosphate
  modified_base 15: mod_base = OTHER; note = 2'-O-methyluridine-3'-phosphate
  modified_base 16: mod_base = OTHER; note = 2'-deoxy-2'-fluorouridine-3'-phosphate
  modified_base 17: mod_base = OTHER; note = 2'-O-methylcytidine-3'-phosphate
  modified_base 18: mod_base = OTHER; note = 2'-O-methyladenosine-3'-phosphate
  modified_base 19: mod_base = OTHER; note = 2'-O-methylcytidine-3'-phosphate
  modified_base 20: mod_base = OTHER; note = 2'-O-methyluridine-3'-phosphate
  modified_base 21: mod_base = OTHER; note = 2'-O-methylcytidine-3'-phosphorothioate
  modified_base 22: mod_base = OTHER; note = 2'-O-methyluridine-3'-phosphorothioate
  modified_base 23: mod_base = OTHER; note = 2'-O-methyluridine
tcaatagcatttacttcactctt

SEQ ID NO: 12689 - RNA, 23 nt, synthetic construct
  source 1..23: mol_type = other RNA
  modified_base 1: mod_base = OTHER; note = 2'-O-methyluridine-3'-phosphorothioate 5'-(E)-Vinylphosphonate
  modified_base 2: mod_base = OTHER; note = 2'-deoxy-2'-fluorouridine-3'-phosphorothioate
  modified_base 3: mod_base = OTHER; note = 2'-O-methylcytidine-3'-phosphate
  modified_base 4: mod_base = OTHER; note = 2'-O-methyladenosine-3'-phosphate
  modified_base 5: mod_base = OTHER; note = 2'-O-methyladenosine-3'-phosphate
  modified_base 6: mod_base = OTHER; note = 2'-deoxy-2'-fluorouridine-3'-phosphate
  modified_base 7: mod_base = OTHER; note = 2'-O-methyladenosine-3'-phosphate
  modified_base 8: mod_base = OTHER; note = 2'-O-methylguanosine-3'-phosphate
  modified_base 9: mod_base = OTHER; note = 2'-O-methylcytidine-3'-phosphate
  modified_base 10: mod_base = OTHER; note = 2'-O-methyladenosine-3'-phosphate
  modified_base 11: mod_base = OTHER; note = 2'-O-methyluridine-3'-phosphate
  modified_base 12: mod_base = OTHER; note = 2'-O-methyluridine-3'-phosphate
  modified_base 13: mod_base = OTHER; note = 2'-O-methyluridine-3'-phosphate
  modified_base 14: mod_base = OTHER; note = 2'-deoxy-2'-fluoroadenosine-3'-phosphate
  modified_base 15: mod_base = OTHER; note = 2'-O-methylcytidine-3'-phosphate
  modified_base 16: mod_base = OTHER; note = 2'-deoxy-2'-fluorouridine-3'-phosphate
  modified_base 17: mod_base = OTHER; note = 2'-O-methyluridine-3'-phosphate
  modified_base 18: mod_base = OTHER; note = 2'-O-methylcytidine-3'-phosphate
  modified_base 19: mod_base = OTHER; note = 2'-O-methyladenosine-3'-phosphate
  modified_base 20: mod_base = OTHER; note = 2'-O-methylcytidine-3'-phosphate
  modified_base 21: mod_base = OTHER; note = 2'-O-methyluridine-3'-phosphorothioate
  modified_base 22: mod_base = OTHER; note = 2'-O-methylcytidine-3'-phosphorothioate
  modified_base 23: mod_base = OTHER; note = 2'-O-methyluridine
ttcaatagcatttacttcactct

SEQ ID NO: 12690 - RNA, 23 nt, synthetic construct
  source 1..23: mol_type = other RNA
  modified_base 1: mod_base = OTHER; note = 2'-O-methyluridine-3'-phosphorothioate 5'-(E)-Vinylphosphonate
  modified_base 2: mod_base = OTHER; note = 2'-deoxy-2'-fluoroadenosine-3'-phosphorothioate
  modified_base 3: mod_base = OTHER; note = 2'-O-methyluridine-3'-phosphate
  modified_base 4: mod_base = OTHER; note = 2'-O-methylcytidine-3'-phosphate
  modified_base 5: mod_base = OTHER; note = 2'-O-methyladenosine-3'-phosphate
  modified_base 6: mod_base = OTHER; note = 2'-deoxy-2'-fluoroadenosine-3'-phosphate
  modified_base 7: mod_base = OTHER; note = 2'-O-methyluridine-3'-phosphate
  modified_base 8: mod_base = OTHER; note = 2'-O-methyladenosine-3'-phosphate
  modified_base 9: mod_base = OTHER; note = 2'-O-methylguanosine-3'-phosphate
  modified_base 10: mod_base = OTHER; note = 2'-O-methylcytidine-3'-phosphate
  modified_base 11: mod_base = OTHER; note = 2'-O-methyladenosine-3'-phosphate
  modified_base 12: mod_base = OTHER; note = 2'-O-methyluridine-3'-phosphate
  modified_base 13: mod_base = OTHER; note = 2'-O-methyluridine-3'-phosphate
  modified_base 14: mod_base = OTHER; note = 2'-deoxy-2'-fluorouridine-3'-phosphate
  modified_base 15: mod_base = OTHER; note = 2'-O-methyladenosine-3'-phosphate
  modified_base 16: mod_base = OTHER; note = 2'-deoxy-2'-fluorocytidine-3'-phosphate
  modified_base 17: mod_base = OTHER; note = 2'-O-methyluridine-3'-phosphate
  modified_base 18: mod_base = OTHER; note = 2'-O-methyluridine-3'-phosphate
  modified_base 19: mod_base = OTHER; note = 2'-O-methylcytidine-3'-phosphate
  modified_base 20: mod_base = OTHER; note = 2'-O-methyladenosine-3'-phosphate
  modified_base 21: mod_base = OTHER; note = 2'-O-methylcytidine-3'-phosphorothioate
  modified_base 22: mod_base = OTHER; note = 2'-O-methyluridine-3'-phosphorothioate
  modified_base 23: mod_base = OTHER; note = 2'-O-methylcytidine
tatcaatagcatttacttcactc

SEQ ID NO: 12691 - RNA, 23 nt, synthetic construct
  source 1..23: mol_type = other RNA
  modified_base 1: mod_base = OTHER; note = 2'-O-methyluridine-3'-phosphorothioate 5'-(E)-Vinylphosphonate
  modified_base 2: mod_base = OTHER; note = 2'-deoxy-2'-fluorouridine-3'-phosphorothioate
  modified_base 3: mod_base = OTHER; note = 2'-O-methyladenosine-3'-phosphate
  modified_base 4: mod_base = OTHER; note = 2'-O-methyluridine-3'-phosphate
  modified_base 5: mod_base = OTHER; note = 2'-O-methylcytidine-3'-phosphate
  modified_base 6: mod_base = OTHER; note = 2'-deoxy-2'-fluoroadenosine-3'-phosphate
  modified_base 7: mod_base = OTHER; note = 2'-O-methyladenosine-3'-phosphate
  modified_base 8: mod_base = OTHER; note = 2'-O-methyluridine-3'-phosphate
  modified_base 9: mod_base = OTHER; note = 2'-O-methyladenosine-3'-phosphate
  modified_base 10: mod_base = OTHER; note = 2'-O-methylguanosine-3'-phosphate
  modified_base 11: mod_base = OTHER; note = 2'-O-methylcytidine-3'-phosphate
  modified_base 12: mod_base = OTHER; note = 2'-O-methyladenosine-3'-phosphate
  modified_base 13: mod_base = OTHER; note = 2'-O-methyluridine-3'-phosphate
  modified_base 14: mod_base = OTHER; note = 2'-deoxy-2'-fluorouridine-3'-phosphate
  modified_base 15: mod_base = OTHER; note = 2'-O-methyluridine-3'-phosphate
  modified_base 16: mod_base = OTHER; note = 2'-deoxy-2'-fluoroadenosine-3'-phosphate
  modified_base 17: mod_base = OTHER; note = 2'-O-methylcytidine-3'-phosphate
  modified_base 18: mod_base = OTHER; note = 2'-O-methyluridine-3'-phosphate
  modified_base 19: mod_base = OTHER; note = 2'-O-methyluridine-3'-phosphate
  modified_base 20: mod_base = OTHER; note = 2'-O-methylcytidine-3'-phosphate
  modified_base 21: mod_base = OTHER; note = 2'-O-methyladenosine-3'-phosphorothioate
  modified_base 22: mod_base = OTHER; note = 2'-O-methylcytidine-3'-phosphorothioate
  modified_base 23: mod_base = OTHER; note = 2'-O-methyluridine
ttatcaatagcatttacttcact

SEQ ID NO: 12692 - RNA, 23 nt, synthetic construct
  source 1..23: mol_type = other RNA
  modified_base 1: mod_base = OTHER; note = 2'-O-methyluridine-3'-phosphorothioate 5'-(E)-Vinylphosphonate
  modified_base 2: mod_base = OTHER; note = 2'-deoxy-2'-fluorouridine-3'-phosphorothioate
  modified_base 3: mod_base = OTHER; note = 2'-O-methyluridine-3'-phosphate
  modified_base 4: mod_base = OTHER; note = 2'-O-methyladenosine-3'-phosphate
  modified_base 5: mod_base = OTHER; note = 2'-O-methyluridine-3'-phosphate
  modified_base 6: mod_base = OTHER; note = 2'-deoxy-2'-fluorocytidine-3'-phosphate
  modified_base 7: mod_base = OTHER; note = 2'-O-methyladenosine-3'-phosphate
  modified_base 8: mod_base = OTHER; note = 2'-O-methyladenosine-3'-phosphate
  modified_base 9: mod_base = OTHER; note = 2'-O-methyluridine-3'-phosphate
  modified_base 10: mod_base = OTHER; note = 2'-O-methyladenosine-3'-phosphate
  modified_base 11: mod_base = OTHER; note = 2'-O-methylguanosine-3'-phosphate
  modified_base 12: mod_base = OTHER; note = 2'-O-methylcytidine-3'-phosphate
  modified_base 13: mod_base = OTHER; note = 2'-O-methyladenosine-3'-phosphate
  modified_base 14: mod_base = OTHER; note = 2'-deoxy-2'-fluorouridine-3'-phosphate
  modified_base 15: mod_base = OTHER; note = 2'-O-methyluridine-3'-phosphate
  modified_base 16: mod_base = OTHER; note = 2'-deoxy-2'-fluorouridine-3'-phosphate
  modified_base 17: mod_base = OTHER; note = 2'-O-methyladenosine-3'-phosphate
  modified_base 18: mod_base = OTHER; note = 2'-O-methylcytidine-3'-phosphate
  modified_base 19: mod_base = OTHER; note = 2'-O-methyluridine-3'-phosphate
  modified_base 20: mod_base = OTHER; note = 2'-O-methyluridine-3'-phosphate
  modified_base 21: mod_base = OTHER; note = 2'-O-methylcytidine-3'-phosphorothioate
  modified_base 22: mod_base = OTHER; note = 2'-O-methyladenosine-3'-phosphorothioate
  modified_base 23: mod_base = OTHER; note = 2'-O-methylcytidine
tttatcaatagcatttacttcac

SEQ ID NO: 12693 - RNA, 23 nt, synthetic construct
  source 1..23: mol_type = other RNA
  modified_base 1: mod_base = OTHER; note = 2'-O-methyluridine-3'-phosphorothioate 5'-(E)-Vinylphosphonate
  modified_base 2: mod_base = OTHER; note = 2'-deoxy-2'-fluoroadenosine-3'-phosphorothioate
  modified_base 3: mod_base = OTHER; note = 2'-O-methylguanosine-3'-phosphate
  modified_base 4: mod_base = OTHER; note = 2'-O-methyluridine-3'-phosphate
  modified_base 5: mod_base = OTHER; note = 2'-O-methyladenosine-3'-phosphate
  modified_base 6: mod_base = OTHER; note = 2'-deoxy-2'-fluoroguanosine-3'-phosphate
  modified_base 7: mod_base = OTHER; note = 2'-O-methylcytidine-3'-phosphate
  modified_base 8: mod_base = OTHER; note = 2'-O-methyladenosine-3'-phosphate
  modified_base 9: mod_base = OTHER; note = 2'-O-methyluridine-3'-phosphate
  modified_base 10: mod_base = OTHER; note = 2'-O-methyluridine-3'-phosphate
  modified_base 11: mod_base = OTHER; note = 2'-O-methyluridine-3'-phosphate
  modified_base 12: mod_base = OTHER; note = 2'-O-methylcytidine-3'-phosphate
  modified_base 13: mod_base = OTHER; note = 2'-O-methyluridine-3'-phosphate
  modified_base 14: mod_base = OTHER; note = 2'-deoxy-2'-fluorouridine-3'-phosphate
  modified_base 15: mod_base = OTHER; note = 2'-O-methyluridine-3'-phosphate
  modified_base 16: mod_base = OTHER; note = 2'-deoxy-2'-fluoroadenosine-3'-phosphate
  modified_base 17: mod_base = OTHER; note = 2'-O-methylcytidine-3'-phosphate
  modified_base 18: mod_base = OTHER; note = 2'-O-methyluridine-3'-phosphate
  modified_base 19: mod_base = OTHER; note = 2'-O-methylguanosine-3'-phosphate
  modified_base 20: mod_base = OTHER; note = 2'-O-methyluridine-3'-phosphate
  modified_base 21: mod_base = OTHER; note = 2'-O-methyluridine-3'-phosphorothioate
  modified_base 22: mod_base = OTHER; note = 2'-O-methyladenosine-3'-phosphorothioate
  modified_base 23: mod_base = OTHER; note = 2'-O-methyluridine
tagtagcatttctttactgttat

SEQ ID NO: 12694 - RNA, 23 nt, synthetic construct
  source 1..23: mol_type = other RNA
  modified_base 1: mod_base = OTHER; note = 2'-O-methyluridine-3'-phosphorothioate 5'-(E)-Vinylphosphonate
  modified_base 2: mod_base = OTHER; note = 2'-deoxy-2'-fluoroguanosine-3'-phosphorothioate
  modified_base 3: mod_base = OTHER; note = 2'-O-methylcytidine-3'-phosphate
  modified_base 4: mod_base = OTHER; note = 2'-O-methyladenosine-3'-phosphate
  modified_base 5: mod_base = OTHER; note = 2'-O-methyluridine-3'-phosphate
  modified_base 6: mod_base = OTHER; note = 2'-deoxy-2'-fluorouridine-3'-phosphate
  modified_base 7: mod_base = OTHER; note = 2'-O-methyluridine-3'-phosphate
  modified_base 8: mod_base = OTHER; note = 2'-O-methylcytidine-3'-phosphate
  modified_base 9: mod_base = OTHER; note = 2'-O-methyluridine-3'-phosphate
  modified_base 10: mod_base = OTHER; note = 2'-O-methyluridine-3'-phosphate
  modified_base 11: mod_base = OTHER; note = 2'-O-methyluridine-3'-phosphate
  modified_base 12: mod_base = OTHER; note = 2'-O-methyladenosine-3'-phosphate
  modified_base 13: mod_base = OTHER; note = 2'-O-methylcytidine-3'-phosphate
  modified_base 14: mod_base = OTHER; note = 2'-deoxy-2'-fluorouridine-3'-phosphate
  modified_base 15: mod_base = OTHER; note = 2'-O-methylguanosine-3'-phosphate
  modified_base 16: mod_base = OTHER; note = 2'-deoxy-2'-fluorouridine-3'-phosphate
  modified_base 17: mod_base = OTHER; note = 2'-O-methyluridine-3'-phosphate
  modified_base 18: mod_base = OTHER; note = 2'-O-methyladenosine-3'-phosphate
  modified_base 19: mod_base = OTHER; note = 2'-O-methyluridine-3'-phosphate
  modified_base 20: mod_base = OTHER; note = 2'-O-methyluridine-3'-phosphate
  modified_base 21: mod_base = OTHER; note = 2'-O-methyladenosine-3'-phosphorothioate
  modified_base 22: mod_base = OTHER; note = 2'-O-methylguanosine-3'-phosphorothioate
  modified_base 23: mod_base = OTHER; note = 2'-O-methyluridine
tgcatttctttactgttattagt

SEQ ID NO: 12695 - RNA, 23 nt, synthetic construct
  source 1..23: mol_type = other RNA
  modified_base 1: mod_base = OTHER; note = 2'-O-methyluridine-3'-phosphorothioate 5'-(E)-Vinylphosphonate
  modified_base 2: mod_base = OTHER; note = 2'-deoxy-2'-fluoroadenosine-3'-phosphorothioate
  modified_base 3: mod_base = OTHER; note = 2'-O-methylguanosine-3'-phosphate
  modified_base 4: mod_base = OTHER; note = 2'-O-methylcytidine-3'-phosphate
  modified_base 5: mod_base = OTHER; note = 2'-O-methyladenosine-3'-phosphate
  modified_base 6: mod_base = OTHER; note = 2'-deoxy-2'-fluorouridine-3'-phosphate
  modified_base 7: mod_base = OTHER; note = 2'-O-methyluridine-3'-phosphate
  modified_base 8: mod_base = OTHER; note = 2'-O-methyluridine-3'-phosphate
  modified_base 9: mod_base = OTHER; note = 2'-O-methylcytidine-3'-phosphate
  modified_base 10: mod_base = OTHER; note = 2'-O-methyluridine-3'-phosphate
  modified_base 11: mod_base = OTHER; note = 2'-O-methyluridine-3'-phosphate
  modified_base 12: mod_base = OTHER; note = 2'-O-methyluridine-3'-phosphate
  modified_base 13: mod_base = OTHER; note = 2'-O-methyladenosine-3'-phosphate
  modified_base 14: mod_base = OTHER; note = 2'-deoxy-2'-fluorocytidine-3'-phosphate
  modified_base 15: mod_base = OTHER; note = 2'-O-methyluridine-3'-phosphate
  modified_base 16: mod_base = OTHER; note = 2'-deoxy-2'-fluoroguanosine-3'-phosphate
  modified_base 17: mod_base = OTHER; note = 2'-O-methyluridine-3'-phosphate
  modified_base 18: mod_base = OTHER; note = 2'-O-methyluridine-3'-phosphate
  modified_base 19: mod_base = OTHER; note = 2'-O-methyladenosine-3'-phosphate
  modified_base 20: mod_base = OTHER; note = 2'-O-methyluridine-3'-phosphate
  modified_base 21: mod_base = OTHER; note = 2'-O-methyluridine-3'-phosphorothioate
  modified_base 22: mod_base = OTHER; note = 2'-O-methyladenosine-3'-phosphorothioate
  modified_base 23: mod_base = OTHER; note = 2'-O-methylguanosine
tagcatttctttactgttattag
